United States Patent Application Publication US 2025/0311734 A1 - sequence listing, part 5

SEQ ID NO: 20104 - protein, 481 aa, Bacillus sp.
HNGTNATMMQYFEWHLPNDGNHWNRLRDDASNLRNRGITAIWIPPAWKGTSQNDVGYGAYDLYDLGEFNQKGTVRTKYGTRSQLESAIHALKNNGVQVYGDVVMNHKAGADGTEFVTAVEVDPSNRNQETSGTYQIQAYTKFDFPGRGNTYSSFKWRWYHFDGTDWDESRKLNRIYKFSGKAWDWPVDTEFGNYDYLMFADYDMDHPEVVNELRRWGEWYTNTLNLDGFRIDAVKHIKFSFTRDWLTHVRNATGKGMFAVAEFWKNDLGALENYLSYTNWNHSVFDVPLHYNLYNASNYGGNYDMAKLLNGTVVQKHPMHAVTFVDNHDSQPGESLESFVQEWFKPLAYALILTREQGYPSVFYGDYYGIPTHSVPAMKAKIDPILAARQNFAYGTQHDYFDHHNIIGWTREGNTTHPNSGLATIMSDGPGGEKWMYVGQNKAGQVWHDITGNKPGTVTINADGWANFSVNGHSVSIWVKR

SEQ ID NO: 20105 - protein, 481 aa, Bacillus sp.
HNGTNATMMQYFEWHLPNDGNHWNRLRDDASNLRNRGITAIWIPPAWKGTSQNDVGYGAYDLYDLGEFNQKGTVRTKYGTRSQLESAIHALKNNGVQVYGDVVMNHKAGADGTEFVTAVEVDPSNRNQETSGTYQIQAYTKFDFPGRGNTYSSFKWRWYHFDGTDWDESRKLNRIYKFSGKAWDWPVDTEFGNYDYLMFADLDMDHPEVVNELRRWGEWYTNTLNLDGFRIDAVKHIKFSFTRDWLTHVRNATGKGMFAVAEFWKNDLGALENYLSYTNWNHSVFDVPLHYNLYNASNTGGNYDMAKLLNGTVVQKHPMHAVTFVDNHDSQPGESLESFVQEWFKPLAYALILTREQGYPSVFYGDYYGIPTHSVPAMKAKIDPILAARQNFAYGTQHDYFDHHNIIGWTREGNTTHPNSGLATIMSDGPGGEKWMYVGQNKAGQVWHDITGNKPGTVTINADGWANFSVNKGSVSIWVKR

SEQ ID NO: 20106 - protein, 481 aa, Bacillus sp.
HNGTNATMMQYFEWHLPNDGNHWNRLRDDASNLRNRGITAIWIPPAWKGTSQNDVGYGAYDLYDLGEFNQKGTVRTKYGTRSQLESAIHALKNNGVQVYGDVVMNHKAGADGTEFVTAVEVDPSNRNQETSGTYQIQAYTKFDFPGRGNTYSSFKWRWYHFDGTDWDESRKLNRIYKFSGKAWDWPVDTEFGNYDYLMFADYDMDHPEVVNELRRWGEWYTNTLNLDGFRIDAVKHIKFSFTRDWLTHVRNATGKGMFAVAEFWKNDLGALENYLSYTNWNHSVFDVPLHYNLYNASNSRGNYDMAKLLNGTVVQKHPMHAVTFVDNHDSQPGESLESFVQEWFKPLAYALILTREQGYPSVFYGDYYGIPTHSVPAMKAKIDPILAARQNFAYGTQHDYFDHHNIIGWTREGNTTHPNSGLATIMSDGPGGEKWMYVGQNKAGQVWHDITGNKPGTVTINADGWANFSVNGASVSIWVKR

SEQ ID NO: 20107 - protein, 481 aa, Bacillus sp.
HNGTNATMMQYFEWHLPNDGNHWNRLRDDASNLRNRGITAIWIPPAWKGTSQNDVGYGAYDLYDLGEFNQKGTVRTKYGTRSQLESAIHALKNNGVQVYGDVVMNHKAGADGTEFVDAVEVDPSNRNQETSGTYQIQAYTKFDFPGRGNTYSSFKWRWYHFDGTDWDESRKLNRIYKFTGKAWDWPVDTEFGNYDYLMFADLDMDHPEVVNELRRWGEWYTNTLNLDGFRIDAVKHIKFSFTRDWLTHVRNATGKGMFAVAEFWKNDLGALENYLSYTNWNHSVFDVPLHYNLYNASNSRGNYDMAKLLNGTVVQKHPMHAVTFVDNHDSQPGESLESFVQEWFKPLAYALILTREQGYPSVFYGDYYGIPTHSVPAMKAKIDPILAARQNFAYGTQHDYFDHHNIIGWTREGNTTHPNSGLATIMSDGPGGEKWMYVGQNKAGQVWHDITGNKPGTVTINADGWANFSVNKGSVSIWVKR

SEQ ID NO: 20108 - protein, 481 aa, Bacillus sp.
HNGTNATMMQYFEWHLPNDGNHWNRLRDDASNLRNRGITAIWIPPAWKGTSQNDVGYGAYDLYDLGEFNQKGTVRTKYGTRSQLESAIHALKNNGVQVYGDVVMNHKAGADGTEFVDAVEVDPSNRNQETSGTYQIQAYTKFDFPGRGNTYSSFKWRWYHFDGTDWDESRKLNRIYKFTGKAWDWPVDTENGNYDYLMFADLDMDHPEVVNELRRWGEWYTNTLNLDGFRIDAVKHIKFQFTRDWLTHVRNATGKGMFAVAEFWKNDLGALENYLSYTNWNHSVFDVPLHYNLYNASNSRGNYDMAKLLNGTVVQKHPMHAVTFVDNHDSQPGESLESFVQEWFKPLAYALILTREQGYPSVFYGDYYGIPTHSVPAMKAKIDPILAARQNFAYGTQHDYFDHHNIIGWTREGNTTHPNSGLATIMSDGPGGEKWMYVGQNKAGQVWHDITGNKPGTVTINADGWANFSVNKGSVSIWVKR

SEQ ID NO: 20109 - protein, 481 aa, Bacillus sp.
HNGTNATMMQYFEWHLPNDGNHWNRLRDDASNLRNRGITAIWIPPAWKGTSQNDVGYGAYDLYDLGEFNQKGTVRTKYGTRSQLESAIHALKNNGVQVYGDVVMNHKAGADGTEFVDAVEVDPSNRNQETSGTYQIQAYTKFDFPGRGNTYSSFKWRWYHFDGTDWDESRKLNRIYKFDGKAWDWEVDTEFGNYDYLMFADLDMDHPEVVNELRRWGEWYTNTLNLDGFRIDAVKHIKFQFTRDWLTHVRNATGKGMFAVAEFWKNDLGALENYLSYTNWNHSVFDVPLHYNLYNASNSRGNYDMAKLLNGTVVQKHPMHAVTFVDNHDSQPGESLESFVQEWFKPLAYALILTREQGYPSVFYGDYYGIPTHSVPAMKAKIDPILAARQNFAYGTQHDYFDHHNIIGWTREGNTTHPNSGLATIMSDGPGGEKWMYVGQNKAGQVWHDITGNKPGTVTINADGWANFSVNKGSVSIWVKR

SEQ ID NO: 20110 - protein, 481 aa, Bacillus sp.
HNGTNATMMQYFEWHLPNDGNHWNRLRDDASNLRNRGITAIWIPPAWKGTSQNDVGYGAYDLYDLGEFNQKGTVRTKYGTRSQLESAIHALKNNGVQVYGDVVMNHKAGADGTEFVTAVEVDPSNRNQETSGTYQIQAYTKFDFPGRGNTYSSFKWRWYHFDGTDWDESRKLNRIYKFSGKAWDWPVDTEFGNYDYLMFADYDMDHPEVVNELRRWGEWYTNTLNLDGFRIDAVKHIKFSFTRDWLTHVRNATGKGMFAVAEFWKNDLGALENYLSYTNWNHSVFDVPLHYNLYNASNYGGNYDMAKLLNGTVVQKHPMHAVTFVDNHDSQPGESLESFVQEWFKPLAYALILTREQGYPSVFYGDYYGIPTHSVPAMKAKIDPILAARQNFAYGTQHDYFDHHNIIGWTREGNTTHPNSGLATIMSDGPGGEKWMYVGQNKAGQVWHDITGNKPGTVTINADGWANFSVNKGSVSIWVKR

SEQ ID NO: 20111 - protein, 481 aa, Bacillus sp.
HNGTNATMMQYFEWHLPNDGNHWNRLRDDASNLRNRGITAIWIPPAWKGTSQNDVGYGAYDLYDLGEFNQKGTVRTKYGTRSQLESAIHALKNNGVQVYGDVVMNHKAGADGTEFVDAVEVDPSNRNQETSGTYQIQAYTKFDFPGRGNTYSSFKWRWYHFDGTDWDESRKLNRIYKFDGKAWDWPVDTENGNYDYLMFADYDMDHPEVVNELRRWGEWYTNTLNLDGFRIDAVKHIKFSFTRDWLTHVRNATGKGMFAVAEYWKNDLGALENYLSYTNWNHSVFDVPLHYNLYNASNSRGNYDMAKLLNGTVVQKHPMHAVTFVDNHDSQPGESLESFVQEWFKPLAYALILTREQGYPSVFYGDYYGIPTHSVPAMKAKIDPILAARQNFAYGTQHDYFDHHNIIGWTREGNTTHPNSGLATIMSDGPGGEKWMYVGQNKAGQVWHDITGNKPGTVTINADGWANFSVNKGSVSIWVKR

SEQ ID NO: 20112 - protein, 481 aa, Bacillus sp.
HNGTNATMMQYFEWHLPNDGNHWNRLRDDASNLRNRGITAIWIPPAWKGTSQNDVGYGAYDLYDLGEFNQKGTVRTKYGTRSQLESAIHALKNNGVQVYGDVVMNHKAGADGTEFVTAVEVDPSNRNQETSGTYQIQAYTKFDFPGRGNTYSSFKWRWYHFDGTDWDESRKLNRIYKFDGKQWDWEVDTEFGNYDYLMFADYDMDHPEVVNELRRWGEWYTNTLNLDGFRIDAVKHIKFSFTRDWLTHVRNATGKGMFAVAEYWKNDLGALENYLSKTNWNHSVFDVPLHYNLYNASNSRGNYDMAKLLNGTVVQKHPMHAVTFVDNHDSQPGESLESFVQEWFKPLAYALILTREQGYPSVFYGDYYGIPTHSVPAMKAKIDPILAARQNFAYGTQHDYFDHHNIIGWTREGNTTHPNSGLATIMSDGPGGEKWMYVGQNKAGQVWHDITGNKPGTVTINADGWANFSVNKGSVSIWVKR

SEQ ID NO: 20113 - protein, 481 aa, Bacillus sp.
HNGTNATMMQYFEWHLPNDGNHWNRLRDDASNLRNRGITAIWIPPAWKGTSQNDVGYGAYDLYDLGEFNQKGTVRTKYGTRSQLESAIHALKNNGVQVYGDVVMNHKAGADGTEFVTAVEVDPSNRNQETSGTYQIVAYTKFDFPGRGNTYSSFKWRWYHFDGTDWDESRKLNRIYKFSGKAWDWPVDTEFGNYDYLMFADYDMDHPEVVNELRRWGEWYTNTLNLDGFRIDAVKHIKFSFTRDWLTHVRNATGKGMFAVAEFWKNDLGALENYLSYTNWNHSVFDVPLHYNLYNASNSRGNYDMAKLLNGTVVQKHPMHAVTFVDNHDSQPGESLESFVQEWFKPLAYALILTREQGYPSVFYGDYYGIPTHSVPAMKAKIDPILAARQNFAYGTQHDYFDHHNIIGWTREGNTTHPNSGLATIMSDGPGGEKWMYVGQNKAGQVWHDITGNKPGTVTINADGWANFSVNGASVSIWVKR

SEQ ID NO: 20114 - protein, 481 aa, Bacillus sp.
HNGTNATMMQYFEWHLPNDGNHWNRLRDDASNLRNRGITAIWIPPAWKGTSQNDVGYGAYDLYDLGEFNQKGTVRTKYGTRSQLESAIHALKNNGVQVYGDVVMNHKAGADGTEFVTAVEVDPSNRNQETSGTYQIQAYTKFDFPGRGNTYSSFKWRWYHFDGTDWDESRKLNRIYKFSGKAWDWPVDTEFGNYDYLMFADYDMDHPEVVNELRRWGEWYTNTLNLDGFRIDAVKHIKFSFTRDWLTHVRNATGKGMFAVAEFWKNDLGALENYLSYTNWNHSVFDVPLHYNLYNASNTGGNYDMAKLLNGTVVQKHPMHAVTFVDNHDSQPGESLESFVQEWFKPLAYALILTREQGYPSVFYGDYYGIPTHSVPAMKAKIDPILAARQNFAYGTQHDYFDHHNIIGWTREGNTTHPNSGLATIMSDGPGGEKWMYVGQNKAGQVWHDITGNKPGTVTINADGWANFSVFGGSVSIWVKR

SEQ ID NO: 20115 - protein, 481 aa, Bacillus sp.
HNGTNATMMQYFEWHLPNDGNHWNRLRDDASNLRNRGITAIWIPPAWKGTSQNDVGYGAYDLYDLGEFNQKGTVRTKYGTRSQLESAIHALKNNGVQVYGDVVMNHKAGADGTEFVTAVEVDPSNRNQETSGTYQIQAYTKFDFPGRGNTYSSFKWRWYHFDGTDWDESRKLNRIYKFSGKAWDWPVDTEFGNYDYLMFADYDMDHPEVVNELRRWGEWYTNTLNLDGFRIDAVKHIKFSFTRDWLTHVRNATGKGMFAVAEFWKNDLGALENYLSYTNWNHSVFDVPLHYNLYNASNYGGNYDMAKLLNGTVVQKHPMHAVTFVDNHDSQPGESLESFVQEWFKPLAYALILTREQGYPSVFYGDYYGIPTHSVPAMKAKIDPILAARQNFAYGTQHDYFDHHNIIGWTREGNTTHPNSGLATIMSDGPGGEKWMYVGQNKAGQVWHDITGNKPGTVTINADGWANFSVFGGSVSIWVKR

SEQ ID NO: 20116 - protein, 481 aa, Bacillus sp.
HNGTNATMMQYFEWHLPNDGNHWNRLRDDASNLRNRGITAIWIPPAWKGTSQNDVGYGAYDLYDLGEFNQKGTVRTKYGTRSQLESAIHALKNNGVQVYGDVVMNHKAGADGTEFVTAVEVDPSNRNQETSGTYQIQAYTKFDFPGRGNTYSSFKWRWYHFDGTDWDESRKLNRIYKFSGKAWDWPVDTEFGNYDYLMFADYDMDHPEVVNELRRWGEWYTNTLNLDGFRIDAVKHIKFSFTRDWLTHVRNATGKGMFAVAEFWKNDLGALENYLSYTNWNHSVFDVPLHYNLYNASNTGGNYDMAKLLNGTVVQKHPMHAVTFVDNHDSQPGESLESFVQEWFKPLAYALILTREQGYPSVFYGDYYGIPTHSVPAMKAKIDPILAARQNFAYGTQHDYFDHHNIIGWTREGNTTHPNSGLATIMSDGPGGEKWMYVGQNKAGQVWHDITGNKPGTVTINADGWANFSVLGGSVSIWVKR

SEQ ID NO: 20117 - protein, 481 aa, Bacillus sp.
HNGTNATMMQYFEWHLPNDGNHWNRLRDDASNLRNRGITAIWIPPAWKGTSQNDVGYGAYDLYDLGEFNQKGTVRTKYGTRSQLESAIHALKNNGVQVYGDVVMNHKAGADGTEFVTAVEVDPSNRNQETSGTYQIQAYTKFDFPGRGNTYSSFKWRWYHFDGTDWDESRKLNRIYKFTGKAWDWPVDTEFGNYDYLMFADYDMDHPEVVNELRRWGEWYTNTLNLDGFRIDAVKHIKFSFTRDWLTHVRNATGKGMFAVAEFWKNDLGALENYLSYTNWNHSVFDVPLHYNLYNASNSRGNYDMAKLLNGTVVQKHPMHAVTFVDNHDSQPGESLESFVQEWFKPLAYALILTREQGYPSVFYGDYYGIPTHSVPAMKAKIDPILAARQNFAYGTQHDYFDHHNIIGWTREGNTTHPNSGLATIMSDGPGGEKWMYVGQNKAGQVWHDITGNKPGTVTINADGWANFSVNKGSVSIWVKR

SEQ ID NO: 20118 - protein, 481 aa, Bacillus sp.
HNGTNGTMMQYFEWHLPNDGNHWNRLRDDASNLRNRGITAIWIPPAWKGTSQSDTGYGAYDLYDLGEFNQRGTVRTKYGTRSQLESAIHALKNNGVQVYGDVVMNHKAGADQTEQVQAVEVNPSDRNQEISGTYQIQAWTGFNFPGRGNTYSSFKWRWYHFDGTDFDESRGLSRIYKFRTKAWDWEVDTENGNYDYLMYADLDMDHPEVVNELRRWGEWYTNTLNLDGFRIDAVKHIKYSFTRDWLTHVRNATGKEMFAVAEFWKNDLGALENYLNKTNWNHSVFDVPLHYNLYNASNSGGNYDMAKLLNGTVVQKHPMHAVTFVDNHDSQPGESLESFVQEWFKPLAYALILTREQGYPSVFYGDYYGIPTHSVPAMKAKIDPILAARQNYAYGTQHDYFDHHNIIGWTREGNTTHPNSGLATIMSDGPGGEKWMYVGQNKAGQVWHDITGNRPGTVTINADGWANFRCNKGSVSIWVKR

SEQ ID NO: 20119 - protein, 481 aa, Bacillus sp.
HNGTNATMMQYFEWHLPNDGNHWNRLRDDASNLRNRGITAIWIPPAWKGTSQNDVGYGAYDLYDLGEFNQKGTVRTKYGTRSQLESAIHALKNNGVQVYGDVVMNHKAGADGTEFVTAVEVDPSNRNQETSGTYQIQAYTKFDFPGRGNTYSSFKWRWYHFDGTDWDESRKLNRIYKFDGKQWDWEVDTENGNYDYLMFADLDMDHPEVVNELRRWGEWYTNTLNLDGFRIDAVKHIKFQFTRDWLTHVRNATGKGMFAVAEYWKNDLGALENYLSKTNWNHSVFDVPLHYNLYNASNSRGNYDMAKLLNGTVVQKHPMHAVTFVDNHDSQPGESLESFVQEWFKPLAYALILTREQGYPSVFYGDYYGIPTHSVPAMKAKIDPILAARQNFAYGTQHDYFDHHNIIGWTREGNTTHPNSGLATIMSDGPGGEKWMYVGQNKAGQVWHDITGNKPGTVTINADGWANFSVNKGSVSIWVKR

SEQ ID NO: 20120 - protein, 481 aa, Bacillus sp.
HNGTNATMMQYFEWHLPNDGNHWNRLRDDASNLRNRGITAIWIPPAWKGTSQNDVGYGAYDLYDLGEFNQKGTVRTKYGTRSQLESAIHALKNNGVQVYGDVVMNHKAGADGTEFVTAVEVDPSNRNQETSGTYQIQAYTKFDFPGRGNTYSSFKWRWYHFDGTDWDESRKLNRIYKFSGKAWDWPVDTEFGNYDYLMFADYDMDHPEVVNELRRWGEWYYNTLNLDGFRIDAVKHIKFSFTRDWLTHVRNATGKEMFAVAEFWKNDLGALENYLSYTNWNHSVFDVPLHYNLYNASNSRGNYDMAKLLNGTVVQKHPMHAVTFVDNHDSQPGESLESFVQEWFKPLAYALILTREQGYPSVFYGDYYGIPTHSVPAMKAKIDPILAARQNFAYGTQHDYFDHHNIIGWTREGNTTHPNSGLATIMSDGPGGEKWMYVGQNKAGQVWHDITGNKPGTVTINADGWANFSVNGASVSIWVKR

SEQ ID NO: 20121 - protein, 481 aa, Bacillus sp.
HNGTNATMMQYFEWHLPNDGNHWNRLRDDASNLRNRGITAIWIPPAWKGTSQNDVGYGAYDLYDLGEFNQKGTVRTKYGTRSQLESAIHALKNNGVQVYGDVVMNHKAGADGTEFVDAVEVDPSNRNQETSGTYQIQAYTKFDFPGRGNTYSSFKWRWYHFDGTDWDESRKLNRIYKFSGKAWDWPVDTEFGNYDYLMFADLDMDHPEVVNELRRWGEWYTNTLNLDGFRIDAVKHIKFSFTRDWLTHVRNATGKGMFAVAEFWKNDLGALENYLSYTNWNHSVFDVPLHYNLYNASNSRGNYDMAKLLNGTVVQKHPMHAVTFVDNHDSQPGESLESFVQEWFKPLAYALILTREQGYPSVFYGDYYGIPTHSVPAMKAKIDPILAARQNFAYGTQHDYFDHHNIIGWTREGNTTHPNSGLATIMSDGPGGEKWMYVGQNKAGQVWHDITGNKPGTVTINADGWANFSVNKGSVSIWVKR

SEQ ID NO: 20122 - protein, 481 aa, Bacillus sp.
HNGTNATMMQYFEWHLPNDGNHWNRLRDDASNLRNRGITAIWIPPAWKGTSQNDVGYGAYDLYDLGEFNQKGTVRTKYGTRSQLESAIHALKNNGVQVYGDVVMNHKAGADGTEFVTAVEVDPSNRNQETSGTYQIQAYTKFDFPGRGNTYSSFKWRWYHFDGTDWDESRKLNRIYKFSGKAWDWPVDTEFGNYDYLMFADYDMDHPEVVNELRRWGEWYTNTLNLDGFRIDAVKHIKFSFTRDWLTHVRNATGKGMFAVAEFWKNDLGALENYLSYTNWNHSVFDVPLHYNLYNASNYGGNYDMAKLLNGTVVQKHPMHAVTFVDNHDSQPGESLESFVQEWFKPLAYALILTREQGYPSVFYGDYYGIPTHSVPAMKAKIDPILEARQDFAYGTQHDYFDHHNIIGWTREGNTTHPNSGLATIMSDGPGGEKWMYVGQNKAGQVWHDITGNKPGTVTINADGWANFSVNKGSVSIWVKR

SEQ ID NO: 20123 - protein, 481 aa, Bacillus sp.
HNGTNATMMQYFEWHLPNDGNHWNRLRDDASNLRNRGITAIWIPPAWKGTSQNDVGYGAYDLYDLGEFNQKGTVRTKYGTRSQLESAIHALKNNGVQVYGDVVMNHKAGADGTEFVTAVEVDPSNRNQETSGTYQIQAYTKFDFPGRGNTYSSFKWRWYHFDGTDWDESRKLNRIYKFSGKAWDWPVDTEFGNYDYLMFADYDMDHPEVVNELRRWGEWYTNTLNLDGFRIDAVKHIKFSFTRDWLTHVRNATGKGMFAVAEFWKNDLGALENYLSYTNWNHSVFDVPLHYNLYNASNTGGNYDMAKLLNGTVVQKHPMHAVTFVDNHDSQPGESLESFVQEWFKPLAYALILTREQGYPSVFYGDYYGIPTHSVPAMKAKIDPILAARQNFAYGTQHDYFDHHNIIGWTREGNTTHPNSGLATIMSDGPGGEKWMYVGQNKAGQVWHDITGNKPGTVTINADGWANFSVNKGSVSIWVKR

SEQ ID NO: 20124 - protein, 481 aa, Bacillus sp.
HNGTNATMMQYFEWHLPNDGNHWNRLRDDASNLRNRGITAIWIPPAWKGTSQNDVGYGAYDLYDLGEFNQKGTVRTKYGTRSQLESAIHALKNNGVQVYGDVVMNHKAGADGTEFVDAVEVDPSNRNQETSGTYQIQAYTKFDFPGRGNTYSSFKWRWYHFDGTDWDESRKLNRIYKFTGKQWDWPVDTENGNYDYLMFADYDMDHPEVVNELRRWGEWYTNTLNLDGFRIDAVKHIKFSFTRDWLTHVRNATGKGMFAVAEFWKNDLGALENYLSYTNWNHSVFDVPLHYNLYNASNSRGNYDMAKLLNGTVVQKHPMHAVTFVDNHDSQPGESLESFVQEWFKPLAYALILTREQGYPSVFYGDYYGIPTHSVPAMKAKIDPILAARQNFAYGTQHDYFDHHNIIGWTREGNTTHPNSGLATIMSDGPGGEKWMYVGQNKAGQVWHDITGNKPGTVTINADGWANFSVNKGSVSIWVKR

SEQ ID NO: 20125 - protein, 481 aa, Bacillus sp.
HNGTNATMMQYFEWHLPNDGNHWNRLRDDASNLRNRGITAIWIPPAWKGTSQNDVGYGAYDLYDLGEFNQKGTVRTKYGTRSQLESAIHALKNNGVQVYGDVVMNHKAGADGTEFVTAVEVDPSNRNQETSGTYQIQAYTKFDFPGRGNTYSSFKWRWYHFDGTDWDESRKLNRIYKFDGKAWDWPVDTEFGNYDYLMFADYDMDHPEVVNELRRWGEWYTNTLNLDGFRIDAVKHIKFSFTRDWLTHVRNATGKGMFAVAEFWKNDLGALENYLSYTNWNHSVFDVPLHYNLYNASNSRGNYDMAKLLNGTVVQKHPMHAVTFVDNHDSQPGESLESFVQEWFKPLAYALILTREQGYPSVFYGDYYGIPTHSVPAMKAKIDPILAARQNFAYGTQHDYFDHHNIIGWTREGNTTHPNSGLATIMSDGPGGEKWMYVGQNKAGQVWHDITGNKPGTVTINADGWANFSVNKGSVSIWVKR

SEQ ID NO: 20126 - protein, 481 aa, Bacillus sp.
HNGTNATMMQYFEWHLPNDGNHWNRLRDDASNLRNRGITAIWIPPAWKGTSQNDVGYGAYDLYDLGEFNQKGTVRTKYGTRSQLESAIHALKNNGVQVYGDVVMNHKAGADGTEFVTAVEVDPSNRNQETSGTYQIVAYTKFDFPGRGNTYSSFKWRWYHFDGTDWDESRKLNRIYKFSGKAWDWPVDTEFGNYDYLMFADYDMDHPEVVNELRRWGEWYTNTLNLDGFRIDAVKHIKFSFTRDWLTHVRNATGKGMFAVAEFWKNDLGALENYLSYTNWNHSVFDVPLHYNLYNASNYGGNYDMAKLLNGTVVQKHPMHAVTFVDNHDSQPGESLESFVQEWFKPLAYALILTREQGYPSVFYGDYYGIPTHSVPAMKAKIDPILEARQDFAYGTQHDYFDHHNIIGWTREGNTTHPNSGLATIMSDGPGGEKWMYVGQNKAGQVWHDITGNKPGTVTINADGWANFSVNKGSVSIWVKR

SEQ ID NO: 20127 - protein, 481 aa, Bacillus sp.
HNGTNATMMQYFEWHLPNDGNHWNRLRDDASNLRNRGITAIWIPPAWKGTSQNDVGYGAYDLYDLGEFNQKGTVRTKYGTRSQLESAIHALKNNGVQVYGDVVMNHKAGADGTEFVTAVEVDPSNRNQETSGTYQIQAYTKFDFPGRGNTYSSFKWRWYHFDGTDWDESRKLNRIYKFSGKAWDWPVDTEFGNYDYLMFADYDMDHPEVVNELRRWGEWYTNTLNLDGFRIDAVKHIKFSFTRDWLTHVRNATGKGMFAVAEFWKNDLGALENYLSYTNWNHSVFDVPLHYNLYNASNSRGNYDMAKLLNGTVVQKHPMHAVTFVDNHDSQPGESLESFVQEWFKPLAYALILTREQGYPSVFYGDYYGIPTHSVPAMKAKIDPILAARQNFAYGTQHDYFDHHNIIGWTREGNTTHPNSGLATIMSDGPGGEKWMYVGQNKAGQVWHDITGNKPGTVTINADGWANFSVNKGSVSIWVKR

SEQ ID NO: 20128 - protein, 481 aa, Bacillus sp.
HNGTNATMMQYFEWHLPNDGNHWNRLRDDASNLRNRGITAIWIPPAWKGTSQNDVGYGAYDLYDLGEFNQKGTVRTKYGTRSQLESAIHALKNNGVQVYGDVVMNHKAGADGTEFVTAVEVDPSNRNQETSGTYQIQAYTKFDFPGRGNTYSSFKWRWYHFDGTDWDESRKLNRIYKFSGKAWDWPVDTEFGNYDYLMFADYDMDHPEVVNELRRWGEWYTNTLNLDGFRIDAVKHIKFSFTRDWLTHVRNATGKGMFAVAEFWKNDLGALENYLSYTNWNHSVFDVPLHYNLYNASNSRGNYDMAKLLNGTVVQKHPMHAVTFVDNHDSQPGESLESFVQEWFKPLAYALILTREQGYPSVFYGDYYGIPTHSVPAMKAKIDPILAARQNFAYGTQHDYFDHHNIIGWTREGNTTHPNSGLATIMSDGPGGEKWMYVGQNKAGQVWHDITGNKPGTVTINADGWANFSVLGGSVSIWVKR

SEQ ID NO: 20129 - protein, 481 aa, Bacillus sp.
HNGTNATMMQYFEWHLPNDGNHWNRLRDDASNLRNRGITAIWIPPAWKGTSQNDVGYGAYDLYDLGEFNQKGTVRTKYGTRSQLESAIHALKNNGVQVYGDVVMNHKAGADGTEFVDAVEVDPSNRNQETSGTYQIQAYTKFDFPGRGNTYSSFKWRWYHFDGTDWDESRKLNRIYKFDGKAWDWPVDTEFGNYDYLMFADLDMDHPEVVNELRRWGEWYTNTLNLDGFRIDAVKHIKFSFTRDWLTHVRNATGKGMFAVAEFWKNDLGALENYLSYTNWNHSVFDVPLHYNLYNASNSRGNYDMAKLLNGTVVQKHPMHAVTFVDNHDSQPGESLESFVQEWFKPLAYALILTREQGYPSVFYGDYYGIPTHSVPAMKAKIDPILAARQNFAYGTQHDYFDHHNIIGWTREGNTTHPNSGLATIMSDGPGGEKWMYVGQNKAGQVWHDITGNKPGTVTINADGWANFSVNKGSVSIWVKR

SEQ ID NO: 20130 - protein, 481 aa, Bacillus sp.
HNGTNATMMQYFEWHLPNDGNHWNRLRDDASNLRNRGITAIWIPPAWKGTSQNDVGYGAYDLYDLGEFNQKGTVRTKYGTRSQLESAIHALKNNGVQVYGDVVMNHKAGADGTEFVTAVEVDPSNRNQETSGTYQIVAYTKFDFPGRGNTYSSFKWRWYHFDGTDWDESRKLNRIYKFSGKAWDWPVDTEFGNYDYLMFADYDMDHPEVVNELRRWGEWYTNTLNLDGFRIDAVKHIKFSFTRDWLTHVRNATGKGMFAVAEFWKNDLGALENYLSYTNWNHSVFDVPLHYNLYNASNYGGNYDMAKLLNGTVVQKHPMHAVTFVDNHDSQPGESLESFVQEWFKPLAYALILTREQGYPSVFYGDYYGIPTHSVPAMKAKIDPILAARQNFAYGTQHDYFDHHNIIGWTREGNTTHPNSGLATIMSDGPGGEKWMYVGQNKAGQVWHDITGNKPGTVTINADGWANFSVNKGSVSIWVKR

SEQ ID NO: 20131 - protein, 481 aa, Bacillus sp.
HNGTNATMMQYFEWHLPNDGNHWNRLRDDASNLRNRGITAIWIPPAWKGTSQNDVGYGAYDLYDLGEFNQKGTVRTKYGTRSQLESAIHALKNNGVQVYGDVVMNHKAGADGTEFVDAVEVDPSNRNQETSGTYQIQAYTKFDFPGRGNTYSSFKWRWYHFDGTDWDESRKLNRIYKFDGKQWDWEVDTEFGNYDYLMFADLDMDHPEVVNELRRWGEWYTNTLNLDGFRIDAVKHIKFQFTRDWLTHVRNATGKGMFAVAEFWKNDLGALENYLSKTNWNHSVFDVPLHYNLYNASNSRGNYDMAKLLNGTVVQKHPMHAVTFVDNHDSQPGESLESFVQEWFKPLAYALILTREQGYPSVFYGDYYGIPTHSVPAMKAKIDPILAARQNFAYGTQHDYFDHHNIIGWTREGNTTHPNSGLATIMSDGPGGEKWMYVGQNKAGQVWHDITGNKPGTVTINADGWANFSVNKGSVSIWVKR

SEQ ID NO: 20132 - protein, 481 aa, Bacillus sp.
HNGTNATMMQYFEWHLPNDGNHWNRLRDDASNLRNRGITAIWIPPAWKGTSQNDVGYGAYDLYDLGEFNQKGTVRTKYGTRSQLESAIHALKNNGVQVYGDVVMNHKAGADGTEFVTAVEVDPSNRNQETSGTYQIQAYTKFDFPGRGNTYSSFKWRWYHFDGTDWDESRKLNRIYKFTGKQWDWEVDTEFGNYDYLMFADYDMDHPEVVNELRRWGEWYTNTLNLDGFRIDAVKHIKFSFTRDWLTHVRNATGKGMFAVAEYWKNDLGALENYLSKTNWNHSVFDVPLHYNLYNASNSRGNYDMAKLLNGTVVQKHPMHAVTFVDNHDSQPGESLESFVQEWFKPLAYALILTREQGYPSVFYGDYYGIPTHSVPAMKAKIDPILAARQNFAYGTQHDYFDHHNIIGWTREGNTTHPNSGLATIMSDGPGGEKWMYVGQNKAGQVWHDITGNKPGTVTINADGWANFSVNKGSVSIWVKR

SEQ ID NO: 20133 - protein, 481 aa, Bacillus sp.
HNGTNATMMQYFEWHLPNDGNHWNRLRDDASNLRNRGITAIWIPPAWKGTSQNDVGYGAYDLYDLGEFNQKGTVRTKYGTRSQLESAIHALKNNGVQVYGDVVMNHKAGADGTEFVTAVEVDPSNRNQETSGTYQIQAYTKFDFPGRGNTYSSFKWRWYHFDGTDWDESRKLNRIYKFDGKAWDWEVDTEFGNYDYLMFADLDMDHPEVVNELRRWGEWYTNTLNLDGFRIDAVKHIKFQFTRDWLTHVRNATGKGMFAVAEYWKNDLGALENYLSKTNWNHSVFDVPLHYNLYNASNSRGNYDMAKLLNGTVVQKHPMHAVTFVDNHDSQPGESLESFVQEWFKPLAYALILTREQGYPSVFYGDYYGIPTHSVPAMKAKIDPILAARQNFAYGTQHDYFDHHNIIGWTREGNTTHPNSGLATIMSDGPGGEKWMYVGQNKAGQVWHDITGNKPGTVTINADGWANFSVNKGSVSIWVKR

SEQ ID NO: 20134 - protein, 481 aa, Bacillus sp.
HNGTNATMMQYFEWHLPNDGNHWNRLRDDASNLRNRGITAIWIPPAWKGTSQNDVGYGAYDLYDLGEFNQKGTVRTKYGTRSQLESAIHALKNNGVQVYGDVVMNHKAGADGTEFVTAVEVDPSNRNQETSGTYQIQAYTKFDFPGRGNTYSSFKWRWYHFDGTDWDESRKLNRIYKFSGKAWDWPVDTEFGNYDYLMFADQDMDHPEVVNELRRWGEWYTNTLNLDGFRIDAVKHIKFSFTRDWLTHVRNATGKGMFAVAEFWKNDLGALENYLSYTNWNHSVFDVPLHYNLYNASNSRGNYDMAKLLNGTVVQKHPMHAVTFVDNHDSQPGESLESFVQEWFKPLAYALILTREQGYPSVFYGDYYGIPTHSVPAMKAKIDPILAARQNFAYGTQHDYFDHHNIIGWTREGNTTHPNSGLATIMSDGPGGEKWMYVGQNKAGQVWHDITGNKPGTVTINADGWANFSVNKGSVSIWVKR

SEQ ID NO: 20135 - protein, 481 aa, Bacillus sp.
HNGTNATMMQYFEWHLPNDGNHWNRLRDDASNLRNRGITAIWIPPAWKGTSQNDVGYGAYDLYDLGEFNQKGTVRTKYGTRSQLESAIHALKNNGVQVYGDVVMNHKAGADGTEFVDAVEVDPSNRNQETSGTYQIQAYTKFDFPGRGNTYSSFKWRWYHFDGTDWDESRKLNRIYKFDGKQWDWEVDTEFGNYDYLMFADYDMDHPEVVNELRRWGEWYTNTLNLDGFRIDAVKHIKFSFTRDWLTHVRNATGKGMFAVAEYWKNDLGALENYLSKTNWNHSVFDVPLHYNLYNASNSRGNYDMAKLLNGTVVQKHPMHAVTFVDNHDSQPGESLESFVQEWFKPLAYALILTREQGYPSVFYGDYYGIPTHSVPAMKAKIDPILAARQNFAYGTQHDYFDHHNIIGWTREGNTTHPNSGLATIMSDGPGGEKWMYVGQNKAGQVWHDITGNKPGTVTINADGWANFSVNKGSVSIWVKR

SEQ ID NO: 20136 - protein, 481 aa, Bacillus sp.
HNGTNATMMQYFEWHLPNDGNHWNRLRDDASNLRNRGITAIWIPPAWKGTSQNDVGYGAYDLYDLGEFNQKGTVRTKYGTRSQLESAIHALKNNGVLVYGDVVMNHKAKADGTEFVDAVEVDPSNRNQETSGTYQIQAWTKFDFSGRGNTYSSFKWRWYHFDGTDWDESRKLNRIYKFTGKAWDWEVDTENGNYDYLMFADLDMDHPEVVNELRRWGEWYTNTLNLDGFRIDAVKHIKFSFTRDWLTHVRNATGKGMFAVAEFWKNDLGALENYLSKTNWNHSVFDVPLHYNLYNASNSRGNYDMAKLLNGTVVQKHPMHAVTFVDNHDSQPGESLESFVQEWFKPLAYALILTREQGYPSVFYGDYYGIPTHSVPAMKDKIDPILAARQNFAYGTQHDYFDHHNIIGWTREGNTTHPNSGLATIMSDGPGGEKWMYVGQNKAGQVWHDITGNKPGTVTINADGWANFSVNKGSVSIWVKR

SEQ ID NO: 20137 - protein, 481 aa, Bacillus sp.
HNGTNATMMQYFEWHLPNDGNHWNRLRDDASNLRNRGITAIWIPPAWKGTSQNDVGYGAYDLYDLGEFNQKGTVRTKYGTRSQLESAIHALKNNGVQVYGDVVMNHKAGADGTEFVTAVEVDPSNRNQETSGTYQIQAYTKFDFPGRGNTYSSFKWRWYHFDGTDWDESRKLNRIYKFDGKAWDWPVDTEFGNYDYLMFADLDMDHPEVVNELRRWGEWYTNTLNLDGFRIDAVKHIKFSFTRDWLTHVRNATGKGMFAVAEFWKNDLGALENYLSYTNWNHSVFDVPLHYNLYNASNSRGNYDMAKLLNGTVVQKHPMHAVTFVDNHDSQPGESLESFVQEWFKPLAYALILTREQGYPSVFYGDYYGIPTHSVPAMKAKIDPILAARQNFAYGTQHDYFDHHNIIGWTREGNTTHPNSGLATIMSDGPGGEKWMYVGQNKAGQVWHDITGNKPGTVTINADGWANFSVNGASVSIWVKR

SEQ ID NO: 20138 - protein, 481 aa, Bacillus sp.
HNGTNATMMQYFEWHLPNDGNHWNRLRDDASNLRNRGITAIWIPPAWKGTSQNDVGYGAYDLYDLGEFNQKGTVRTKYGTRSQLESAIHALKNNGVQVYGDVVMNHKAGADGTEFVDAVEVDPSNRNQETSGTYQIQAYTKFDFPGRGNTYSSFKWRWYHFDGTDWDESRKLNRIYKFTGKAWDWPVDTENGNYDYLMFADYDMDHPEVVNELRRWGEWYTNTLNLDGFRIDAVKHIKFQFTRDWLTHVRNATGKGMFAVAEFWKNDLGALENYLSYTNWNHSVFDVPLHYNLYNASNSRGNYDMAKLLNGTVVQKHPMHAVTFVDNHDSQPGESLESFVQEWFKPLAYALILTREQGYPSVFYGDYYGIPTHSVPAMKAKIDPILAARQNFAYGTQHDYFDHHNIIGWTREGNTTHPNSGLATIMSDGPGGEKWMYVGQNKAGQVWHDITGNKPGTVTINADGWANFSVNKGSVSIWVKR

SEQ ID NO: 20139 - protein, 481 aa, Bacillus sp.
HNGTNATMMQYFEWHLPNDGNHWNRLRDDASNLRNRGITAIWIPPAWKGTSQNDVGYGAYDLYDLGEFNQKGTVRTKYGTRSQLESAIHALKNNGVQVYGDVVMNHKAGADGTEFVDAVEVDPSNRNQETSGTYQIQAYTKFDFPGRGNTYSSFKWRWYHFDGTDWDESRKLNRIYKFDGKQWDWEVDTENGNYDYLMFADLDMDHPEVVNELRRWGEWYTNTLNLDGFRIDAVKHIKFQFTRDWLTHVRNATGKGMFAVAEYWKNDLGALENYLSKTNWNHSVFDVPLHYNLYNASNSRGNYDMAKLLNGTVVQKHPMHAVTFVDNHDSQPGESLESFVQEWFKPLAYALILTREQGYPSVFYGDYYGIPTHSVPAMKAKIDPILAARQNFAYGTQHDYFDHHNIIGWTREGNTTHPNSGLATIMSDGPGGEKWMYVGQNKAGQVWHDITGNKPGTVTINADGWANFSVNKGSVSIWVKR

SEQ ID NO: 20140 - protein, 481 aa, Bacillus sp.
HNGTNATMMQYFEWHLPNDGNHWNRLRDDASNLRNRGITAIWIPPAWKGTSQNDVGYGAYDLYDLGEFNQKGTVRTKYGTRSQLESAIHALKNNGVQVYGDVVMNHKAGADGTEFVTAVEVDPSNRNQETSGTYQIQAYTKFDFPGRGNTYSSFKWRWYHFDGTDWDESRKLNRIYKFSGKAWDWPVDTEFGNYDYLMFADYDMDHPEVVNELRRWGEWYTNTLNLDGFRIDAVKHIKFSFTRDWLTHVRNATGKGMFAVAEFWKNDLGALENYLSYTNWNHSVFDVPLHYNLYNASNYGGNYDMAKLLNGTVVQKHPMHAVTFVDNHDSQPGESLESFVQEWFKPLAYALILTREQGYPSVFYGDYYGIPTHSVPAMKAKIDPILEARQWFAYGTQHDYFDHHNIIGWTREGNTTHPNSGLATIMSDGPGGEKWMYVGQNKAGQVWHDITGNKPGTVTINADGWANFSVNKGSVSIWVKR

SEQ ID NO: 20141 - protein, 481 aa, Bacillus sp.
HNGTNGTMMQYFEWHLPNDGNHWNRLRDDASNLRNRGITAIWIPPAWKGTSQNDVGYGVYDLYDLGEFNQKGTVRTKYGTRSQLESAIHALKNNGVLVYGDVVMNHKAGADGTEFVDAVEVDPSNRNQETSGTYQIQAYTKFDFPGRGNTYSSFKWRWYHFDGTDWDESRKLNRIYKFTGKAWDWEVDTEFGNYDYLMFADYDMDHPEVVNELRRWGEWYTNTLNLDGFRIDAVKHIKFSFTRDWLTHVRNATGKGMFAVAEFWKNDLGALENYLSKTNWNHSVFDVPLHYNLYNASNSRGNYDMAKLLNGTVVQKHPMHAVTFVDNHDSQPGESLESFVQEWFKPLAYALILTREQGYPSVFYGDYYGIPTHSVPAMKDKIDPILAARQNFAYGTQHDYFDHHNIIGWTREGNTTHPNSGLATIMSDGPGGEKWMYVGQNKAGQVWHDITGNKPGTVTINADGWANFSVNKGSVSIWVKR

SEQ ID NO: 20142 - protein, 481 aa, Bacillus sp.
HNGTNATMMQYFEWHLPNDGNHWNRLRDDASNLRNRGITAIWIPPAWKGTSQNDVGYGAYDLYDLGEFNQKGTVRTKYGTRSQLESAIHALKNNGVQVYGDVVMNHKAGADGTEFVDAVEVDPSNRNQETSGTYQIQAYTKFDFPGRGNTYSSFKWRWYHFDGTDWDESRKLNRIYKFTGKQWDWPVDTENGNYDYLMFADLDMDHPEVVNELRRWGEWYTNTLNLDGFRIDAVKHIKFSFTRDWLTHVRNATGKGMFAVAEFWKNDLGALENYLSYTNWNHSVFDVPLHYNLYNASNSRGNYDMAKLLNGTVVQKHPMHAVTFVDNHDSQPGESLESFVQEWFKPLAYALILTREQGYPSVFYGDYYGIPTHSVPAMKAKIDPILAARQNFAYGTQHDYFDHHNIIGWTREGNTTHPNSGLATIMSDGPGGEKWMYVGQNKAGQVWHDITGNKPGTVTINADGWANFSVNKGSVSIWVKR

SEQ ID NO: 20143 - protein, 481 aa, Bacillus sp.
HNGTNATMMQYFEWHLPNDGNHWNRLRDDASNLRNRGITAIWIPPAWKGTSQNDVGYGAYDLYDLGEFNQKGTVRTKYGTRSQLESAIHALKNNGVQVYGDVVMNHKAGADGTEFVTAVEVDPSNRNQETSGTYQIQAYTKFDFPGRGNTYSSFKWRWYHFDGTDWDESRKLNRIYKFSGKAWDWPVDTEFGNYDYLMFADNDMDHPEVVNELRRWGEWYTNTLNLDGFRIDAVKHIKFSFTRDWLTHVRNATGKGMFAVAEFWKNDLGALENYLSYTNWNHSVFDVPLHYNLYNASNSRGNYDMAKLLNGTVVQKHPMHAVTFVDNHDSQPGESLESFVQEWFKPLAYALILTREQGYPSVFYGDYYGIPTHSVPAMKAKIDPILAARQNFAYGTQHDYFDHHNIIGWTREGNTTHPNSGLATIMSDGPGGEKWMYVGQNKAGQVWHDITGNKPGTVTINADGWANFSVNKGSVSIWVKR

SEQ ID NO: 20144 - protein, 481 aa, Bacillus sp.
HNGTNATMMQYFEWHLPNDGNHWNRLRDDASNLRNRGITAIWIPPAWKGTSQNDVGYGAYDLYDLGEFNQKGTVRTKYGTRSQLESAIHALKNNGVQVYGDVVMNHKAGADGTEFVTAVEVDPSNRNQETSGTYQIQAYTKFDFPGRGNTYSSFKWRWYHFDGTDWDESRKLNRIYKFDGKQWDWEVDTEFGNYDYLMFADLDMDHPEVVNELRRWGEWYTNTLNLDGFRIDAVKHIKFSFTRDWLTHVRNATGKGMFAVAEFWKNDLGALENYLSYTNWNHSVFDVPLHYNLYNASNTGGNYDMAKLLNGTVVQKHPMHAVTFVDNHDSQPGESLESFVQEWFKPLAYALILTREQGYPSVFYGDYYGIPTHSVPAMKAKIDPILAARQNFAYGTQHDYFDHHNIIGWTREGNTTHPNSGLATIMSDGPGGEKWMYVGQNKAGQVWHDITGNKPGTVTINADGWANFSVNKGSVSIWVKR

SEQ ID NO: 20145 - protein, 481 aa, Bacillus sp.
HNGTNATMMQYFEWHLPNDGNHWNRLRDDASNLRNRGITAIWIPPAWKGTSQNDVGYGAYDLYDLGEFNQKGTVRTKYGTRSQLESAIHALKNNGVQVYGDVVMNHKAGADGTEFVDAVEVDPSNRNQETSGTYQIQAYTKFDFPGRGNTYSSFKWRWYHFDGTDWDESRKLNRIYKFTGKAWDWEVDTENGNYDYLMFADLDMDHPEVVNELRRWGEWYTNTLNLDGFRIDAVKHIKFQFTRDWLTHVRNATGKGMFAVAEYWKNDLGALENYLSYTNWNHSVFDVPLHYNLYNASNSRGNYDMAKLLNGTVVQKHPMHAVTFVDNHDSQPGESLESFVQEWFKPLAYALILTREQGYPSVFYGDYYGIPTHSVPAMKAKIDPILAARQNFAYGTQHDYFDHHNIIGWTREGNTTHPNSGLATIMSDGPGGEKWMYVGQNKAGQVWHDITGNKPGTVTINADGWANFSVNKGSVSIWVKR

SEQ ID NO: 20146 - protein, 481 aa, Bacillus sp.
HNGTNATMMQYFEWHLPNDGNHWNRLRDDASNLRNRGITAIWIPPAWKGTSQNDVGYGAYDLYDLGEFNQKGTVRTKYGTRSQLESAIHALKNNGVQVYGDVVMNHKAGADGTEFVTAVEVDPSNRNQETSGTYQIQAYTKFDFPGRGNTYSSFKWRWYHFDGTDWDESRKLNRIYKFDGKAWDWPVDTEFGNYDYLMFADLDMDHPEVVNELRRWGEWYTNTLNLDGFRIDAVKHIKFSFTRDWLTHVRNATGKGMFAVAEFWKNDLGALENYLSYTNWNHSVFDVPLHYNLYNASNSRGNYDMAKLLNGTVVQKHPMHAVTFVDNHDSQPGESLESFVQEWFKPLAYALILTREQGYPSVFYGDYYGIPTHSVPAMKAKIDPILAARQNFAYGTQHDYFDHHNIIGWTREGNTTHPNSGLATIMSDGPGGEKWMYVGQNKAGQVWHDITGNKPGTVTINADGWANFSVNKGSVSIWVKR

SEQ ID NO: 20147 - protein, 481 aa, Bacillus sp.
HNGTNGTMMQYFEWHLPNDGNHWNRLRDDASNLRNRGITAIWIPPAWKGTSQSDTGYGAYDLYDLGEFNQRGTVRTKYGTRSQLESAIHALKNNGVQVYGDVVMDHKGGADQTEQVQAVEVNPSDRNQEISGTYQIQAWTGFNFPGRGNTYSSFKWRWYHFDGTDFDESRGLSRIYKFRTKAWDWEVDTENGNYDYLMYADLDMDHPEVVNELRRWGEWYTNTLNLDGFRIDAVKHIKYSFTRDWLTHVRNATGKEMFAVAEFWKNDLGALENYLNKTNWNHSVFDVPLHYNLYNASNSGGNYDMAKLLNGTVVQKHPMHAVTFVDNHDSQPGESLESFVQEWFKPLAYALILTREQGYPSVFYGDYYGIPTHSVPAMKAKIDPILAARQNYAYGTQHDYFDHHNIIGWTREGNTTHPNSGLATIMSDGPGGEKWMYVGQNKAGQVWHDITGNRPGTVTINADGWANFRCNKGSVSIWVKR

SEQ ID NO: 20148 - protein, 481 aa, Bacillus sp.
HNGTNATMMQYFEWHLPNDGNHWNRLRDDASNLRNRGITAIWIPPAWKGTSQNDVGYGAYDLYDLGEFNQKGTVRTKYGTRSQLESAIHALKNNGVQVYGDVVMNHKAGADGTEFVTAVEVDPSNRNQETSGTYQIQAYTKFDFPGRGNTYSSFKWRWYHFDGTDWDESRKLNRIYKFSGKAWDWPVDTEFGNYDYLMFADYDMDHPEVVNELRRWGEWYTNTLNLDGFRIDAVKHIKFSFTRDWLTHVRNATGKGMFAVAEFWKNDLGALENYLSYTNWNHSVFDVPLHYNLYNASNTGGNYDMAKLLNGTVVQKHPMHAVTFVDNHDSQPGESLESFVQEWFKPLAYALILTREQGYPSVFYGDYYGIPTHSVPAMKAKIDPILAARQNFAYGTQHDYFDHHNIIGWTREGNTTHPNSGLATIMSDGPGGEKWMYVGQNKAGQVWHDITGNKPGTVTINADGWANFSVNGASVSIWVKR

SEQ ID NO: 20149 - protein, 481 aa, Bacillus sp.
HNGTNATMMQYFEWHLPNDGNHWNRLRDDASNLRNRGITAIWIPPAWKGTSQNDVGYGAYDLYDLGEFNQKGTVRTKYGTRSQLESAIHALKNNGVQVYGDVVMNHKAGADGTEFVDAVEVDPSNRNQETSGTYQIQAYTKFDFPGRGNTYSSFKWRWYHFDGTDWDESRKLNRIYKFDGKQWDWEVDTEFGNYDYLMFADLDMDHPEVVNELRRWGEWYTNTLNLDGFRIDAVKHIKFSFTRDWLTHVRNATGKGMFAVAEYWKNDLGALENYLSKTNWNHSVFDVPLHYNLYNASNSRGNYDMAKLLNGTVVQKHPMHAVTFVDNHDSQPGESLESFVQEWFKPLAYALILTREQGYPSVFYGDYYGIPTHSVPAMKAKIDPILAARQNFAYGTQHDYFDHHNIIGWTREGNTTHPNSGLATIMSDGPGGEKWMYVGQNKAGQVWHDITGNKPGTVTINADGWANFSVNKGSVSIWVKR

SEQ ID NO: 20150 - protein, 481 aa, Bacillus sp.
HNGTNATMMQYFEWHLPNDGNHWNRLRDDASNLRNRGITAIWIPPAWKGTSQNDVGYGAYDLYDLGEFNQKGTVRTKYGTRSQLESAIHALKNNGVQVYGDVVMNHKAGADGTEFVDAVEVDPSNRNQETSGTYQIQAYTKFDFPGRGNTYSSFKWRWYHFDGTDWDESRKLNRIYKFDGKAWDWEVDTENGNYDYLMFADLDMDHPEVVNELRRWGEWYTNTLNLDGFRIDAVKHIKFQFTRDWLTHVRNATGKGMFAVAEYWKNDLGALENYLSYTNWNHSVFDVPLHYNLYNASNSRGNYDMAKLLNGTVVQKHPMHAVTFVDNHDSQPGESLESFVQEWFKPLAYALILTREQGYPSVFYGDYYGIPTHSVPAMKAKIDPILAARQNFAYGTQHDYFDHHNIIGWTREGNTTHPNSGLATIMSDGPGGEKWMYVGQNKAGQVWHDITGNKPGTVTINADGWANFSVNKGSVSIWVKR

SEQ ID NO: 20151 - protein, 481 aa, Bacillus sp.
HNGTNATMMQYFEWHLPNDGNHWNRLRDDASNLRNRGITAIWIPPAWKGTSQNDVGYGAYDLYDLGEFNQKGTVRTKYGTRSQLESAIHALKNNGVQVYGDVVMNHKAGADGTEFVTAVEVDPSNRNQETSGTYQIQAYTKFDFPGRGNTYSSFKWRWYHFDGTDWDESRKLNRIYKFSGKAWDWPVDTEFGNYDYLMFADYDMDHPEVVNELRRWGEWYTNTLNLDGFRIDAVKHIKFSFTRDWLTHVRNATGKGMFAVAEFWKNDLGALENYLSYTNWNHSVFDVPLHYNLYNASNTGGNYDMAKLLNGTVVQKHPMHAVTFVDNHDSQPGESLESFVQEWFKPLAYALILTREQGYPSVFYGDYYGIPTHSVPAMKAKIDPILEARQDFAYGTQHDYFDHHNIIGWTREGNTTHPNSGLATIMSDGPGGEKWMYVGQNKAGQVWHDITGNKPGTVTINADGWANFSVNKGSVSIWVKR

SEQ ID NO: 20152 - protein, 481 aa, Bacillus sp.
HNGTNATMMQYFEWHLPNDGNHWNRLRDDASNLRNRGITAIWIPPAWKGTSQNDVGYGAYDLYDLGEFNQKGTVRTKYGTRSQLESAIHALKNNGVQVYGDVVMNHKAGADGTEFVTAVEVDPSNRNQETSGTYQIQAYTKFDFPGRGNTYSSFKWRWYHFDGTDWDESRKLNRIYKFSGKAWDWPVDTEFGNYDYLMFADYDMDHPEVVNELRRWGEWYTNTLNLDGFRIDAVKHIKFSFTRDWLTHVRNATGKGMFAVAEFWKNDLGALENYLSYTNWNHSVFDVPLHYNLYNASNYGGNYDMAKLLNGTVVQKHPMHAVTFVDNHDSQPGESLESFVQEWFKPLAYALILTREQGYPSVFYGDYYGIPTHSVPAMKAKIDPILAARQNFAYGTQHDYFDHHNIIGWTREGNTTHPNSGLATIMSDGPGGEKWMYVGQNKAGQVWHDITGNKPGTVTINADGWANFSVLGGSVSIWVKR

SEQ ID NO: 20153 - protein, 481 aa, Bacillus sp.
HNGTNATMMQYFEWHLPNDGNHWNRLRDDASNLRNRGITAIWIPPAWKGTSQNDVGYGAYDLYDLGEFNQKGTVRTKYGTRSQLESAIHALKNNGVQVYGDVVMNHKAGADGTEFVDAVEVDPSNRNQETSGTYQIQAYTKFDFPGRGNTYSSFKWRWYHFDGTDWDESRKLNRIYKFTGKAWDWPVDTEFGNYDYLMFADYDMDHPEVVNELRRWGEWYTNTLNLDGFRIDAVKHIKFSFTRDWLTHVRNATGKGMFAVAEFWKNDLGALENYLSYTNWNHSVFDVPLHYNLYNASNSRGNYDMAKLLNGTVVQKHPMHAVTFVDNHDSQPGESLESFVQEWFKPLAYALILTREQGYPSVFYGDYYGIPTHSVPAMKAKIDPILAARQNFAYGTQHDYFDHHNIIGWTREGNTTHPNSGLATIMSDGPGGEKWMYVGQNKAGQVWHDITGNKPGTVTINADGWANFSVNKGSVSIWVKR

SEQ ID NO: 20154 - protein, 481 aa, Bacillus sp.
HNGTNATMMQYFEWHLPNDGNHWNRLRDDASNLRNRGITAIWIPPAWKGTSQNDVGYGAYDLYDLGEFNQKGTVRTKYGTRSQLESAIHALKNNGVQVYGDVVMNHKAGADGTEFVDAVEVDPSNRNQETSGTYQIQAYTKFDFPGRGNAYSSFKWRWYHFDGTDWDESRKLNRIYKFTGKAWDWEVDTEFGNYDYLMFADYDMDHPEVVNELRRWGEWYTNTLNLDGFRIDAVKHIKFSFTRDWLTHVRNATGVVMFAVAEFWKNDLGALENYLSKTNWNHSVFDVPLHYNLYNASNSRGNYDMAKLLNGTVVQKHPMHAVTFVDNHDSQPGESLESFVQEWFKPLAYALILTREQGYPSVFYGDYYGIPTHSVPAMKAKIDPILAARQNFAYGTQHDYFDHHNIIGWTREGNTTHPNSGLATIMSDGPGGEKWMYVGQNKAGQVWHDITGNKPGTVTINADGWANFSVNKGSVSIWVKR

SEQ ID NO: 20155 - protein, 481 aa, Bacillus sp.
HNGTNATMMQYFEWHLPNDGNHWNRLRDDASNLRNRGITAIWIPPAWKGTSQNDVGYGAYDLYDLGEFNQKGTVRTKYGTRSQLESAIHALKNNGVQVYGDVVMNHKAGADGTEFVDAVEVDPSNRNQETSGTYQIQAYTKFDFPGRGNTYSSFKWRWYHFDGTDWDESRKLNRIYKFSGKAWDWPVDTEFGNYDYLMFADYDMDHPEVVNELRRWGEWYTNTLNLDGFRIDAVKHIKFSFTRDWLTHVRNATGKGMFAVAEFWKNDLGALENYLSYTNWNHSVFDVPLHYNLYNASNSRGNYDMAKLLNGTVVQKHPMHAVTFVDNHDSQPGESLESFVQEWFKPLAYALILTREQGYPSVFYGDYYGIPTHSVPAMKAKIDPILAARQNFAYGTQHDYFDHHNIIGWTREGNTTHPNSGLATIMSDGPGGEKWMYVGQNKAGQVWHDITGNKPGTVTINADGWANFSVNKGSVSIWVKR

SEQ ID NO: 20156 - protein, 481 aa, Bacillus sp.
HNGTNATMMQYFEWHLPNDGNHWNRLRDDASNLRNRGITAIWIPPAWKGTSQNDVGYGAYDLYDLGEFNQKGTVRTKYGTRSQLESAIHALKNNGVQVYGDVVMNHKAGADGTEFVDAVEVDPSNRNQETSGTYQIQAWTKFDFPGRGNTYSSFKWRWYHFDGTDWDESRKLNRIYKFTGKAWDWEVDTENGNYDYLMFADLDMDHPEVVNELRRWGEWYTNTLNLDGFRIDAVKHIKFSFTRDWLTHVRNATGKGMFAVAEFWKNDLGALENYLSKTNNNHKVFDVPLHYNLYNASNSRGNYDMAKLLNGTVVQKTPMAAVTFVDNHDSQPGESLESFVQEWFKPLAYALILTREQGYPSVFYGDYYGIPTHSVPAMKAKIDPILAARQNFAYGTQHDYFDHHNIIGWTREGNTTHPNSGLATIMSDGPGGEKWMYVGQNKAGQVWHDITGNKPGTVTINADGWANFSVNKGSVSIWVKR

SEQ ID NO: 20157 - protein, 481 aa, Bacillus sp.
HNGTNATMMQYFEWHLPNDGNHWNRLRDDASNLRNRGITAIWIPPAWKGTSQNDVGYGAYDLYDLGEFNQKGTVRTKYGTRSQLESAIHALKNNGVQVYGDVVMNHKAGADGTEFVTAVEVDPSNRNQETSGTYQIVAYTKFDFPGRGNTYSSFKWRWYHFDGTDWDESRKLNRIYKFSGKAWDWPVDTEFGNYDYLMFADYDMDHPEVVNELRRWGEWYTNTLNLDGFRIDAVKHIKFSFTRDWLTHVRNATGKGMFAVAEFWKNDLGALENYLSYTNWNHSVFDVPLHYNLYNASNTGGNYDMAKLLNGTVVQKHPMHAVTFVDNHDSQPGESLESFVQEWFKPLAYALILTREQGYPSVFYGDYYGIPTHSVPAMKAKIDPILAARQNFAYGTQHDYFDHHNIIGWTREGNTTHPNSGLATIMSDGPGGEKWMYVGQNKAGQVWHDITGNKPGTVTINADGWANFSVNKGSVSIWVKR

SEQ ID NO: 20158 - protein, 481 aa, Bacillus sp.
HNGTNATMMQYFEWHLPNDGNHWNRLRDDASNLRNRGITAIWIPPAWKGTSQNDVGYGAYDLYDLGEFNQKGTVRTKYGTRSQLESAIHALKNNGVQVYGDVVMNHKAGADGTEFVDAVEVDPSNRNQETSGTYQIQAYTKFDFPGRGNTYSSFKWRWYHFDGTDWDESRKLNRIYKFTGKQWDWEVDTEFGNYDYLMFADYDMDHPEVVNELRRWGEWYTNTLNLDGFRIDAVKHIKFSFTRDWLTHVRNATGKGMFAVAEYWKNDLGALENYLSKTNWNHSVFDVPLHYNLYNASNSRGNYDMAKLLNGTVVQKHPMHAVTFVDNHDSQPGESLESFVQEWFKPLAYALILTREQGYPSVFYGDYYGIPTHSVPAMKAKIDPILAARQNFAYGTQHDYFDHHNIIGWTREGNTTHPNSGLATIMSDGPGGEKWMYVGQNKAGQVWHDITGNKPGTVTINADGWANFSVNKGSVSIWVKR

SEQ ID NO: 20159 - protein, 481 aa, Bacillus sp.
HNGTNATMMQYFEWHLPNDGNHWNRLRDDASNLRNRGITAIWIPPAWKGTSQNDVGYGAYDLYDLGEFNQKGTVRTKYGTRSQLESAIHALKNNGVQVYGDVVMNHKAGADGTEFVTAVEVDPSNRNQETSGTYQIQAYTKFDFPGRGNTYSSFKWRWYHFDGTDWDESRKLNRIYKFSGKAWDWPVDTEFGNYDYLMFADYDMDHPEVVNELRRWGEWYTNTLNLDGFRIDAVKHIKFSFTRDWLTHVRNATGKGMFAVAEFWKNDLGALENYLSYTNWNHSVFDVPLHYNLYNASNTGGNYDMAKLLNGTVVQKHPMHAVTFVDNHDSQPGESLESFVQEWFKPLAYALILTREQGYPSVFYGDYYGIPTHSVPAMKAKIDPILEARQWFAYGTQHDYFDHHNIIGWTREGNTTHPNSGLATIMSDGPGGEKWMYVGQNKAGQVWHDITGNKPGTVTINADGWANFSVNKGSVSIWVKR

SEQ ID NO: 20160 - protein, 481 aa, Bacillus sp.
HNGTNATMMQYFEWHLPNDGNHWNRLRDDASNLRNRGITAIWIPPAWKGTSQNDVGYGAYDLYDLGEFNQKGTVRTKYGTRSQLESAIHALKNNGVQVYGDVVMNHKAGADGTEFVDAVEVDPSNRNQETSGTYQIQAYTKFDFPGRGNTYSSFKWRWYHFDGTDWDESRKLNRIYKFDGKAWDWPVDTENGNYDYLMFADLDMDHPEVVNELRRWGEWYTNTLNLDGFRIDAVKHIKFQFTRDWLTHVRNATGKGMFAVAEFWKNDLGALENYLSYTNWNHSVFDVPLHYNLYNASNSRGNYDMAKLLNGTVVQKHPMHAVTFVDNHDSQPGESLESFVQEWFKPLAYALILTREQGYPSVFYGDYYGIPTHSVPAMKAKIDPILAARQNFAYGTQHDYFDHHNIIGWTREGNTTHPNSGLATIMSDGPGGEKWMYVGQNKAGQVWHDITGNKPGTVTINADGWANFSVNKGSVSIWVKR

SEQ ID NO: 20161 - protein, 481 aa, Bacillus sp.
HNGTNATMMQYFEWHLPNDGNHWNRLRDDASNLRNRGITAIWIPPAWKGTSQNDVGYGAYDLYDLGEFNQKGTVRTKYGTRSQLESAIHALKNNGVQVYGDVVMNHKAGADGTEFVTAVEVDPSNRNQETSGTYQIQAYTKFDFPGRGNTYSSFKWRWYHFDGTDWDESRKLNRIYKFDGKAWDWPVDTEFGNYDYLMFADLDMDHPEVVNELRRWGEWYYNTLNLDGFRIDAVKHIKFSFTRDWLTHVRNATGKEMFAVAEFWKNDLGALENYLSYTNWNHSVFDVPLHYNLYNASNSRGNYDMAKLLNGTVVQKHPMHAVTFVDNHDSQPGESLESFVQEWFKPLAYALILTREQGYPSVFYGDYYGIPTHSVPAMKAKIDPILAARQNFAYGTQHDYFDHHNIIGWTREGNTTHPNSGLATIMSDGPGGEKWMYVGQNKAGQVWHDITGNKPGTVTINADGWANFSVNGASVSIWVKR

SEQ ID NO: 20162 - protein, 481 aa, Bacillus sp.
HNGTNATMMQYFEWHLPNDGNHWNRLRDDASNLRNRGITAIWIPPAWKGTSQNDVGYGAYDLYDLGEFNQKGTVRTKYGTRSQLESAIHALKNNGVQVYGDVVMNHKAGADGTEFVTAVEVDPSNRNQETSGTYQIQAYTKFDFPGRGNTYSSFKWRWYHFDGTDWDESRKLNRIYKFTGKAWDWPVDTEFGNYDYLMFADLDMDHPEVVNELRRWGEWYTNTLNLDGFRIDAVKHIKFSFTRDWLTHVRNATGKGMFAVAEFWKNDLGALENYLSYTNWNHSVFDVPLHYNLYNASNSRGNYDMAKLLNGTVVQKHPMHAVTFVDNHDSQPGESLESFVQEWFKPLAYALILTREQGYPSVFYGDYYGIPTHSVPAMKAKIDPILAARQNFAYGTQHDYFDHHNIIGWTREGNTTHPNSGLATIMSDGPGGEKWMYVGQNKAGQVWHDITGNKPGTVTINADGWANFSVNKGSVSIWVKR

SEQ ID NO: 20163 - protein, 481 aa, Bacillus sp.
HNGTNATMMQYFEWHLPNDGNHWNRLRDDASNLRNRGITAIWIPPAWKGTSQNDVGYGAYDLYDLGEFNQKGTVRTKYGTRSQLESAIHALKNNGVQVYGDVVMNHKAGADGTEFVDAVEVDPSNRNQETSGTYQIQAYTKFDFPGRGNTYSSFKWRWYHFDGTDWDESRKLNRIYKFDGKAWDWEVDTEFGNYDYLMFADLDMDHPEVVNELRRWGEWYTNTLNLDGFRIDAVKHIKFQFTRDWLTHVRNATGKGMFAVAEYWKNDLGALENYLSKTNWNHSVFDVPLHYNLYNASNSRGNYDMAKLLNGTVVQKHPMHAVTFVDNHDSQPGESLESFVQEWFKPLAYALILTREQGYPSVFYGDYYGIPTHSVPAMKAKIDPILAARQNFAYGTQHDYFDHHNIIGWTREGNTTHPNSGLATIMSDGPGGEKWMYVGQNKAGQVWHDITGNKPGTVTINADGWANFSVNKGSVSIWVKR

SEQ ID NO: 20164 - protein, 516 aa, Bacillus sp.
AAPFNGTMMQYFEWYLPDDGTLWTKLANDANNLSSLGITALWIPPAWKGTSRSDVGYGVYDLYDLGEFNQKGTVRTKYGTKAQYLQAIQAAHAAGIQVYADVVFDHKGGADATEWVDAVEVNPSDRNQEISGTYQIQAWTKFDFPGRGNTHSSFKWRWYHFDGVDWDESRKLSNRIYKFRGIGKAWDWEVDTENGNYDYLMYADIDMDHPEVVTELKNWGKWYVNTTNIDGFRIDAVKHIKFSFFPDWISHVRSQTGKPLFTVAEFWSYDINKIHNYITKTNGTMSLFDAPLHNKFYTASKSGGAFDMRTIMTNTLMKDQPSLAVTFVDNHDSEPGQALQSFVDPWFKPLAYAFILTRQEGYPCVFYGDYYGIPQHNIPALKSKIDPILIARRDYAYGTQHDYLDHSDIIGWTREGVTEKPGSGLAAIISDGPGGSKWMFVGKNHAGKVFYDITGNRSDTVTINADGWGEFKVNGGSVSIWVPKKTTVSTIARPITTRPWTGEFVRWTEPRLVAWP

SEQ ID NO: 20165 - protein, 516 aa, Geobacillus stearothermophilus
AAPFNGTMMQYFEWHLPDDGTLWTKLANDANNLSSLGITAIWIPPAWKGTSRSDVGYGVYDLYDLGEFNQKGTVRTKYGTKAQYLQAIQAAHAAGMQVYADVVFDHKGGADATEWVDAVEVNPSDRNQEISGTYQIQAWTKFDFPGRGNTYSSFKWRWYHFDGVDWDESRQKLSRIYKFRGIGKAWDWEVDSENGNYDYLMYADLDMDHPEVVTELKNWGKWYVNTTNIDGFRIDAVKHIKFSFFPDWLSHVRSQTGKPLFTVAEFWSYDINKLHNYITKTNGTMSLFDAPLHNKFYTASKSGGAFDMRTLLTNTLMKDQPTLAVTFVDNHDSEPGQALQSFVDPWFKPLAYAFILTRQEGYPCVFYGDYYGIPQHNIPALKAKIDPILIARRDFAYGTQHDYLDHSDIIGWTREGVTEKPGSGLAAIISDGPGGSKWMYVGKNHAGKVFHDITGNKSDTVTINADGWAEFKVNGGSVSIWVPRKTTVSTIARPITTRPWTGEFVRWTEPRLVAWP

SEQ ID NO: 20166 - protein, 480 aa, Bacillus sp.
HSGTNATMMQYFEWHLPNDGNHWNRLRDDASNLRNRGITAIWIPPAWKGTSQNDVGYGAYDLYDLGEFNQKGTVRTKYGTRSQLESAIHALKDNGVLVYGDVVMNHKAKADGTEFVDAVEVDPSNRNQETSGTYQIQAWTKFDFPGRGNTYSSFKWRWYHFDGTDWDESRKLNRIYKFTGKAWDWEVDTENGNYDYLMFADLDMDHPEVVNELRRWGEWYTNTLNLDGFRIDAVKHIKFSFTRDWLTHRNATGKGMFAVAEFWKNDLGALENYLSKTNWNHSVFDVPLHYNLYNASNSRGNYDMAKLLNGTVVQKHPMHAVTFVDNHDSQPGESLESFVQEWFKPLAYALILTREQGYPSVFYGDYYGIPTHSVPAMKAKIDPILAARQNFAYGTQHDYFDHHNIIGWTREGNTTHPNSGLATIMSDGPGGEKWMYVGQNKAGQVWHDITGNKPGTVTINADGWANFSVNKGSVSIWVKR

SEQ ID NO: 20167 - protein, 512 aa, Bacillus subtilis
LAFLLTASLFCPTGQPAKAAAPFNGTMMQYFEWYLPDDGTLWTKVANEANNLSSLGITALWLPPAYKGTSRSDVGYGVYDLYDLGEFNQKGTVRTKYGTKAQYLQAIQAAHAAGMQVYADVVFDHKGGADGTEGVDAVEVNPSDCNQEFSGTYQIQAWTKFDFPGRGNTYSSFKWRWYHFDGVDWDESRKLSRIYKFRGIGKAWDWEVDTENGNYDYLMYADLDMDHPEVVTELKNWGKWYVNTTNIDGFRLDAVKHIKFSFFPDWLSYVRSQTGKPLFTVGEYWSYDINKLHNYITKTDGTMSLFDAPLHNKFYTASKSGGAFDMRTLMTNTLMKDQPTLAVTFGDNHDTEPGQALQSWVDPWFKPLAYAFILTRQEGYPCVFYGDYYGIPQYNIPSLKSKIDPLLIARRDYAYGTQHDYLDHSDIIGWTREGGTEKPGSGLAALITDGPGGSKWMYVGKQHAGKVFYDLTGNRSDTVTINSDGWGEFKVNGGSVSVWVPRKTTVSTITRP

SEQ ID NO: 20168 - protein, 512 aa, unidentified
LAFLLTASLFCPTGQPAKAAAPFNGTMMQYFEWYLPDDGTLWTKVANEANNLSSLGITALWLPPAYKGTSRSDVGYGVYDLYDLGEFNQKGTVRTKYGTKAQYLQAIQAAHAAGMQVYADVVFDHKGGADGTEWVDAVEVNPSDRNQEISGTYQIQAWTKFDFPGRGNTYSSFKWRWYHFDGVDWDESRKLSRIYKFRGIGKAWDWEVDTENGNYDYLMYADLDMDHPEVVTELKNWGKWYVNTTNIDGFRLDAVKHIKFSFFPDWLSYVRSQTGKPLFTVGEYWSYDINKLHNYITKTNGTMSLFDAPLHNKFYTASKSGGAFDMRTLMTNTLMKDQPTLAVTFVDNHDTEPGQALQSWVDPWFKPLAYAFILTRQEGYPGVFYGDYYGIPQYNIPSLKSKIDPLLIARRDYAYGTQHDYLDHSDIIGWTREGVTEKPGSGLAALITDGPGGSKWMYVGKQHAGKVFYDLTGNRSDTVTITSDGWGEFKVNGGSVSVWVPRKTTVSTITRP

SEQ ID NO: 20169 - protein, 508 aa, Geobacillus stearothermophilus
LAFLLTALLFCPTGQPAKAAAPFNGTMMQYFEWYLPDDGTLWTKVANEANNLSSLGITALWLPPAYKGTSRSDVGYGVYDLYDLGEFNQKGAVRTKYGTKAQYLQAIQAAHAAGMQVYADVVFDHKGGADGTEWVDAVEVNPSDRNQRISGTYQIQAWTKFDFPGRGNTYSSFKWRWYHFDGVDWDESRKLSRIYKFRGKAWDWEVDTENGNYDYLMYADLDMDHPEVVTELKSWGKWYVNTTNIDGFRLDAVKHIKFSFFPDWLSYVRSQTGKPLFTVGEYWSYDINKLHNYIMKTNGTMSLFDAPLHNKFYTASKSGGTFDMRTLMTNTLMKDQPTLAVTFVDNHDTEPGQALQSWVDPWFKPLAYAFILTRQEGYPCVFYGDYYGIPQYNIPSLKSKIDPLLIARRDYAYGTQHDYLDHSDIIGWTREGVTEKPGSGLAALITDGPGGSKWMYVGKQHAGKVFYDLTGNRSDTVTINSDGWGEFKVNGGSVSVWVPRKTTVSTIA

SEQ ID NO: 20170 - protein, 510 aa, Geobacillus stearothermophilus
LAFLLTALLFCPTGQPAKAAAPFNGTMMQYFEWYLPDDGTLWTKVANEANNLSSLGITALWLPPAYKGTSRSDVGYGVYDLYDLGEFNQKGAVRTKYGTKAQYLQAIQAAHAAGMQVYADVVFDHKGGADGTEWVDAVEVNPSDRNQEISGTYQIQAWTKFDFPGRGNTYSSFKWRWYHFDGVDWDESRKLSRIYKFRGIGKAWDWEVDTENGNYDYLMYADLDMDHPEVVTELKSWGKWYVNTTNIDGFRLDAVKHIKFSFFPDWLSYVRSQTGKPLFTVGEYWSYDINKLHNYIMKTNGTMSLFDAPLHNKFYTASKSGGTFDMRTLMTNTLMKDQPTLAVTFVDNHDTEPGQALQSWVDPWFKPLAYAFILTRQEGYPCVFYGDYYGIPQYNIPSLKSKIDPLLIARRDYAYGTQHDYLDHSDIIGWTREGVTEKPGSGLAALITDGPGGSKWMYVGKQHAGKVFYDLTGNRSDTVTINSDGWGEFKVNGGSVSVWVPRKTTVSTIA

SEQ ID NO: 20171 - protein, 493 aa, Geobacillus stearothermophilus
AAPFNGTMMQYFEWYLPDNGTLWTKVAKEANNLSSLGITALWLPPAYKGTSRSDVGYGVYDLYDLGEFNQKGTVRTKYGTKAQYLRAIQAAHAAGMRVYADVVFDHKGGADGTEWVDAVEVNPSDRNQEISGTYQIQAWTKFDFPGRGNTYSSFKWRWYHFDGVDWDESRKLSRIYKFRGIGKAWDWEVDTENGNYDYLMYADLDMDHPEVVTELKNWGKWYVKTTNIDGFRLDAVKHIKFSFFPDWLSYVRSQTGKPLFTVGEYWSYDIKKLHNYITKTKGTMSLFDAPLHNKFYTASKSGGAFNMRTLMTNTLMKNRPTLAVTFVDNHDTEPGQALQSWVDPWFKPLAYAFILTREEGYPCVFYGDYYGIPQYNIPSLKSKIDPLLIARRNYAYGTQHDYLDHSDIIGWTREGVTEKPGSGLAALITDGPGGSKWMYVGKEHAGKVFYDLTGNRSNTVTINSDGWGEFKVNGGSVSVWVPRKTTVSTIARP

SEQ ID NO: 20172 - protein, 504 aa, Geobacillus stearothermophilus
ALLFCPTGQPAKAAAPFNGTMMQYFEWYLPDDGTLWTKVANEANNLSSLGITALWLPPAYKGTSRSDVGYGVYDLYDLGEFNQKGAVRTKYGTKAQYLQAIQAAHAAGMQVYADVVFDHKGGADGTEWVDAVEVNPSDRNQEISGTYQIQAWTKFDFPGRGNTYSSFKWRWYHFDGVDWDESRKLSRIYKFRGIGKAWDWEVDTENGNYDYLMYADLDMDHPEVVTELKSWGKWYVNTTNIDGFRLDAVKHIKFSFFPDWLSNVRSQTGKPLFTVGEYWSYDINKLHNYNMKTNGTMSLFDAPLHNKFYTASKSGGTFDMRTLMTNTLMKDQPTLAVTFVDNHDTEPGQALQSWVDPWFKPLAYAFILTRQEGYPCVFYGDYYGIPQYNIPSLKSKIDPLLIARRDYAYGTQHDYLDHSDIIGWTREGVTEKPGSGLAALITDGPGGRKWMYVGKQHAGKVFYDLTGNRSDTVTINSDGWGEFKVNGGSVSVWVPRKTTVSTIA

SEQ ID NO: 20173 - protein, 484 aa, Synthetic construct
HHNGTNGTMMQYFEWYLPNDGNHWNRLRSDASNLKDKGITAVWIPPAWKGASQNDVGYGAYDLYDLGEFNQKGTVRTKYGTRNQLQAAVTALKSNGIQVYGDVVMNHKGGADATEWVRAVEVNPSNRNQEVSGDYTIEAWTKFDFPGRGNTHSNFKWRWWHFDGVDWDQSRQLQNKIYKFRGDGKGWDWEVDTENGNYDYLMYADYDMDHPEVVNELRNWGVWYTNTLGLDGFRIDAVKHIKYSFTRDWLEHVRNTTGKNMFAVAEFWKNDIGAIENYLSKTNWNHSVFDVPLHYNLYNASRSGGNYDMRQIFNGTVVQRHPTHAVTFVDNHDSQPEEALESFVEEWFKPLAYALTLTRDQGYPSVFYGDYYGIPTHGVPAMKSKIDPILEARQKYAYGKQNDYMDHHNMIGWTREGNTAHPNSGLATIMSDGPGGNKWMYVGRNKAGQVWRDITGNRSGTVTINADGWGNFSVNGGSVSIWVN

SEQ ID NO: 20174 - protein, 484 aa, Synthetic construct
HHNQTNGTMMQYFEWYLPNDGNHWNRLRSDASNLKDKGITAVWIPPAWKGASQNDVGYGAYDLYDLGEFNQKGTVRTKYGTRNQLQAAVTALKSNGIQVYGDVVMNHKGGADATEWVRAVEVNPSNRNQEVSGDYTIEAWTKFDFPGRGNTHSNFKWRWWHFDGVDWDQSRQLQNRIYKFRGDGKEWDWEVDTENGNYDYLMYADIDMDHPEVVNELRNWGVWYTNTLGLDGFRIDAVKHIKYSFTRDWLTHVRNTTGKNMFAVAEFWKNDIGAIENYLSKTNWNHSVFDVPLHYNLYNASRSGGNYDMRQIFNGTVVQRHPTHAVTFVDNHDSQPEEALESFVEEWFKPLAYALTLTRDQGYPSVFYGDYYGIPTHGVPAMKSKIDPILEARQKYAYGKQNDYMDHHNMIGWTREGNTAHPNSGLATIMSDGPGGNKWMYVGRNKAGQVWRDITGNRSGTVTINADGWGNFSVNGGSVSIWVN

SEQ ID NO: 20175 - protein, 484 aa, Synthetic construct
HHNGTNGTMMQYFEWYLPNDGNHWHRLRSDASNLKDKGITAVWIPPAWKGASQNDVGYGAYDLYDLGEFNQKGTVRTKYGTRNQLQAAVTALKSNGIQVYGDVVMNHKGGADATEWVRAVEVNPSNRNQEVSGDYTIEAWTKFDFPGRGNTHSNFKWRWYHFDGVDWDQSRQLQNRIYKFRGDGKEWDWEVDTENGNYDYLMYADYDMDHPEVVNELRNWGVWYTNTLGLDGFRIDAVKHIKYSFTRDWLEHVRNTTGKNMFAVAEFWKNDIGAIENYLSKTNWNHSVFDVPLHYNLYNASRSGGNYDMRQIFNGTVVQRHPTHAVTFVDNHDSQPEEALESFVEEWFKPLAYALTLTRDQGYPSVFYGDYYGIPTHGVPAMKSKIDPILEARQKYAYGKQNDYMDHHNMIGWTREGNTAHPNSGLATIMSDGPGGNKWMYVGRNKAGQVWRDITGNRSGTVTINADGWGNFSVNGGSVSIWVN

SEQ ID NO: 20176 - protein, 484 aa, Synthetic construct
HHNGTNGTMMQYFEWYLPNDGNHWHRLRSDASNLKDKGITAVWIPPAWKGASQNDVGYGAYDLYDLGEFNQKGTVRTKYGTRNQLQAAVTALKSNGIQVYGDVVMNHKGGADATEWVRAVEVNPSNRNQEVSGDYTIEAWTKFDFPGRGNTHSNFKWRWYHFDGVDWDQSRQLQNKIYKFRGDGKEWDWEVDTENGNYDYLMYADIDMDHPEVVNELRNWGVWYTNTLGLDGFRIDAVKHIKYSFTRDWLTHVRNTTGKNMFAVAEFWKNDIGAIENYLSKTNWNHSVFDVPLHYNLYNASRSGGNYDMRQIFNGTVVQRHPTHAVTFVDNHDSQPEEALESFVEEWFKPLAYALTLTRDQGYPSVFYGDYYGIPTHGVPAMKSKIDPILEARQKYAYGKQNDYMDHHNMIGWTREGNTAHPNSGLATIMSDGPGGNKWMYVGRNKAGQVWRDITGNRSGTVTINADGWGNFSVNGGSVSIWVN

SEQ ID NO: 20177 - protein, 484 aa, Synthetic construct
HHNQTNGTMMQYFEWYLPNDGNHWNRLRSDASNLKDKGITAVWIPPAWKGASQNDVGYGAYDLYDLGEFNQKGTVRTKYGTRNQLQAAVTALKSNGIQVYGDVVMNHKGGADATEWVRAVEVNPSNRNQEVSGDYTIEAWTKFDFPGRGNTHSNFKWRWYHFDGVDWDQSRQLQNKIYKFRGDGKGWDWEVDTENGNYDYLMYADYDMDHPEVVNELRNWGVWYTNTLGLDGFRIDAVKHIKYSFTRDWLTHVRNTTGKNMFAVAEFWKNDIGAIRNYLSKTNWNHSVFDVPLHYNLYNASRSGGNYDMRQIFNGTVVQRHPTHAVTFVDNHDSQPEEALESFVEEWFKPLAYALTLTRDQGYPSVFYGDYYGIPTHGVPAMKSKIDPILEARQKYAYGKQNDYLDHHNMIGWTREGNTAHPNSGLATIMSDGPGGNKWMYVGRNKAGQVWRDITGNRSGTVTINADGWGNFSVNGGSVSIWVN

SEQ ID NO: 20178 - protein, 484 aa, Synthetic construct
HHNQTNGTMMQYFEWYLPNDGNHWNRLRSDASNLKDKGITAVWIPPAWKGASQNDVGYGAYDLYDLGEFNQKGTVRTKYGTRNQLQAAVTALKSNGIQVYGDVVMNHKGGADATEWVRAVEVNPSNRNQEVSGDYTIEAWTKFDFPGRGNTHSNFKWRWYHFDGVDWDQSRQLQNKIYKFRGDGKGWDWEVDTENGNYDYLMYADYDMDHPEVVNELRNWGVWYTNTLGLDGFRIDAVKHIKYSFTRDWLEHVRNTTGKNMFAVAEFWKNDIGAIENYLSKTNWNHSVFDVPLHYNLYNASRSGGNYDMRQIFNGTVVQRHPTHAVTFVDNHDSQPEEALESFVEEWFKPLAYALTLTRDQGYPSVFYGDYYGIPTHGVPAMKSKIDPILEARQKYAYGKQNDYMDHHNMIGWTREGNTAHPNSGLATIMSDGPGGNKWMYVGRNKAGQVWRDITGNRSGTVTINADGWGNFSVNGGSVSIWVN

SEQ ID NO: 20179 - protein, 484 aa, Synthetic construct
HHNGTNGTMMQYFEWYLPNDGNHWNRLRSDASNLKDKGITAVWIPPAWKGASQNDVGYGAYDLYDLGEFNQKGTVRTKYGTRNQLQAAVTALKSNGIQVYGDVVMNHKGGADATEWVRAVEVNPSNRNQEVSGDYTIEAWTKFDFPGRGNTHSNFKWRWYHFDGVDWDQSRQLQNRIYKFRGDGKEWDWEVDTENGNYDYLMYADYDMDHPEVVNELRNWGVWYTNTLGLDGFRIDAVKHIKYSFTRDWLTHVRNTTGKNMFAVAEFWKNDIGAIRNYLSKTNWNHSVFDVPLHYNLYNASRSGGNYDMRQIFNGTVVQRHPTHAVTFVDNHDSQPEEALESFVEEWFKPLAYALTLTRDQGYPSVFYGDYYGIPTHGVPAMKSKIDPILEARQKYAYGKQNDYMDHHNMIGWTREGNTAHPNSGLATIMSDGPGGNKWMYVGRNKAGQVWRDITGNRSGTVTINADGWGNFSVNGGSVSIWVN

SEQ ID NO: 20180 - protein, 484 aa, Synthetic construct
HHNGTNGTMMQYFEWYLPNDGNHWNRLRSDASNLKDKGITAVWIPPAWKGASQNDVGYGAYDLYDLGEFNQKGTVRTKYGTRNQLQAAVTALKSNGIQVYGDVVMNHKGGADATEWVRAVEVNPSNRNQEVSGDYTIEAWTKFDFPGRGNTHSNFKWRWWHFDGVDWDQSRQLQNKIYKFRGDGKGWDWEVDTENGNYDYLMYADYDMDHPEVVNELRNWGVWYTNTLGLDGFRIDAVKHIKYSFTRDWLTHVRNTTGKNMFAVAEFWKNDIGAIRNYLSKTNWNHSVFDVPLHYNLYNASRSGGNYDMRQIFNGTVVQRHPGHAVTFVDNHDSQPEEALESFVEEWFKPLAYALTLTRDQGYPSVFYGDYYGIPTHGVPAMKSKIDPILEARQKYAYGKQNDYLDHHNMIGWTREGNTAHPNSGLATIMSDGPGGNKWMYVGRNKAGQVWRDITGNRSGTVTINADGWGNFSVNGGSVSIWVN

SEQ ID NO: 20181 - protein, 484 aa, Synthetic construct
HHNGTNGTMMQYFEWYLPNDGNHWHRLRSDASNLKDKGITAVWIPPAWKGASQNDVGYGAYDLYDLGEFNQKGTVRTKYGTRNQLQAAVTALKSNGIQVYGDVVMNHKGGADATEWVRAVEVNPSNRNQEVSGDYTIEAWTKFDFPGRGNTHSNFKWRWWHFDGVDWDQSRQLQNKIYKFRGDGKGWDWEVDTENGNYDYLMYADYDMDHPEVVNELRNWGVWYTNTLGLDGFRIDAVKHIKYSFTRDWLEHVRNTTGKNMFAVAEFWKNDIGAIENYLSKTNWNHSVFDVPLHYNLYNASRSGGNYDMRQIFNGTVVQRHPTHAVTFVDNHDSQPEEALESFVEEWFKPLAYALTLTRDQGYPSVFYGDYYGIPTHGVPAMKSKIDPILEARQKYAYGKQNDYLDHHNMIGWTREGNTAHPNSGLATIMSDGPGGNKWMYVGRNKAGQVWRDITGNRSGTVTINADGWGNFSVNGGSVSIWVN

SEQ ID NO: 20182 - protein, 484 aa, Synthetic construct
HHNGTNGTMMQYFEWYLPNDGNHWYRLRSDASNLKDKGITAVWIPPAWKGASQNDVGYGAYDLYDLGEFNQKGTVRTKYGTRNQLQAAVTALKSNGIQVYGDVVMNHKGGADATEWVRAVEVNPSNRNQEVSGDYTIEAWTKFDFPGRGNTHSNFKWRWYHFDGVDWDQSRQLQNKIYKFRGDGKEWDWEVDTENGNYDYLMYADYDMDHPEVVNELRNWGVWYTNTLGLDGFRIDAVKHIKYSFTRDWLTHVRNTTGKNMFAVAEFWKNDIGAIENYLSKTNWNHSVFDVPLHYNLYNASRSGGNYDMRQIFNGTVVQRHPTHAVTFVDNHDSQPEEALESFVEEWFKPLAYALTLTRDQGYPSVFYGDYYGIPTHGVPAMKSKIDPILEARQKYAYGKQNDYLDHHNMIGWTREGNTAHPNSGLATIMSDGPGGNKWMYVGRNKAGQVWRDITGNRSGTVTINADGWGNFSVNGGSVSIWVN

SEQ ID NO: 20183 - protein, 484 aa, Synthetic construct
HHNGTNGTMMQYFEWYLPNDGNHWNRLRSDASNLKDKGITAVWIPPAWKGASQNDVGYGAYDLYDLGEFNQKGTVRTKYGTRNQLQAAVTALKSNGIQVYGDVVMNHKGGADATEWVRAVEVNPSNRNQEVSGDYTIEAWTKFDFPGRGNTHSNFKWRWWHFDGVDWDQSRQLQNKIYKFRGDGKGWDWEVDTENGNYDYLMYADYDMDHPEVVNELRNWGVWYTNTLGLDGFRIDAVKHIKYSFTRDWLTHVRNTTGKNMFAVAEFWKNDIGAIENYLSKTNWNHSVFDVPLHYNLYNASRSGGNYDMRQIFNGTVVQRHPTHAVTFVDNHDSQPEEALESFVEEWFKPLAYALTLTRDQGYPSVFYGDYYGIPTHGVPAMKSKIDPILEARQKYAYGKQNDYMDHHNMIGWTREGNTAHPNSGLATIMSDGPGGNKWMYVGRNKAGQVWRDITGNRSGTVTINADGWGNFSVNGGSVSIWVN

SEQ ID NO: 20184 - protein, 484 aa, Synthetic construct
HHNQTNGTMMQYFEWYLPNDGNHWHRLRSDASNLKDKGITAVWIPPAWKGASQNDVGYGAYDLYDLGEFNQKGTVRTKYGTRNQLQAAVTALKSNGIQVYGDVVMNHKGGADATEWVRAVEVNPSNRNQEVSGDYTIEAWTKFDFPGRGNTHSNFKWRWYHFDGVDWDQSRQLQNKIYKFRGDGKGWDWEVDTENGNYDYLMYADYDMDHPEVVNELRNWGVWYTNTLGLDGFRIDAVKHIKYSFTRDWLEHVRNTTGKNMFAVAEFWKNDIGAIENYLSKTNWNHSVFDVPLHYNLYNASRSGGNYDMRQIFNGTVVQRHPTHAVTFVDNHDSQPEEALESFVEEWFKPLAYALTLTRDQGYPSVFYGDYYGIPTHGVPAMKSKIDPILEARQKYAYGKQNDYLDHHNMIGWTREGNTAHPNSGLATIMSDGPGGNKWMYVGRNKAGQVWRDITGNRSGTVTINADGWGNFSVNGGSVSIWVN

SEQ ID NO: 20185 - protein, 484 aa, Synthetic construct
HHNQTNGTMMQYFEWYLPNDGNHWNRLRSDASNLKDKGITAVWIPPAWKGASQNDVGYGAYDLYDLGEFNQKGTVRTKYGTRNQLQAAVTALKSNGIQVYGDVVMNHKGGADATEWVRAVEVNPSNRNQEVSGDYTIEAWTKFDFPGRGNTHSNFKWRWYHFDGVDWDQSRQLQNKIYKFRGDGKGWDWEVDTENGNYDYLMYADYDMDHPEVVNELRNWGVWYTNTLGLDGFRIDAVKHIKYSFTRDWLTHVRNTTGKNMFAVAEFWKNDIGAIENYLSKTNWNHSVFDVPLHYNLYNASRSGGNYDMRQIFNGTVVQRHPTHAVTFVDNHDSQPEEALESFVEEWFKPLAYALTLTRDQGYPSVFYGDYYGIPTHGVPAMKSKIDPILEARQKYAYGKQNDYMDHHNMIGWTREGNTAHPNSGLATIMSDGPGGNKWMYVGRNKAGQVWRDITGNRSGTVTINADGWGNFSVNGGSVSIWVN

SEQ ID NO: 20186 - protein, 484 aa, Synthetic construct
HHNGTNGTMMQYFEWYLPNDGNHWHRLRSDASNLKDKGITAVWIPPAWKGASQNDVGYGAYDLYDLGEFNQKGTVRTKYGTRNQLQAAVTALKSNGIQVYGDVVMNHKGGADATEWVRAVEVNPSNRNQEVSGDYTIEAWTKFDFPGRGNTHSNFKWRWWHFDGVDWDQSRQLQNRIYKFRGDGKEWDWEVDTENGNYDYLMYADYDMDHPEVVNELRNWGVWYTNTLGLDGFRIDAVKHIKYSFTRDWLEHVRNTTGKNMFAVAEFWKNDIGAIENYLSKTNWNHSVFDVPLHYNLYNASRSGGNYDMRQIFNGTVVQRHPTHAVTFVDNHDSQPEEALESFVEEWFKPLAYALTLTRDQGYPSVFYGDYYGIPTHGVPAMKSKIDPILEARQKYAYGKQNDYLDHHNMIGWTREGNTAHPNSGLATIMSDGPGGNKWMYVGRNKAGQVWRDITGNRSGTVTINADGWGNFSVNGGSVSIWVN

SEQ ID NO: 20187 - protein, 484 aa, Synthetic construct
HHNQTNGTMMQYFEWYLPNDGNHWNRLRSDASNLKDKGITAVWIPPAWKGASQNDVGYGAYDLYDLGEFNQKGTVRTKYGTRNQLQAAVTALKSNGIQVYGDVVMNHKGGADATEWVRAVEVNPSNRNQEVSGDYTIEAWTKFDFPGRGNTHSNFKWRWYHFDGVDWDQSRQLQNRIYKFRGDGKEWDWEVDTENGNYDYLMYADYDMDHPEVVNELRNWGVWYTNTLGLDGFRIDAVKHIKYSFTRDWLTHVRNTTGKNMFAVAEFWKNDIGAIENYLSKTNWNHSVFDVPLHYNLYNASRSGGNYDMRQIFNGTVVQRHPTHAVTFVDNHDSQPEEALESFVEEWFKPLAYALTLTRDQGYPSVFYGDYYGIPTHGVPAMKSKIDPILEARQKYAYGKQNDYMDHHNMIGWTREGNTAHPNSGLATIMSDGPGGNKWMYVGRNKAGQVWRDITGNRSGTVTINADGWGNFSVNGGSVSIWVN

SEQ ID NO: 20188 - protein, 484 aa, Synthetic construct
HHNGTNGTMMQYFEWYLPNDGNHWNRLRSDASNLKDKGITAVWIPPAWKGASQNDVGYGAYDLYDLGEFNQKGTVRTKYGTRNQLQAAVTALKSNGIQVYGDVVMNHKGGADATEWVRAVEVNPSNRNQEVSGDYTIEAWTKFDFPGRGNTHSNFKWRWWHFDGVDWDQSRQLQNRIYKFRGDGKEWDWEVDTENGNYDYLMYADIDMDHPEVVNELRNWGVWYTNTLGLDGFRIDAVKHIKYSFTRDWLTHVRNTTGKNMFAVAEFWKNDIGAIRNYLSKTNWNHSVFDVPLHYNLYNASRSGGNYDMRQIFNGTVVQRHPTHAVTFVDNHDSQPEEALESFVEEWFKPLAYALTLTRDQGYPSVFYGDYYGIPTHGVPAMKSKIDPILEARQKYAYGKQNDYMDHHNMIGWTREGNTAHPNSGLATIMSDGPGGNKWMYVGRNKAGQVWRDITGNRSGTVTINADGWGNFSVNGGSVSIWVN

SEQ ID NO: 20189 - protein, 484 aa, Synthetic construct
HHNGTNGTMMQYFEWYLPNDGNHWNRLRSDASNLKDKGITAVWIPPAWKGASQNDVGYGAYDLYDLGEFNQKGTVRTKYGTRNQLQAAVTALKSNGIQVYGDVVMNHKGGADATEWVRAVEVNPSNRNQEVSGDYTIEAWTKFDFPGRGNTHSNFKWRWYHFDGVDWDQSRQLQNKIYKFRGDGKEWDWEVDTENGNYDYLMYADIDMDHPEVVNELRNWGVWYTNTLGLDGFRIDAVKHIKYSFTRDWLEHVRNTTGKNMFAVAEFWKNDIGAIRNYLSKTNWNHSVFDVPLHYNLYNASRSGGNYDMRQIFNGTVVQRHPTHAVTFVDNHDSQPEEALESFVEEWFKPLAYALTLTRDQGYPSVFYGDYYGIPTHGVPAMKSKIDPILEARQKYAYGKQNDYMDHHNMIGWTREGNTAHPNSGLATIMSDGPGGNKWMYVGRNKAGQVWRDITGNRSGTVTINADGWGNFSVNGGSVSIWVN

SEQ ID NO: 20190 - protein, 484 aa, Synthetic construct
HHNGTNGTMMQYFEWYLPNDGNHWNRLRSDASNLKDKGITAVWIPPAWKGASQNDVGYGAYDLYDLGEFNQKGTVRTKYGTREQLQAAVTALKSNGIQVYGDVVMNHKGGADATEWVRAVEVNPSNRNQEVSGDYTIEAWTKFDFPGRGNTHSNFKWRWYHFDGVDWDQSRQLQNRIYKFRGDGKEWDWEVDTENGNYDYLMYADIDMDHPEVVNELRDWGVWYTRTLGLDGFRIDAVKHIKYSFTRDWLTHVRNTTGKNMFAVAEFWKNDIGAIENYLSKTNWNHSVFDVPLHYNLYNASRSGGNYDMRQIFNGTVVQRHPTHAVTFVDNHDSQPEEALESFVEEWFKPLAYALTLTRDQGYPSVFYGDYYGIPTHGVPAMKSKIDPILEARQKYAYGKQNDYLDHHNMIGWTREGNTAHPNSGLATIMSDGPGGNKWMYVGRNKAGQVWRDITGNRSGTVTINADGWGNFSVNGGSVSIWVN

SEQ ID NO: 20191 - protein, 484 aa, Synthetic construct
HHNQTNGTMMQYFEWYLPNDGNHWHRLRSDASNLKDKGITAVWIPPAWKGASQNDVGYGAYDLYDLGEFNQKGTVRTKYGTRNQLQAAVTALKSNGIQVYGDVVMNHKGGADATEWVRAVEVNPSNRNQEVSGDYTIEAWTKFDFPGRGNTHSNFKWRWYHFDGVDWDQSRQLQNKIYKFRGDGKGWDWEVDTENGNYDYLMYADYDMDHPEVVNELRNWGVWYTNTLGLDGFRIDAVKHIKYSFTRDWLTHVRNTTGKNMFAVAEFWKNDIGAIENYLSKTNWNHSVFDVPLHYNLYNASRSGGNYDMRQIFNGTVVQRHPGHAVTFVDNHDSQPEEALESFVEEWFKPLAYALTLTRDQGYPSVFYGDYYGIPTHGVPAMKSKIDPILEARQKYAYGKQNDYLDHHNMIGWTREGNTAHPNSGLATIMSDGPGGNKWMYVGRNKAGQVWRDITGNRSGTVTINADGWGNFSVNGGSVSIWVN

SEQ ID NO: 20192 - protein, 484 aa, Synthetic construct
HHNGTNGTMMQYFEWYLPNDGNHWHRLRSDASNLKDKGITAVWIPPAWKGASQNDVGYGAYDLYDLGEFNQKGTVRTKYGTRNQLQAAVTALKSNGIQVYGDVVMNHKGGADATEWVRAVEVNPSNRNQEVSGDYTIEAWTKFDFPGRGNTHSNFKWRWYHFDGVDWDQSRQLQNKIYKFRGDGKEWDWEVDTENGNYDYLMYADYDMDHPEVVNELRNWGVWYTNTLGLDGFRIDAVKHIKYSFTRDWLTHVRNTTGKNMFAVAEFWKNDIGAIENYLSKTNWNHSVFDVPLHYNLYNASRSGGNYDMRQIFNGTVVQRHPTHAVTFVDNHDSQPEEALESFVEEWFKPLAYALTLTRDQGYPSVFYGDYYGIPTHGVPAMKSKIDPILEARQKYAYGKQNDYLDHHNMIGWTREGNTAHPNSGLATIMSDGPGGNKWMYVGRNKAGQVWRDITGNRSGTVTINADGWGNFSVNGGSVSIWVN

SEQ ID NO: 20193 - protein, 484 aa, Synthetic construct
HHNGTNGTMMQYFEWYLPNDGNHWNRLRSDASNLKDKGITAVWIPPAWKGASQNDVGYGAYDLYDLGEFNQKGTVRTKYGTRNQLQAAVTALKSNGIQVYGDVVMNHKGGADATEWVRAVEVNPSNRNQEVSGDYTIEAWTKFDFPGRGNTHSNFKWRWYHFDGVDWDQSRQLQNKIYKFRGDGKEWDWEVDTENGNYDYLMYADYDMDHPEVVNELRNWGVWYTNTLGLDGFRIDAVKHIKYSFTRDWLTHVRNTTGKNMFAVAEFWKNDIGAIRNYLSKTNWNHSVFDVPLHYNLYNASRSGGNYDMRQIFNGTVVQRHPTHAVTFVDNHDSQPEEALESFVEEWFKPLAYALTLTRDQGYPSVFYGDYYGIPTHGVPAMKSKIDPILEARQKYAYGKQNDYLDHHNMIGWTREGNTAHPNSGLATIMSDGPGGNKWMYVGRNKAGQVWRDITGNRSGTVTINADGWGNFSVNGGSVSIWVN

SEQ ID NO: 20194 - protein, 484 aa, Synthetic construct
HHNGTNGTMMQYFEWYLPNDGNHWHRLRSDASNLKDKGITAVWIPPAWKGASQNDVGYGAYDLYDLGEFNQKGTVRTKYGTRNQLQAAVTALKSNGIQVYGDVVMNHKGGADATEWVRAVEVNPSNRNQEVSGDYTIEAWTKFDFPGRGNTHSNFKWRWYHFDGVDWDQSRQLQNKIYKFRDDGKEWDWEVDTENGNYDYLMYADYDMDHPEVVNELRNWGVWYTNTLGLDGFRIDAVKHIKYSFTRDWLTHVRNTTGKNMFAVAEFWKNDIGAIENYLSKTNWNHSVFDVPLHYNLYNASRSGGNYDMRQIFNGTVVQRHPTHAVTFVDNHDSQPEEALESFVEEWFKPLAYALTLTRDQGYPSVFYGDYYGIPTHGVPAMKSKIDPILEARQKYAYGKQNDYLDHHNMIGWTREGNTAHPNSGLATIMSDGPGGNKWMYVGRNKAGQVWRDITGNRSGTVTINADGWGNFSVNGGSVSIWVN

SEQ ID NO: 20195 - protein, 484 aa, Synthetic construct
HHNGTNGTMMQYFEWYLPNDGNHWNRLRSDASNLKDKGITAVWIPPAWKGASQNDVGYGAYDLYDLGEFNQKGTVRTKYGTRNQLQAAVTALKSNGIQVYGDVVMNHKGGADATEWVRAVEVNPSNRNQEVSGDYTIEAWTKFDFPGRGNTHSNFKWRWYHFDGVDWDQSRQLQNRIYKFRGDGKEWDWEVDTENGNYDYLMYADIDMDHPEVVNELRNWGVWYTNTLGLDGFRIDAVKHIKYSFTRDWLTHVRNTTGKNMFAVAEFWKNDIGAIENYLSKTNWNHSVFDVPLHYNLYNASRSGGNYDMRQIFEGTVVQRHPTHAVTFVDNHDSQPEEALESFVEEWFKPLAYALTLTRDQGYPSVFYGDYYGIPTHGVPAMKSKIDPILEARQKYAYGKQNDYLDHHNMIGWTREGNTAHPNSGLATIMSDGPGGNKWMYVGRNKAGQVWRDITGNRSDEVTINADGWGNFSVNGGSVSIWVN

SEQ ID NO: 20196 - protein, 484 aa, Synthetic construct
HHNQTNGTMMQYFEWYLPNDGNHWNRLRSDASNLKDKGITAVWIPPAWKGASQNDVGYGAYDLYDLGEFNQKGTVRTKYGTRNQLQAAVTALKSNGIQVYGDVVMNHKGGADATEWVRAVEVNPSNRNQEVSGDYTIEAWTKFDFPGRGNTHSNFKWRWYHFDGVDWDQSRQLQNKIYKFRGDGKEWDWEVDTENGNYDYLMYADIDMDHPEVVNELRNWGVWYTNTLGLDGFRIDAVKHIKYSFTRDWLTHVRNTTGKNMFAVAEFWKNDIGAIENYLSKTNWNHSVFDVPLHYNLYNASRSGGNYDMRQIFNGTVVQRHPGHAVTFVDNHDSQPEEALESFVEEWFKPLAYALTLTRDQGYPSVFYGDYYGIPTHGVPAMKSKIDPILEARQKYAYGKQNDYMDHHNMIGWTREGNTAHPNSGLATIMSDGPGGNKWMYVGRNKAGQVWRDITGNRSGTVTINADGWGNFSVNGGSVSIWVN

SEQ ID NO: 20197 - protein, 484 aa, Synthetic construct
HHNGTNGTMMQYFEWYLPNDGNHWNRLRSDASNLKDKGITAVWIPPAWKGASQNDVGYGAYDLYDLGEFNQKGTVRTKYGTRNQLQAAVTALKSNGIQVYGDVVMNHKGGADATEWVRAVEVNPSNRNQEVSGDYTIEAWTKFDFPGRGNTHSNFKWRWYHFDGVDWDQSRQLQNRIYKFRGDGKEWDWEVDEENGNYDYLMYADYDMDHPEVVNELRNWGVWYTNTLGLDGFRIDAVKHIKYSFTRDWLTHVRNTTGKNMFAVAEFWKNDIGAIENYLSKTNWNHSVFDVPLHYNLYNASRSGGNYDMRQIFNGTVVQRHPTHAVTFVDNHDSQPEEALESFVEEWFKPLAYALTLTRDQGYPSVFYGDYYGIPTHGVPAMKSKIDPILEARQKYAYGKQNDYMDHHNMIGWTREGNTAHPNSGLATIMSDGPGGNKWMYVGRNKAGQVWRDITGNRSGTVTINADGWGNFSVNGGSVSIWVN

SEQ ID NO: 20198 - protein, 484 aa, Synthetic construct
HHNQTNGTMMQYFEWYLPNDGNHWNRLRSDASNLKDKGITAVWIPPAWKGASQNDVGYGAYDLYDLGEFNQKGTVRTKYGTRNQLQAAVTALKSNGIQVYGDVVMNHKGGADATEWVRAVEVNPSNRNQEVSGDYTIEAWTKFDFPGRGNTHSNFKWRWWHFDGVDWDQSRQLQNRIYKFRGDGKEWDWEVDTENGNYDYLMYADIDMDHPEVVNELRNWGVWYTNTLGLDGFRIDAVKHIKYSFTRDWLEHVRNTTGKNMFAVAEFWKNDIGAIENYLSKTNWNHSVFDVPLHYNLYNASRSGGNYDMRQIFNGTVVQRHPTHAVTFVDNHDSQPEEALESFVEEWFKPLAYALTLTRDQGYPSVFYGDYYGIPTHGVPAMKSKIDPILEARQKYAYGKQNDYMDHHNMIGWTREGNTAHPNSGLATIMSDGPGGNKWMYVGRNKAGQVWRDITGNRSGTVTINADGWGNFSVNGGSVSIWVN

SEQ ID NO: 20199 - protein, 484 aa, Synthetic construct
HHNGTNGTMMQYFEWYLPNDGNHWNRLRSDASNLKDKGITAVWIPPAWKGASQNDVGYGAYDLYDLGEFNQKGTVRTKYGTRNQLQAAVTALKSNGIQVYGDVVMNHKGGADATEWVRAVEVNPSNRNQEVSGDYTIEAWTKFDFPGRGNTHSNFKWRWWHFDGVDWDQSRQLQNRIYKFRGDGKEWDWEVDTENGNYDYLMYADYDMDHPEVVNELRNWGVWYTNTLGLDGFRIDAVKHIKYSFTRDWLTHVRNTTGKNMFAVAEFWKNDIGAIRNYLSKTNWNHSVFDVPLHYNLYNASRSGGNYDMRQIFNGTVVQRHPTHAVTFVDNHDSQPEEALESFVEEWFKPLAYALTLTRDQGYPSVFYGDYYGIPTHGVPAMKSKIDPILEARQKYAYGKQNDYLDHHNMIGWTREGNTAHPNSGLATIMSDGPGGNKWMYVGRNKAGQVWRDITGNRSGTVTINADGWGNFSVNGGSVSIWVN

SEQ ID NO: 20200 - protein, 484 aa, Synthetic construct
HHNGTNGTMMQYFEWYLPNDGNHWHRLRSDASNLKDKGITAVWIPPAWKGASQNDVGYGAYDLYDLGEFNQKGTVRTKYGTRNQLQAAVTALKSNGIQVYGDVVMNHKGGADATEWVRAVEVNPSNRNQEVSGDYTIEAWTKFDFPGRGNTHSNFKWRWYHFDGVDWDQSRQLQNRIYKFRGDGKEWDWEVDTENGNYDYLMYADYDMDHPEVVNELRNWGVWYTNTLGLDGFRIDAVKHIKYSFTRDWLTHVRNTTGKNMFAVAEFWKNDIGAIENYLSKTNWNHSVFDVPLHYNLYNASRSGGNYDMRQIFNGTVVQRHPTHAVTFVDNHDSQPEEALESFVEEWFKPLAYALTLTRDQGYPSVFYGDYYGIPTHGVPAMKSKIDPILEARQKYAYGKQNDYMDHHNMIGWTREGNTAHPNSGLATIMSDGPGGNKWMYVGRNKAGQVWRDITGNRSGTVTINADGWGNFSVNGGSVSIWVN

SEQ ID NO: 20201 - protein, 484 aa, Synthetic construct
HHNQTNGTMMQYFEWYLPNDGNHWNRLRSDASNLKDKGITAVWIPPAWKGASQNDVGYGAYDLYDLGEFNQKGTVRTKYGTRNQLQAAVTALKSNGIQVYGDVVMNHKGGADATEWVRAVEVNPSNRNQEVSGDYTIEAWTKFDFPGRGNTHSNFKWRWWHFDGVDWDQSRQLQNRIYKFRGDGKEWDWEVDTENGNYDYLMYADYDMDHPEVVNELRNWGVWYTNTLGLDGFRIDAVKHIKYSFTRDWLEHVRNTTGKNMFAVAEFWKNDIGAIENYLSKTNWNHSVFDVPLHYNLYNASRSGGNYDMRQIFNGTVVQRHPTHAVTFVDNHDSQPEEALESFVEEWFKPLAYALTLTRDQGYPSVFYGDYYGIPTHGVPAMKSKIDPILEARQKYAYGKQNDYLDHHNMIGWTREGNTAHPNSGLATIMSDGPGGNKWMYVGRNKAGQVWRDITGNRSGTVTINADGWGNFSVNGGSVSIWVN

SEQ ID NO: 20202 - protein, 484 aa, Synthetic construct
HHNGTNGTMMQYFEWYLPNDGNHWNRLRSDASNLKDKGITAVWIPPAWKGASQNDVGYGAYDLYDLGEFNQKGTVRTKYGTRNQLQAAVTALKSNGIQVYGDVVMNHKGGADATEWVRAVEVNPSNRNQEVSGDYTIEAWTKFDFPGRGNTHSNFKWRWYHFDGVDWDQSRQLQNRIYKFRGDGKEWDWEVDTENGNYDYLMYADIDMDHPEVVNELRNWGVWYTNTLGLDGFRIDAVKHIKYSFTRDWLTHVRNTTGKNMFAVAEFWKNDIGAIENYLSKTNWNHSVFDVPLHYNLYNASRSGGNYDMRQIFKGTVVQRHPTHAVTFVDNHDSQPEEALESFVEEWFKPLAYALTLTRDQGYPSVFYGDYYGIPTHGVPAMKSKIDPILEARQKYAYGKQNDYLDHHNMIGWTREGNTAHPNSGLATIMSDGPGGNKWMYVGRNKAGQRWRDITGNRSDTVTINADGWGNFSVNGGSVSIWVN

SEQ ID NO: 20203 - protein, 484 aa, Synthetic construct
HHNQTNGTMMQYFEWYLPNDGNHWNRLRSDASNLKDKGITAVWIPPAWKGASQNDVGYGAYDLYDLGEFNQKGTVRTKYGTRNQLQAAVTALKSNGIQVYGDVVMNHKGGADATEWVRAVEVNPSNRNQEVSGDYTIEAWTKFDFPGRGNTHSNFKWRWWHFDGVDWDQSRQLQNRIYKFRGDGKEWDWEVDTENGNYDYLMYADYDMDHPEVVNELRNWGVWYTNTLGLDGFRIDAVKHIKYSFTRDWLTHVRNTTGKNMFAVAEFWKNDIGAIENYLSKTNWNHSVFDVPLHYNLYNASRSGGNYDMRQIFNGTVVQRHPTHAVTFVDNHDSQPEEALESFVEEWFKPLAYALTLTRDQGYPSVFYGDYYGIPTHGVPAMKSKIDPILEARQKYAYGKQNDYLDHHNMIGWTREGNTAHPNSGLATIMSDGPGGNKWMYVGRNKAGQVWRDITGNRSGTVTINADGWGNFSVNGGSVSIWVN

SEQ ID NO: 20204 - protein, 484 aa, Synthetic construct
HHNGTNGTMMQYFEWYLPNDGNHWNRLRSDASNLKDKGITAVWIPPAWKGASQNDVGYGAYDLYDLGEFNQKGTVRTKYGTRNQLQRAVTALKSNGIQVYGDVVMNHKGGADATEWVRAVEVNPSNRNQEVSGDYTIEAWTKFDFPGRGNTHSNFKWRWYHFDGVDWDQSRQLQNRIYKFRGDGKEWDWEVDTENGNYDYLMYADIDMDHPEVVNELRNWGVWYTNTLGLDGFRIDAVKHIKYSFTRDWLTHVRNTTGKNMFAVAEFWKNDIGAIENYLSKTNWNHSVFDVPLHYNLYNASRSGGNYDMRQIFNKTVVQRHPTHAVTFVDNHDSQPEEALESFVEEWFKPLAYALTLTRDQGYPSVFYGDYYGIPTHGVPAMKSKIDPILEARQKYAYGKQNDYLDHHNMIGWTREGNTAHPNSGLATIMSDGPGGNKWMYVGRNKAGQVWRDITGNRSGRVTINADGWGNFSVNGGSVSIWVN

SEQ ID NO: 20205 - protein, 484 aa, Synthetic construct
HHNGTNGTMMQYFEWYLPNDGNHWNRLRSDASNLKDKGITAVWIPPAWKGASQNDVGYGAYDLYDLGEFNQKGTVRTKYGTRNQLQDAVTALKSNGIQVYGDVVMNHKGGADATEWVRAVEVNPSNRNQEVSGDYTIEAWTKFDFPGRGNTHSNFKWRWYHFDGVDWDQSRQLQNRIYKFRGDGKEWDWEVDTENGNYDYLMYADIDMDHPEVVNELRNWGVWYTDTLGLDGFRIDAVKHIKYSFTRDWLTHVRNTTGKNMFAVAEFWKNDIGAIENYLSKTNWNHSVFDVPLHYNLYNASRSGGNYDMRQIFNGTVVQRHPTHAVTFVDNHDSQPEEALESFVEEWFKPLAYALTLTRDQGYPSVFYGDYYGIPTHGVPAMKSKIDPILEARQKYAYGKQNDYLDHHNMIGWTREGNTEHPNSGLATIMSDGPGGNKWMYVGRNKAGQVWRDITGNRSGTVTINADGWGNFSVNGGSVSIWVN

SEQ ID NO: 20206 - protein, 484 aa, Synthetic construct
HHNGTNGTMMQYFEWYLPNDGNHWHRLRSDASNLKDKGITAVWIPPAWKGASQNDVGYGAYDLYDLGEFNQKGTVRTKYGTRNQLQAAVTALKSNGIQVYGDVVMNHKGGADATEWVRAVEVNPSNRNQEVSGDYTIEAWTKFDFPGRGNTHSNFKWRWWHFDGVDWDQSRQLQNRIYKFRGDGKEWDWEVDTENGNYDYLMYADYDMDHPEVVNELRNWGVWYTNTLGLDGFRIDAVKHIKYSFTRDWLTHVRNTTGKNMFAVAEFWKNDIGAIENYLSKTNWNHSVFDVPLHYNLYNASRSGGNYDMRQIFNGTVVQRHPTHAVTFVDNHDSQPEEALESFVEEWFKPLAYALTLTRDQGYPSVFYGDYYGIPTHGVPAMKSKIDPILEARQKYAYGKQNDYLDHHNMIGWTREGNTAHPNSGLATIMSDGPGGNKWMYVGRNKAGQVWRDITGNRSGTVTINADGWGNFSVNGGSVSIWVN

SEQ ID NO: 20207 - protein, 484 aa, Synthetic construct
HHNGTNGTMMQYFEWYLPNDGNHWNRLRSDASNLKDKGITAVWIPPAWKGASQNDVGYGAYDLYDLGEFNQKGTVRTKYGTRNQLQAAVTALKSNGIQVYGDVVMNHKGGADATEWVRAVEVNPSNRNQEVSGDYTIEAWTKFDFPGRGNTHSNFKWRWDHFDGVDWDQSRQLQNRIYKFRGDGKEWDWEVDTENGNYDYLMYADIDMDHPEVVNELRNWGVWYTNTLGLDGFRIDAVKHIKYSFTRDWLTHVRNTTGKNMFAVAEFWKNDIGAIENYLSKTNWNHSVFDVPLHYNLYNASRSGGNYDMRQIFNGTVVQRHPTHAVTFVDNHDSQPEEALESFVEEWFKPLAYALTLTRDQGYPSVFYGDYYGIPTHGVPAMKSKIDPILEARQKYAYGKQNDYLDHHNMIGWTREGNTKHPNSGLATIMSDGPGGNKWMYVGRNKAGQVWRDITGNRSDTVTINADGWGNFSVNGGSVSIWVN

SEQ ID NO: 20208 - protein, 484 aa, Synthetic construct
HHNGTNGTMMQYFEWYLPNDGNHWNRLRSDASNLKDKGITAVWIPPAWKGASQNDVGYGAYDLYDLGEFNQKGTVRTKYGTRNQLQAAVTALKSNGIQVYGDVVMNHKGGADATEWVRAVEVNPSNRNQEVSGDYTIEAWTKFDFPGRGNTHSNFKWRWYHFDGVDWDQSRQLQNKIYKFRGDGKEWDWEVDTENGNYDYLMYADYDMDHPEVVNELRNWGVWYTNTLGLDGFRIDAVKHIKYSFTRDWLEHVRNTTGKNMFAVAEFWKNDIGAIENYLSKTNWNHSVFDVPLHYNLYNASRSGGNYDMRQIFNGTVVQRHPTHAVTFVDNHDSQPEEALESFVEEWFKPLAYALTLTRDQGYPSVFYGDYYGIPTHGVPAMKSKIDPILEARQKYAYGKQNDYMDHHNMIGWTREGNTAHPNSGLATIMSDGPGGNKWMYVGRNKAGQVWRDITGNRSGTVTINADGWGNFSVNGGSVSIWVN

SEQ ID NO: 20209 - protein, 484 aa, Synthetic construct
HHNGTNGTMMQYFEWYLPNDGNHWHRLRSDASNLKDKGITAVWIPPAWKGASQNDVGYGAYDLYDLGEFNQKGTVRTKYGTRNQLQAAVTALKSNGIQVYGDVVMNHKGGADATEWVRAVEVNPSNRNQEVSGDYTIEAWTKFDFPGRGNTHSNFKWRWYHFDGVDWDQSRQLQNKIYKFRGDGKGWDWEVDTENGNYDYLMYADYDMDHPEVVNELRNWGVWYTNTLGLDGFRIDAVKHIKYSFTRDWLTHVRNTTGKNMFAVAEFWKNDIGAIENYLSKTNWNHSVFDVPLHYNLYNASRSGGNYDMRQIFNGTVVQRHPTHAVTFVDNHDSQPEEALESFVEEWFKPLAYALTLTRDQGYPSVFYGDYYGIPTHGVPAMKSKIDPILEARQKYAYGKQNDYMDHHNMIGWTREGNTAHPNSGLATIMSDGPGGNKWMYVGRNKAGQVWRDITGNRSGTVTINADGWGNFSVNGGSVSIWVN

SEQ ID NO: 20210 - protein, 484 aa, Synthetic construct
HHNGTNGTMMQYFEWYLPNDGNHWNRLRSDASNLKDKGITAVWIPPAWKGASQNDVGYGAYDLYDLGEFNQKGTVRTKYGTRNQLQDAVTALKSNGIQVYGDVVMNHKGGADATEWVRAVEVNPSNRNQEVSGDYTIEAWTKFDFPGRGNTHSNFKWRWYHFDGVDWDQSRQLQNRIYKFRGDGKEWDWEVDTENGNYDYLMYADIDMDHPEVVNELRNWGVWYTNTLGLDGFRIDAVKHIKYSFTRDWLTHVRNTTGKNMFAVAEFWKNDIGAIENYLSKTNWNHSVFDVPLHYNLYNASRSGGNYDMRQIFEGTVVQRHPTHAVTFVDNHDSQPEEALESFVEEWFKPLAYALTLTRDQGYPSVFYGDYYGIPTHGVPAMKSKIDPILEARQKYAYGKQNDYLDHHNMIGWTREGNTAHPNSGLATIMSDGPGGNKWMYVGRNKAGQVWRDITGNRSGTVTINADGWGEFSVNGGSVSIWVN

SEQ ID NO: 20211 - protein, 484 aa, Synthetic construct
HHNGTNGTMMQYFEWYLPNDGNHWNRLRSDASNLKDKGITAVWIPPAWKGASQNDVGYGAYDLYDLGEFNQKGTVRTKYGTRNQLQAAVTALKSNGIQVYGDVVMNHKGGADATEWVRAVEVNPSNRNQEVSGDYTIEAWTKFDFPGRGNTHSNFKWRWYHFDGVDWDQSRQLQNRIYKFRGDGKEWDWEVDTENGNYDYLMYADIDMDHPEVVNELRNWGVWYTDTLGLDGFRIDAVKHIKYSFTRDWLTHVRNTTGKNMFAVAEFWKNDIGAIENYLSKTNWNHSVFDVPLHYNLYNASRSGGNYDMRKIFNGTVVQRHPTHAVTFVDNHDSQPEEALESFVEEWFKPLAYALTLTRDQGYPSVFYGDYYGIPTHGVPAMKSKIDPILEARQKYAYGKQNDYLDHHNMIGWTREGNTAHPNSGLATIMSDGPGGNKWMYVGRNKAGQVWRDITGNRSDTVTINADGWGNFSVNGGSVSIWVN

SEQ ID NO: 20212 - protein, 484 aa, Synthetic construct
HHNQTNGTMMQYFEWYLPNDGNHWNRLRSDASNLKDKGITAVWIPPAWKGASQNDVGYGAYDLYDLGEFNQKGTVRTKYGTRNQLQAAVTALKSNGIQVYGDVVMNHKGGADATEWVRAVEVNPSNRNQEVSGDYTIEAWTKFDFPGRGNTHSNFKWRWYHFDGVDWDQSRQLQNKIYKFRGDGKEWDWEVDTENGNYDYLMYADIDMDHPEVVNELRNWGVWYTNTLGLDGFRIDAVKHIKYSFTRDWLTHVRNTTGKNMFAVAEFWKNDIGAIENYLSKTNWNHSVFDVPLHYNLYNASRSGGNYDMRQIFNGTVVQRHPTHAVTFVDNHDSQPEEALESFVEEWFKPLAYALTLTRDQGYPSVFYGDYYGIPTHGVPAMKSKIDPILEARQKYAYGKQNDYMDHHNMIGWTREGNTAHPNSGLATIMSDGPGGNKWMYVGRNKAGQVWRDITGNRSGTVTINADGWGNFSVNGGSVSIWVN

SEQ ID NO: 20213 - protein, 484 aa, Synthetic construct
HHNQTNGTMMQYFEWYLPNDGNHWHRLRSDASNLKDKGITAVWIPPAWKGASQNDVGYGAYDLYDLGEFNQKGTVRTKYGTRNQLQAAVTALKSNGIQVYGDVVMNHKGGADATEWVRAVEVNPSNRNQEVSGDYTIEAWTKFDFPGRGNTHSNFKWRWYHFDGVDWDQSRQLQNKIYKFRGDGKGWDWEVDTENGNYDYLMYADYDMDHPEVVNELRNWGVWYTNTLGLDGFRIDAVKHIKYSFTRDWLTHVRNTTGKNMFAVAEFWKNDIGAIENYLSKTNWNHSVFDVPLHYNLYNASRSGGNYDMRQIFNGTVVQRHPTHAVTFVDNHDSQPEEALESFVEEWFKPLAYALTLTRDQGYPSVFYGDYYGIPTHGVPAMKSKIDPILEARQKYAYGKQNDYLDHHNMIGWTREGNTAHPNSGLATIMSDGPGGNKWMYVGRNKAGQVWRDITGNRSGTVTINADGWGNFSVNGGSVSIWVN

SEQ ID NO: 20214 - protein, 484 aa, Synthetic construct
HHNGTNGTMMQYFEWYLPNDGNHWNRLRSDASNLKDKGITAVWIPPAWKGASQNDVGYGAYDLYDLGEFNQKGTVRTKYGTRNQLQAAVTALKSNGIQVYGDVVMNHKGGADATEWVRAVEVNPSNRNQEVSGDYTIEAWTKFDFPGRGNTHSNFKWRWYHFDGVDWDQSRQLQNKIYKFRGDGKEWDWEVDTENGNYDYLMYADYDMDHPEVVNELRNWGVWYTNTLGLDGFRIDAVKHIKYSFTRDWLTHVRNTTGKNMFAVAEFWKNDIGAIENYLSKTNWNHSVFDVPLHYNLYNASRSGGNYDMRQIFNGTVVQRHPTHAVTFVDNHDSQPEEALESFVEEWFKPLAYALTLTRDQGYPSVFYGDYYGIPTHGVPAMKSKIDPILEARQKYAYGKQNDYMDHHNMIGWTREGNTAHPNSGLATIMSDGPGGNKWMYVGRNKAGQVWRDITGNRSGTVTINADGWGNFSVNGGSVSIWVN

SEQ ID NO: 20215 - protein, 484 aa, Synthetic construct
HHNQTNGTMMQYFEWYLPNDGNHWNRLRSDASNLKDKGITAVWIPPAWKGASQNDVGYGAYDLYDLGEFNQKGTVRTKYGTRNQLQAAVTALKSNGIQVYGDVVMNHKGGADATEWVRAVEVNPSNRNQEVSGDYTIEAWTKFDFPGRGNTHSNFKWRWYHFDGVDWDQSRQLQNRIYKFRGDGKEWDWEVDTENGNYDYLMYADIDMDHPEVVNELRNWGVWYTNTLGLDGFRIDAVKHIKYSFTRDWLEHVRNTTGKNMFAVAEFWKNDIGAIRNYLSKTNWNHSVFDVPLHYNLYNASRSGGNYDMRQIFNGTVVQRHPTHAVTFVDNHDSQPEEALESFVEEWFKPLAYALTLTRDQGYPSVFYGDYYGIPTHGVPAMKSKIDPILEARQKYAYGKQNDYMDHHNMIGWTREGNTAHPNSGLATIMSDGPGGNKWMYVGRNKAGQVWRDITGNRSGTVTINADGWGNFSVNGGSVSIWVN

SEQ ID NO: 20216 - protein, 484 aa, Synthetic construct
HHNGTNGTMMQYFEWYLPNDGNHWNRLRSDASNLKDKGITAVWIPPAWKGASQNDVGYGAYDLYDLGEFNQKGTVRTKYGTRNQLQAAVTALKSNGIQVYGDVVMNHKGGADATEWVRAVEVNPSNRNQEVSGDYTIEAWTKFDFPGRGNTHSNFKWRWYHFDGVDWDQSRQLQNRIYKFRGDGKEWDWEVDTENGNYDYLMYADIDMDHPEVVNELRNWGVWYTNTLGLDGFRIDAVKHIKYSFTRDWLTHVRNTTGKNMFAVAEFWKNDIGAIENYLSKTNWNHSVFDVPLHYNLYNASRSGGNYDMRQIFEGTVVQRHPTHAVTFVDNHDSQPEEALESFVEEWFKPLAYALTLTRDQGYPSVFYGDYYGIPTHGVPAMKSKIDPILEARQKYAYGKQNDYLDHHNMIGWTREGNTEHPNSGLATIMSDGPGGNKWMYVGRNKAGQVWRDITGNRSGEVTINADGWGNFSVNGGSVSIWVN

SEQ ID NO: 20217 - protein, 484 aa, Synthetic construct
HHNGTNGTMMQYFEWYLPNDGNHWHRLRSDASNLKDKGITAVWIPPAWKGASQNDVGYGAYDLYDLGEFNQKGTVRTKYGTRNQLQAAVTALKSNGIQVYGDVVMNHKGGADATEWVDAVEVNPSNRNQEVSGDYTIEAWTKFDFPGRGNTHSNFKWRWYHFDGVDWDQSRQLQNKIYKFRGDGKEWDWEVDTENGNYDYLMYADYDMDHPEVVNELRNWGVWYTNTLGLDGFRIDAVKHIKYSFTRDWLTHVRNTTGKNMFAVAEFWKNDIGAIENYLSKTNWNHSVFDVPLHYNLYNASRSGGNYDMRQIFNGTVVQRHPTHAVTFVDNHDSQPEEALESFVEEWFKPLAYALTLTRDQGYPSVFYGDYYGIPTHGVPAMKSKIDPILEARQKYAYGKQNDYLDHHNMIGWTREGNTAHPNSGLATIMSDGPGGNKWMYVGRNKAGQVWRDITGNRSGTVTINADGWGNFSVNGGSVSIWVN

SEQ ID NO: 20218 - protein, 484 aa, Synthetic construct
HHNQTNGTMMQYFEWYLPNDGNHWHRLRSDASNLKDKGITAVWIPPAWKGASQNDVGYGAYDLYDLGEFNQKGTVRTKYGTRNQLQAAVTALKSNGIQVYGDVVMNHKGGADATEWVRAVEVNPSNRNQEVSGDYTIEAWTKFDFPGRGNTHSNFKWRWYHFDGVDWDQSRQLQNRIYKFRGDGKEWDWEVDTENGNYDYLMYADYDMDHPEVVNELRNWGVWYTNTLGLDGFRIDAVKHIKYSFTRDWLTHVRNTTGKNMFAVAEFWKNDIGAIENYLSKTNWNHSVFDVPLHYNLYNASRSGGNYDMRQIFNGTVVQRHPTHAVTFVDNHDSQPEEALESFVEEWFKPLAYALTLTRDQGYPSVFYGDYYGIPTHGVPAMKSKIDPILEARQKYAYGKQNDYLDHHNMIGWTREGNTAHPNSGLATIMSDGPGGNKWMYVGRNKAGQVWRDITGNRSGTVTINADGWGNFSVNGGSVSIWVN

SEQ ID NO: 20219 - protein, 484 aa, Synthetic construct
HHNQTNGTMMQYFEWYLPNDGNHWHRLRSDASNLKDKGITAVWIPPAWKGASQNDVGYGAYDLYDLGEFNQKGTVRTKYGTRNQLQAAVTALKSNGIQVYGDVVMNHKGGADATEWVRAVEVNPSNRNQEVSGDYTIEAWTKFDFPGRGNTHSNFKWRWYHFDGVDWDQSRQLQNRIYKFRGDGKEWDWEVDTENGNYDYLMYADIDMDHPEVVNELRNWGVWYTNTLGLDGFRIDAVKHIKYSFTRDWLTHVRNTTGKNMFAVAEFWKNDIGAIENYLSKTNWNHSVFDVPLHYNLYNASRSGGNYDMRQIFNGTVVQRHPTHAVTFVDNHDSQPEEALESFVEEWFKPLAYALTLTRDQGYPSVFYGDYYGIPTHGVPAMKSKIDPILEARQKYAYGKQNDYMDHHNMIGWTREGNTAHPNSGLATIMSDGPGGNKWMYVGRNKAGQVWRDITGNRSGTVTINADGWGNFSVNGGSVSIWVN

SEQ ID NO: 20220 - protein, 484 aa, Synthetic construct
HHNQTNGTMMQYFEWYLPNDGNHWNRLRSDASNLKDKGITAVWIPPAWKGASQNDVGYGAYDLYDLGEFNQKGTVRTKYGTRNQLQAAVTALKSNGIQVYGDVVMNHKGGADATEWVRAVEVNPSNRNQEVSGDYTIEAWTKFDFPGRGNTHSNFKWRWYHFDGVDWDQSRQLQNRIYKFRGDGKEWDWEVDTENGNYDYLMYADYDMDHPEVVNELRNWGVWYTNTLGLDGFRIDAVKHIKYSFTRDWLEHVRNTTGKNMFAVAEFWKNDIGAIENYLSKTNWNHSVFDVPLHYNLYNASRSGGNYDMRQIFNGTVVQRHPTHAVTFVDNHDSQPEEALESFVEEWFKPLAYALTLTRDQGYPSVFYGDYYGIPTHGVPAMKSKIDPILEARQKYAYGKQNDYMDHHNMIGWTREGNTAHPNSGLATIMSDGPGGNKWMYVGRNKAGQVWRDITGNRSGTVTINADGWGNFSVNGGSVSIWVN

SEQ ID NO: 20221 - protein, 484 aa, Synthetic construct
HHNGTNGTMMQYFEWYLPNDGNHWHRLRSDASNLKDKGITAVWIPPAWKGASQNDVGYGAYDLYDLGEFNQKGTVRTKYGTRNQLQAAVTALKSNGIQVYGDVVMNHKGGADATEWVRAVEVNPSNRNQEVSGDYTIEAWTKFDFPGRGNTHSNFKWRWWHFDGVDWDQSRQLQNKIYKFRGDGKEWDWEVDTENGNYDYLMYADIDMDHPEVVNELRNWGVWYTNTLGLDGFRIDAVKHIKYSFTRDWLEHVRNTTGKNMFAVAEFWKNDIGAIENYLSKTNWNHSVFDVPLHYNLYNASRSGGNYDMRQIFNGTVVQRHPTHAVTFVDNHDSQPEEALESFVEEWFKPLAYALTLTRDQGYPSVFYGDYYGIPTHGVPAMKSKIDPILEARQKYAYGKQNDYLDHHNMIGWTREGNTAHPNSGLATIMSDGPGGNKWMYVGRNKAGQVWRDITGNRSGTVTINADGWGNFSVNGGSVSIWVN

SEQ ID NO: 20222 - protein, 484 aa, Synthetic construct
HHNGTNGTMMQYFEWYLPNDGNHWNRLRSDASNLKDKGITAVWIPPAWKGASQNDVGYGAYDLYDLGEFNQKGTVRTKYGTRNQLQAAVTALKSNGIQVYGDVVMNHKGGADATEWVRAVEVNPSNRNQEVSGDYTIEAWTKFDFPGRGNTHSNFKWRWYHFDGVDWDQSRQLQNKIYKFRGDGKEWDWEVDEENGNYDYLMYADIDMDHPEVVNELRNWGVWYTNTLGLDGFRIDAVKHIKYSFTRDWLTHVRNTTGKNMFAVAEFWKNDIGAIENYLSKTNWNHSVFDVPLHYNLYNASRSGGNYDMRQIFNGTVVQRHPTHAVTFVDNHDSQPEEALESFVEEWFKPLAYALTLTRDQGYPSVFYGDYYGIPTHGVPAMKSKIDPILEARQKYAYGKQNDYMDHHNMIGWTREGNTAHPNSGLATIMSDGPGGNKWMYVGRNKAGQVWRDITGNRSGTVTINADGWGNFSVNGGSVSIWVN

SEQ ID NO: 20223 - protein, 484 aa, Synthetic construct
HHNGTNGTMMQYFEWYLPNDGNHWNRLRSDASNLKDKGITAVWIPPAWKGASQNDVGYGAYDLYDLGEFNQKGTVRTKYGTRNQLQAAVTALKSNGIQVYGDVVMNHKGGADATEWVRAVEVNPSNRNQEVSGDYTIEAWTKFDFPGRGNTHSNFKWRWWHFDGVDWDQSRQLQNKIYKFRGDGKEWDWEVDTENGNYDYLMYADYDMDHPEVVNELRNWGVWYTNTLGLDGFRIDAVKHIKYSFTRDWLTHVRNTTGKNMFAVAEFWKNDIGAIENYLSKTNWNHSVFDVPLHYNLYNASRSGGNYDMRQIFNGTVVQRHPTHAVTFVDNHDSQPEEALESFVEEWFKPLAYALTLTRDQGYPSVFYGDYYGIPTHGVPAMKSKIDPILEARQKYAYGKQNDYLDHHNMIGWTREGNTAHPNSGLATIMSDGPGGNKWMYVGRNKAGQVWRDITGNRSGTVTINADGWGNFSVNGGSVSIWVN

SEQ ID NO: 20224 - protein, 484 aa, Synthetic construct
HHNGTNGTMMQYFEWYLPNDGNHWHRLRSDASNLKDKGITAVWIPPAWKGASQNDVGYGAYDLYDLGEFNQKGTVRTKYGTRNQLQAAVTALKSNGIQVYGDVVMNHKGGADATEWVRAVEVNPSNRNQEVSGDYTIEAWTKFDFPGRGNTHSNFKWRWWHFDGVDWDQSRQLQNKIYKFRGDGKGWDWEVDTENGNYDYLMYADYDMDHPEVVNELRNWGVWYTNTLGLDGFRIDAVKHIKYSFTRDWLTHVRNTTGKNMFAVAEFWKNDIGAIENYLSKTNWNHSVFDVPLHYNLYNASRSGGNYDMRQIFNGTVVQRHPTHAVTFVDNHDSQPEEALESFVEEWFKPLAYALTLTRDQGYPSVFYGDYYGIPTHGVPAMKSKIDPILEARQKYAYGKQNDYLDHHNMIGWTREGNTAHPNSGLATIMSDGPGGNKWMYVGRNKAGQVWRDITGNRSGTVTINADGWGNFSVNGGSVSIWVN

SEQ ID NO: 20225 - protein, 484 aa, Synthetic construct
HHNGTNGTMMQYFEWYLPNDGNHWHRLRSDASNLKDKGITAVWIPPAWKGASQNDVGYGAYDLYDLGEFNQKGTVRTKYGTRNQLQAAVTALKSNGIQVYGDVVMNHKGGADATEWVRAVEVNPSNRNQEVSGDYTIEAWTKFDFPGRGNTHSNFKWRWYHFDGVDWDQSRQLQNKIYKFRGDGKEWDWEVDTENGNYDYLMYADIDMDHPEVVNELRNWGVWYTNTLGLDGFRIDAVKHIKYSFTRDWLEHVRNTTGKNMFAVAEFWKNDIGAIRNYLSKTNWNHSVFDVPLHYNLYNASRSGGNYDMRQIFNGTVVQRHPTHAVTFVDNHDSQPEEALESFVEEWFKPLAYALTLTRDQGYPSVFYGDYYGIPTHGVPAMKSKIDPILEARQKYAYGKQNDYLDHHNMIGWTREGNTAHPNSGLATIMSDGPGGNKWMYVGRNKAGQVWRDITGNRSGTVTINADGWGNFSVNGGSVSIWVN

SEQ ID NO: 20226 - protein, 484 aa, Synthetic construct
HHNGTNGTMMQYFEWYLPNDGNHWNRLRSDASNLKDKGITAVWIPPAWKGASQNDVGYGAYDLYDLGEFNQKGTVRTKYGTRNQLQAAVTALKSNGIQVYGDVVMNHKGGADATEWVRAVEVNPSNRNQEVSGDYTIEAWTKFDFPGRGNTHSNFKWRWWHFDGVDWDQSRQLQNKIYKFRGDGKGWDWEVDTENGNYDYLMYADYDMDHPEVVNELRNWGVWYTNTLGLDGFRIDAVKHIKYSFTRDWLTHVRNTTGKNMFAVAEFWKNDIGAIENYLSKTNWNHSVFDVPLHYNLYNASRSGGNYDMRQIFNGTVVQRHPGHAVTFVDNHDSQPEEALESFVEEWFKPLAYALTLTRDQGYPSVFYGDYYGIPTHGVPAMKSKIDPILEARQKYAYGKQNDYMDHHNMIGWTREGNTAHPNSGLATIMSDGPGGNKWMYVGRNKAGQVWRDITGNRSGTVTINADGWGNFSVNGGSVSIWVN

SEQ ID NO: 20227 - protein, 484 aa, Synthetic construct
HHNGTNGTMMQYFEWYLPNDGNHWNRLRSDASNLKDKGITAVWIPPAWKGASQNDVGYGAYDLYDLGEFNQKGTVRTKYGTRNQLQRAVTALKSNGIQVYGDVVMNHKGGADATEWVRAVEVNPSNRNQEVSGDYTIEAWTKFDFPGRGNTHSNFKWRWYHFDGVDWDQSRQLQNRIYKFRGDGKEWDWEVDTENGNYDYLMYADIDMDHPEVVNELRNWGVWYTDTLGLDGFRIDAVKHIKYSFTRDWLTHVRNTTGKNMFAVAEFWKNDIGAIENYLSKTNWNHSVFDVPLHYNLYNASRSGGNYDMRQIFNGTVVQRHPTHAVTFVDNHDSQPEEALESFVEEWFKPLAYALTLTRDQGYPSVFYGDYYGIPTHGVPAMKSKIDPILEARQKYAYGKQNDYLDHHNMIGWTREGNTAHPNSGLATIMSDGPGGNKWMYVGRNKAGQVWRDITGNRSGTVTINADGWGEFSVNGGSVSIWVN

SEQ ID NO: 20228 - protein, 484 aa, Synthetic construct
HHNGTNGTMMQYFEWYLPNDGNHWHRLRSDASNLKDKGITAVWIPPAWKGASQNDVGYGAYDLYDLGEFNQKGTVRTKYGTRNQLQAAVTALKSNGIQVYGDVVMNHKGGADATEWVRAVEVNPSNRNQEVSGDYTIEAWTKFDFPGRGNTHSNFKWRWYHFDGVDWDQSRQLQNKIYKFRGDGKGWDWEVDTENGNYDYLMYADYDMDHPEVVNELRNWGVWYTNTLGLDGFRIDAVKHIKYSFTRDWLTHVRNTTGKNMFAVAEFWKNDIGAIRNYLSKTNWNHSVFDVPLHYNLYNASRSGGNYDMRQIFNGTVVQRHPTHAVTFVDNHDSQPEEALESFVEEWFKPLAYALTLTRDQGYPSVFYGDYYGIPTHGVPAMKSKIDPILEARQKYAYGKQNDYLDHHNMIGWTREGNTAHPNSGLATIMSDGPGGNKWMYVGRNKAGQVWRDITGNRSGTVTINADGWGNFSVNGGSVSIWVN

SEQ ID NO: 20229 - protein, 484 aa, Synthetic construct
HHNQTNGTMMQYFEWYLPNDGNHWNRLRSDASNLKDKGITAVWIPPAWKGASQNDVGYGAYDLYDLGEFNQKGTVRTKYGTRNQLQAAVTALKSNGIQVYGDVVMNHKGGADATEWVRAVEVNPSNRNQEVSGDYTIEAWTKFDFPGRGNTHSNFKWRWYHFDGVDWDQSRQLQNKIYKFRGDGKEWDWEVDTENGNYDYLMYADIDMDHPEVVNELRNWGVWYTNTLGLDGFRIDAVKHIKYSFTRDWLEHVRNTTGKNMFAVAEFWKNDIGAIENYLSKTNWNHSVFDVPLHYNLYNASRSGGNYDMRQIFNGTVVQRHPTHAVTFVDNHDSQPEEALESFVEEWFKPLAYALTLTRDQGYPSVFYGDYYGIPTHGVPAMKSKIDPILEARQKYAYGKQNDYMDHHNMIGWTREGNTAHPNSGLATIMSDGPGGNKWMYVGRNKAGQVWRDITGNRSGTVTINADGWGNFSVNGGSVSIWVN

SEQ ID NO: 20230 - protein, 484 aa, Synthetic construct
HHNGTNGTMMQYFEWYLPNDGNHWNRLRSDASNLKDKGITAVWIPPAWKGASQNDVGYGAYDLYDLGEFNQKGTVRTKYGTREQLQAAVTALKSNGIQVYGDVVMNHKGGADATEWVRAVEVNPSNRNQEVSGDYTIEAWTKFDFPGRGNTHSNFKWRWYHFDGVDWDQSRQLQNRIYKFRGDGKEWDWEVDTENGNYDYLMYADIDMDHPEVVNELRRWGVWYTRTLGLDGFRIDAVKHIKYSFTRDWLTHVRNTTGKNMFAVAEFWKNDIGAIENYLSKTNWNHSVFDVPLHYNLYNASRSGGNYDMRQIFNGTVVQRHPTHAVTFVDNHDSQPEEALESFVEEWFKPLAYALTLTRDQGYPSVFYGDYYGIPTHGVPAMKSKIDPILEARQKYAYGKQNDYLDHHNMIGWTREGNTAHPNSGLATIMSDGPGGNKWMYVGRNKAGQVWRDITGNRSGTVTINADGWGNFSVNGGSVSIWVN

SEQ ID NO: 20231 - protein, 484 aa, Bacillus sp.
HHNGTNGTMMQYFEWYLPNDGNHWNRLRSDASNLKDKGITAVWIPPAWKGASQNDVGYGAYDLYDLGEFNQKGTVRTKYGTRNQLQAAVTALKNNGIQVYGDVVMNHKGGADATEMVRAVEVNPSNRNQEVSGDYTIEAWTRFDFPGRGNTHSNFKWRWYHFDGVDWDQSRQLQNRIYKFRGDGKAWDWEVDTENGNYDYLMYADIDMDHPEVVNELRNWGVWYTNTLGLDGFRIGAVKHIKYSFTRDWLTHVRNTTGKNMFAVAEFWKNDIGAIENYLSKTNWNHSVFDVPLHYNLYNASRSGGNYDMRQIFNGTVVQRHPTHAVTFVDNHDSQPEEALESFVEEWFKPLACALTLTRDQGYPSVFYGDYYGIPTHGVPAMKSKIDPILEARQKYAYGKQNDYLDHHNMIGWTREGNTAHPNSGLATIMSDGPGGNKWMYVGRNKAGQVWRDITGNRSGTVTINADGWGNFSVNGGSVSIWVN

SEQ ID NO: 20232 - protein, 484 aa, Synthetic construct
HHNGTNGTMMQYFEWYLPNDGNHWNRLRSDASNLKDKGITAVWIPPAWKGASQNDVGYGAYDLYDLGEFNQKGTVRTKYGTRNQLQRAVTALKSNGIQVYGDVVMNHKGGADATEWVRAVEVNPSNRNQEVSGDYTIEAWTKFDFPGRGNTHSNFKWRWYHFDGVDWDQSRQLQNRIYKFRGDGKEWDWEVDTENGNYDYLMYADIDMDHPEVVNELRNWGVWYTNTLGLDGFRIDAVKHIKYSFTRDWLTHVRNTTGKNMFAVAEFWKNDIGAIENYLSKTNWNHSVFDVPLHYNLYNASRSGGNYDMRKIFEGTVVQRHPTHAVTFVDNHDSQPEEALESFVEEWFKPLAYALTLTRDQGYPSVFYGDYYGIPTHGVPAMKSKIDPILEARQKYAYGKQNDYLDHHNMIGWTREGNTAHPNSGLATIMSDGPGGNKWMYVGRNKAGQVWRDITGNRSGTVTINADGWGNFSVNGGSVSIWVN

SEQ ID NO: 20233 - protein, 484 aa, Synthetic construct
HHNGTNGTMMQYFEWYLPNDGNHWNRLRSDASNLKDKGITAVWIPPAWKGASQNDVGYGAYDLYDLGEFNQKGTVRTKYGTRNQLQAAVTALKSNGIQVYGDVVMNHKGGADATEWVRAVEVNPSNRNQEVSGDYTIEAWTKFDFPGRGNTHSNFKWRWDHFDGVDWDQSRQLQNRIYKFRGDGKEWDWEVDTENGNYDYLMYADIDMDHPEVVNELRNWGVWYTNTLGLDGFRIDAVKHIKYSFTRDWLTHVRNTTGKNMFAVAEFWKNDIGAIENYLSKTNWNHSVFDVPLHYNLYNASRSGGNYDMRQIFNKTVVQRHPTHAVTFVDNHDSQPEEALESFVEEWFKPLAYALTLTRDQGYPSVFYGDYYGIPTHGVPAMKSKIDPILEARQKYAYGKQNDYLDHHNMIGWTREGNTAHPNSGLATIMSDGPGGNKWMYVGRNKAGQRWRDITGNRSGTVTINADGWGNFSVNGGSVSIWVN

SEQ ID NO: 20234 - protein, 484 aa, Synthetic construct
HHNGTNGTMMQYFEWYLPNDGNHWHRLRSDASNLKDKGITAVWIPPAWKGASQNDVGYGAYDLYDLGEFNQKGTVRTKYGTRNQLQAAVTALKSNGIQVYGDVVMNHKGGADATEWVRAVEVNPSNRNQEVSGDYTIEAWTKFDFPGRGNTHSNFKWRWYHFDGVDWDQSRQLQNKIYKFRGDGKEWDWEVDTENGNYDYLMYADYDMDHPEVVNELRNWGVWYTNTLGLDGFRIDAVKHIKYSFTRDWLEHVRNTTGKNMFAVAEFWKNDIGAIENYLSKTNWNHSVFDVPLHYNLYNASRSGGNYDMRQIFNGTVVQRHPTHAVTFVDNHDSQPEEALESFVEEWFKPLAYALTLTRDQGYPSVFYGDYYGIPTHGVPAMKSKIDPILEARQKYAYGKQNDYLDHHNMIGWTREGNTAHPNSGLATIMSDGPGGNKWMYVGRNKAGQVWRDITGNRSGTVTINADGWGNFSVNGGSVSIWVN

SEQ ID NO: 20235 - protein, 484 aa, Synthetic construct
HHNGTNGTMMQYFEWYLPNDGNHWNRLRSDASNLKDKGITAVWIPPAWKGASQNDVGYGAYDLYDLGEFNQKGTVRTKYGTRRQLQAAVTALKSNGIQVYGDVVMNHKGGADATEWVRAVEVNPSNRNQEVSGDYTIEAWTKFDFPGRGNTHSNFKWRWYHFDGVDWDQSRQLQNRIYKFRGDGKEWDWEVDTENGNYDYLMYADIDMDHPEVVNELRRWGVWYTDTLGLDGFRIDAVKHIKYSFTRDWLTHVRNTTGKNMFAVAEFWKNDIGAIENYLSKTNWNHSVFDVPLHYNLYNASRSGGNYDMRQIFNGTVVQRHPTHAVTFVDNHDSQPEEALESFVEEWFKPLAYALTLTRDQGYPSVFYGDYYGIPTHGVPAMKSKIDPILEARQKYAYGKQNDYLDHHNMIGWTREGNTAHPNSGLATIMSDGPGGNKWMYVGRNKAGQVWRDITGNRSGTVTINADGWGNFSVNGGSVSIWVN

SEQ ID NO: 20236 - protein, 484 aa, Synthetic construct
HHNQTNGTMMQYFEWYLPNDGNHWNRLRSDASNLKDKGITAVWIPPAWKGASQNDVGYGAYDLYDLGEFNQKGTVRTKYGTRNQLQAAVTALKSNGIQVYGDVVMNHKGGADATEWVRAVEVNPSNRNQEVSGDYTIEAWTKFDFPGRGNTHSNFKWRWWHFDGVDWDQSRQLQNKIYKFRGDGKGWDWEVDTENGNYDYLMYADYDMDHPEVVNELRNWGVWYTNTLGLDGFRIDAVKHIKYSFTRDWLTHVRNTTGKNMFAVAEFWKNDIGAIENYLSKTNWNHSVFDVPLHYNLYNASRSGGNYDMRQIFNGTVVQRHPTHAVTFVDNHDSQPEEALESFVEEWFKPLAYALTLTRDQGYPSVFYGDYYGIPTHGVPAMKSKIDPILEARQKYAYGKQNDYLDHHNMIGWTREGNTAHPNSGLATIMSDGPGGNKWMYVGRNKAGQVWRDITGNRSGTVTINADGWGNFSVNGGSVSIWVN

SEQ ID NO: 20237 - protein, 484 aa, Synthetic construct
HHNGTNGTMMQYFEWYLPNDGNHWNRLRSDASNLKDKGITAVWIPPAWKGASQNDVGYGAYDLYDLGEFNQKGTVRTKYGTRNQLQAAVTALKSNGIQVYGDVVMNHKGGADATEWVRAVEVNPSNRNQEVSGDYTIEAWTKFDFPGRGNTHSNFKWRWWHFDGVDWDQSRQLQNKIYKFRGDGKGWDWEVDTENGNYDYLMYADYDMDHPEVVNELRNWGVWYTNTLGLDGFRIDAVKHIKYSFTRDWLEHVRNTTGKNMFAVAEFWKNDIGAIRNYLSKTNWNHSVFDVPLHYNLYNASRSGGNYDMRQIFNGTVVQRHPTHAVTFVDNHDSQPEEALESFVEEWFKPLAYALTLTRDQGYPSVFYGDYYGIPTHGVPAMKSKIDPILEARQKYAYGKQNDYLDHHNMIGWTREGNTAHPNSGLATIMSDGPGGNKWMYVGRNKAGQVWRDITGNRSGTVTINADGWGNFSVNGGSVSIWVN

SEQ ID NO: 20238 - protein, 484 aa, Synthetic construct
HHNGTNGTMMQYFEWYLPNDGNHWNRLRSDASNLKDKGITAVWIPPAWKGASQNDVGYGAYDLYDLGEFNQKGTVRTKYGTRNQLQAAVTALKSNGIQVYGDVVMNHKGGADATEWVRAVEVNPSNRNQEVSGDYTIEAWTKFDFPGRGNTHSNFKWRWWHFDGVDWDQSRQLQNKIYKFRGDGKEWDWEVDTENGNYDYLMYADIDMDHPEVVNELRNWGVWYTNTLGLDGFRIDAVKHIKYSFTRDWLTHVRNTTGKNMFAVAEFWKNDIGAIENYLSKTNWNHSVFDVPLHYNLYNASRSGGNYDMRQIFNGTVVQRHPTHAVTFVDNHDSQPEEALESFVEEWFKPLAYALTLTRDQGYPSVFYGDYYGIPTHGVPAMKSKIDPILEARQKYAYGKQNDYMDHHNMIGWTREGNTAHPNSGLATIMSDGPGGNKWMYVGRNKAGQVWRDITGNRSGTVTINADGWGNFSVNGGSVSIWVN

SEQ ID NO: 20239 - protein, 484 aa, Synthetic construct
HHNGTNGTMMQYFEWYLPNDGNHWNRLRSDASNLKDKGITAVWIPPAWKGASQNDVGYGAYDLYDLGEFNQKGTVRTKYGTRNQLQAAVTALKSNGIQVYGDVVMNHKGGADATEWVRAVEVNPSNRNQEVSGDYTIEAWTKFDFPGRGNTHSNFKWRWWHFDGVDWDQSRQLQNRIYKFRGDGKEWDWEVDTENGNYDYLMYADIDMDHPEVVNELRNWGVWYTNTLGLDGFRIDAVKHIKYSFTRDWLEHVRNTTGKNMFAVAEFWKNDIGAIRNYLSKTNWNHSVFDVPLHYNLYNASRSGGNYDMRQIFNGTVVQRHPTHAVTFVDNHDSQPEEALESFVEEWFKPLAYALTLTRDQGYPSVFYGDYYGIPTHGVPAMKSKIDPILEARQKYAYGKQNDYMDHHNMIGWTREGNTAHPNSGLATIMSDGPGGNKWMYVGRNKAGQVWRDITGNRSGTVTINADGWGNFSVNGGSVSIWVN

SEQ ID NO: 20240 - protein, 484 aa, Synthetic construct
HHNGTNGTMMQYFEWYLPNDGNHWNRLRSDASNLKDKGITAVWIPPAWKGASQNDVGYGAYDLYDLGEFNQKGTVRTKYGTRNQLQAAVTALKSNGIQVYGDVVMNHKGGADATEWVRAVEVNPSNRNQEVSGDYTIEAWTKFDFPGRGNTHSNFKWRWYHFDGVDWDQSRQLQNRIYKFRGDGKEWDWEVDTENGNYDYLMYADIDMDHPEVVNELRNWGVWYTDTLGLDGFRIDAVKHIKYSFTRDWLTHVRNTTGKNMFAVAEFWKNDIGAIENYLSKTNWNHSVFDVPLHYNLYNASRSGGNYDMRQIFNGTVVQRHPTHAVTFVDNHDSQPEEALESFVEEWFKPLAYALTLTRDQGYPSVFYGDYYGIPTHGVPAMKSKIDPILEARQKYAYGKQNDYLDHHNMIGWTREGNTAHPNSGLATIMSDGPGGNKWMYVGRNKAGQVWRDITGNRSGEVTINADGWGEFSVNGGSVSIWVN

SEQ ID NO: 20241 - protein, 484 aa, Synthetic construct
HHNGTNGTMMQYFEWYLPNDGNHWNRLRSDASNLKDKGITAVWIPPAWKGASQNDVGYGAYDLYDLGEFNQKGTVRTKYGTRNQLQAAVTALKSNGIQVYGDVVMNHKGGADATEWVRAVEVNPSNRNQEVSGDYTIEAWTKFDFPGRGNTHSNFKWRWWHFDGVDWDQSRQLQNRIYKFRGDGKEWDWEVDEENGNYDYLMYADYDMDHPEVVNELRNWGVWYTNTLGLDGFRIDAVKHIKYSFTRDWLTHVRNTTGKNMFAVAEFWKNDIGAIENYLSKTNWNHSVFDVPLHYNLYNASRSGGNYDMRQIFNGTVVQRHPTHAVTFVDNHDSQPEEALESFVEEWFKPLAYALTLTRDQGYPSVFYGDYYGIPTHGVPAMKSKIDPILEARQKYAYGKQNDYLDHHNMIGWTREGNTAHPNSGLATIMSDGPGGNKWMYVGRNKAGQVWRDITGNRSGTVTINADGWGNFSVNGGSVSIWVN

SEQ ID NO: 20242 - protein, 484 aa, Synthetic construct
HHNGTNGTMMQYFEWYLPNDGNHWNRLRSDASNLKDKGITAVWIPPAWKGASQNDVGYGAYDLYDLGEFNQKGTVRTKYGTRNQLQDAVTALKSNGIQVYGDVVMNHKGGADATEWVRAVEVNPSNRNQEVSGDYTIEAWTKFDFPGRGNTHSNFKWRWYHFDGVDWDQSRQLQNRIYKFRGDGKEWDWEVDTENGNYDYLMYADIDMDHPEVVNELRNWGVWYTNTLGLDGFRIDAVKHIKYSFTRDWLTHVRNTTGKNMFAVAEFWKNDIGAIENYLSKTNWNHSVFDVPLHYNLYNASRSGGNYDMRQIFNKTVVQRHPTHAVTFVDNHDSQPEEALESFVEEWFKPLAYALTLTRDQGYPSVFYGDYYGIPTHGVPAMKSKIDPILEARQKYAYGKQNDYLDHHNMIGWTREGNTKHPNSGLATIMSDGPGGNKWMYVGRNKAGQVWRDITGNRSGTVTINADGWGNFSVNGGSVSIWVN

SEQ ID NO: 20243 - protein, 484 aa, Synthetic construct
HHNQTNGTMMQYFEWYLPNDGNHWHRLRSDASNLKDKGITAVWIPPAWKGASQNDVGYGAYDLYDLGEFNQKGTVRTKYGTRNQLQAAVTALKSNGIQVYGDVVMNHKGGADATEWVRAVEVNPSNRNQEVSGDYTIEAWTKFDFPGRGNTHSNFKWRWYHFDGVDWDQSRQLQNKIYKFRGDGKEWDWEVDTENGNYDYLMYADIDMDHPEVVNELRNWGVWYTNTLGLDGFRIDAVKHIKYSFTRDWLEHVRNTTGKNMFAVAEFWKNDIGAIENYLSKTNWNHSVFDVPLHYNLYNASRSGGNYDMRQIFNGTVVQRHPTHAVTFVDNHDSQPEEALESFVEEWFKPLAYALTLTRDQGYPSVFYGDYYGIPTHGVPAMKSKIDPILEARQKYAYGKQNDYLDHHNMIGWTREGNTAHPNSGLATIMSDGPGGNKWMYVGRNKAGQVWRDITGNRSGTVTINADGWGNFSVNGGSVSIWVN

SEQ ID NO: 20244 - protein, 484 aa, Synthetic construct
HHNGTNGTMMQYFEWYLPNDGNHWNRLRSDASNLKDKGITAVWIPPAWKGASQNDVGYGAYDLYDLGEFNQKGTVRTKYGTRNQLQAAVTALKSNGIQVYGDVVMNHKGGADATEWVRAVEVNPSNRNQEVSGDYTIEAWTKFDFPGRGNTHSNFKWRWYHFDGVDWDQSRQLQNRIYKFRGDGKEWDWEVDTENGNYDYLMYADIDMDHPEVVNELRNWGVWYTNTLGLDGFRIDAVKHIKYSFTRDWLTHVRNTTGKNMFAVAEFWKNDIGAIENYLSKTNWNHSVFDVPLHYNLYNASRSGGNYDMRKIFNGTVVQRHPTHAVTFVDNHDSQPEEALESFVEEWFKPLAYALTLTRDQGYPSVFYGDYYGIPTHGVPAMKSKIDPILEARQKYAYGKQNDYLDHHNMIGWTREGNTEHPNSGLATIMSDGPGGNKWMYVGRNKAGQVWRDITGNRSGTVTINADGWGEFSVNGGSVSIWVN

SEQ ID NO: 20245 - protein, 484 aa, Synthetic construct
HHNGTNGTMMQYFEWYLPNDGNHWDRLRSDASNLKDKGITAVWIPPAWKGASQNDVGYGAYDLYDLGEFNQKGTVRTKYGTRNQLQAAVTALKSNGIQVYGDVVMNHKGGADATEWVRAVEVNPSNRNQEVSGDYTIEAWTKFDFPGRGNTHSNFKWRWYHFDGVDWDQSRQLQNKIYKFRGDGKEWDWEVDTENGNYDYLMYADYDMDHPEVVNELRNWGVWYTNTLGLDGFRIDAVKHIKYSFTRDWLTHVRNTTGKNMFAVAEFWKNDIGAIENYLSKTNWNHSVFDVPLHYNLYNASRSGGNYDMRQIFNGTVVQRHPTHAVTFVDNHDSQPEEALESFVEEWFKPLAYALTLTRDQGYPSVFYGDYYGIPTHGVPAMKSKIDPILEARQKYAYGKQNDYLDHHNMIGWTREGNTAHPNSGLATIMSDGPGGNKWMYVGRNKAGQVWRDITGNRSGTVTINADGWGNFSVNGGSVSIWVN

SEQ ID NO: 20246 - protein, 484 aa, Synthetic construct
HHNGTNGTMMQYFEWYLPNDGNHWNRLRSDASNLKDKGITAVWIPPAWKGASQNDVGYGAYDLYDLGEFNQKGTVRTKYGTRNQLQAAVTALKSNGIQVYGDVVMNHKGGADATEWVRAVEVNPSNRNQEVSGDYTIEAWTKFDFPGRGNTHSNFKWRWWHFDGVDWDQSRQLQNRIYKFRGDGKEWDWEVDTENGNYDYLMYADYDMDHPEVVNELRNWGVWYTNTLGLDGFRIDAVKHIKYSFTRDWLEHVRNTTGKNMFAVAEFWKNDIGAIENYLSKTNWNHSVFDVPLHYNLYNASRSGGNYDMRQIFNGTVVQRHPTHAVTFVDNHDSQPEEALESFVEEWFKPLAYALTLTRDQGYPSVFYGDYYGIPTHGVPAMKSKIDPILEARQKYAYGKQNDYMDHHNMIGWTREGNTAHPNSGLATIMSDGPGGNKWMYVGRNKAGQVWRDITGNRSGTVTINADGWGNFSVNGGSVSIWVN

SEQ ID NO: 20247 - protein, 484 aa, Synthetic construct
HHNQTNGTMMQYFEWYLPNDGNHWNRLRSDASNLKDKGITAVWIPPAWKGASQNDVGYGAYDLYDLGEFNQKGTVRTKYGTRNQLQAAVTALKSNGIQVYGDVVMNHKGGADATEWVRAVEVNPSNRNQEVSGDYTIEAWTKFDFPGRGNTHSNFKWRWYHFDGVDWDQSRQLQNRIYKFRGDGKEWDWEVDTENGNYDYLMYADYDMDHPEVVNELRNWGVWYTNTLGLDGFRIDAVKHIKYSFTRDWLEHVRNTTGKNMFAVAEFWKNDIGAIENYLSKTNWNHSVFDVPLHYNLYNASRSGGNYDMRQIFNGTVVQRHPGHAVTFVDNHDSQPEEALESFVEEWFKPLAYALTLTRDQGYPSVFYGDYYGIPTHGVPAMKSKIDPILEARQKYAYGKQNDYMDHHNMIGWTREGNTAHPNSGLATIMSDGPGGNKWMYVGRNKAGQVWRDITGNRSGTVTINADGWGNFSVNGGSVSIWVN

SEQ ID NO: 20248 - protein, 484 aa, Synthetic construct
HHNGTNGTMMQYFEWYLPNDGNHWHRLRSDASNLKDKGITAVWIPPAWKGASQNDVGYGAYDLYDLGEFNQKGTVRTKYGTRNQLQAAVTALKSNGIQVYGDVVMNHKGGADATEWVRAVEVNPSNRNQEVSGDYTIEAWTKFDFPGRGNTHSNFKWRWYHFDGVDWDQSRQLQNKIYKFRGDGKGWDWEVDTENGNYDYLMYADYDMDHPEVVNELRNWGVWYTNTLGLDGFRIDAVKHIKYSFTRDWLEHVRNTTGKNMFAVAEFWKNDIGAIENYLSKTNWNHSVFDVPLHYNLYNASRSGGNYDMRQIFNGTVVQRHPTHAVTFVDNHDSQPEEALESFVEEWFKPLAYALTLTRDQGYPSVFYGDYYGIPTHGVPAMKSKIDPILEARQKYAYGKQNDYMDHHNMIGWTREGNTAHPNSGLATIMSDGPGGNKWMYVGRNKAGQVWRDITGNRSGTVTINADGWGNFSVNGGSVSIWVN

SEQ ID NO: 20249 - protein, 484 aa, Synthetic construct
HHNQTNGTMMQYFEWYLPNDGNHWHRLRSDASNLKDKGITAVWIPPAWKGASQNDVGYGAYDLYDLGEFNQKGTVRTKYGTRNQLQAAVTALKSNGIQVYGDVVMNHKGGADATEWVRAVEVNPSNRNQEVSGDYTIEAWTKFDFPGRGNTHSNFKWRWWHFDGVDWDQSRQLQNRIYKFRGDGKEWDWEVDTENGNYDYLMYADIDMDHPEVVNELRNWGVWYTNTLGLDGFRIDAVKHIKYSFTRDWLTHVRNTTGKNMFAVAEFWKNDIGAIENYLSKTNWNHSVFDVPLHYNLYNASRSGGNYDMRQIFNGTVVQRHPGHAVTFVDNHDSQPEEALESFVEEWFKPLAYALTLTRDQGYPSVFYGDYYGIPTHGVPAMKSKIDPILEARQKYAYGKQNDYLDHHNMIGWTREGNTAHPNSGLATIMSDGPGGNKWMYVGRNKAGQVWRDITGNRSGTVTINADGWGNFSVNGGSVSIWVN

SEQ ID NO: 20250 - protein, 484 aa, Synthetic construct
HHNQTNGTMMQYFEWYLPNDGNHWNRLRSDASNLKDKGITAVWIPPAWKGASQNDVGYGAYDLYDLGEFNQKGTVRTKYGTRNQLQAAVTALKSNGIQVYGDVVMNHKGGADATEWVRAVEVNPSNRNQEVSGDYTIEAWTKFDFPGRGNTHSNFKWRWWHFDGVDWDQSRQLQNKIYKFRGDGKEWDWEVDTENGNYDYLMYADIDMDHPEVVNELRNWGVWYTNTLGLDGFRIDAVKHIKYSFTRDWLTHVRNTTGKNMFAVAEFWKNDIGAIENYLSKTNWNHSVFDVPLHYNLYNASRSGGNYDMRQIFNGTVVQRHPTHAVTFVDNHDSQPEEALESFVEEWFKPLAYALTLTRDQGYPSVFYGDYYGIPTHGVPAMKSKIDPILEARQKYAYGKQNDYLDHHNMIGWTREGNTAHPNSGLATIMSDGPGGNKWMYVGRNKAGQVWRDITGNRSGTVTINADGWGNFSVNGGSVSIWVN

SEQ ID NO: 20251 - protein, 484 aa, Synthetic construct
HHNGTNGTMMQYFEWYLPNDGNHWNRLRSDASNLKDKGITAVWIPPAWKGASQNDVGYGAYDLYDLGEFNQKGTVRTKYGTRNQLQRAVTALKSNGIQVYGDVVMNHKGGADATEWVRAVEVNPSNRNQEVSGDYTIEAWTKFDFPGRGNTHSNFKWRWYHFDGVDWDQSRQLQNRIYKFRGDGKEWDWEVDTENGNYDYLMYADIDMDHPEVVNELRNWGVWYTNTLGLDGFRIDAVKHIKYSFTRDWLTHVRNTTGKNMFAVAEFWKNDIGAIENYLSKTNWNHSVFDVPLHYNLYNASRSGGNYDMRQIFKKTVVQRHPTHAVTFVDNHDSQPEEALESFVEEWFKPLAYALTLTRDQGYPSVFYGDYYGIPTHGVPAMKSKIDPILEARQKYAYGKQNDYLDHHNMIGWTREGNTAHPNSGLATIMSDGPGGNKWMYVGRNKAGQVWRDITGNRSGTVTINADGWGNFSVNGGSVSIWVN

SEQ ID NO: 20252 - protein, 484 aa, Synthetic construct
HHNGTNGTMMQYFEWYLPNDGNHWNRLRSDASNLKDKGITAVWIPPAWKGASQNDVGYGAYDLYDLGEFNQKGTVRTKYGTRNQLQAAVTALKSNGIQVYGDVVMNHKGGADATEWVRAVEVNPSNRNQEVSGDYTIEAWTKFDFPGRGNTHSNFKWRWWHFDGVDWDQSRQLQNRIYKFRGDGKEWDWEVDTENGNYDYLMYADYDMDHPEVVNELRNWGVWYTNTLGLDGFRIDAVKHIKYSFTRDWLTHVRNTTGKNMFAVAEFWKNDIGAIENYLSKTNWNHSVFDVPLHYNLYNASRSGGNYDMRQIFNGTVVQRHPTHAVTFVDNHDSQPEEALESFVEEWFKPLAYALTLTRDQGYPSVFYGDYYGIPTHGVPAMKSKIDPILEARQKYAYGKQNDYMDHHNMIGWTREGNTAHPNSGLATIMSDGPGGNKWMYVGRNKAGQVWRDITGNRSGTVTINADGWGNFSVNGGSVSIWVN

SEQ ID NO: 20253 - protein, 484 aa, Synthetic construct
HHNGTNGTMMQYFEWYLPNDGNHWNRLRSDASNLKDKGITAVWIPPAWKGASQNDVGYGAYDLYDLGEFNQKGTVRTKYGTRNQLQDAVTALKSNGIQVYGDVVMNHKGGADATEWVRAVEVNPSNRNQEVSGDYTIEAWTKFDFPGRGNTHSNFKWRWDHFDGVDWDQSRQLQNRIYKFRGDGKEWDWEVDTENGNYDYLMYADIDMDHPEVVNELRNWGVWYTNTLGLDGFRIDAVKHIKYSFTRDWLTHVRNTTGKNMFAVAEFWKNDIGAIENYLSKTNWNHSVFDVPLHYNLYNASRSGGNYDMRQIFNGTVVQRHPTHAVTFVDNHDSQPEEALESFVEEWFKPLAYALTLTRDQGYPSVFYGDYYGIPTHGVPAMKSKIDPILEARQKYAYGKQNDYLDHHNMIGWTREGNTAHPNSGLATIMSDGPGGNKWMYVGRNKAGQVWRDITGNRSGEVTINADGWGNFSVNGGSVSIWVN

SEQ ID NO: 20254 - protein, 484 aa, Synthetic construct
HHNQTNGTMMQYFEWYLPNDGNHWNRLRSDASNLKDKGITAVWIPPAWKGASQNDVGYGAYDLYDLGEFNQKGTVRTKYGTRNQLQAAVTALKSNGIQVYGDVVMNHKGGADATEWVRAVEVNPSNRNQEVSGDYTIEAWTKFDFPGRGNTHSNFKWRWYHFDGVDWDQSRQLQNRIYKFRGDGKEWDWEVDTENGNYDYLMYADYDMDHPEVVNELRNWGVWYTNTLGLDGFRIDAVKHIKYSFTRDWLEHVRNTTGKNMFAVAEFWKNDIGAIRNYLSKTNWNHSVFDVPLHYNLYNASRSGGNYDMRQIFNGTVVQRHPTHAVTFVDNHDSQPEEALESFVEEWFKPLAYALTLTRDQGYPSVFYGDYYGIPTHGVPAMKSKIDPILEARQKYAYGKQNDYLDHHNMIGWTREGNTAHPNSGLATIMSDGPGGNKWMYVGRNKAGQVWRDITGNRSGTVTINADGWGNFSVNGGSVSIWVN

SEQ ID NO: 20255 - protein, 484 aa, Synthetic construct
HHNGTNGTMMQYFEWYLPNDGNHWNRLRSDASNLKDKGITAVWIPPAWKGASQNDVGYGAYDLYDLGEFNQKGTVRTKYGTRNQLQRAVTALKSNGIQVYGDVVMNHKGGADATEWVRAVEVNPSNRNQEVSGDYTIEAWTKFDFPGRGNTHSNFKWRWYHFDGVDWDQSRQLQNRIYKFRGDGKEWDWEVDTENGNYDYLMYADIDMDHPEVVNELRNWGVWYTNTLGLDGFRIDAVKHIKYSFTRDWLTHVRNTTGKNMFAVAEFWKNDIGAIENYLSKTNWNHSVFDVPLHYNLYNASRSGGNYDMRQIFNGTVVQRHPTHAVTFVDNHDSQPEEALESFVEEWFKPLAYALTLTRDQGYPSVFYGDYYGIPTHGVPAMKSKIDPILEARQKYAYGKQNDYLDHHNMIGWTREGNTEHPNSGLATIMSDGPGGNKWMYVGRNKAGQRWRDITGNRSGTVTINADGWGNFSVNGGSVSIWVN

SEQ ID NO: 20256 - protein, 484 aa, Synthetic construct
HHNGTNGTMMQYFEWYLPNDGNHWHRLRSDASNLKDKGITAVWIPPAWKGASQNDVGYGAYDLYDLGEFNQKGTVRTKYGTRNQLQAAVTALKSNGIQVYGDVVMNHKGGADATEWVRAVEVNPSNRNQEVSGDYTIEAWTKFDFPGRGNTHSNFKWRWYHFDGVDWDQSRQLQNRIYKFRGDGKEWDWEVDTENGNYDYLMYADYDMDHPEVVNELRNWGVWYTNTLGLDGFRIDAVKHIKYSFTRDWLTHVRNTTGKNMFAVAEFWKNDIGAIRNYLSKTNWNHSVFDVPLHYNLYNASRSGGNYDMRQIFNGTVVQRHPGHAVTFVDNHDSQPEEALESFVEEWFKPLAYALTLTRDQGYPSVFYGDYYGIPTHGVPAMKSKIDPILEARQKYAYGKQNDYLDHHNMIGWTREGNTAHPNSGLATIMSDGPGGNKWMYVGRNKAGQVWRDITGNRSGTVTINADGWGNFSVNGGSVSIWVN

SEQ ID NO: 20257 - protein, 484 aa, Synthetic construct
HHNGTNGTMMQYFEWYLPNDGNHWNRLRSDASNLKDKGITAVWIPPAWKGASQNDVGYGAYDLYDLGEFNQKGTVRTKYGTRNQLQAAVTALKSNGIQVYGDVVMNHKGGADATEWVRAVEVNPSNRNQEVSGDYTIEAWTKFDFPGRGNTHSNFKWRWYHFDGVDWDQSRQLQNRIYKFRGDGKEWDWEVDTENGNYDYLMYADYDMDHPEVVNELRNWGVWYTNTLGLDGFRIDAVKHIKYSFTRDWLEHVRNTTGKNMFAVAEFWKNDIGAIRNYLSKTNWNHSVFDVPLHYNLYNASRSGGNYDMRQIFNGTVVQRHPTHAVTFVDNHDSQPEEALESFVEEWFKPLAYALTLTRDQGYPSVFYGDYYGIPTHGVPAMKSKIDPILEARQKYAYGKQNDYMDHHNMIGWTREGNTAHPNSGLATIMSDGPGGNKWMYVGRNKAGQVWRDITGNRSGTVTINADGWGNFSVNGGSVSIWVN

SEQ ID NO: 20258 - protein, 484 aa, Synthetic construct
HHNGTNGTMMQYFEWYLPNDGNHWHRLRSDASNLKDKGITAVWIPPAWKGASQNDVGYGAYDLYDLGEFNQKGTVRTKYGTRNQLQAAVTALKSNGIQVYGDVVMNHKGGADATEWVRAVEVNPSNRNQEVSGDYTIEAWTKFDFPGRGNTHSNFKWRWYHFDGVDWDQSRQLQNKIYKFRGDGKGWDWEVDTENGNYDYLMYADYDMDHPEVVNELRNWGVWYTNTLGLDGFRIDAVKHIKYSFTRDWLEHVRNTTGKNMFAVAEFWKNDIGAIRNYLSKTNWNHSVFDVPLHYNLYNASRSGGNYDMRQIFNGTVVQRHPTHAVTFVDNHDSQPEEALESFVEEWFKPLAYALTLTRDQGYPSVFYGDYYGIPTHGVPAMKSKIDPILEARQKYAYGKQNDYLDHHNMIGWTREGNTAHPNSGLATIMSDGPGGNKWMYVGRNKAGQVWRDITGNRSGTVTINADGWGNFSVNGGSVSIWVN

SEQ ID NO: 20259 - protein, 481 aa, Bacillus sp.
HNGTNATMMQYFEWHLPNDGNHWNRLRDDASNLRNRGITAIWIPPAWKGTSQNDVGYGAYDLYDLGEFNQKGTVRTKYGTRSQLESAIHALKNNGVQVYGDVVMNHKAGADGTEFVTAVEVDPSNRNQETSGTYQIQAYTKFDFPGRGNTYSSFKWRWYHFDGTDWDESRKLNRIYKFSGKAWDWPVDTEFGNYDYLMFADYDMDHPEVVNELRRWGEWYTNTLNLDGFRIDAVKHIKFSFTRDWLTHVRNATGKGMFAVAEFWKNDLGALENYLSYTNWNHSVFDVPLHYNLYNASNSRGNYDMAKLLNGTVVQKHHMHAVTFVDNHDSQPGESLESFVQEWFKPLAYALILTREQGYPSVFYGDYYGIPTHSVPAMKAKIDPILAARQNFAYGTQHDYFDHHNIIGWTREGNTTHPNSGLATIMSDGPGGEKWMYVGQNKAGQVWHDITGNKPGTVTINADGWANFSVNKGSVSIWVKR

SEQ ID NO: 20260 - protein, 481 aa, Bacillus sp.
HNGTNATMMQYFEWHLPNDGNHWNRLRDDASNLRNRGITAIWIPPAWKGTSQNDVGYGAYDLYDLGEFNQKGTVRTKYGTRSQLESAIHALKNNGVQVYGDVVMNHKAGADGTEFVTAVEVDPSNRNQETLGTYQIQAYTKFDFPGRGNTYSSFKWRWYHFDGTDWDESRKLNRIYKFSGKAWDWPVDTEFGNYDYLMFADYDMDHPEVVNELRRWGEWYTNTLNLDGFRIDAVKHIKFSFTRDWLTHVRNATGKGMFAVAEFWKNDLGALENYLSYTNWNHSVFDVPLHYNLYNASNYGGNYDMAKLLNGTVVQKHPMHAVTFVDNHDSQPGESLESFVQEWFKPLAYALILTREQGYPSVFYGDYYGIPTHSVPAMKAKIDPILEARQWFAYGTQHDYFDHHNIIGWTREGNTTHPNSGLATIMSDGPGGEKWMYVGQNKAGQVWHDITGNKPGTVTINADGWANFSVNKGSVSIWVKR

SEQ ID NO: 20261 - protein, 481 aa, Bacillus sp.
HNGTNATMMQYFEWHLPNDGNHWNRLRDDASNLRNRGITAIWIPPAWKGTSQNDVGYGAYDLYDLGEFNQKGTVRTKYGTRSQLESAIHALKNNGVQVYGDVVMNHKAGADGTEFVTAVEVDPSNRNQETSGTYQIQAYTKFDFPGRGNTYSSFKWRWYHFDGTDWDESRKLNRIYKFSGKAWDWPVDTEFGNYDYLMFADYDMDHPEVVNELRRWGEWYTNTLNLDGFRIDAVKHIKFSFTRDWLTHVRNATGKGMFAVAEFWKNDLGALENYLSYTNWNHSVFDVPLHYNLYNASNSRGNYDMAKLLNGTVVQKHPMHAVTFVDNHDSQPGESLESFVQEWFKPLAYALILTREQGYPSVFYGDYYGIPTHSVPAMKAKIDPILEARQDFAYGTQHDYFDHHNIIGWTREGNTTAPNSGLATIMSDGPGGEKWMYVGQNKAGQVWHDITGNKPGTVTINADGWANFSVNKGSVSIWVKR

SEQ ID NO: 20262 - protein, 481 aa, Bacillus sp.
HNGTNATMMQYFEWHLPNDGNHWNRLRDDASNLRNRGITAIWIPPAWKGTSQNDVGYGAYDLYDLGEFNQKGTVRTKYGTRSQLESAIHALKNNGVQVYGDVVMNHKAGADGTEFVDAVEVDPSNRNQETSGTYQIQAYTKFDFPGRGNTYSSFKWRWYHFDGTDWDESRKLNRIYKFTGKQWDWEVDTEFGNYDYLMFADLDMDHPEVVNELRRWGEWYTNTLNLDGFRIDAVKHIKFSFTRDWLTHVRNATGKGMFAVAEYWKNDLGALENYLSYTNWNHSVFDVPLHYNLYNASNSRGNYDMAKLLNGTVVQKHPMHAVTFVDNHDSQPGESLESFVQEWFKPLAYALILTREQGYPSVFYGDYYGIPTHSVPAMKAKIDPILAARQNFAYGTQHDYFDHHNIIGWTREGNTTHPNSGLATIMSDGPGGEKWMYVGQNKAGQVWHDITGNKPGTVTINADGWANFSVNKGSVSIWVKR

SEQ ID NO: 20263 - protein, 481 aa, Bacillus sp.
HNGTNATMMQYFEWHLPNDGNHWNRLRDDASNLRNRGITAIWIPPAWKGTSQNDVGYGAYDLYDLGEFNQKGTVRTKYGTRSQLESAIHALKNNGVQVYGDVVMNHKAGADGTEFVDAVEVDPSNRNQETSGTYQIQAYTKFDFPGRGNTYSSFKWRWYHFDGTDWDESRKLNRIYKFTGKAWDWPVDTEFGNYDYLMFADLDMDHPEVVNELRRWGEWYTNTLNLDGFRIDAVKHIKFSFTRDWLTHVRNATGKGMFAVAEYWKNDLGALENYLSYTNWNHSVFDVPLHYNLYNASNSRGNYDMAKLLNGTVVQKHPMHAVTFVDNHDSQPGESLESFVQEWFKPLAYALILTREQGYPSVFYGDYYGIPTHSVPAMKAKIDPILAARQNFAYGTQHDYFDHHNIIGWTREGNTTHPNSGLATIMSDGPGGEKWMYVGQNKAGQVWHDITGNKPGTVTINADGWANFSVNGASVSIWVKR

SEQ ID NO: 20264 - protein, 481 aa, Bacillus sp.
HNGTNATMMQYFEWHLPNDGNHWNRLRDDASNLRNRGITAIWIPPAWKGTSQNDVGYGAYDLYDLGEFNQKGTVRTKYGTRSQLESAIHALKNNGVQVYGDVVMNHKAGADGTEFVDAVEVDPSNRNQETSGTYQIQAYTKFDFPGRGNTYSSFKWRWYHFDGTDWDESRKLNRIYKFDGKQWDWEVDTEFGNYDYLMFADLDMDHPEVVNELRRWGEWYTNTLNLDGFRIDAVKHIKFQFTRDWLTHVRNATGKGMFAVAEFWKNDLGALENYLSYTNWNHSVFDVPLHYNLYNASNSRGNYDMAKLLNGTVVQKHPMHAVTFVDNHDSQPGESLESFVQEWFKPLAYALILTREQGYPSVFYGDYYGIPTHSVPAMKAKIDPILAARQNFAYGTQHDYFDHHNIIGWTREGNTTHPNSGLATIMSDGPGGEKWMYVGQNKAGQVWHDITGNKPGTVTINADGWANFSVNKGSVSIWVKR

SEQ ID NO: 20265 - protein, 481 aa, Bacillus sp.
HNGTNATMMQYFEWHLPNDGNHWNRLRDDASNLRNRGITAIWIPPAWKGTSQNDVGYGAYDLYDLGEFNQKGTVRTKYGTRSQLESAIHALKNNGVQVYGDIVMNHKAGADGTEFVTAVEVDPSNRNQETSGTYQIQAYTKFDFPGRGNTYSSFKWRWYHFDGTDWDESRKLNRIYKFSGKAWDWPVDTEFGNYDYLMFADYDMDHPEVVNELRRWGEWYTNTLNLDGFRIDAVKHIKFSFTRDWLTHVRNATGKGMFAVAEFWKNDLGALENYLSYTNWNHSVFDVPLHYNLYNASNYGGNYDMAKLLNGTVVQKHPMHAVTFVDNHDSQPGESLESFVQEWFKPLAYALILTREQGYPSVFYGDYYGIPTHSVPAMKAKIDPILAARQNFAYGTQHDYFDHHNIIGWTREGNTTHPNSGLATIMSDGPGGEKWMYVGQNKAGQVWHDITGNKPGTVTINADGWANFSVLGGSVSIWVKR

SEQ ID NO: 20266 - protein, 481 aa, Bacillus sp.
HNGTNATMMQYFEWHLPNDGNHWNRLRDDASNLRNRGITAIWIPPAWKGTSQNDVGYGAYDLYDLGEFNQKGTVRTKYGTRSQLESAIHALKNNGVQVYGDVVMNHKAGADGTEFVTAVEVDPSNRNQETSGTYQIQAYTKFDFPGRGNTYSSFKWRWYHFDGTDWDESRKLNRIYKFSGKAWDWPVDTEFGNYDYLMFADYDMDHPEVVNELRRWGEWYTNTLNLDGFRIDAVKHIKFSFTRDWLTHVRNATGKGMFAVAEFWKNDLGALENYLSYTNWNHSVFDVPLHYNLYNASNYGGNYDMAKLLNGTVVQKHPMHAVTFVDNHDSQPGESLESFVQEWFKPLAYALILTREQGYPSVFYGDYNGIPTHSVPAMKAKIDPILAARQNFAYGTQHDYFDHHNIIGWTREGNTTHPNSGLATIMSDGPGGEKWMYVGQNKAGQVWHDITGNKPGTVTINADGWANFSVNKGSVSIWVKR

SEQ ID NO: 20267 - protein, 481 aa, Bacillus sp.
HNGTNATMMQYFEWHLPNDGNHWNRLRDDASNLRNRGITAIWIPPAWKGTSQNDVGYGAYDLYDLGEFNQKGTVRTKYGTRSQLESAIHALKNNGVQVYGDVVMNHKAGADGTEFVTAVEVDPSNRNQETSGTYQIQAYTKFDFPGRGNTYSSFKWRWYHFDGTDWDESRKLNRIYKFSGKAWDWPVDTEFGNYDYLMFADYDMDHPEVVNELRRWGEWYTNTLNLDGFRIDAVKHIKFSFTRDWLTHVRNATGKGDFAVAEFWKNDLGALENYLSYTNWNHSVFDVPLHYNLYNASNSRGNYDMAKLLNGTVVQKHPMHAVTFVDNHDSQPGESLESFVQEWFKPLAYALILTREQGYPSVFYGDYYGIPTHSVPAMKAKIDPILAARQNFAYGTQHDYFDHHNIIGWTREGNTTHPNSGLATIMSDGPGGEKWMYVGQNKAGQVWHDITGNKPGTVTINADGWANFSVNKGSVSIWVKR

SEQ ID NO: 20268 - protein, 481 aa, Bacillus sp.
HNGTNATMMQYFEWHLPNDGNHWNRLRDDASNLRNRGITAIWIPPAWKGTSQNDVGYGAYDLYDLGEFNQKGTVRTKYGTRSQLESAIHALKNNGVQVYGDVVMNHKAGADGTEFVTAVEVDPSNRNQETSGTYQIQAYTKFDFPGRGNTYSSFKWRWYHFDGTDWDESRKLNRIYKFSGKAWDWPVDTEFGNYDYLMFADYDMDHPEVVNELRRWGEWYTNTLNLDGFRIDAVKHIKFSFTRDWLTHVRNATGKGDFAVAEFWKNDLGALENYLSYTNWNHSVFDVPLHYNLYNASNSRGNYDMAKLLNGTVVQKHPMHAVTFVDNHDSQPGESLESFVQEWFKPLAYALILTREQGYPSVFYGDYYGIPTHSVPAMKAKIDPILAARQNFAYGTQHDYFDHHNIIGWTREGNTTHPNSGLATIMSDGPGGEKWMYVGQNKAGQVWHDITGNKPGTVTINADGWANFSVLGGSVSIWVKR

SEQ ID NO: 20269 - protein, 481 aa, Bacillus sp.
HNGTNATMMQYFEWHLPNDGNHWNRLRDDASNLRNRGITAIWIPPAWKGTSQNDVGYGAYDLYDLGEFNQKGTVRTKYGTRSQLESAIHALKNNGVQVYGDVVMNHKAGADGTEFVTAVEVDPSNRNQETSGTYQIQAYTKFDFPGRGNTYSSFKWRWYHFDGTDWDESRKLNRIYKFSGKAWDWPVDTEFGNYDYLMFADYDMDHPEVVNELRRWGEWYTNTLNLDGFRIDAVKHIKFSFTRDWLTHVRNATGKGMFAVAEFWKNDLGALENYLSYTNWNHSVFDVPLHYNLYNASNSRGNYDMAKLLNGTVVQKHPMHAVTFVDNHDSQPGESLESFVQEWFKPLAYALILTREQGYPSVFYGDYYGIPTHSVPAMKAKIDPILEARQWFAYGTQHDYFDHHNIIGWTREGNTTPPNSGLATIMSDGPGGEKWMYVGQNKAGQVWHDITGNKPGTVTINADGWANFSVNKGSVSIWVKR

SEQ ID NO: 20270 - protein, 481 aa, Bacillus sp.
HNGTNATMMQYFEWHLPNDGNHWNRLRDDASNLRNRGITAIWIPPAWKGTSQNDVGYGAYDLYDLGEFNQKGTVRTKYGTRSQLESAIHALKNNGVQVYGDVVMNHKAGADGTEFVTAVEVDPSNRNQETSGTYQIQAYTKFDFPGRGNTYSSFKWRWYHFDGTDWDESRKLNRIYKFSGKAWDWPVDTEFGNYDYLMFADLDMDHPEVVNELRRWGEWYTNTLNLDGFRIDAVKHIKFSFTRDWLTHVRNATGKGMFAVAEYWKNDLGALENYLSYTNWNHSVFDVPLHYNLYNASNTGGNYDMAKLLNGTVVQKHPMHAVTFVDNHDSQPGESLESFVQEWFKPLAYALILTREQGYPSVFYGDYYGIPTHSVPAMKAKIDPILAARQNFAYGTQHDYFDHHNIIGWTREGNTTHPNSGLATIMSDGPGGEKWMYVGQNKAGQVWHDITGNKPGTVTINADGWANFSVNKGSVSIWVKR

SEQ ID NO: 20271 - protein, 481 aa, Bacillus sp.
HNGTNATMMQYFEWHLPNDGNHWNRLRDDASNLRNNGITAIWIPPAWKGTSQNDVGYGAYDLYDLGEFNQKGTVRTKYGTRSQLESAIHALKNNGVQVYGDVVMNHKAGADGTEFVTAVEVDPSNRNQETSGTYQIQAYTKFDFPGRGNTYSSFKWRWYHFDGTDWDESRKLNRIYKFSGKAWDWPVDTEFGNYDYLMFADYDMDHPEVVNELRRWGEWYYNTLNLDGFRIDAVKHIKFSFTRDWLTHVRNATGKEMFAVAEFWKNDLGALENYLSYTNWNHSVFDVPLHYNLYNASNSRGNYDMAKLLNGTVVQKHPMHAVTFVDNHDSQPGESLESFVQEWFKPLAYALILTREQGYPSVFYGDYYGIPTHSVPAMKAKIDPILAARQNFAYGTQHDYFDHHNIIGWTREGNTTHPNSGLATIMSDGPGGEKWMYVGQNKAGQVWHDITGNKPGTVTINADGWANFSVNKGSVSIWVKR

SEQ ID NO: 20272 - protein, 481 aa, Bacillus sp.
HNGTNATMMQYFEWHLPNDGNHWNRLRDDASNLRNRGITAIWIPPAWKGTSQNDVGYGAYDLYDLGEFNQKGTVRTKYGTRSQLESAIHALKNNGVQVYGDVVMNHKAGADGTEFVTAVEVDPSNRNQETSGTYQIQAYTKFDFPGRGNTYSSFKWRWYHFDGTDWDESRKLNRIYKFSGKAWDWPVDTEFGNYDYLMFADYDMDHPEVVNELRRWGEWYFNTLNLDGFRIDAVKHIKFSFTRDWLTHVRNATGKGMFAVAEFWKNDLGALENYLSYTNWNHSVFDVPLHYNLYNASNYGGNYDMAKLLNGTVVQKHPMHAVTFVDNHDSQPGESLESFVQEWFKPLAYALILTREQGYPSVFYGDYYGIPTHSVPAMKAKIDPILAARQNFAYGTQHDYFDHHNIIGWTREGNTTHPNSGLATIMSDGPGGEKWMYVGQNKAGQVWHDITGNKPGTVTINADGWANFSVNKGSVSIWVKR

SEQ ID NO: 20273 - protein, 481 aa, Bacillus sp.
HDGTNATMMQYFEWHLPNDGNHWNRLRDDASNLRNRGITAIWIPPAWKGTSQNDVGYGAYDLYDLGEFNQKGTVRTKYGTRSQLESAIHALKNNGVQVYGDVVMNHKAGADGTEFVTAVEVDPSNRNQETSGTYQIQAYTKFDFPGRGNTYSSFKWRWYHFDGTDWDESRKLNRIYKFSGKAWDWPVDTEFGNYDYLMFADYDMDHPEVVNELRRWGEWYTNTLNLDGFRIDAVKHIKFSFTRDWLTHVRNATGKGMFAVAEFWKNDLGALENYLSYTNWNHSVFDVPLHYNLYNASNTGGNYDMAKLLNGTVVQKHPMHAVTFVDNHDSQPGESLESFVQEWFKPLAYALILTREQGYPSVFYGDYYGIPTHSVPAMKAKIDPILAARQNFAYGTQHDYFDHHNIIGWTREGNTTHPNSGLATIMSDGPGGEKWMYVGQNKAGQVWHDITGNKPGTVTINADGWANFSVNKGSVSIWVKR

SEQ ID NO: 20274 - protein, 481 aa, Bacillus sp.
HNGTNATMMQYFEWHLPNDGNHWNRLRDDASNLRNRGITAIWIPPAWKGTSQNDVGYGAYDLYDLGEFNQKGTVRTKYGTRSQLESAIHALKNNGVQVYGDVVMNHKAGADGTEFVTAVEVDPSNRNQETSGTYQIQAYTKFDFPGRGNTYSSFKWRWYHFDGTDWDESRKLNRIYKFSGKAWDWPVDTEFGNYDYLMFADYDMDHPEVVNELRRWGEWYTNTLNLDGFRIDAVKHIKFSFTRDWLTHVRNATGKGMFAVAEFWKNDLGALENYLSYTNWNHSVFDVPLHYNLYNASNSRGNYDMAKLLNGTVVQKHPMHAVTFVDNHDSQPGESLESFVQEWFKPLAYALILTREQGYPSVFYGDYYGIPTHSVPAMKAKIDPILAARQNFAYGTQHDYFDHHNIIGWTREGNTTPPNSGLATIMSDGPGGEKWMYVGQNKAGQVWHDITGNKPGTVTINADGWANFSVNKGSVSIWVKR

SEQ ID NO: 20275 - protein, 481 aa, Bacillus sp.
HDGTNATMMQYFEWHLPNDGNHWNRLRDDASNLRNRGITAIWIPPAWKGTSQNDVGYGAYDLYDLGEFNQKGTVRTKYGTRSQLESAIHALKNNGVQVYGDVVMNHKAGADGTEFVTAVEVDPSNRNQETSGTYQIQAYTKFDFPGRGNTYSSFKWRWYHFDGTDWDESRKLNRIYKFSGKAWDWPVDTEFGNYDYLMFADYDMDHPEVVNELRRWGEWYTNTLNLDGFRIDAVKHIKFSFTRDWLTHVRNATGKGMFAVAEFWKNDLGALENYLSYTNWNHSVFDVPLHYNLYNASNTGGNYDMAKLLNGTVVQKHPMHAVTFVDNHDSQPGESLESFVQEWFKPLAYALILTREQGYPSVFYGDYYGIPTHSVPAMKAKIDPILAARQNFAYGTQHDYFDHHNIIGWTREGNTTHPNSGLATIMSDGPGGEKWMYVGQNKAGQVWHDITGNKPGTVTINADGWANFSVNGHSVSIWVKR

SEQ ID NO: 20276 - protein, 481 aa, Bacillus sp.
HNGTNATMMQYFEWHLPNDGNHWNRLRDDASNLRNRGITAIWIPPAWKGTSQNDVGYGAYDLYDLGEFNQKGTVRTKYGTRSQLESAIHALKNNGVQVYGDVVMNHKAGADGTEFVTAVEVDPSNRNQETSGTYQIQAYTKFDFPGRGNTYSSFKWRWYHFDGTDWDESRKLNRIYKFQGKQWDWPVDTENGNYDYLMFADLDMDHPEVVNELRRWGEWYTNTLNLDGFRIDAVKHIKFSFTRDWLTHVRNATGKGMFAVAEYWKNDLGALENYLSYTNWNHSVFDVPLHYNLYNASNSRGNYDMAKLLNGTVVQKHPMHAVTFVDNHDSQPGESLESFVQEWFKPLAYALILTREQGYPSVFYGDYYGIPTHSVPAMKAKIDPILAARQNFAYGTQHDYFDHHNIIGWTREGNTTHPNSGLATIMSDGPGGEKWMYVGQNKAGQVWHDITGNKPGTVTINADGWANFSVNKGSVSIWVKR

SEQ ID NO: 20277 - protein, 481 aa, Bacillus sp.
HNGTNATMMQYFEWHLPNDGNHWNRLRDDASNLRNRGITAIWIPPAWKGTSQNDVGYGAYDLYDLGEFNQKGTVRTKYGTRSQLESAIHALKNNGVQVYGDVVMNHKAGADGTEFVTAVEVDPSNRNQETSGTYQIQAYTKFDFPGRGNTYSSFKWRWYHFDGTDWDESRKLNRIYKFSGKAWDWPVDTEFGNYDYLMFADYDMDHPEVVNELRRWGEWYTNTLNLDGFRIDAVKHIKFSFTRDWLTHVRNATGKGMFAVAEFWKNDLGALENYLSYTNWNHSVFDVPLHYNLYNASNYGGNYDMAKLLNGTVVQKHPMHAVTFVDNHDSQPGESLESFVQEWFKPLAYALILTREQGYPSVFYGDYYGIPTHSVPAMKAKIDPILAARQNFAYGTQHDYFDHHNIIGWTREGNTTAPNSGLATIMSDGPGGEKWMYVGQNKAGQVWHDITGNKPGTVTINADGWANFSVNKGSVSIWVKR

SEQ ID NO: 20278 - protein, 481 aa, Bacillus sp.
HNGTNATMMQYFEWHLPNDGNHWNRLRDDASNLRNRGITAIWIPPAWKGTSQNDVGYGAYDLYDLGEFNQKGTVRTKYGTRSQLESAIHALKNNGVQVYGDVVMNHKAGADGTEFVTAVEVDPSNRNQETSGTYQIQAYTKFDFPGRGNTYSSFKWRWYHFDGTDWDESRKLNRIYKFSGKAWDWPVDTEFGNYDYLMFADYDMDHPEVVNELRRWGEWYTNTLNLDGFRIDAVKHIKFSFTRDWLTHVRNATGKGDFAVAEFWKNDLGALENYLSYTNWNHSVFDVPLHYNLYNASNSRGNYDMAKLLNGTVVQKHPMHAVTFVDNHDSQPGESLESFVQEWFKPLAYALILTREQGYPSVFYGDYYGIPTHSVPAMKAKIDPILEARQDFAYGTQHDYFDHHNIIGWTREGNTTHPNSGLATIMSDGPGGEKWMYVGQNKAGQVWHDITGNKPGTVTINADGWANFSVNKGSVSIWVKR

SEQ ID NO: 20279 - protein, 481 aa, Bacillus sp.
HNGTNATMMQYFEWHLPNDGNHWNRLRDDASNLRNRGITAIWIPPAWKGTSQNDVGYGAYDLYDLGEFNQKGTVRTKYGTRSQLESAIHALKNNGVQVYGDVVMNHKAGADGTEFVDAVEVDPSNRNQETSGTYQIQAYTKFDFPGRGNTYSSFKWRWYHFDGTDWDESRKLNRIYKFTGKAWDWPVDTEFGNYDYLMFADLDMDHPEVVNELRRWGEWYTNTLNLDGFRIDAVKHIKFSFTRDWLTHVRNATGKGWFAVAEFWKNDLGALENYLSYTNWNHSVFDVPLHYNLYNASNSRGNYDMAKLLNGTVVQKHPMHAVTFVDNHDSQPGESLESFVQEWFKPLAYALILTREQGYPSVFYGDYYGIPTHSVPAMKAKIDPILAARQNFAYGTQHDYFDHHNIIGWTREGNTTHPNSGLATIMSDGPGGEKWMYVGQNKAGQVWHDITGNKPGTVTINADGWANFSVNGASVSIWVKR

SEQ ID NO: 20280 - protein, 481 aa, Bacillus sp.
HNGTNATMMQYFEWHLPNDGNHWNRLRDDASNLRNRGITAIWIPPAWKGTSQNDVGYGAYDLYDLGEFNQKGTVRTKYGTRSQLESAIHALKNNGVQVYGDVVMNHKAGADGTEFVTAVEVDPSNRNQETSGTYQIQAYTKFDFPGRGNTYSSFKWRWYHFDGTDWDESRKLNRIYKFSGKAWDWPVDTEFGNYDYLMFADYDMDHPEVVNELRRWGEWYTNTLNLDGFRIDAVKHIKFSFTRDWLTHVRNATGKGMFAVAEFWKNDLGALENYLSYTNWNHSVFDVPLHYNLYNASNSRGNYDMAKLLNGTVVQKHPMHAVTFVDNHDSQPGESLESFVQEWFKPLAYALILTREQGYPSVFYGDYYGIPTHSVPAMKAKIDPILAARQNFAYGTQHDYFDHHNIIGWTREGNTTAPNSGLATIMSDGPGGEKWMYVGQNKAGQVWHDITGNKPGTVTINADGWANFSVNGASVSIWVKR

SEQ ID NO: 20281 - protein, 481 aa, Bacillus sp.
HNGTNATMMQYFEWHLPNDGNHWNRLRDDASNLRNRGITAIWIPPAWKGTSQNDVGYGAYDLYDLGEFNQKGTVRTKYGTRSQLESAIHALKNNGVQVYGDVVMNHKAGADGTEFVDAVEVDPSNRNQETSGTYQIQAYTKFDFPGRGNTYSSFKWRWYHFDGTDWDESRKLNRIYKFDGKAWDWPVDTENGNYDYLMFADYDMDHPEVVNELRRWGEWYTNTLNLDGFRIDAVKHIKFQFTRDWLTHVRNATGKGMFAVAEFWKNDLGALENYLSYTNWNHSVFDVPLHYNLYNASNSRGNYDMAKLLNGTVVQKHPMHAVTFVDNHDSQPGESLESFVQEWFKPLAYALILTREQGYPSVFYGDYYGIPTHSVPAMKAKIDPILAARQNFAYGTQHDYFDHHNLIGWTREGNTTHPNSGLATIMSDGPGGEKWMYVGQNKAGQVWHDITGNKPGTVTINADGWANFSVNKGSVSIWVKR

SEQ ID NO: 20282 - protein, 481 aa, Bacillus sp.
HNGTNATMMQYFEWHLPNDGNHWNRLRDDASNLRNRGITAIWIPPAWKGTSQNDVGYGAYDLYDLGEFNQKGTVRTKYGTRSQLESAIHALKNNGVQVYGDVVMNHKAGADGTEFVTAVEVDPSNRNQETSGTYQIQAYTKFDFPGRGNTYSSFKWRWYHFDGTDWDESRKLNRIYKFSGKAWDWPVDTEFGNYDYLMFADYDMDHPEVVNELRRWGEWYTNTLNLDGFRIDAVKHIKFSFTRDWLTHVRNATGKGMFAVAEFWKNDLGALENYLSYTNWNHSVFDVPLHYNLYNASNTGGNYDMAKLLNGTVVQKHPMHAVTFVDNHDSQPGESLESFVQEWFKPLAYALILTREQGYPSVFYGDYYGIPTHSVPAMKAKIDPILEARQWFAYGTQHDYFDHHNIIGWTREGNTTAPNSGLATIMSDGPGGEKWMYVGQNKAGQVWHDITGNKPGTVTINADGWANFSVNKGSVSIWVKR

SEQ ID NO: 20283 - protein, 481 aa, Bacillus sp.
HDGTNATMMQYFEWHLPNDGNHWNRLRDDASNLRNRGITAIWIPPAWKGTSQNDVGYGAYDLYDLGEFNQKGTVRTKYGTRSQLESAIHALKNNGVQVYGDVVMNHKAGADGTEFVTAVEVDPSNRNQETSGTYQIQAYTKFDFPGRGNTYSSFKWRWYHFDGTDWDESRKLNRIYKFSGKAWDWPVDTEFGNYDYLMFADYDMDHPEVVNELRRWGEWYTNTLNLDGFRIDAVKHIKFSFTRDWLTHVRNADGKEMFAVAEFWKNDLGALENYLSYTNWNHSVFDVPLHYNLYNASNSRGNYDMAKLLNGTVVQKHPMHAVTFVDNHDSQPGESLESFVQEWFKPLAYALILTREQGYPSVFYGDYYGIPTHSVPAMKAKIDPILAARQNFAYGTQHDYFDHHNIIGWTREGNTTHPNSGLATIMSDGPGGEKWMYVGQNKAGQVWHDITGNKPGTVTINADGWANFSVNKGSVSIWVKR

SEQ ID NO: 20284 - protein, 481 aa, Bacillus sp.
HNGTNATMMQYFEWHLPNDGNHWNRLRDDASNLRNRGITAIWIPPAWKGTSQNDVGYGAYDLYDLGEFNQKGTVRTKYGTRSQLESAIHALKNNGVQVYGDVVMNHKAGADGTEFVTAVEVDPSNRNQETSGTYQIQAYTKFDFPGRGNTYSSFKWRWYHFDGTDWDESRKLNRIYKFSGKAWDWPVDTEFGNYDYLMFADYDMDHPEVVNELRRWGEWYTNTLNLDGFRIDAVKHIKFSFTRDWLTHVRNATGKGWFAVAEFWKNDLGALENYLSYTNWNHSVFDVPLHYNLYNASNTGGNYDMAKLLNGTVVQKHPMHAVTFVDNHDSQPGESLESFVQEWFKPLAYALILTREQGYPSVFYGDYYGIPTHSVPAMKAKIDPILAARQNFAYGTQHDYFDHHNIIGWTREGNTTHPNSGLATIMSDGPGGEKWMYVGQNKAGQVWHDITGNKPGTVTINADGWANFSVNKGSVSIWVKR

SEQ ID NO: 20285 - protein, 481 aa, Bacillus sp.
HNGTNATMMQYFEWHLPNDGNHWNRLRDDASNLRNRGITAIWIPPAWKGTSQNDVGYGAYDLYDLGEFNQKGTVRTKYGTRSQLESAIHALKNNGVQVYGDVVMNHKAGADGTEFVTAVEVDPSNRNQETSGTYQIQAYTKFDFPGRGNTYSSFKWRWYHFDGTDWDESRKLNRIYKFSGKAWDWPVDTEFGNYDYLMFADLDMDHPEVVNELRRWGEWYTNTLNLDGFRIDAVKHIKFSFTRDWLTHVRNATGKGDFAVAEFWKNDLGALENYLSYTNWNHSVFDVPLHYNLYNASNTGGNYDMAKLLNGTVVQKHPMHAVTFVDNHDSQPGESLESFVQEWFKPLAYALILTREQGYPSVFYGDYYGIPTHSVPAMKAKIDPILAARQNFAYGTQHDYFDHHNIIGWTREGNTTHPNSGLATIMSDGPGGEKWMYVGQNKAGQVWHDITGNKPGTVTINADGWANFSVNKGSVSIWVKR

SEQ ID NO: 20286 - protein, 481 aa, Bacillus sp.
HNGTNATMMQYFEWHLPNDGNHWNRLRDDASNLRNRGITAIWIPPAWKGTSQNDVGYGAYDLYDLGEFNQKGTVRTKYGTRSQLESAIHALKNNGVQVYGDVVMNHKAGADGTEFVTAVEVDPSNRNQETSGTYQIQAYTKFDFPGRGNTYSSFKWRWYHFDGTDWDESRKLNRIYKFSGKAWDWPVDTEFGNYDYLMFADYDMDHPEVVNELRRWGEWYYNTLNLDGFRIDAVKHIKFSFTRDWLTHVRNATGKGMFAVAEFWKNDLGALENYLSYTNWNHSVFDVPLHYNLYNASNSRGNYDMAKLLNGTVVQKHPMHAVTFVDNHDSQPGESLESFVQEWFKPLAYALILTREQGYPSVFYGDYYGIPTHSVPAMKAKIDPILAARQNFAYGTQHDYFDHHNIIGWTREGNTTHPNSGLATIMSDGPGGEKWMYVGQNKAGQVWHDITGNKPGTVTINADGWANFSVNGASVSIWVKR

SEQ ID NO: 20287 - protein, 481 aa, Bacillus sp.
HNGTNATMMQYFEWHLPNDGNHWNRLRDDASNLRNRGITAIWIPPAWKGTSQNDVGYGAYDLYDLGEFNQKGTVRTKYGTRSQLESAIHALKNNGVQVYGDVVMNHKAGADGTEFVTAVEVDPSNRNQETSGTYQIQAYTKFDFPGRGNTYSSFKWRWYHFDGTDWDESRKLNRIYKFSGKAWDWPVDTEFGNYDYLMFADYDMDHPEVVNELRRWGEWYTNTLNLDGFRIDAVKHIKFSFTRDWLTHVRNATGKGWFAVAEFWKNDLGALENYLSYTNWNHSVFDVPLHYNLYNASNSRGNYDMAKLLNGTVVQKHPMHAVTFVDNHDSQPGESLESFVQEWFKPLAYALILTREQGYPSVFYGDYYGIPTHSVPAMKAKIDPILAARQNFAYGTQHDYFDHHNIIGWTREGNTTHPNSGLATIMSDGPGGEKWMYVGQNKAGQVWHDITGNKPGTVTINADGWANFSVNGASVSIWVKR

SEQ ID NO: 20288 - protein, 481 aa, Bacillus sp.
HNGTNATMMQYFEWHLPNDGNHWNRLRDDASNLRNRGITAIWIPPAWKGTSQNDVGYGAYDLYDLGEFNQKGTVRTKYGTRSQLESAIHALKNNGVQVYGDVVMNHKAGADGTEFVTAVEVDPSNRNQETSGTYQIQAYTKFDFHGRGNTYSSFKWRWYHFDGTDWDESRKLNRIYKFSGKAWDWPVDTEFGNYDYLMFADYDMDHPEVVNELRRWGEWYTNTLNLDGFRIDAVKHIKFSFTRDWLTHVRNATGKGMFAVAEFWKNDLGALENYLSYTNWNHSVFDVPLHYNLYNASNTGGNYDMAKLLNGTVVQKHPMHAVTFVDNHDSQPGESLESFVQEWFKPLAYALILTREQGYPSVFYGDYYGIPTHSVPAMKAKIDPILAARQNFAYGTQHDYFDHHNIIGWTREGNTTHPNSGLATIMSDGPGGEKWMYVGQNKAGQVWHDITGNKPGTVTINADGWANFSVNKGSVSIWVKR

SEQ ID NO: 20289 - protein, 481 aa, Bacillus sp.
HNGTNATMMQYFEWHLPNDGNHWNRLRDDASNLRNRGITAIWIPPAWKGTSQNDVGYGAYDLYDLGEFNQKGTVRTKYGTRSQLESAIHALKNNGVQVYGDVVMNHKAGADGTEFVTAVEVDPSNRNQETSGTYQIQAYTKFDFPGRGNTYSSFKWRWYHFDGTDWDESRKLNRIYKFDGKAWDWPVDTEFGNYDYLMFADYDMDHPEVVNELRRWGEWYYNTLNLDGFRIDAVKHIKFSFTRDWLTHVRNATGKEMFAVAEYWKNDLGALENYLSYTNWNHSVFDVPLHYNLYNASNSRGNYDMAKLLNGTVVQKHPMHAVTFVDNHDSQPGESLESFVQEWFKPLAYALILTREQGYPSVFYGDYYGIPTHSVPAMKAKIDPILAARQNFAYGTQHDYFDHHNIIGWTREGNTTHPNSGLATIMSDGPGGEKWMYVGQNKAGQVWHDITGNKPGTVTINADGWANFSVNGASVSIWVKR

SEQ ID NO: 20290 - protein, 481 aa, Bacillus sp.
HNGTNATMMQYFEWHLPNDGNHWNRLRDDASNLRNNGITAIWIPPAWKGTSQNDVGYGAYDLYDLGEFNQKGTVRTKYGTRSQLESAIHALKNNGVQVYGDVVMNHKAGADGTEFVTAVEVDPSNRNQETSGTYQIQAYTKFDFPGRGNTYSSFKWRWYHFDGTDWDESRKLNRIYKFSGKAWDWPVDTEFGNYDYLMFADYDMDHPEVVNELRRWGEWYTNTLNLDGFRIDAVKHIKFSFTRDWLTHVRNATGKGMFAVAEFWKNDLGALENYLSYTNWNHSVFDVPLHYNLYNASNYGGNYDMAKLLNGTVVQKHPMHAVTFVDNHDSQPGESLESFVQEWFKPLAYALILTREQGYPSVFYGDYYGIPTHSVPAMKAKIDPILAARQNFAYGTQHDYFDHHNIIGWTREGNTTHPNSGLATIMSDGPGGEKWMYVGQNKAGQVWHDITGNKPGTVTINADGWANFSVNKGSVSIWVKR

SEQ ID NO: 20291 - protein, 481 aa, Bacillus sp.
HNGTNATMMQYFEWHLPNDGNHWNRLRDDASNLRNRGITAIWIPPAWKGTSQNDVGYGAYDLYDLGEFNQKGTVRTKYGTRSQLESAIHALKNNGVQVYGDVVMNHKAGADGTEFVDAVEVDPSNRNQETSGTYQIQAYTKFDFPGRGNTYSSFKWRWYHFDGTDWDESRKLNRIYKFTGKAWDWPVDTEFGNYDYLMFADLDMDHPEVVNELRRWGEWYTNTLNLDGFRIDAVKHIKFSFTRDWLTHVRNATGKGMFAVAEYWKNDLGALENYLSYTNWNHSVFDVPLHYNLYNASNSRGNYDMAKLLNGTVVQKHPMHAVTFVDNHDSQPGESLESFVQEWFKPLAYALILTREQGYPSVFYGDYYGIPTHSVPAMKAKIDPILAARQNFAYGTQHDYFDHHNIIGWTREGNTTHPNSGLATIMSDGPGGEKWMYVGQNKAGQVWHDITGNKPGTVTINADGWANFSVNKGSVSIWVKR

SEQ ID NO: 20292 - protein, 481 aa, Bacillus sp.
HNGTNATMMQYFEWHLPNDGNHWNRLRDDASNLRNRGITAIWIPPAWKGTSQNDVGYGAYDLYDLGEFNQKGTVRTKYGTRSQLESAIHALKNNGVQVYGDVVMNHKAGADGTEFVTAVEVDPSNRNQETSGTYQIQAYTKFDFPGRGNTYSSFKWRWYHFDGTDWDESRKLNRIYKFSGKAWDWPVDTEFGNYDYLMFADYDMDHPEVVNELRRWGEWYTNTLNLDGFRIDAVKHIKFSFTRDWLTHVRNATGKGMFAVAEFWKNDLGALENYLSYTNWNHSVFDVPLHYNLYNASNSRGNYDMAKLLNGTVVQKHPMHAVTFVDNHDSQPGESLESFVQEWFKPLAYALILTREQGYPSVFYGDYYGIPTHSVPAMKAKIDPILAARQNFAYGTQHDYFDHHNIIGWTREGNTTHPNSGLATIMSDGPGGEKWMYVGQNKAGQVWHDITGNKPGTVTINADGWAMFSVNKGSVSIWVKR

SEQ ID NO: 20293 - protein, 481 aa, Bacillus sp.
HDGTNATMMQYFEWHLPNDGNHWNRLRDDASNLRNRGITAIWIPPAWKGTSQNDVGYGAYDLYDLGEFNQKGTVRTKYGTRSQLESAIHALKNNGVQVYGDVVMNHKAGADGTEFVTAVEVDPSNRNQETSGTYQIQAYTKFDFPGRGNTYSSFKWRWYHFDGTDWDESRKLNRIYKFSGKAWDWPVDTEFGNYDYLMFADYDMDHPEVVNELRRWGEWYTNTLNLDGFRIDAVKHIKFSFTRDWLTHVRNATGKGMFAVAEFWKNDLGALENYLSYTNWNHSVFDVPLHYNLYNASNYGGNYDMAKLLNGTVVQKHPMHAVTFVDNHDSQPGESLESFVQEWFKPLAYALILTREQGYPSVFYGDYYGIPTHSVPAMKAKIDPILAARQNFAYGTQHDYFDHHNIIGWTREGNTTHPNSGLATIMSDGPGGEKWMYVGQNKAGQVWHDITGNKPGTVTINADGWANFSVLGGSVSIWVKR

SEQ ID NO: 20294 - protein, 481 aa, Bacillus sp.
HNGTNATMMQYFEWHLPNDGNHWNRLRDDASNLRNRGITAIWIPPAWKGTSQNDVGYGAYDLYDLGEFNQKGTVRTKYGTRSQLESAIHALKNNGVQVYGDVVMNHKAGADGTEFVTAVEVDPSNRNQETSGTYQIQAYTKFDFPGRGNTYSSFKWRWYHFDGTDWDESRKLNRIYKFSGKAWDWPVDTEFGNYDYLMFADLDMDHPEVVNELRRWGEWYTNTLNLDGFRIDAVKHIKFSFTRDWLTHVRNATGKGWFAVAEFWKNDLGALENYLSYTNWNHSVFDVPLHYNLYNASNSRGNYDMAKLLNGTVVQKHPMHAVTFVDNHDSQPGESLESFVQEWFKPLAYALILTREQGYPSVFYGDYYGIPTHSVPAMKAKIDPILAARQNFAYGTQHDYFDHHNIIGWTREGNTTHPNSGLATIMSDGPGGEKWMYVGQNKAGQVWHDITGNKPGTVTINADGWANFSVNGASVSIWVKR

SEQ ID NO: 20295 - protein, 481 aa, Bacillus sp.
HNGTNATMMQYFEWHLPNDGNHWNRLRDDASNLRNRGITAIWIPPAWKGTSQNDVGYGAYDLYDLGEFNQKGTVRTKYGTRSQLESAIHALKNNGVLVYGDVVMNHKAGADGTEFVTAVEVDPSNRNQETSGTYQIQAYTKFDFPGRGNTYSSFKWRWYHFDGTDWDESRKLNRIYKFSGKAWDWPVDTEFGNYDYLMFADYDMDHPEVVNELRRWGEWYTNTLNLDGFRIDAVKHIKFSFTRDWLTHVRNATGKGMFAVAEFWKNDLGALENYLSYTNWNHSVFDVPLHYNLYNASNSRGNYDMAKLLNGTVVQKHPMHAVTFVDNHDSQPGESLESFVQEWFKPLAYALILTREQGYPSVFYGDYYGIPTHSVPAMKAKIDPILAARQNFAYGTQHDYFDHHNIIGWTREGNTTHPNSGLATIMSDGPGGEKWMYVGQNKAGQVWHDITGNKPGTVTINADGWANFSVNKGSVSIWVKR

SEQ ID NO: 20296 - protein, 481 aa, Bacillus sp.
HGGTNATMMQYFEWHLPNDGNHWNRLRDDASNLRNRGITAIWIPPAWKGTSQNDVGYGAYDLYDLGEFNQKGTVRTKYGTRSQLESAIHALKNNGVQVYGDVVMNHKAGADGTEFVTAVEVDPSNRNQETSGTYQIQAYTKFDFPGRGNTYSSFKWRWYHFDGTDWDESRKLNRIYKFSGKAWDWPVDTEFGNYDYLMFADYDMDHPEVVNELRRWGEWYTNTLNLDGFRIDAVKHIKFSFTRDWLTHVRNATGKGMFAVAEFWKNDLGALENYLSYTNWNHSVFDVPLHYNLYNASNTGGNYDMAKLLNGTVVQKHPMHAVTFVDNHDSQPGESLESFVQEWFKPLAYALILTREQGYPSVFYGDYYGIPTHSVPAMKAKIDPILAARQNFAYGTQHDYFDHHNIIGWTREGNTTHPNSGLATIMSDGPGGEKWMYVGQNKAGQVWHDITGNKPGTVTINADGWANFSVNKGSVSIWVKR

SEQ ID NO: 20297 - protein, 481 aa, Bacillus sp.
HNGTNATMMQYFEWHLPNDGNHWNRLRDDASNLRNRGIGAIWIPPAWKGTSQNDVGYGAYDLYDLGEFNQKGTVRTKYGTRSQLESAIHALKNNGVQVYGDVVMNHKAGADGTEFVTAVEVDPSNRNQETSGTYQIQAYTKFDFPGRGNTYSSFKWRWYHFDGTDWDESRKLNRIYKFSGKAWDWPVDTEFGNYDYLMFADYDMDHPEVVNELRRWGEWYTNTLNLDGFRIDAVKHIKFSFTRDWLTHVRNATGKGMFAVAEFWKNDLGALENYLSYTNWNHSVFDVPLHYNLYNASNYGGNYDMAKLLNGTVVQKHPMHAVTFVDNHDSQPGESLESFVQEWFKPLAYALILTREQGYPSVFYGDYYGIPTHSVPAMKAKIDPILAARQNFAYGTQHDYFDHHNIIGWTREGNTTHPNSGLATIMSDGPGGEKWMYVGQNKAGQVWHDITGNKPGTVTINADGWANFSVNKGSVSIWVKR

SEQ ID NO: 20298 - protein, 481 aa, Bacillus sp.
HNGTNATMMQYFEWHLPNDGNHWNRLRDDASNLRNAGITAIWIPPAWKGTSQNDVGYGAYDLYDLGEFNQKGTVRTKYGTRSQLESAIHALKNNGVQVYGDVVMNHKAGADGTEFVTAVEVDPSNRNQETSGTYQIQAYTKFDFPGRGNTYSSFKWRWYHFDGTDWDESRKLNRIYKFSGKAWDWPVDTEFGNYDYLMFADYDMDHPEVVNELRRWGEWYTNTLNLDGFRIDAVKHIKFSFTRDWLTHVRNATGKGMFAVAEFWKNDLGALENYLSYTNWNHSVFDVPLHYNLYNASNSRGNYDMAKLLNGTVVQKHPMHAVTFVDNHDSQPGESLESFVQEWFKPLAYALILTREQGYPSVFYGDYYGIPTHSVPAMKAKIDPILAARQNFAYGTQHDYFDHHNIIGWTREGNTTHPNSGLATIMSDGPGGEKWMYVGQNKAGQVWHDITGNKPGTVTINADGWANFSVNKGSVSIWVKR

SEQ ID NO: 20299 - protein, 481 aa, Bacillus sp.
HNGTNATMMQYFEWHLPNDGNHWNRLRDDASNLRNAGITAIWIPPAWKGTSQNDVGYGAYDLYDLGEFNQKGTVRTKYGTRSQLESAIHALKNNGVQVYGDVVMNHKAGADGTEFVTAVEVDPSNRNQETSGTYQIQAYTKFDFPGRGNTYSSFKWRWYHFDGTDWDESRKLNRIYKFSGKAWDWPVDTEFGNYDYLMFADYDMDHPEVVNELRRWGEWYFNTLNLDGFRIDAVKHIKFSFTRDWLTHVRNATGKEMFAVAEFWKNDLGALENYLSYTNWNHSVFDVPLHYNLYNASNSRGNYDMAKLLNGTVVQKHPMHAVTFVDNHDSQPGESLESFVQEWFKPLAYALILTREQGYPSVFYGDYYGIPTHSVPAMKAKIDPILAARQNFAYGTQHDYFDHHNIIGWTREGNTTHPNSGLATIMSDGPGGEKWMYVGQNKAGQVWHDITGNKPGTVTINADGWANFSVNKGSVSIWVKR

SEQ ID NO: 20300 - protein, 481 aa, Bacillus sp.
HNGTNATMMQYFEWHLPNDGNHWNRLRDDASNLRNRGITAIWIPPAWKGTSQNDVGYGAYDLYDLGEFNQKGTVRTKYGTRSQLESAIHALKNNGVQVYGDVVMNHKAGADGTEFVTAVEVDPSNRNQETSGTYQIQAYTKFDFPGRGNTYSSFKWRWYHFDGTDWDESRKLNRIYKFSGKAWDWPVDTEFGNYDYLMFADYDMDHPEVVNELRRWGEWYFNTLNLDGFRIDAVKHIKFSFTRDWLTHVRNATGKGMFAVAEFWKNDLGALENYLSYTNWNHSVFDVPLHYNLYNASNTGGNYDMAKLLNGTVVQKHPMHAVTFVDNHDSQPGESLESFVQEWFKPLAYALILTREQGYPSVFYGDYYGIPTHSVPAMKAKIDPILAARQNFAYGTQHDYFDHHNIIGWTREGNTTHPNSGLATIMSDGPGGEKWMYVGQNKAGQVWHDITGNKPGTVTINADGWANFSVNKGSVSIWVKR

SEQ ID NO: 20301 - protein, 481 aa, Bacillus sp.
HDGTNATMMQYFEWHLPNDGNHWNRLRDDASNLRNRGITAIWIPPAWKGTSQNDVGYGAYDLYDLGEFNQKGTVRTKYGTRSQLESAIHALKNNGVQVYGDVVMNHKAGADGTEFVTAVEVDPSNRNQETSGTYQIQAYTKFDFPGRGNTYSSFKWRWYHFDGTDWDESRKLNRIYKFSGKAWDWPVDTEFGNYDYLMFADYDMDHPEVVNELRRWGEWYTNTLNLDGFRIDAVKHIKFSFTRDWLTHVRNATGKGMFAVAEFWKNDLGALENYLSYTNWNHSVFDVPLHYNLYNASNYGGNYDMAKLLNGTVVQKHPMHAVTFVDNHDSQPGESLESFVQEWFKPLAYALILTREQGYPSVFYGDYYGIPTHSVPAMKAKIDPILAARQNFAYGTQHDYFDHHNIIGWTREGNTTHPNSGLATIMSDGPGGEKWMYVGQNKAGQVWHDITGNKPGTVTINADGWANFSVNKGSVSIWVKR

SEQ ID NO: 20302 - protein, 481 aa, Bacillus sp.
HNGTNATMMQYFEWHLPNDGNHWNRLRDDASNLRNRGITAIWIPPAWKGTSQNDVGYGAYDLYDLGEFNQKGTVRTKYGTRSQLESAIHALKNNGVQVYGDVVMNHKAGADGTEFVTAVEVDPSNRNQETSGTYQIQAYTKFDFPGRGNTYSSFKWRWYHFDGTDWDESRKLNRIYKFSGKAWDWPVDTEFGNYDYLMFADYDMDHPEVVNELRRWGEWYTNTLNLDGFRIDAVKHIKFSFTRDWLTHVRNATGKGMFAVAEFWKNDLGALENYLSYTNWNHSVFDVPLHYNLYNASNSRGNYDMAKLLNGTVVQKHPMHAVTFVDNHDSQPGESLESFVQEWFKPLAYALILTREQGYPSVFYGDYYGIPTHSVPAMKAKIDPILEARQWFAYGTQHDYFDHHNIIGWTREGNTTPPNSGLATIMSDGPGGEKWMYVGQNKAGQVWHDITGNKPGTVTINADGWANFSVLGGSVSIWVKR

SEQ ID NO: 20303 - protein, 481 aa, Bacillus sp.
HNGTNATMMQYFEWHLPNDGNHWNRLRDDASNLRNRGITAIWIPPAWKGTSQNDVGYGAYDLYDLGEFNQKGTVRTKYGTRSQLESAIHALKNNGVQVYGDVVMNHKAGADGTEFVTAVEVDPSNRNQETSGTYQIQAYTKFDFPGRGNTYSSFKWRWYHFDGTDWDESRKLNRIYKFSGKQWDWPVDTEFGNYDYLMFADLDMDHPEVVNELRRWGEWYTNTLNLDGFRIDAVKHIKFSFTRDWLTHVRNATGKGMFAVAEFWKNDLGALENYLSYTNWNHSVFDVPLHYNLYNASNTGGNYDMAKLLNGTVVQKHPMHAVTFVDNHDSQPGESLESFVQEWFKPLAYALILTREQGYPSVFYGDYYGIPTHSVPAMKAKIDPILAARQNFAYGTQHDYFDHHNIIGWTREGNTTHPNSGLATIMSDGPGGEKWMYVGQNKAGQVWHDITGNKPGTVTINADGWANFSVNKGSVSIWVKR

SEQ ID NO: 20304 - protein, 481 aa, Bacillus sp.
HNGTNATMMQYFEWHLPNDGNHWNRLRDDASNLRNRGITAIWIPPAWKGTSQNDVGYGAYDLYDLGEFNQKLTVRTKYGTRSQLESAIHALKNNGVQVYGDVVMNHKAGADGTEFVTAVEVDPSNRNQETSGTYQIQAYTKFDFPGRGNTYSSFKWRWYHFDGTDWDESRKLNRIYKFSGKAWDWPVDTEFGNYDYLMFADYDMDHPEVVNELRRWGEWYTNTLNLDGFRIDAVKHIKFSFTRDWLTHVRNATGKGMFAVAEFWKNDLGALENYLSYTNWNHSVFDVPLHYNLYNASNYGGNYDMAKLLNGTVVQKHPMHAVTFVDNHDSQPGESLESFVQEWFKPLAYALILTREQGYPSVFYGDYYGIPTHSVPAMKAKIDPILAARQNFAYGTQHDYFDHHNIIGWTREGNTTHPNSGLATIMSDGPGGEKWMYVGQNKAGQVWHDITGNKPGTVTINADGWANFSVNKGSVSIWVKR

SEQ ID NO: 20305 - protein, 481 aa, Bacillus sp.
HNGTNATMMQYFEWHLPNDGNHWNRLRDDASNLRNAGITAIWIPPAWKGTSQNDVGYGAYDLYDLGEFNQKGTVRTKYGTRSQLESAIHALKNNGVQVYGDVVMNHKAGADGTEFVTAVEVDPSNRNQETSGTYQIQAYTKFDFPGRGNTYSSFKWRWYHFDGTDWDESRKLNRIYKFSGKAWDWPVDTEFGNYDYLMFADYDMDHPEVVNELRRWGEWYTNTLNLDGFRIDAVKHIKFSFTRDWLTHVRNATGKGMFAVAEFWKNDLGALENYLSYTNWNHSVFDVPLHYNLYNASNYGGNYDMAKLLNGTVVQKHPMHAVTFVDNHDSQPGESLESFVQEWFKPLAYALILTREQGYPSVFYGDYYGIPTHSVPAMKAKIDPILEARQDFAYGTQHDYFDHHNIIGWTREGNTTHPNSGLATIMSDGPGGEKWMYVGQNKAGQVWHDITGNKPGTVTINADGWANFSVNKGSVSIWVKR

SEQ ID NO: 20306 - protein, 481 aa, Bacillus sp.
HNGTNATMMQYFEWHLPNDGNHWNRLRDDASNLRNRGITAIWIPPAWKGTSQNDVGYGAYDLYDLGEFNQKGTVRTKYGTRSQLESAIHALKNNGVQVYGDVVMNHKAGADGTEFVTAVEVDPSNRNQETSGTYQIQAYTKFDFPGRGNTYSSFKWRWYHFDGTDWDESRKLNRIYKFSGKAWDWPVDTEFGNYDYLMFADYDMDHPEVVNELRRWGEWYTNTLNLDGFRIDAVKHIKFSFTRDWLTHVRNATGKGMFAVAEFWKNDLGALENYLSYTNWNHSVFDVPLHYNLYNASNSRGNYDMAKLLNGTVVQKHPMHAVTFVDNHDSQPGESLESFVQEWFKPLAYALILTREQGYPSVFYGDYYGIPTHSVPAMKAKIDPILAARQNFAYGTQHDYFDHHNIIGWTREGNTTAPNSGLATIMSDGPGGEKWMYVGQNKAGQVWHDITGNKPGTVTINADGWANFSVNGHSVSIWVKR

SEQ ID NO: 20307 - protein, 481 aa, Bacillus sp.
HNGTNATMMQYFEWHLPNDGNHWNRLRDDASNLRNRGITAIWIPPAWKGTSQNDVGYGAYDLYDLGEFNQKGTVRTKYGTRSQLESAIHALKNNGVQVYGDVVMNHKAGADGTEFVTAVEVDPSNRNQETSGTYQIQAYTKFDFPGRGNTYSSFKWRWYHFDGTDWDESRKLNRIYKFSGKQWDWPVDTENGNYDYLMFADLDMDHPEVVNELRRWGEWYTNTLNLDGFRIDAVKHIKFSFTRDWLTHVRNATGKGMFAVAEYWKNDLGALENYLSYTNWNHSVFDVPLHYNLYNASNSRGNYDMAKLLNGTVVQKHPMHAVTFVDNHDSQPGESLESFVQEWFKPLAYALILTREQGYPSVFYGDYYGIPTHSVPAMKAKIDPILAARQNFAYGTQHDYFDHHNIIGWTREGNTTHPNSGLATIMSDGPGGEKWMYVGQNKAGQVWHDITGNKPGTVTINADGWANFSVNKGSVSIWVKR

SEQ ID NO: 20308 - protein, 481 aa, Bacillus sp.
HNGTNATMMQYFEWHLPNDGNHWNRLRDDASNLRNRGITAIWIPPAWKGTSQNDVGYGAYDLYDLGEFNQKGTVRTKYGTRSQLESAIHALKNNGVQVYGDVVMNHKAGADGTEFVDAVEVDPSNRNQETSGTYQIQAYTKFDFPGRGNTYSSFKWRWYHFDGTDWDESRKLNRIYKFTGKAWDWPVDTEFGNYDYLMFADLDMDHPEVVNELRRWGEWYTNTLNLDGFRIDAVKHIKFSFTRDWLTHVRNATGKGMFAVAEYWKNDLGALENYLSYTNWNHSVFDVPLHYNLYNASNTGGNYDMAKLLNGTVVQKHPMHAVTFVDNHDSQPGESLESFVQEWFKPLAYALILTREQGYPSVFYGDYYGIPTHSVPAMKAKIDPILAARQNFAYGTQHDYFDHHNIIGWTREGNTTHPNSGLATIMSDGPGGEKWMYVGQNKAGQVWHDITGNKPGTVTINADGWANFSVNKGSVSIWVKR

SEQ ID NO: 20309 - protein, 481 aa, Bacillus sp.
HNGTNATMMQYFEWHLPNDGNHWNRLRDDASNLRNNGITAIWIPPAWKGTSQNDVGYGAYDLYDLGEFNQKGTVRTKYGTRSQLESAIHALKNNGVQVYGDVVMNHKAGADGTEFVTAVEVDPSNRNQETSGTYQIQAYTKFDFPGRGNTYSSFKWRWYHFDGTDWDESRKLNRIYKFSGKAWDWPVDTEFGNYDYLMFADLDMDHPEVVNELRRWGEWYTNTLNLDGFRIDAVKHIKFSFTRDWLTHVRNATGKGMFAVAEFWKNDLGALENYLSYTNWNHSVFDVPLHYNLYNASNYGGNYDMAKLLNGTVVQKHPMHAVTFVDNHDSQPGESLESFVQEWFKPLAYALILTREQGYPSVFYGDYYGIPTHSVPAMKAKIDPILAARQNFAYGTQHDYFDHHNIIGWTREGNTTHPNSGLATIMSDGPGGEKWMYVGQNKAGQVWHDITGNKPGTVTINADGWANFSVNKGSVSIWVKR

SEQ ID NO: 20310 - protein, 481 aa, Bacillus sp.
HNGTNATMMQYFEWHLPNDGNHWNRLRDDASNLRNRGITAIWIPPAWKGTSQNDVGYGAYDLYDLGEFNQKGTVRTKYGTRSQLESAIHALKNNGVQVYGDVVMNHKAGADGTEFVTAVEVDPSNRNQETSGTYQIQAYTKFDFPGRGNTYSSFKWRWYHFDGTDWDESRKLNRIYKFDGKAWDWPVDTEFGNYDYLMFADLDMDHPEVVNELRRWGEWYTNTLNLDGFRIDAVKHIKFSFTRDWLTHVRNATGKGDFAVAEFWKNDLGALENYLSYTNWNHSVFDVPLHYNLYNASNTGGNYDMAKLLNGTVVQKHPMHAVTFVDNHDSQPGESLESFVQEWFKPLAYALILTREQGYPSVFYGDYYGIPTHSVPAMKAKIDPILAARQNFAYGTQHDYFDHHNIIGWTREGNTTHPNSGLATIMSDGPGGEKWMYVGQNKAGQVWHDITGNKPGTVTINADGWANFSVNKGSVSIWVKR

SEQ ID NO: 20311 - protein, 481 aa, Bacillus sp.
HNGTNATMMQYFEWHLPNDGNHWNRLRDDASNLRNRGITAIWIPPAWKGTSQNDVGYGAYDLYDLGEFNQKGTVRTKYGTRSQLESAIHALKNNGVQVYGDVVMNHKAGADGTEFVTAVEVDPSNRNQETSGTYQIQAYTKFDFPGRGNTYSSFKWRWYHFDGTDWDESRKLNRIYKFSGKAWDWPVDTEFGNYDYLMFADYDMDHPEVVNELRRWGEWYTNTLNLDGFRIDAVKHIKFSFTRDWLTHVRNATGKGMFAVAEFWKNDLGALENYLSYTNWNHSVFDVPLHYNLYNASNSRGNYDMAKLLNGTVVQKHPMHAVTFVDNHDSQPGESLESFVQEWFKPLAYALILTREQGYPSVFYGDYYGIPTHSVPAMKAKIDPILEARQWFAYGTQHDYFDHHNIIGWTREGNTTAPNSGLATIMSDGPGGEKWMYVGQNKAGQVWHDITGNKPGTVTINADGWANFSVNKGSVSIWVKR

SEQ ID NO: 20312 - protein, 481 aa, Bacillus sp.
HNGTNATMMQYFEWHLPNDGNHWNRLRDDASNLRNAGITAIWIPPAWKGTSQNDVGYGAYDLYDLGEFNQKGTVRTKYGTRSQLESAIHALKNNGVQVYGDVVMNHKAGADGTEFVTAVEVDPSNRNQETSGTYQIQAYTKFDFPGRGNTYSSFKWRWYHFDGTDWDESRKLNRIYKFSGKAWDWPVDTEFGNYDYLMFADYDMDHPEVVNELRRWGEWYTNTLNLDGFRIDAVKHIKFSFTRDWLTHVRNATGKGMFAVAEFWKNDLGALENYLSYTNWNHSVFDVPLHYNLYNASNYGGNYDMAKLLNGTVVQKHPMHAVTFVDNHDSQPGESLESFVQEWFKPLAYALILTREQGYPSVFYGDYYGIPTHSVPAMKAKIDPILAARQNFAYGTQHDYFDHHNIIGWTREGNTTHPNSGLATIMSDGPGGEKWMYVGQNKAGQVWHDITGNKPGTVTINADGWANFSVNKGSVSIWVKR

SEQ ID NO: 20313 - protein, 481 aa, Bacillus sp.
HNGTNATMMQYFEWHLPNDGNHWNRLRDDASNLRNRGITAIWIPPAWKGTSQNDVGYGAYDLYDLGEFNQKGTVRTKYGTRSQLESAIHALKNNGVQVYGDVVMNHKAGADGTEFVTAVEVDPSNRNQETSGTEQIQAYTKFDFPGRGNTYSSFKWRWYHFDGTDWDESRKLNRIYKFSGKAWDWPVDTEFGNYDYLMFADYDMDHPEVVNELRRWGEWYTNTLNLDGFRIDAVKHIKFSFTRDWLTHVRNATGKGMFAVAEFWKNDLGALENYLSYTNWNHSVFDVPLHYNLYNASNTGGNYDMAKLLNGTVVQKHPMHAVTFVDNHDSQPGESLESFVQEWFKPLAYALILTREQGYPSVFYGDYYGIPTHSVPAMKAKIDPILAARQNFAYGTQHDYFDHHNIIGWTREGNTTHPNSGLATIMSDGPGGEKWMYVGQNKAGQVWHDITGNKPGTVTINADGWANFSVLGGSVSIWVKR

SEQ ID NO: 20314 - protein, 481 aa, Bacillus sp.
HNGTNATMMQYFEWHLPNDGNHWNRLRDDASNLRNRGITAIWIPPAWKGTSQNDVGYGAYDLYDLGEFNQKGTVRTKYGTRSQLESAIHALKNNGVQVYGDVVMNHKAGADGTEFVTAVEVDPSNRNQETSGTYQIQAYTKFDFPGRGNTYSSFKWRWYHFDGTDWDESRKLNRIYKFSGKQWDWPVDTEFGNYDYLMFADLDMDHPEVVNELRRWGEWYTNTLNLDGFRIDAVKHIKFSFTRDWLTHVRNATGKGMFAVAEFWKNDLGALENYLSYTNWNHSVFDVPLHYNLYNASNSRGNYDMAKLLNGTVVQKHPMHAVTFVDNHDSQPGESLESFVQEWFKPLAYALILTREQGYPSVFYGDYYGIPTHSVPAMKAKIDPILAARQNFAYGTQHDYFDHHNIIGWTREGNTTHPNSGLATIMSDGPGGEKWMYVGQNKAGQVWHDITGNKPGTVTINADGWANFSVNGASVSIWVKR

SEQ ID NO: 20315 - protein, 481 aa, Bacillus sp.
HNGTNATMMQYFEWHLPNDGNHWNRLRDDASNLRNRGITAIWIPPAWKGTSQNDVGYGAYDLYDLGEFNQKGTVRTKYGTRSQLESAIHALKNNGVLVYGDVVMNHKAGADGTEFVTAVEVDPSNRNQETSGTYQIQAYTKFDFPGRGNTYSSFKWRWYHFDGTDWDESRKLNRIYKFSGKAWDWPVDTEFGNYDYLMFADYDMDHPEVVNELRRWGEWYTNTLNLDGFRIDAVKHIKFSFTRDWLTHVRNATGKGMFAVAEFWKNDLGALENYLSYTNWNHSVFDVPLHYNLYNASNYGGNYDMAKLLNGTVVQKHPMHAVTFVDNHDSQPGESLESFVQEWFKPLAYALILTREQGYPSVFYGDYYGIPTHSVPAMKAKIDPILAARQNFAYGTQHDYFDHHNIIGWTREGNTTHPNSGLATIMSDGPGGEKWMYVGQNKAGQVWHDITGNKPGTVTINADGWANFSVNKGSVSIWVKR

SEQ ID NO: 20316 - protein, 481 aa, Bacillus sp.
HNGTNATMMQYFEWHLPNDGNHWNRLRDDASNLRNRGITAIWIPPAWKGTSQNDVGYGAYDLYDLGEFNQKGTVRTKYGTRSQLESAIHALKNNGVQVYGDVVMNHKAGADGTEFVTAVEVDPSNRNQETDGTYQIQAYTKFDFPGRGNTYSSFKWRWYHFDGTDWDESRKLNRIYKFSGKAWDWPVDTEFGNYDYLMFADYDMDHPEVVNELRRWGEWYTNTLNLDGFRIDAVKHIKFSFTRDWLTHVRNATGKGMFAVAEFWKNDLGALENYLSYTNWNHSVFDVPLHYNLYNASNTGGNYDMAKLLNGTVVQKHPMHAVTFVDNHDSQPGESLESFVQEWFKPLAYALILTREQGYPSVFYGDYYGIPTHSVPAMKAKIDPILAARQNFAYGTQHDYFDHHNIIGWTREGNTTHPNSGLATIMSDGPGGEKWMYVGQNKAGQVWHDITGNKPGTVTINADGWANFSVNKGSVSIWVKR

SEQ ID NO: 20317 - protein, 481 aa, Bacillus sp.
HNGTNATMMQYFEWHLPNDGNHWNRLRDDASNLRNRGITAIWIPPAWKGTSQNDVGYGAYDLYDLGEFNQKGTVRTKYGTRSQLESAIHALKNNGVQVYGDVVMNHKAGADGTEFVTAVEVDPSNRNQETSGTYQIQAYTKFDFPGRGNTYSSFKWRWYHFDGTDWDESRKLNRIYKFSGKAWDWPVDTEFGNYDYLMFADYDMDHPEVVNELRRWGEWYTNTLNLDGFRIDAVKHIKFSFTRDWLTHVRNATGKGMFAVAEFWKNDLGALENYLSYTNWNHSVFDVPLHYNLYNASNTGGNYDMAKLLNGTVVQKHPMHAVTFVDNHDSQPGESLESFVQEWFKPLAYALILTREQGVPSVFYGDYYGIPTHSVPAMKAKIDPILAARQNFAYGTQHDYFDHHNIIGWTREGNTTHPNSGLATIMSDGPGGEKWMYVGQNKAGQVWHDITGNKPGTVTINADGWANFSVNKGSVSIWVKR

SEQ ID NO: 20318 - protein, 481 aa, Bacillus sp.
HNGTNATMMQYFEWHLPNDGNHWNRLRDDASNLRNRGITAIWIPPAWKGTSQNDVGYGAYDLYDLGEFNQKGTVRTKYGTRSQLESAIHALKNNGVLVYGDVVMNHKAKADGTEFVDAVEVDPSNRNQETDGTEQIQAWTKFDFPGRGNTYSSFKWRWYHFDGTDWDESRKLNRIYKFTGKAWDWEVDTENGNYDYLMFADLDMDHPEVVNELRRWGEWYTNTLNLDGFRIDAVKHIKFSFTRDWLTHVRNATGKGMFAVAEFWKNDLGALENYLSKTNWNHSVFDVPLHYNLYNASNSRGNYDMAKLLNGAVVQKHPMHAVTFVDNHDSQPGESLESFVQEWFKPLAYALILTREQGYPSVFYGDYYGIPTHSVPAMKAKIDPILAARQNFAYGTQHDYFDHHNIIGWTREGNTTHPNSGLATIMSDGPGGEKWMYVGQNKAGQVWHDITGNKPGTVTINADGWANFSVNKGSVSIWVKR

SEQ ID NO: 20319 - protein, 481 aa, Bacillus sp.
HNGTNATMMQYFEWHLPNDGNHWNRLRDDASNLRNAGITAIWIPPAWKGTSQNDVGYGAYDLYDLGEFNQKGTVRTKYGTRSQLESAIHALKNNGVQVYGDVVMNHKAGADGTEFVTAVEVDPSNRNQETSGTYQIQAYTKFDFPGRGNTYSSFKWRWYHFDGTDWDESRKLNRIYKFSGKAWDWPVDTEFGNYDYLMFADYDMDHPEVVNELRRWGEWYTNTLNLDGFRIDAVKHIKFSFTRDWLTHVRNATGKGMFAVAEFWKNDLGALENYLSYTNWNHSVFDVPLHYNLYNASNYGGNYDMAKLLNGTVVQKHPMHAVTFVDNHDSQPGESLESFVQEWFKPLAYALILTREQGYPSVFYGDYYGIPTHSVPAMKAKIDPILAARQNFAYGTQHDYFDHHNIIGWTREGNTTHPNSGLATIMSDGPGGEKWMYVGQNKAGQVWHDITGNKPGTVTINADGWANFSVLGGSVSIWVKR

SEQ ID NO: 20320 - protein, 481 aa, Bacillus sp.
HNGTNATMMQYFEWHLPNDGNHWNRLRDDASNLRNRGITAIWIPPAWKGTSQNDVGYGAYDLYDLGEFNQKGTVRTKYGTRSQLESAIHALKNNGVQVYGDVVMNHKAGADGTEFVTAVEVDPSNRNQETSGTYQIQAYTKFDFPGRGNTYSSFKWRWYHFDGTDWDESRKLNRIYKFSGKAWDWPVDTEFGNYDYLMFADYDMDHPEVVNELRRWGEWYTNTLNLDGFRIDAVKHIKFSFTRDWLTHVRNATGKGMFAVAEFWKNDLGALENYLSYTNWNHSVFDVPLHYNLYNASNSRGNYDMAKLLNGTVVQKHPMHAVTFVDNHDSQPGESLESFVQEWFKPLAYALILTREQGYPSVFYGDYYGIPTHSVPAMKAKIDPILEARQDFAYGTQHDYFDHHNIIGWTMEGNTTHPNSGLATIMSDGPGGEKWMYVGQNKAGQVWHDITGNKPGTVTINADGWANFSVNKGSVSIWVKR

SEQ ID NO: 20321 - protein, 481 aa, Bacillus sp.
HNGTNATMMQYFEWHLPNDGNHWNRLRDDASNLRNRGITAIWIPPAWKGTSQNDVGYGAYDLYDLGEFNQKGTVRTKYGTRSQLESAIHALKNNGVQVYGDVVMNHKAGADGTEFVTAVEVDPSNRNQETDGTYQIQAYTKFDFPGRGNTYSSFKWRWYHFDGTDWDESRKLNRIYKFSGKAWDWPVDTEFGNYDYLMFADYDMDHPEVVNELRRWGEWYTNTLNLDGFRIDAVKHIKFSFTRDWLTHVRNATGKGMFAVAEFWKNDLGALENYLSYTNWNHSVFDVPLHYNLYNASNYGGNYDMAKLLNGTVVQKHPMHAVTFVDNHDSQPGESLESFVQEWFKPLAYALILTREQGYPSVFYGDYYGIPTHSVPAMKAKIDPILAARQNFAYGTQHDYFDHHNIIGWTREGNTTHPNSGLATIMSDGPGGEKWMYVGQNKAGQVWHDITGNKPGTVTINADGWANFSVNKGSVSIWVKR

SEQ ID NO: 20322 - protein, 481 aa, Bacillus sp.
HDGTNATMMQYFEWHLPNDGNHWNRLRDDASNLRNRGITAIWIPPAWKGTSQNDVGYGAYDLYDLGEFNQKGTVRTKYGTRSQLESAIHALKNNGVQVYGDVVMNHKAGADGTEFVTAVEVDPSNRNQETSGTYQIQAYTKFDFPGRGNTYSSFKWRWYHFDGTDWDESRKLNRIYKFSGKAWDWPVDTEFGNYDYLMFADYDMDHPEVVNELRRWGEWYTNTLNLDGFRIDAVKHIKFSFTRDWLTHVRNATGKGMFAVAEFWKNDLGALENYLSYTNWNHSVFDVPLHYNLYNASNSRGNYDMAKLLNGTVVQKHPMHAVTFVDNHDSQPGESLESFVQEWFKPLAYALILTREQGYPSVFYGDYYGIPTHSVPAMKAKIDPILAARQNFAYGTQHDYFDHHNIIGWTREGNTTHPNSGLATIMSDGPGGEKWMYVGQNKAGQVWHDITGNKPGTVTINADGWANFSVNKGSVSIWVKR

SEQ ID NO: 20323 - protein, 481 aa, Bacillus sp.
HNGTNATMMQYFEWHLPNDGNHWNRLRDDASNLRNAGITAIWIPPAWKGTSQNDVGYGAYDLYDLGEFNQKGTVRTKYGTRSQLESAIHALKNNGVQVYGDVVMNHKAGADGTEFVTAVEVDPSNRNQETSGTYQIQAYTKFDFPGRGNTYSSFKWRWYHFDGTDWDESRKLNRIYKFSGKAWDWPVDTEFGNYDYLMFADYDMDHPEVVNELRRWGEWYTNTLNLDGFRIDAVKHIKFSFTRDWLTHVRNATGKGMFAVAEFWKNDLGALENYLSYTNWNHSVFDVPLHYNLYNASNTGGNYDMAKLLNGTVVQKHPMHAVTFVDNHDSQPGESLESFVQEWFKPLAYALILTREQGYPSVFYGDYYGIPTHSVPAMKAKIDPILAARQNFAYGTQHDYFDHHNIIGWTREGNTTHPNSGLATIMSDGPGGEKWMYVGQNKAGQVWHDITGNKPGTVTINADGWANFSVNKGSVSIWVKR

SEQ ID NO: 20324 - protein, 481 aa, Bacillus sp.
HNGTNATMMQYFEWHLPNDGNHWNRLRDDASNLRNRGITAIWIPPAWKGTSQNDVGYGAYDLYDLGEFNQKGTVRTKYGTRSQLESAIHALKNNGVQVYGDVVMNHKAGADGTEFVDAVEVDPSNRNQETSGTYQIQAYTKFDFPGRGNTYSSFKWRWYHFDGTDWDESRKLNRIYKFTGKQWDWEVDTENGNYDYLMFADLDMDHPEVVNELRRWGEWYTNTLNLDGFRIDAVKHIKFQFTRDWLTHVRNATGKGMFAVAEYWKNDLGALENYLSYTNWNHSVFDVPLHYNLYNASNSRGNYDMAKLLNGTVVQKHPMHAVTFVDNHDSQPGESLESFVQEWFKPLAYALILTREQGYPSVFYGDYYGIPTHSVPAMKAKIDPILAARQNFAYGTQHDYFDHHNIIGWTREGNTTHPNSGLATIMSDGPGGEKWMYVGQNKAGQVWHDITGNKPGTVTINADGWANFSVNKGSVSIWVKR

SEQ ID NO: 20325 - protein, 481 aa, Bacillus sp.
HNGTNATMMQYFEWHLPNDGNHWNRLRDDASNLRNRGITAIWIPPAWKGTSQNDVGYGAYDLYDLGEFNQKGTVRTKYGTRSQLESAIHALKNNGVQVYGDVVMNHKAGADGTEFVTAVEVDPSNRNQETSGTYQIQAYTKFDFPGRGNTYSSFKWRWYHFDGTDWDESRKLNRIYKFSGKAWDWPVDTEFGNYDYLMFADYDMDHPEVVNELRRWGEWYTNTLNLDGFRIDAVKHIKFSFTRDWLTHVRNATGKGMFAVAEFWKNDLGALENYLSYTNWNHSVFDVPLHYNLYNASNSRGNYDMAKLLNGTVVQKHPMHAVTFVDNHDSQPGESLESFVQEWFKPLAYALILTREQGYPSVFYGDYYGIPTHSVPAMKAKIDPILEARQWFAYGTQHDYFDHHNIIGWTREGNTTAPNSGLATIMSDGPGGEKWMYVGQNKAGQVWHDITGNKPGTVTINADGWANFSVLGGSVSIWVKR

SEQ ID NO: 20326 - protein, 481 aa, Bacillus sp.
HNGTNATMMQYFEWHLPNDGNHWNRLRDDASNLRNRGITAIWIPPAWKGTSQNDVGYGAYDLYDLGEFNQKGTVRTKYGTRSQLESAIHALKNNGVQVYGDVVMNHKAGADGTEFVTAVEVDPSNRNQETSGTYQIQAYTKFDFPGRGNTYSSFKWRWYHFDGTDWDESRKLNRIYKFDGKAWDWPVDTEFGNYDYLMFADLDMDHPEVVNELRRWGEWYTNTLNLDGFRIDAVKHIKFSFTRDWLTHVRNATGKGWFAVAEFWKNDLGALENYLSYTNWNHSVFDVPLHYNLYNASNSRGNYDMAKLLNGTVVQKHPMHAVTFVDNHDSQPGESLESFVQEWFKPLAYALILTREQGYPSVFYGDYYGIPTHSVPAMKAKIDPILAARQNFAYGTQHDYFDHHNIIGWTREGNTTHPNSGLATIMSDGPGGEKWMYVGQNKAGQVWHDITGNKPGTVTINADGWANFSVNGASVSIWVKR

SEQ ID NO: 20327 - protein, 481 aa, Bacillus sp.
HNGTNATMMQYFEWHLPNDGNHWNRLRDDASNLRNRGITAIWIPPAWKGTSQNDVGYGAYDLYDLGEFNQKGTVRTKYGTRSQLESAIHALKNNGVQVYGDVVMNHKAGADGTEFVDAVEVDPSNRNQETSGTYQIQAYTKFDFPGRGNTYSSFKWRWYHFDGTDWDESRKLNRIYKFTGKAWDWPVDTEFGNYDYLMFADLDMDHPEVVNELRRWGEWYTNTLNLDGFRIDAVKHIKFSFTRDWLTHVRNATGKGDFAVAEFWKNDLGALENYLSYTNWNHSVFDVPLHYNLYNASNTGGNYDMAKLLNGTVVQKHPMHAVTFVDNHDSQPGESLESFVQEWFKPLAYALILTREQGYPSVFYGDYYGIPTHSVPAMKAKIDPILAARQNFAYGTQHDYFDHHNIIGWTREGNTTHPNSGLATIMSDGPGGEKWMYVGQNKAGQVWHDITGNKPGTVTINADGWANFSVNKGSVSIWVKR

SEQ ID NO: 20328 - protein, 481 aa, Bacillus sp.
HNGTNATMMQYFEWHLPNDGNHWNRLRDDASNLRNAGITAIWIPPAWKGTSQNDVGYGAYDLYDLGEFNQKGTVRTKYGTRSQLESAIHALKNNGVQVYGDVVMNHKAGADGTEFVTAVEVDPSNRNQETSGTYQIQAYTKFDFPGRGNTYSSFKWRWYHFDGTDWDESRKLNRIYKFSGKAWDWPVDTEFGNYDYLMFADYDMDHPEVVNELRRWGEWYYNTLNLDGFRIDAVKHIKFSFTRDWLTHVRNATGKEMFAVAEFWKNDLGALENYLSYTNWNHSVFDVPLHYNLYNASNSRGNYDMAKLLNGTVVQKHPMHAVTFVDNHDSQPGESLESFVQEWFKPLAYALILTREQGYPSVFYGDYYGIPTHSVPAMKAKIDPILAARQNFAYGTQHDYFDHHNIIGWTREGNTTHPNSGLATIMSDGPGGEKWMYVGQNKAGQVWHDITGNKPGTVTINADGWANFSVNKGSVSIWVKR

SEQ ID NO: 20329 - protein, 481 aa, Bacillus sp.
HNGTNATMMQYFEWHLPNDGNHWNRLRDDASNLRNRGITAIWIPPAWKGTSQNDVGYGAYDLYDLGEFNQKGTVRTKYGTRSQLESAIHALKNNGVQVYGDVVMNHKAGADGTEFVTAVEVDPSNRNQETSGTYQIQAYTKFDFPGRGNTYSSFKWRWYHFDGTDWDESRKLNRIYKFSGKDWDWPVDTENGNYDYLMFADYDMDHPEVVNELRRWGEWYTNTLNLDGFRIDAVKHIKFSFTRDWLTHVRNATGKGMFAVAEYWKNDLGALENYLSYTNWNHSVFDVPLHYNLYNASNSRGNYDMAKLLNGTVVQKHPMHAVTFVDNHDSQPGESLESFVQEWFKPLAYALILTREQGYPSVFYGDYYGIPTHSVPAMKAKIDPILAARQNFAYGTQHDYFDHHNIIGWTREGNTTHPNSGLATIMSDGPGGEKWMYVGQNKAGQVWHDITGNKPGTVTINADGWANFSVNKGSVSIWVKR

SEQ ID NO: 20330 - protein, 481 aa, Bacillus sp.
HNGTNATMMQYFEWHLPNDGNHWNRLRDDASNLRNRGITAIWIPPAWKGTSQNDVGYGAYDLYDLGEFNQKGTVRTKYGTRSQLESAIHALKNNGVQVYGDVVMNHKAGADGTEFVTAVEVDPSNRNQETSGTYQIQAYTKFDFPGRGNTYSSFKWRWYHFDGTDWDESRKLNRIYKFSGKQWDWPVDTEFGNYDYLMFADLDMDHPEVVNELRRWGEWYYNTLNLDGFRIDAVKHIKFSFTRDWLTHVRNATGKEMFAVAEFWKNDLGALENYLSYTNWNHSVFDVPLHYNLYNASNSRGNYDMAKLLNGTVVQKHPMHAVTFVDNHDSQPGESLESFVQEWFKPLAYALILTREQGYPSVFYGDYYGIPTHSVPAMKAKIDPILAARQNFAYGTQHDYFDHHNIIGWTREGNTTHPNSGLATIMSDGPGGEKWMYVGQNKAGQVWHDITGNKPGTVTINADGWANFSVNGASVSIWVKR

SEQ ID NO: 20331 - protein, 481 aa, Bacillus sp.
HNGTNATMMQYFEWHLPNDGNHWNRLRDDASNLRNAGITAIWIPPAWKGTSQNDVGYGAYDLYDLGEFNQKGTVRTKYGTRSQLESAIHALKNNGVQVYGDVVMNHKAGADGTEFVTAVEVDPSNRNQETSGTYQIQAYTKFDFPGRGNTYSSFKWRWYHFDGTDWDESRKLNRIYKFSGKAWDWPVDTEFGNYDYLMFADYDMDHPEVVNELRRWGEWYTNTLNLDGFRIDAVKHIKFSFTRDWLTHVRNADGKEMFAVAEFWKNDLGALENYLSYTNWNHSVFDVPLHYNLYNASNSRGNYDMAKLLNGTVVQKHPMHAVTFVDNHDSQPGESLESFVQEWFKPLAYALILTREQGYPSVFYGDYYGIPTHSVPAMKAKIDPILAARQNFAYGTQHDYFDHHNIIGWTREGNTTHPNSGLATIMSDGPGGEKWMYVGQNKAGQVWHDITGNKPGTVTINADGWANFSVNKGSVSIWVKR

SEQ ID NO: 20332 - protein, 481 aa, Bacillus sp.
HNGTNATMMQYFEWHLPNDGNHWNRLRDDASNLRNRGITAIWIPPAWKGTSQNDVGYGAYDLYDLGEFNQKGTVRTKYGTRSQLESAIHALKNNGVQVYGDVVMNHKAGADGTEFVDAVEVDPSNRNQETSGTYQIQAYTKFDFPGRGNTYSSFKWRWYHFDGTDWDESRKLNRIYKFDGKAWDWPVDTEFGNYDYLMFADLDMDHPEVVNELRRWGEWYTNTLNLDGFRIDAVKHIKFQFTRDWLTHVRNATGKGMFAVAEFWKNDLGALENYLSYTNWNHSVFDVPLHYNLYNASNSRGNYDMAKLLNGTVVQKHPMHAVTFVDNHDSQPGESLESFVQEWFKPLAYALILTREQGYPSVFYGDYYGIPTHSVPAMKAKIDPILAARQNFAYGTQHDYFDHHNIIGWTREGNTTHPNSGLATIMSDGPGGEKWMYVGQNKAGQVWHDITGNKPGTVTINADGWANFSVNKGSVSIWVKR

SEQ ID NO: 20333 - protein, 481 aa, Bacillus sp.
HNGTNATMMQYFEWHLPNDGNHWNRLRDDASNLRNRGITAIWIPPAWKGTSQNDVGYGAYDLYDLGEFNQKGTVRTKYGTRSQLESAIHALKNNGVQVYGDVVMNHKAGADGTEFVDAVEVDPSNRNQETSGTYQIQAYTKFDFPGRGNTYSSFKWRWYHFDGTDWDESRKLNRIYKFTGKQWDWPVDTEFGNYDYLMFADLDMDHPEVVNELRRWGEWYTNTLNLDGFRIDAVKHIKFSFTRDWLTHVRNATGKGMFAVAEFWKNDLGALENYLSYTNWNHSVFDVPLHYNLYNASNSRGNYDMAKLLNGTVVQKHPMHAVTFVDNHDSQPGESLESFVQEWFKPLAYALILTREQGYPSVFYGDYYGIPTHSVPAMKAKIDPILAARQNFAYGTQHDYFDHHNIIGWTREGNTTHPNSGLATIMSDGPGGEKWMYVGQNKAGQVWHDITGNKPGTVTINADGWANFSVNKGSVSIWVKR

SEQ ID NO: 20334 - protein, 481 aa, Bacillus sp.
HNGTNATMMQYFEWHLPNDGNHWNRLRDDASNLRNRGITAIWIPPAWKGTSQNDVGYGAYDLYDLGEFNQKGTVRTKYGTRSQLESAIHALKNNGVQVYGDVVMNHKAGADGTEFVTAVEVDPSNRNQETSGTYQIQAYTKFDFPGRGNTYSSFKWRWYHFDGTDWDESRKLNRIYKFSGKAWDWPVDTEFGNYDYLMFADYDMDHPEVVNELRRWGEWYTNTLNLDGFRIDAVKHIKFSFTRDWLTHVRNADGKEMFAVAEFWKNDLGALENYLSYTNWNHSVFDVPLHYNLYNASNSRGNYDMAKLLNGTVVQKHPMHAVTFVDNHDSQPGESLESFVQEWFKPLAYALILTREQGYPSVFYGDYYGIPTHSVPAMKAKIDPILAARQNFAYGTQHDYFDHHNIIGWTREGNTTHPNSGLATIMSDGPGGEKWMYVGQNKAGQVWHDITGNKPGTVTINADGWAMFSVNKGSVSIWVKR

SEQ ID NO: 20335 - protein, 481 aa, Bacillus sp.
HNGTNATMMQYFEWHLPNDGNHWNRLRDDASNLRNRGITAIWIPPAWKGTSQNDVGYGAYDLYDLGEFNQKGTVRTKYGTRSQLESAIHALKNNGVQVYGDVVMNHKAGADGTEFVTAVEVDPSNRNQETSGTYQIQAYTKFDFPGRGNTYSSFKWRWYHFDGTDWDESRKLNRIYKFSGKDWDWPVDTENGNYDYLMFADLDMDHPEVVNELRRWGEWYTNTLNLDGFRIDAVKHIKFSFTRDWLTHVRNATGKGMFAVAEYWKNDLGALENYLSYTNWNHSVFDVPLHYNLYNASNSRGNYDMAKLLNGTVVQKHPMHAVTFVDNHDSQPGESLESFVQEWFKPLAYALILTREQGYPSVFYGDYYGIPTHSVPAMKAKIDPILAARQNFAYGTQHDYFDHHNIIGWTREGNTTHPNSGLATIMSDGPGGEKWMYVGQNKAGQVWHDITGNKPGTVTINADGWANFSVNKGSVSIWVKR

SEQ ID NO: 20336 - protein, 481 aa, Bacillus sp.
HNGTNATMMQYFEWHLPNDGNHWNRLRDDASNLRNRGITAIWIPPAWKGTSQNDVGYGAYDLYDLGEFNQKGTVRTKYGTRSQLESAIHALKNNGVQVYGDVVMNHKAGADGTEFVTAVEVDPSNRNQETSGTYQIVAYTKFDFPGRGNTYSSFKWRWYHFDGTDWDESRKLNRIYKFSGKAWDWPVDTEFGNYDYLMFADYDMDHPEVVNELRRWGEWYFNTLNLDGFRIDAVKHIKFSFTRDWLTHVRNATGKGMFAVAEFWKNDLGALENYLSYTNWNHSVFDVPLHYNLYNASNYGGNYDMAKLLNGTVVQKHPMHAVTFVDNHDSQPGESLESFVQEWFKPLAYALILTREQGYPSVFYGDYYGIPTHSVPAMKAKIDPILAARQNFAYGTQHDYFDHHNIIGWTREGNTTHPNSGLATIMSDGPGGEKWMYVGQNKAGQVWHDITGNKPGTVTINADGWANFSVNKGSVSIWVKR

SEQ ID NO: 20337 - protein, 481 aa, Bacillus sp.
HNGTNATMMQYFEWHLPNDGNHWNRLRDDASNLRNNGITAIWIPPAWKGTSQNDVGYGAYDLYDLGEFNQKGTVRTKYGTRSQLESAIHALKNNGVQVYGDVVMNHKAGADGTEFVTAVEVDPSNRNQETSGTYQIQAYTKFDFPGRGNTYSSFKWRWYHFDGTDWDESRKLNRIYKFSGKAWDWPVDTEFGNYDYLMFADYDMDHPEVVNELRRWGEWYTNTLNLDGFRIDAVKHIKFSFTRDWLTHVRNATGKGMFAVAEFWKNDLGALENYLSYTNWNHSVFDVPLHYNLYNASNTGGNYDMAKLLNGTVVQKHPMHAVTFVDNHDSQPGESLESFVQEWFKPLAYALILTREQGYPSVFYGDYYGIPTHSVPAMKAKIDPILEARQDFAYGTQHDYFDHHNIIGWTREGNTTHPNSGLATIMSDGPGGEKWMYVGQNKAGQVWHDITGNKPGTVTINADGWANFSVNKGSVSIWVKR

SEQ ID NO: 20338 - protein, 481 aa, Bacillus sp.
HNGTNATMMQYFEWHLPNDGNHWNRLRDDASNLRNRGITAIWIPPAWKGTSQNDVGYGAYDLYDLGEFNQKGTVRTKYGTRSQLESAIHALKNNGVQVYGDVVMNHKAGADGTEFVTAVEVDPSNRNQETSGTYQIQAYTKFDFPGRGNTYSSFKWRWYHFDGTDWDESRKLNRIYKFSGKAWDWPVDTEFGNYDYLMFADYDMDHPEVVNELRRWGEWYTNTLNLDGFRIDAVKHIKFSFTRDWLTHVRNATGKGMFAVAEFWKNDLGALENYLSYTNWNHSVFDVPLHYNLYNASNTGGNYDMAKLLNGTVVQKHPMWAVTFVDNHDSQPGESLESFVQEWFKPLAYALILTREQGYPSVFYGDYYGIPTHSVPAMKAKIDPILAARQNFAYGTQHDYFDHHNIIGWTREGNTTHPNSGLATIMSDGPGGEKWMYVGQNKAGQVWHDITGNKPGTVTINADGWANFSVNKGSVSIWVKR

SEQ ID NO: 20339 - protein, 481 aa, Bacillus sp.
HNGTNATMMQYFEWHLPNDGNHWNRLRDDASNLRNRGITAIWIPPAWKGTSQNDVGYGAYDLYDLGEFNQKGTVRTKYGTRSQLESAIHALKNNGVQVYGDVVMNHKAGADGTEFVTAVEVDPSNRNQETSGTYQIQAYTKFDFPGRGNTYSSFKWRWYHFDGTDWDESRKLNRIYKFSGKAWDWPVDTEFGNYDYLMFADYDMDHPEVVNELRRWGEWYTNTLNLDGFRIDAVKHIKFSFTRDWLTHVRNATGKGMFAVAEFWKNDLGALENYLSYTNWNHSVFDVPLHYNLYNASNTGGNYDMAKLLNGTVVQKHPMHAVTFVDNHDSQPGESLESFVQEWFKPLAYALILTREQGYPSVFYGDYYGIPTHSVPAMKAKIDPILAARQNFAYGTQHDYFDHHNIIGWTREGNTTAPNSGLATIMSDGPGGEKWMYVGQNKAGQVWHDITGNKPGTVTINADGWANFSVNKGSVSIWVKR

SEQ ID NO: 20340 - protein, 481 aa, Bacillus sp.
HNGTNATMMQYFEWHLPNDGNHWNRLRDDASNLRNRGITAIWIPPAWKGTSQNDVGYGAYDLYDLGEFNQKGTVRTKYGTRSQLESAIHALKNNGVQVYGDVVMNHKAGADGTEFVTAVEVDPSNRNQETSGTYQIQAYTKFDFPGRGNTYSSFKWRWYHFDGTDWDESRKLNRIYKFDGKQWDWPVDTEFGNYDYLMFADLDMDHPEVVNELRRWGEWYYNTLNLDGFRIDAVKHIKFSFTRDWLTHVRNATGKEMFAVAEFWKNDLGALENYLSYTNWNHSVFDVPLHYNLYNASNSRGNYDMAKLLNGTVVQKHPMHAVTFVDNHDSQPGESLESFVQEWFKPLAYALILTREQGYPSVFYGDYYGIPTHSVPAMKAKIDPILAARQNFAYGTQHDYFDHHNIIGWTREGNTTHPNSGLATIMSDGPGGEKWMYVGQNKAGQVWHDITGNKPGTVTINADGWANFSVNGASVSIWVKR

SEQ ID NO: 20341 - protein, 481 aa, Bacillus sp.
HNGTNATMMQYFEWHLPNDGNHWNRLRDDASNLRNNGITAIWIPPAWKGTSQNDVGYGAYDLYDLGEFNQKGTVRTKYGTRSQLESAIHALKNNGVQVYGDVVMNHKAGADGTEFVTAVEVDPSNRNQETSGTYQIQAYTKFDFPGRGNTYSSFKWRWYHFDGTDWDESRKLNRIYKFDGKAWDWPVDTEFGNYDYLMFADLDMDHPEVVNELRRWGEWYTNTLNLDGFRIDAVKHIKFSFTRDWLTHVRNATGKGMFAVAEFWKNDLGALENYLSYTNWNHSVFDVPLHYNLYNASNYGGNYDMAKLLNGTVVQKHPMHAVTFVDNHDSQPGESLESFVQEWFKPLAYALILTREQGYPSVFYGDYYGIPTHSVPAMKAKIDPILAARQNFAYGTQHDYFDHHNIIGWTREGNTTHPNSGLATIMSDGPGGEKWMYVGQNKAGQVWHDITGNKPGTVTINADGWANFSVNKGSVSIWVKR

SEQ ID NO: 20342 - protein, 481 aa, Bacillus sp.
HNGTNATMMQYFEWHLPNDGNHWNRLRDDASNLRNRGITAIWIPPAWKGTSQNDVGYGAYDLYDLGEFNQKGTVRTKYGTRSQLESAIHALKNNGVQVYGDVVMNHKAGADGTEFVTAVEVDPSNRNQETSGTYQIQAYTKFDFPGRGNTYSSFKWRWYHFDGTDWDESRKLNRIYKFSGKAWDWPVDTEFGNYDYLMFADYDMDHPEVVNELRRWGEWYTNTLNLDGFRIDAVKHIKFSFTRDWLTHVRNATGKGDFAVAEFWKNDLGALENYLSYTNWNHSVFDVPLHYNLYNASNSRGNYDMAKLLNGTVVQKHPMHAVTFVDNHDSQPGESLESFVQEWFKPLAYALILTREQGYPSVFYGDYYGIPTHSVPAMKAKIDPILEARQNFAYGTQHDYFDHHNIIGWTREGNTTAPNSGLATIMSDGPGGEKWMYVGQNKAGQVWHDITGNKPGTVTINADGWANFSVNKGSVSIWVKR

SEQ ID NO: 20343 - protein, 481 aa, Bacillus sp.
HNGTNATMMQYFEWHLPNDGNHWNRLRDDASNLRNRGITAIWIPPAWKGTSQNDVGYGAYDLYDLGEFNQKGTVRTKYGTRSQLESAIHALKNNGVQVYGDVVMNHKAGADGTEFVTAVEVDPSNRNQETSGTYQIQAYTKFDFPGRGNTYSSFKWRWYHFDGTDWDESRKLNRIYKFSGKAWDWPVDTEFGNYDYLMFADYDMDHPEVVNELRRWGEWYTNTLNLDGFRIDAVKHIKFSFTRDWLTHVRNATGKGMFAVAEFWKNDLGALENYLSYTNWNHSVFDVPLHYNLYNASNSRGNYDMAKLLNGTVVQKHPMHAVTFVDNHDSQPGESLESFVQEWFKPLAYALILTREQGVPSVFYGDYYGIPTHSVPAMKAKIDPILAARQNFAYGTQHDYFDHHNIIGWTREGNTTHPNSGLATIMSDGPGGEKWMYVGQNKAGQVWHDITGNKPGTVTINADGWANFSVNGASVSIWVKR

SEQ ID NO: 20344 - protein, 481 aa, Bacillus sp.
HNGTNATMMQYFEWHLPNDGNHWNRLRDDASNLRNRGITAIWIPPAWKGTSQNDVGYGAYDLYDLGEFNQKGTVRTKYGTRSQLESAIHALKNNGVQVYGDVVMNHKAGADGTEFVTAVEVDPSNRNQETSGTYQIQAYTKFDFPGRGNTYSSFKWRWYHFDGTDWDESRKLNRIYKFDGKAWDWPVDTEFGNYDYLMFADLDMDHPEVVNELRRWGEWYTNTLNLDGFRIDAVKHIKFSFTRDWLTHVRNATGKGMFAVAEYWKNDLGALENYLSYTNWNHSVFDVPLHYNLYNASNSRGNYDMAKLLNGTVVQKHPMHAVTFVDNHDSQPGESLESFVQEWFKPLAYALILTREQGYPSVFYGDYYGIPTHSVPAMKAKIDPILAARQNFAYGTQHDYFDHHNIIGWTREGNTTHPNSGLATIMSDGPGGEKWMYVGQNKAGQVWHDITGNKPGTVTINADGWANFSVNGASVSIWVKR

SEQ ID NO: 20345 - protein, 481 aa, Bacillus sp.
HNGTNATMMQYFEWHLPNDGNHWNRLRDDASNLRNRGITAIWIPPAWKGTSQNDVGYGAYDLYDLGEFNQKGTVRTKYGTRSQLESAIHALKNNGVQVYGDVVMNHKAGADGTEFVTAVEVDPSNRNQETSGTYQIQAYTKFDFPGRGNTYSSFKWRWYHFDGTDWDESRKLNRIYKFSGKAWDWPVDTEFGNYDYLMFADYDMDHPEVVNELRRWGEWYTNTLNLDGFRIDAVKHIKFSFTRDWLTHVRNATGKGMPAVAEFWKNDLGALENYLSYTNWNHSVFDVPLHYNLYNASNSRGNYDMAKLLNGTVVQKHPMHAVTFVDNHDSQPGESLESFVQEWFKPLAYALILTREQGYPSVFYGDYYGIPTHSVPAMKAKIDPILAARQNFAYGTQHDYFDHHNIIGWTREGNTTHPNSGLATIMSDGPGGEKWMYVGQNKAGQVWHDITGNKPGTVTINADGWANFSVNKGSVSIWVKR

SEQ ID NO: 20346 - protein, 481 aa, Bacillus sp.
HNGTNATMMQYFEWHLPNDGNHWNRLRDDASNLRNRGITAIWIPPAWKGTSQNDVGYGAYDLYDLGEFNQKGTVRTKYGTRSQLESAIHALKNNGVQVYGDVVMNHKAGADGTEFVTAVEVDPSNRNQETSGTYQIQAYTKFDFPGRGNTYSSFKWRWYHFDGTDWDESRKLNRIYKFSGKAWDWPVDTEFGNYDYLMFADYDMDHPEVVNELRRWGEWYTNTLNLDGFRIDAVKHIKFSFTRDWLTHVRNATGKGMFAVAEFWKNDLGALENYLSYTNWNHSVFDVPLHYNLYNASNSRGNYDMAKLLNGTVVQKHHMHAVTFVDNHDSQPGESLESFVQEWFKPLAYALILTREQGYPSVFYGDYYGIPTHSVPAMKAKIDPILAARQNFAYGTQHDYFDHHNIIGWTREGNTTHPNSGLATIMSDGPGGEKWMYVGQNKAGQVWHDITGNKPGTVTINADGWANFSVLGGSVSIWVKR

SEQ ID NO: 20347 - protein, 481 aa, Bacillus sp.
HNGTNATMMQYFEWHLPNDGNHWNRLRDDASNLRNRGITAIWIPPAWKGTSQNDVGYGAYDLYDLGEFNQKGTVRTKYGTRSQLESAIHALKNNGVQVYGDVVMNHKAGADGTEFVTAVEVDPSNRNQETSGTYQIQAYTKFDFPGRGNTYSSFKWRWYHFDGTDWDESRKLNRIYKFSGKAWDWPVDTEFGNYDYLMFADLDMDHPEVVNELRRWGEWYYNTLNLDGFRIDAVKHIKFSFTRDWLTHVRNATGKEMFAVAEYWKNDLGALENYLSYTNWNHSVFDVPLHYNLYNASNSRGNYDMAKLLNGTVVQKHPMHAVTFVDNHDSQPGESLESFVQEWFKPLAYALILTREQGYPSVFYGDYYGIPTHSVPAMKAKIDPILAARQNFAYGTQHDYFDHHNIIGWTREGNTTHPNSGLATIMSDGPGGEKWMYVGQNKAGQVWHDITGNKPGTVTINADGWANFSVNGASVSIWVKR

SEQ ID NO: 20348 - protein, 481 aa, Bacillus sp.
HNGTNATMMQYFEWHLPNDGNHWNRLRDDASNLRNRGITAIWIPPAWKGTSQNDVGYGAYDLYDLGEFNQKGTVRTKYGTRSQLESAIHALKNNGVQVYGDVVMNHKAGADGTEFVTAVEVDPSNRNQETSGTYQIQAYTKFDFPGRGNTYSSFKWRWYHFDGTDWDESRKLNRIYKFSGKAWDWPVDTEFGNYDYLMFADYDMDHPEVVNELRRWGEWYTNTLNLDGFRIDAVKHIKFSFTRDWLTHVRNATGKGDFAVAEFWKNDLGALENYLSYTNWNHSVFDVPLHYNLYNASNSRGNYDMAKLLNGTVVQKHPMHAVTFVDNHDSQPGESLESFVQEWFKPLAYALILTREQGYPSVFYGDYYGIPTHSVPAMKAKIDPILEARQWFAYGTQHDYFDHHNIIGWTREGNTTHPNSGLATIMSDGPGGEKWMYVGQNKAGQVWHDITGNKPGTVTINADGWANFSVNKGSVSIWVKR

SEQ ID NO: 20349 - protein, 481 aa, Bacillus sp.
HNGTNATMMQYFEWHLPNDGNHWNRLRDDASNLRNRGITAIWIPPAWKGTSQNDVGYGAYDLYDLGEFNQKGTVRTKYGTRSQLESAIHALKNNGVQVYGDVVMNHKAGADGTEFVTAVEVDPSNRNQETSGTYQIQAYTKFDFPGRGNTYSSFKWRWYHFDGTDWDESRKLNRIYKFDGKAWDWPVDTEFGNYDYLMFADLDMDHPEVVNELRRWGEWYTNTLNLDGFRIDAVKHIKFSFTRDWLTHVRNATGKGMFAVAEYWKNDLGALENYLSYTNWNHSVFDVPLHYNLYNASNTGGNYDMAKLLNGTVVQKHPMHAVTFVDNHDSQPGESLESFVQEWFKPLAYALILTREQGYPSVFYGDYYGIPTHSVPAMKAKIDPILAARQNFAYGTQHDYFDHHNIIGWTREGNTTHPNSGLATIMSDGPGGEKWMYVGQNKAGQVWHDITGNKPGTVTINADGWANFSVNKGSVSIWVKR

SEQ ID NO: 20350 - protein, 481 aa, Bacillus sp.
HNGTNATMMQYFEWHLPNDGNHWNRLRDDASNLRNRGITAIWIPPAWKGTSQNDVGYGAYDLYDLGEFNQKGTVRTKYGTRSQLESAIHALKNNGVQVYGDVVMNHKAGADGTEFVTAVEVDPSNRNQETSGTYQIVAYTKFDFPGRGNTYSSFKWRWYHFDGTDWDESRKLNRIYKFSGKAWDWPVDTEFGNYDYLMFADYDMDHPEVVNELRRWGEWYTNTLNLDGFRIDAVKHIKFSFTRDWLTHVRNATGKGMFAVAEFWKNDLGALENYLSYTNWNHSVFDVPLHYNLYNASNSRGNYDMAKLLNGTVVQKHPMHAVTFVDNHDSQPGESLESFVQEWFKPLAYALILTREQGYPSVFYGDYYGIPTHSVPAMKAKIDPILAARQNFAYGTQHDYFDHHNIIGWTREGNTTQPNSGLATIMSDGPGGEKWMYVGQNKAGQVWHDITGNKPGTVTINADGWANFSVNKGSVSIWVKR

SEQ ID NO: 20351 - protein, 481 aa, Bacillus sp.
HNGTNATMMQYFEWHLPNDGNHWNRLRDDASNLRNRGITAIWIPPAWKGTSQNDVGYGAYDLYDLGEFNQKGTVRTKYGTRSQLESAIHALKNNGVQVYGDVVMNHKAGADGTEFVTAVEVDPSNRNQETSGTYQIQAYTKFDFPGRGNTYSSFKWRWYHFDGTDWDESRKLNRIYKFSGKAWDWPVDTEFGNYDYLMFADYDMDHPEVVNELRRWGEWYTNTLNLDGFRIDAVKHIKFSFTRDWLTHVRNATGKGDFAVAEFWKNDLGALENYLSYTNWNHSVFDVPLHYNLYNASNTGGNYDMAKLLNGTVVQKHPMHAVTFVDNHDSQPGESLESFVQEWFKPLAYALILTREQGYPSVFYGDYYGIPTHSVPAMKAKIDPILAARQNFAYGTQHDYFDHHNIIGWTREGNTTHPNSGLATIMSDGPGGEKWMYVGQNKAGQVWHDITGNKPGTVTINADGWANFSVNKGSVSIWVKR

SEQ ID NO: 20352 - protein, 481 aa, Bacillus sp.
HNGTNATMMQYFEWHLPNDGNHWNRLRDDASNLRNRGITAIWIPPAWKGTSQNDVGYGAYDLYDLGEFNQKGTVRTKYGTRSQLESAIHALKNNGVQVYGDVVMNHKAGADGTEFVTAVEVDPSNRNQETSGTYQIQAYTKFDFPGRGNTYSSFKWRWYHFDGTDWDESRKLNRIYKFSGKAWDWPVDTEFGNYDYLMFADYDMDHPEVVNELRRWGEWYYNTLNLDGFRIDAVKHIKFSFTRDWLTHVRNATGKGMFAVAEFWKNDLGALENYLSYTNWNHSVFDVPLHYNLYNASNYGGNYDMAKLLNGTVVQKHPMHAVTFVDNHDSQPGESLESFVQEWFKPLAYALILTREQGYPSVFYGDYYGIPTHSVPAMKAKIDPILAARQNFAYGTQHDYFDHHNIIGWTREGNTTHPNSGLATIMSDGPGGEKWMYVGQNKAGQVWHDITGNKPGTVTINADGWANFSVNKGSVSIWVKR

SEQ ID NO: 20353 - protein, 481 aa, Bacillus sp.
HNGTNATMMQYFEWHLPNDGNHWNRLRDDASNLRNRGITAIWIPPAWKGTSQNDVGYGAYDLYDLGEFNQKGTVRTKYGTRSQLESAIHALKNNGVQVYGDVVMNHKAGADGTEFVTAVEVDPSNRNQETSGTYQIQAYTKFDFPGRGNTYSSFKWRWYHFDGTDWDESRKLNRIYKFSGKAWDWPVDTEFGNYDYLMFADYDMDHPEVVNELRRWGEWYTNTLNLDGFRIDAVKHIKFSFTRDWLTHVRNATGKGMFAVAEFWKNDLGALENYLSYTNWNHSVFDVPLHYNLYNASNTGGNYDMAKLLNGTVVQKHPMHAVTFVDNHDSQPGESLESFVQEWFKPLAYALILTREQGYPSVFYGDYYGIPTHSVPAMKAKIDPILAARQNFAYGTQHDYFDHHNIIGWTREGNTTHPNSGLATIMSDGPGGEKWMYVGQNKAGQVWHDITGNKPGTVTINADGWAMFSVNKGSVSIWVKR

SEQ ID NO: 20354 - protein, 481 aa, Bacillus sp.
HNGTNATMMQYFEWHLPNDGNHWNRLRDDASNLRNRGITAIWIPPAWKGTSQNDVGYGAYDLYDLGEFNQKGTVRTKYGTRSQLESAIHALKNNGVQVYGDVVMNHKAGADGTEFVDAVEVDPSNRNQETSGTYQIQAYTKFDFPGRGNTYSSFKWRWYHFDGTDWDESRKLNRIYKFTGKQWDWEVDTENGNYDYLMFADLDMDHPEVVNELRRWGEWYTNTLNLDGFRIDAVKHIKFSFTRDWLTHVRNATGKGMFAVAEYWKNDLGALENYLSYTNWNHSVFDVPLHYNLYNASNSRGNYDMAKLLNGTVVQKHPMHAVTFVDNHDSQPGESLESFVQEWFKPLAYALILTREQGYPSVFYGDYYGIPTHSVPAMKAKIDPILAARQNFAYGTQHDYFDHHNIIGWTREGNTTHPNSGLALIMSDGPGGEKWMYVGQNKAGQVWHDITGNKPGTVTINADGWANFSVNKGSVSIWVKR

SEQ ID NO: 20355 - protein, 481 aa, Bacillus sp.
HNGTNATMMQYFEWHLPNDGNHWNRLRDDASNLRNRGITAIWIPPAWKGTSQNDVGYGAYDLYDLGEFNQKGTVRTKYGTRSQLESAIHALKNNGVQVYGDVVMNHKAGADGTEFVTAVEVDPSNRNQETSGTYQIQAYTKFDFPGRGNTYSSFKWRWYHFDGTDWDESRKLNRIYKFSGKQWDWPVDTENGNYDYLMFADYDMDHPEVVNELRRWGEWYTNTLNLDGFRIDAVKHIKFSFTRDWLTHVRNATGKGMFAVAEYWKNDLGALENYLSYTNWNHSVFDVPLHYNLYNASNSRGNYDMAKLLNGTVVQKHPMHAVTFVDNHDSQPGESLESFVQEWFKPLAYALILTREQGYPSVFYGDYYGIPTHSVPAMKAKIDPILAARQNFAYGTQHDYFDHHNIIGWTREGNTTHPNSGLATIMSDGPGGEKWMYVGQNKAGQVWHDITGNKPGTVTINADGWANFSVNKGSVSIWVKR

SEQ ID NO: 20356 - protein, 481 aa, Bacillus sp.
HNGTNATMMQYFEWHLPNDGNHWNRLRDDASNLRNRGITAIWIPPAWKGTSQNDVGYGAYDLYDLGEFNQKGTVRTKYGTRSQLESAIHALKNNGVQVYGDVVMNHKAGADGTEFVTAVEVDPSNRNQETSGTYQIQAYTKFDFPGRGNTYSSFKWRWYHFDGTDWDESRKLNRIYKFSGKAWDWPVDTEFGNYDYLMFADYDMDHPEVVNELRRWGEWYYNTLNLDGFRIDAVKHIKFSFTRDWLTHVRNATGKGMFAVAEFWKNDLGALENYLSYTNWNHSVFDVPLHYNLYNASNSRGNYDMAKLLNGTVVQKHPMHAVTFVDNHDSQPGESLESFVQEWFKPLAYALILTREQGYPSVFYGDYYGIPTHSVPAMKAKIDPILAARQNFAYGTQHDYFDHHNIIGWTREGNTTHPNSGLATIMSDGPGGEKWMYVGQNKAGQVWHDITGNKPGTVTINADGWANFSVLGGSVSIWVKR

SEQ ID NO: 20357 - protein, 481 aa, Bacillus sp.
HNGTNATMMQYFEWHLPNDGNHWNRLRDDASNLRNRGITAIWIPPAWKGTSQNDVGYGAYDLYDLGEFNQKGTVRTKYGTRSQLESAIHALKNNGVQVYGDVVMNHKAGADGTEFVTAVEVDPSNRNQETSGTYQIQAYTKFDFPGRGNTYSSFKWRWYHFDGTDWDESRKLNRIYKFSGKAWDWPVDTEFGNYDYLMFADYDMDHPEVVNELRRWGEWYTNTLNLDGFRIDAVKHIKFSFTRDWLTHVRNATGKGMFAVAEFWKNDLGALENYLSYTNWNHSVFDVPLHYNLYNASNSRGNYDMAKLLNGTVVQKHPMHAVTFVDNHDSQPGESLESFVQEWFKPLAYALILTREQGYPSVFYGDYYGIPTHSVPAMKAKIDPILAARQNFAYGTQHDYFDHHNIIGWTREGNTTAPNSGLATIMSDGPGGEKWMYVGQNKAGQVWHDITGNKPGTVTINADGWANFSVNKGSVSIWVKR

SEQ ID NO: 20358 - protein, 481 aa, Bacillus sp.
HNGTNATMMQYFEWHLPNDGNHWNRLRDDASNLRNRGITAIWIPPAWKGTSQNDVGYGAYDLYDLGEFNQKGTVRTKYGTRSQLESAIHALKNNGVQVYGDVVMNHKAGADGTEFVDAVEVDPSNRNQETSGTYQIQAYTKFDFPGRGNTYSSFKWRWYHFDGTDWDESRKLNRIYKFTGKQWDWEVDTEFGNYDYLMFADLDMDHPEVVNELRRWGEWYTNTLNLDGFRIDAVKHIKFQFTRDWLTHVRNATGKGMFAVAEFWKNDLGALENYLSYTNWNHSVFDVPLHYNLYNASNSRGNYDMAKLLNGTVVQKHPMHAVTFVDNHDSQPGESLESFVQEWFKPLAYALILTREQGYPSVFYGDYYGIPTHSVPAMKAKIDPILAARQNFAYGTQHDYFDHHNIIGWTREGNTTHPNSGLATIMSDGPGGEKWMYVGQNKAGQVWHDITGNKPGTVTINADGWANFSVNKGSVSIWVKR

SEQ ID NO: 20359 - protein, 481 aa, Bacillus sp.
HNGTNATMMQYFEWHLPNDGNHWNRLRDDASNLRNRGITAIWIPPAWKGTSQNDVGYGAYDLYDLGEFNQKGTVRTKYGTRSQLESAIHALKNNGVQVYGDVVMNHKAGADGTEFVTAVEVDPSNRNQETSGTYQIQAYTKFDFPGRGNTYSSFKWRWYHFDGTDWDESRKLNRIYKFSGKAWDWPVDTEFGNYDYLMFADYDMDHPEVVNELRRWGEWYTNTLNLDGFRIDAVKHIKFSFTRDWLTHVRNATGKGDFAVAEFWKNDLGALENYLSYTNWNHSVFDVPLHYNLYNASNYGGNYDMAKLLNGTVVQKHPMHAVTFVDNHDSQPGESLESFVQEWFKPLAYALILTREQGYPSVFYGDYYGIPTHSVPAMKAKIDPILAARQNFAYGTQHDYFDHHNIIGWTREGNTTHPNSGLATIMSDGPGGEKWMYVGQNKAGQVWHDITGNKPGTVTINADGWANFSVNKGSVSIWVKR

SEQ ID NO: 20360 - protein, 481 aa, Bacillus sp.
HNGTNATMMQYFEWHLPNDGNHWNRLRDDASNLRNRGITAIWIPPAWKGTSQNDVGYGAYDLYDLGEFNQKGTVRTKYGTRSQLESAIHALKNNGVQVYGDVVMNHKAGADGTEFVTAVEVDPSNRNQETSGTYQIQAYTKFDFPGRGNTYSSFKWRWYHFDGTDWDESRKLNRIYKFSGKAWDWPVDTEFGNYDYLMFADYDMDHPEVVNELRRWGEWYTNTLNLDGFRIDAVKHIKFSFTRDWLTHVRNATGKGDFAVAEFWKNDLGALENYLSYTNWNHSVFDVPLHYNLYNASNSRGNYDMAKLLNGTVVQKHPMHAVTFVDNHDSQPGESLESFVQEWFKPLAYALILTREQGYPSVFYGDYYGIPTHSVPAMKAKIDPILAARQNFAYGTQHDYFDHHNIIGWTREGNTTHPNSGLATIMSDGPGGEKWMYVGQNKAGQVWHDITGNKPGTVTINADGWANFSVFGGSVSIWVKR

SEQ ID NO: 20361 - protein, 481 aa, Bacillus sp.
HNGTNATMMQYFEWHLPNDGNHWNRLRDDASNLRNRGITAIWIPPAWKGTSQNDVGYGAYDLYDLGEFNQKGTVRTKYGTRSQLESAIHALKNNGVQVYGDVVMNHKAGADGTEFVTAVEVDPSNRNQETSGTEQIQAYTKFDFPGRGNTYSSFKWRWYHFDGTDWDESRKLNRIYKFSGKAWDWPVDTEFGNYDYLMFADYDMDHPEVVNELRRWGEWYTNTLNLDGFRIDAVKHIKFSFTRDWLTHVRNATGKGMFAVAEFWKNDLGALENYLSYTNWNHSVFDVPLHYNLYNASNYGGNYDMAKLLNGTVVQKHPMHAVTFVDNHDSQPGESLESFVQEWFKPLAYALILTREQGYPSVFYGDYYGIPTHSVPAMKAKIDPILAARQNFAYGTQHDYFDHHNIIGWTREGNTTHPNSGLATIMSDGPGGEKWMYVGQNKAGQVWHDITGNKPGTVTINADGWANFSVNKGSVSIWVKR

SEQ ID NO: 20362 - protein, 481 aa, Bacillus sp.
HNGTNATMMQYFEWHLPNDGNHWNRLRDDASNLRNRGITAIWIPPAWKGTSQNDVGYGAYDLYDLGEFNQKGTVRTKYGTRSQLESAIHALKNNGVQVYGDVVMNHKAGADGTEFVTAVEVDPSNRNQETSGTYQIQAYTKFDFPGRGNTYSSFKWRWYHFDGTDWDESRKLNRIYKFSGKAWDWPVDTEFGNYDYLMFADYDMDHPEVVNELRRWGEWYTNTLNLDGFRIDAVKHIKFSFTRDWLTHVRNATGKGWFAVAEFWKNDLGALENYLSYTNWNHSVFDVPLHYNLYNASNYGGNYDMAKLLNGTVVQKHPMHAVTFVDNHDSQPGESLESFVQEWFKPLAYALILTREQGYPSVFYGDYYGIPTHSVPAMKAKIDPILAARQNFAYGTQHDYFDHHNIIGWTREGNTTHPNSGLATIMSDGPGGEKWMYVGQNKAGQVWHDITGNKPGTVTINADGWANFSVNKGSVSIWVKR

SEQ ID NO: 20363 - protein, 481 aa, Bacillus sp.
HNGTNATMMQYFEWHLPNDGNHWNRLRDDASNLRNRGITAIWIPPAWKGTSQNDVGYGAYDLYDLGEFNQKGTVRTKYGTRSQLESAIHALKNNGVQVYGDVVMNHKAGADGTEFVTAVEVDPSNRNQETLGTYQIQAYTKFDFPGRGNTYSSFKWRWYHFDGTDWDESRKLNRIYKFSGKAWDWPVDTEFGNYDYLMFADYDMDHPEVVNELRRWGEWYTNTLNLDGFRIDAVKHIKFSFTRDWLTHVRNATGKGMFAVAEFWKNDLGALENYLSYTNWNHSVFDVPLHYNLYNASNYGGNYDMAKLLNGTVVQKHPMHAVTFVDNHDSQPGESLESFVQEWFKPLAYALILTREQGYPSVFYGDYYGIPTHSVPAMKAKIDPILAARQNFAYGTQHDYFDHHNIIGWTREGNTTHPNSGLATIMSDGPGGEKWMYVGQNKAGQVWHDITGNKPGTVTINADGWANFSVNKGSVSIWVKR

SEQ ID NO: 20364 - protein, 481 aa, Bacillus sp.
HNGTNATMMQYFEWHLPNDGNHWNRLRDDASNLRNRGITAIWIPPAWKGTSQNDVGYGAYDLYDLGEFNQKGTVRTKYGTRSQLESAIHALKNNGVQVYGDVVMNHKAGADGTEFVTAVEVDPSNRNQETSGTYQIQAYTKFDFPGRGNTYSSFKWRWYHFDGTDWDESRKLNRIYKFSGKAWDWPVDTEFGNYDYLMFADYDMDHPEVVNELRRWGEWYTNTLNLDGFRIDAVKHIKFSFTRDWLTHVRNATGKGMFAVAEYWKNDLGALENYLSYTNWNHSVFDVPLHYNLYNASNSRGNYDMAKLLNGTVVQKHPMHAVTFVDNHDSQPGESLESFVQEWFKPLAYALILTREQGYPSVFYGDYYGIPTHSVPAMKAKIDPILAARQNFAYGTQHDYFDHHNIIGWTREGNTTHPNSGLATIMSDGPGGEKWMYVGQNKAGQVWHDITGNKPGTVTINADGWANFSVNKGSVSIWVKR

SEQ ID NO: 20365 - protein, 481 aa, Bacillus sp.
HNGTNATMMQYFEWHLPNDGNHWNRLRDDASNLRNRGITAIWIPPAWKGTSQNDVGYGAYDLYDLGEFNQKGTVRTKYGTRSQLESAIHALKNNGVQVYGDVVMNHKAGADGTEFVTAVEVDPSNRNQETSGTYQIQAYTKFDFHGRGNTYSSFKWRWYHFDGTDWDESRKLNRIYKFSGKAWDWPVDTEFGNYDYLMFADYDMDHPEVVNELRRWGEWYTNTLNLDGFRIDAVKHIKFSFTRDWLTHVRNATGKGMFAVAEFWKNDLGALENYLSYTNWNHSVFDVPLHYNLYNASNTGGNYDMAKLLNGTVVQKHPMHAVTFVDNHDSQPGESLESFVQEWFKPLAYALILTREQGYPSVFYGDYYGIPTHSVPAMKAKIDPILAARQNFAYGTQHDYFDHHNIIGWTREGNTTHPNSGLATIMSDGPGGEKWMYVGQNKAGQVWHDITGNKPGTVTINADGWANFSVNGASVSIWVKR

SEQ ID NO: 20366 - protein, 481 aa, Bacillus sp.
HNGTNATMMQYFEWHLPNDGNHWNRLRDDASNLRNRGITAIWIPPAWKGTSQNDVGYGAYDLYDLGEFNQKGTVRTKYGTRSQLESAIHALKNNGVQVYGDVVMNHKAGADGTEFVTAVEVDPSNRNQETSGTYQIQAYTKFDFPGRGNTYSSFKWRWYHFDGTDWDESRKLNRIYKFSGKAWDWPVDTEFGNYDYLMFADYDMDHPEVVNELRRWGEWYYNTLNLDGFRIDAVKHIKFSFTRDWLTHVRNATGKGMFAVAEFWKNDLGALENYLSYTNWNHSVFDVPLHYNLYNASNTGGNYDMAKLLNGTVVQKHPMHAVTFVDNHDSQPGESLESFVQEWFKPLAYALILTREQGYPSVFYGDYYGIPTHSVPAMKAKIDPILAARQNFAYGTQHDYFDHHNIIGWTREGNTTHPNSGLATIMSDGPGGEKWMYVGQNKAGQVWHDITGNKPGTVTINADGWANFSVNKGSVSIWVKR

SEQ ID NO: 20367 - protein, 481 aa, Bacillus sp.
HNGTNATMMQYFEWHLPNDGNHWNRLRDDASNLRNRGITAIWIPPAWKGTSQNDVGYGAYDLYDLGEFNQKGTVRTKYGTRSQLESAIHALKNNGVQVYGDVVMNHKAGADGTEFVTAVEVDPSNRNQETSGTYQIQAYTKFDFPGRGNTYSSFKWRWYHFDGTDWDESRKLNRIYKFSGKAWDWPVDTEFGNYDYLMFADLDMDHPEVVNELRRWGEWYTNTLNLDGFRIDAVKHIKFSFTRDWLTHVRNATGKGMFAVAEYWKNDLGALENYLSYTNWNHSVFDVPLHYNLYNASNSRGNYDMAKLLNGTVVQKHPMHAVTFVDNHDSQPGESLESFVQEWFKPLAYALILTREQGYPSVFYGDYYGIPTHSVPAMKAKIDPILAARQNFAYGTQHDYFDHHNIIGWTREGNTTHPNSGLATIMSDGPGGEKWMYVGQNKAGQVWHDITGNKPGTVTINADGWANFSVNGASVSIWVKR

SEQ ID NO: 20368 - protein, 481 aa, Bacillus sp.
HNGTNATMMQYFEWHLPNDGNHWNRLRDDASNLRNRGITAIWIPPAWKGTSQNDVGYGAYDLYDLGEFNQKGTVRTKYGTRSQLESAIHALKNNGVQVYGDVVMNHKAGADGTEFVTAVEVDPSNRNQETSGTYQIQAYTKFDFPGRGNTYSSFKWRWYHFDGTDWDESRKLNRIYKFTGKQWDWPVDTEFGNYDYLMFADYDMDHPEVVNELRRWGEWYTNTLNLDGFRIDAVKHIKFSFTRDWLTHVRNATGKGMFAVAEFWKNDLGALENYLSYTNWNHSVFDVPLHYNLYNASNSRGNYDMAKLLNGTVVQKHPMHAVTFVDNHDSQPGESLESFVQEWFKPLAYALILTREQGYPSVFYGDYYGIPTHSVPAMKAKIDPILAARQNFAYGTQHDYFDHHNIIGWTREGNTTHPNSGLATIMSDGPGGEKWMYVGQNKAGQVWHDITGNKPGTVTINADGWANFSVNKGSVSIWVKR

SEQ ID NO: 20369 - protein, 481 aa, Bacillus sp.
HNGTNATMMQYFEWHLPNDGNHWNRLRDDASNLRNRGITAIWIPPAWKGTSQNDVGYGAYDLYDLGEFNQKGTVRTKYGTRSQLESAIHALKNNGVQVYGDVVMNHKAGADGTEFVTAVEVDPSNRNQETSGTYQIQAYTKFDFHGRGNTYSSFKWRWYHFDGTDWDESRKLNRIYKFSGKAWDWPVDTEFGNYDYLMFADYDMDHPEVVNELRRWGEWYTNTLNLDGFRIDAVKHIKFSFTRDWLTHVRNATGKGMFAVAEFWKNDLGALENYLSYTNWNHSVFDVPLHYNLYNASNYGGNYDMAKLLNGTVVQKHPMHAVTFVDNHDSQPGESLESFVQEWFKPLAYALILTREQGYPSVFYGDYYGIPTHSVPAMKAKIDPILAARQNFAYGTQHDYFDHHNIIGWTREGNTTHPNSGLATIMSDGPGGEKWMYVGQNKAGQVWHDITGNKPGTVTINADGWANFSVLGGSVSIWVKR

SEQ ID NO: 20370 - protein, 481 aa, Bacillus sp.
HNGTNATMMQYFEWHLPNDGNHWNRLRDDASNLRNRGITAIWIPPAWKGTSQNDVGYGAYDLYDLGEFNQKGTVRTKYGTRSQLESAIHALKNNGVQVYGDVVMNHKAGADGTEFVTAVEVDPSNRNQETSGTYQIQAYTKFDFPGRGNTYSSFKWRWYHFDGTDWDESRKLNRIYKFSGKAWDWPVDTEFGNYDYLMFADYDMDHPEVVNELRRWGEWYTNTLNLDGFRIDAVKHIKFSFTRDWLTHVRNATGKGMFAVAEFWKNDLGALENYLSYTNWNHSVFDVPLHYNLYNASNSRGNYDMAKLLNGTVVQKHPMHAVTFVDNHDSQPGESLESFVQEWFKPLAYALILTREQGYPSVFYGDYYGIPTHSVPAMKAKIDPILAARQNFAYGTQHDYFDHHNIIGWTREGNTTHPNSGLATIMSDGPGGEKWMYVGQNKAGQVWHDITGNKPGTVTINADGWAMFSVNGASVSIWVKR

SEQ ID NO: 20371 - protein, 481 aa, Bacillus sp.
HNGTNATMMQYFEWHLPNDGNHWNRLRDDASNLRNRGITAIWIPPAWKGTSQNDVGYGAYDLYDLGEFNQKGTVRTKYGTRSQLESAIHALKNNGVQVYGDVVMNHKAGADGTEFVTAVEVDPSNRNQETSGTYQIQAYTKFDFPGRGNTYSSFKWRWYHFDGTDWDESRKLNRIYKFSGKAWDWPVDTEFGNYDYLMFADYDMDHPEVVNELRRWGEWYTNTLNLDGFRIDAVKHIKFSFTRDWLTHVRNATGKGWFAVAEFWKNDLGALENYLSYTNWNHSVFDVPLHYNLYNASNYGGNYDMAKLLNGTVVQKHPMHAVTFVDNHDSQPGESLESFVQEWFKPLAYALILTREQGYPSVFYGDYYGIPTHSVPAMKAKIDPILAARQNFAYGTQHDYFDHHNIIGWTREGNTTHPNSGLATIMSDGPGGEKWMYVGQNKAGQVWHDITGNKPGTVTINADGWANFSVNGASVSIWVKR

SEQ ID NO: 20372 - protein, 481 aa, Bacillus sp.
HNGTNATMMQYFEWHLPNDGNHWNRLRDDASNLRNRGITAIWIPPAWKGTSQNDVGYGAYDLYDLGEFNQKGTVRTKYGTRSQLESAIHALKNNGVQVYGDVVMNHKAGADGTEFVTAVEVDPSNRNQETSGTYQIQAYTKFDFPGRGNTYSSFKWRWYHFDGTDWDESRKLNRIYKFSGKAWDWPVDTEFGNYDYLMFADYDMDHPEVVNELRRWGEWYTNTLNLDGFRIDAVKHIKFSFTRDWLTHVRNATGKGMFAVAEFWKNDLGALENYLSYTNWNHSVFDVPLHYNLYNASNYGGNYDMAKLLNGTVVQKHPMHAVTFVDNHDSQPGESLESFVQEWFKPLAYALILTREQGVPSVFYGDYYGIPTHSVPAMKAKIDPILAARQNFAYGTQHDYFDHHNIIGWTREGNTTHPNSGLATIMSDGPGGEKWMYVGQNKAGQVWHDITGNKPGTVTINADGWANFSVNKGSVSIWVKR

SEQ ID NO: 20373 - protein, 481 aa, Bacillus sp.
HNGTNATMMQYFEWHLPNDGNHWNRLRDDASNLRNRGITAIWIPPAWKGTSQNDVGYGAYDLYDLGEFNQKGTVRTKYGTRSQLESAIHALKNNGVQVYGDVVMNHKAGADGTEFVTAVEVDPSNRNQETSGTYQIQAYTKFDFPGRGNTYSSFKWRWYHFDGTDWDESRKLNRIYKFSGKQWDWPVDTEFGNYDYLMFADYDMDHPEVVNELRRWGEWYTNTLNLDGFRIDAVKHIKFSFTRDWLTHVRNATGKGMFAVAEFWKNDLGALENYLSYTNWNHSVFDVPLHYNLYNASNSRGNYDMAKLLNGTVVQKHPMHAVTFVDNHDSQPGESLESFVQEWFKPLAYALILTREQGYPSVFYGDYYGIPTHSVPAMKAKIDPILAARQNFAYGTQHDYFDHHNIIGWTREGNTTHPNSGLATIMSDGPGGEKWMYVGQNKAGQVWHDITGNKPGTVTINADGWANFSVNKGSVSIWVKR

SEQ ID NO: 20374 - protein, 481 aa, Bacillus sp.
HNGTNATMMQYFEWHLPNDGNHWNRLRDDASNLRNRGITAIWIPPAWKGTSQNDVGYGAYDLYDLGEFNQKGTVRTKYGTRSQLESAIHALKNNGVQVYGDVVMNHKAGADGTEFVTAVEVDPSNRNQETSGTYQIQAYTKFDFPGRGNTYSSFKWRWYHFDGTDWDESRKLNRIYKFSGKQWDWPVDTEFGNYDYLMFADYDMDHPEVVNELRRWGEWYYNTLNLDGFRIDAVKHIKFSFTRDWLTHVRNATGKEMFAVAEFWKNDLGALENYLSYTNWNHSVFDVPLHYNLYNASNSRGNYDMAKLLNGTVVQKHPMHAVTFVDNHDSQPGESLESFVQEWFKPLAYALILTREQGYPSVFYGDYYGIPTHSVPAMKAKIDPILAARQNFAYGTQHDYFDHHNIIGWTREGNTTHPNSGLATIMSDGPGGEKWMYVGQNKAGQVWHDITGNKPGTVTINADGWANFSVNGASVSIWVKR

SEQ ID NO: 20375 - protein, 481 aa, Bacillus sp.
HNGTNATMMQYFEWHLPNDGNHWNRLRDDASNLRNRGITAIWIPPAWKGTSQNDVGYGAYDLYDLGEFNQKGTVRTKYGTRSQLESAIHALKNNGVQVYGDVVMNHKAGADGTEFVTAVEVDPSNRNQETSGTYQIVAYTKFDFPGRGNTYSSFKWRWYHFDGTDWDESRKLNRIYKFSGKAWDWPVDTEFGNYDYLMFADYDMDHPEVVNELRRWGEWYTNTLNLDGFRIDAVKHIKFSFTRDWLTHVRNATGKGMFAVAEFWKNDLGALENYLSYTNWNHSVFDVPLHYNLYNASNSRGNYDMAKLLNGTVVQKHPMWAVTFVDNHDSQPGESLESFVQEWFKPLAYALILTREQGYPSVFYGDYYGIPTHSVPAMKAKIDPILAARQNFAYGTQHDYFDHHNIIGWTREGNTTHPNSGLATIMSDGPGGEKWMYVGQNKAGQVWHDITGNKPGTVTINADGWANFSVLGGSVSIWVKR

SEQ ID NO: 20376 - protein, 481 aa, Bacillus sp.
HNGTNATMMQYFEWHLPNDGNHWNRLRDDASNLRNRGITAIWIPPAWKGTSQNDVGYGAYDLYDLGEFNQKGTVRTKYGTRSQLESAIHALKNNGVQVYGDVVMNHKAGADGTEFVTAVEVDPSNRNQETSGTYQIQAYTKFDFPGRGNTYSSFKWRWYHFDGTDWDESRKLNRIYKFSGKAWDWPVDTEFGNYDYLMFADYDMDHPEVVNELRRWGEWYTNTLNLDGFRIDAVKHIKFSFTRDWLTHVRNATGKGMFAVAEFWKNDLGALENYLSYTNWNHSVFDVPLHYNLYNASNSRGNYDMAKLLNGTVVQKHPMHAVTFVDNHDSQPGESLESFVQEWFKPLAYALILTREQGYPSVFYGDYYGIPTHSVPAMKAKIDPILEARQDFAYGTQHDYFDHHNIIGWTREGNTTHPVSGLATIMSDGPGGEKWMYVGQNKAGQVWHDITGNKPGTVTINADGWANFSVNKGSVSIWVKR

SEQ ID NO: 20377 - protein, 481 aa, Bacillus sp.
HNGTNATMMQYFEWHLPNDGNHWNRLRDDASNLRNRGITAIWIPPAWKGTSQNDVGYGAYDLYDLGEFNQKGTVRTKYGTRSQLESAIHALKNNGVQVYGDVVMNHKAGADGTEFVTAVEVDPSNRNQETSGTYQIQAYTKFDFPGRGNTYSSFKWRWYHFDGTDWDESRKLNRIYKFSGKAWDWPVDTEFGNYDYLMFADYDMDHPEVVNELRRWGEWYTNTLNLDGFRIDAVKHIKFSFTRDWLTHVRNATGKGMFAVAEFWKNDLGALENYLSYTNWNHSVFDVPLHYNLYNASNSRGNYDMAKLLNGTVVQKHPMHAVTFVDNHDSQPGESLESFVQEWFKPLAYALILTREQGYPSVFYGDYYGIPTHSVPAMKAKIDPILAARQNFAYGTQHDYFDHHNIIGWTREGNTTAPNSGLATIMSDGPGGEKWMYVGQNKAGQVWHDITGNKPGTVTINADGWANFSVLGGSVSIWVKR

SEQ ID NO: 20378 - protein, 481 aa, Bacillus sp.
HNGTNATMMQYFEWHLPNDGNHWNRLRDDASNLRNRGIGAIWIPPAWKGTSQNDVGYGAYDLYDLGEFNQKGTVRTKYGTRSQLESAIHALKNNGVQVYGDVVMNHKAGADGTEFVTAVEVDPSNRNQETSGTYQIQAYTKFDFPGRGNTYSSFKWRWYHFDGTDWDESRKLNRIYKFSGKAWDWPVDTEFGNYDYLMFADYDMDHPEVVNELRRWGEWYTNTLNLDGFRIDAVKHIKFSFTRDWLTHVRNATGKGMFAVAEFWKNDLGALENYLSYTNWNHSVFDVPLHYNLYNASNSRGNYDMAKLLNGTVVQKHPMHAVTFVDNHDSQPGESLESFVQEWFKPLAYALILTREQGYPSVFYGDYYGIPTHSVPAMKAKIDPILAARQNFAYGTQHDYFDHHNIIGWTREGNTTHPNSGLATIMSDGPGGEKWMYVGQNKAGQVWHDITGNKPGTVTINADGWANFSVNGASVSIWVKR

SEQ ID NO: 20379 - protein, 480 aa, Bacillus sp.
HSGTNATMMQYFEWHLPNDGNHWNRLRDDASNLRNRGITAIWIPPAWKGTSQNDVGYGAYDLYDLGEFNQKGTVRTKYGTRSQLESAIHALKDNGVLVYGDVVMNHKAGADGTEFVDAVEVDPSNRNQETSGTYQIQAYTKFDFPGRGNTYSSFKWRWYHFDGTDWDESRKLNRIYKFTGKAWDWEVDTEFGNYDYLMFADYDMDHPEVVNELRRWGEWYTNTLNLDGFRIDAVKHIKFSFTRDWLTHRNATGKGMFAVAEFWKNDLGALENYLSKTNWNHSVFDVPLHYNLYNASNSRGNYDMAKLLNGTVVQKHPMHAVTFVDNHDSQPGESLESFVQEWFKPLAYALILTREQGYPSVFYGDYYGIPTHSVPAMKAKIDPILAARQNFAYGTQHDYFDHHNIIGWTREGNTTHPNSGLATIMSDGPGGEKWMYVGQNKAGQVWHDITGNKPGTVTINADGWANFSVNKGSVSIWVKR

SEQ ID NO: 20380 - protein, 480 aa, Bacillus sp.
HNGTNATMMQYFEWHLPNDGNHWNRLRDDASNLRNRGITAIWIPPAWKGTSQNDVGYGAYDLYDLGEFNQKGTVRTKYGTRSQLESAIHALKNNGVQVYGDVVMNHKAGADGTEFVTAVEVDPSNRNQETSGTYQIQAYTKFDFPGRGNTYSSFKWRWYHFDGTDWDESRKLNRIYKFSGKQWDWPVDTENGYDYLMFADLDMDHPEVVNELRRWGEWYTNTLNLDGFRIDAVKHIKFSFTRDWLTHVRNATGKGMFAVAEYWKNDLGALENYLSYTNWNHSVFDVPLHYNLYNASNSRGNYDMAKLLNGTVVQKHPMHAVTFVDNHDSQPGESLESFVQEWFKPLAYALILTREQGYPSVFYGDYYGIPTHSVPAMKAKIDPILAARQNFAYGTQHDYFDHHNIIGWTREGNTTHPNSGLATIMSDGPGGEKWMYVGQNKAGQVWHDITGNKPGTVTINADGWANFSVNKGSVSIWVKR

SEQ ID NO: 20381 - protein, 480 aa, Bacillus sp.
HDGTNATMMQYFEWHLPNDGNHWNRLRDDASNLRNRGITAIWIPPAWKGTSQNDVGYGAYDLYDLGEFNQKGTVRTKYGTRSQLESAIHALKNNGVQVYGDVVMNHKAGADGTEFVTAVEVDPSNRNQETSGTYQIQAYTKFDFPGRGNTYSSFKWRWYHFDGTDWDESRKLNRIYKFSGKAWDWPVDTEFGNYDYLMFADYDMDHPEVVNELRRWGEWYTNTLNLDGFRIDAVKHIKFSFTRDWLTHVRNATGKGMFAVAEFWKNDLGALENYLSYTNWNHSVFDVPLHYNLYNASNTGGNYDMAKLLNGTVVQKHPMHAVTFVDNHDSQPGESLESFVQEWFKPLAYALILTREQGYPSFYGDYYGIPTHSVPAMKAKIDPILAARQNFAYGTQHDYFDHHNIIGWTREGNTTHPNSGLATIMSDGPGGEKWMYVGQNKAGQVWHDITGNKPGTVTINADGWANFSVLGGSVSIWVKR

SEQ ID NO: 20382 - protein, 511 aa, Geobacillus stearothermophilus
LAFLLTALLFCPTGQPAKAAAPFNGTMMQYFEWYLPDDGTLWTKVANEANNLSSLGITALWLPPAYKGTSRSDVGYGVYDLYDLGEFNQKGAVRTKYGTKAQYLQAIQAAHAAGMQVYADVVFDHKGGADGTEWVDAVEVNPSDRNQEISGTYQIQAWTKFDFPGRGNTYSSFKWRWYHFDGVDWDESRKLSRIYKFRGIGKAWDWEVDTENGNYDYLMYADLDMDHPEVVTELKSWGKWYVNTTNIDGFRLDAVKHIKFSFFPDWLSDVRSQTGKPLFTVGEYWSYDINKLHNTYIMKTNGTMSLFDAPLHNKFYTASKSGGTFDMRTLMTNTLMKDQPTLAVTFVDNHDTEPGQALQSWVDPWFKPLAYAFILTRQEGYPCVFYGDYYGIPQYNIPSLKSKIDPLLIARRDYAYGTQHDYLDHSDIIGWTREGVTEKPGSGLAALITDGPGGSKWMYVGKQHAGKVFYDLTGNRSDTVTINSDGWGEFKVNGGSVSVWVPRKTTVSTIA

SEQ ID NO: 20383 - protein, 510 aa, unidentified
LAFLLTALLFCPTGQPAKAAAPFNGTMMQYFEWYLPDDGTLWTKVANEANNLSSLGITALWLPPAYKGTSRSDVGYGVYDLYDLGEFNQKGAVRTKYGTKAQYLQAIQAAHAAGMQVYADVVFDHKGGADGTEWVDAVEVNPSDRNQEISGTYQIQAWTKFDFPGRGNTYSSFKWRWYHFDGVDWDESRKLSRIYKFRGIGKAWDWEVDTENGNYDYLMYADLDMDHPEVVTELKSWGKWYVNTTNIDGFRLDAVKHIKFSFFPDWLSDVRSQTGKPLFTVGEYWSYDINKLHNYIMKTNGTMSLFDAPLHNKFYTASKSGGTFDMRTLMTNTLMKDQPTLAVTFVDNHDTEPGQALQSWVDPWFKPLAYAFILTRQEGYPCVFYGDYYGIPQYNIPSLKSKIDPLLIARRDYAYGTQHDYLDHSDIIGWTREGVTEKPGSGLAALITDGPGGSKWMYVGKQHAGKVFYDLTGNRSDTVTINSDGWGEFKVNGGSVSVWVPRKTTVSTIA

SEQ ID NO: 20384 - protein, 493 aa, Geobacillus stearothermophilus
AAPFNGTMMQYFEWYLPDDGTLWTKVADEANNLSSLGITALWLPPAYKGTSRSDVGYGVYDLYDLGEFNQKGTVRTKYGTKAQYLEAIEAAHAAGMRVYADVVFDHKGGADGTEWVDAVEVNPSDRNQEISGTYQIQAWTKFDFPGRGNTYSSFKWRWYHFDGVDWDESRQLSRIYKFRGIGKAWDWEVDTENGNYDYLMYADLDMDHPEVVTELKNWGKWYVDTTNIDGFRLDAVKHIKFSFFPDWLSYVRSQTGKPLFTVGEYWSYDIDKLHNYITKTDGTMSLFDAPLHNKFYTASKSGGAFDMQTLMTNTLMKDRPTLAVTFVDNHDTEPGQALQSWVDPWFKPLAYAFILTREEGYPCVFYGDYYGIPQYNIPSLKSQIDPLLIARRDYAYGTQHDYLDHSDIIGWTREGVTEKPGSGLAALITDGPGGSKWMYVGKEHAGQVFYDLTGNRSDTVTINSDGWGEFQVNGGSVSVWVPQKTTVSTIARP

SEQ ID NO: 20385 - protein, 493 aa, Geobacillus stearothermophilus
AAPFNGTMMQYFEWYLPDDGTLWTKVANEANNLSSLGITALWLPPAYKGTSRSDVGYGVYILYDLGEXNQKGTVRTKYGTKAQYLQAIQAAHAAGMQVYADVVFDHKGGADGTEWVDAVEVNPSDRNQEISGTYQIQAWTKFDFPGRGNTYSSFKWRWYHFDGVDWDESRKLSRIYKFRGIGKAWDWEVDTENGNYDYLMYADLDMDHPEVVTELKNWGKWYVNTTNIDGXRLDAVKHIKFSFFPDWLSYVRSQTGKPLXTVGEYWSYDXNKLHNYITKTXGTMSLFDAPLXNKFYTASKSGGAFDMRXLMTNTLMKDQPTLAVTFVDNHDTEPGQALQSWVDPWFKPLAYAFILTRQEGYPCVFYGDYYGIPQYNIPSLKSKXDPLLIARRDYAYGXQHDYLDHSDIXGXTREGGTXKPGSGLAALITDGPGGSKWXYVGKQHAGKVFXDLTGNRSDTVTINSDGWGEFKVNGGSVSVXVPRKTTVSTIARP

SEQ ID NO: 20386 - protein, 489 aa, Geobacillus stearothermophilus
AAPFNGTMMQYFEWHLPDDGTLWTKLANDANNLSSLGITAIWIPPAWKGTSRSDVGYGVYDLYDLGEFNQKGTVRTKYGTKAQYLQAIQAAHAAGMQVYADVVFDHKGGADATEWVDAVEVNPSDRNQEISGTYQIQAWTKFDFPGRGNTYSSFKWRWYHFDGVDWDESRQKLSRIYKFRGIGKAWDWEVDSENGNYDYLMYADLDMDHPEVVTELKNWGKWYVNTTNIDGFRIDAVKHIKFSFFPDWLSHVRSQTGKPLFTVAEFWSYDINKLHNYITKTNGTMSLFDAPLHNKFYTASKSGGAFDMRTLLTNTLMKDQPTLAVTFVDNHDSEPGQALQSFVDPWFKPLAYAFILTRQEGYPCVFYGDYYGIPQHNIPALKAKIDPILIARRDFAYGTQHDYLDHSDIIGWTREGVTEKPGSGLAAIISDGPGGSKWMYVGKNHAGKVFHDITGNKSDTVTINADGWAEFKVNGGSVSIWVPRKTTVS

SEQ ID NO: 20387 - protein, 489 aa, Bacillus sp.
AAPFNGTMMQYFEWYLPDDGTLWTKLANDANNLSSLGITALWIPPAWKGTSRSDVGYGVYDLYDLGEFNQKGTVRTKYGTKAQYLQAIQAAHAAGIQVYADVVFDHKGGADATEWVDAVEVNPSDRNQEISGTYQIQAWTKFDFPGRGNTHSSFKWRWYHFDGVDWDESRKLSNRIYKFRGIGKAWDWEVDTENGNYDYLMYADIDMDHPEVVTELKNWGKWYVNTTNIDGFRIDAVKHIKFSFFPDWISHVRSQTGKPLFTVAEFWSYDINKIHNYITKTNGTMSLFDAPLHNKFYTASKSGGAFDMRTIMTNTLMKDQPSLAVTFVDNHDSEPGQALQSFVDPWFKPLAYAFILTRQEGYPCVFYGDYYGIPQHNIPALKSKIDPILIARRDYAYGTQHDYLDHSDIIGWTREGVTEKPGSGLAAIISDGPGGSKWMFVGKNHAGKVFYDITGNRSDTVTINADGWGEFKVNGGSVSIWVPKKTTVS

SEQ ID NO: 20388 - protein, 482 aa, Bacillus sp.
HHGGTNATMMQYFEWHLPNDGNHWNRLRDDASNLRNRGITAIWIPPAWKGTSQNDVGYGAYDLYDLGEFNQKGTVRTKYGTRSQLESAIHALKNNGVQVYGDVVMNHKAGADGTEFVTAVEVDPSNRNQETSGTYQIQAYTKFDFPGRGNTYSSFKWRWYHFDGTDWDESRKLNRIYKFSGKAWDWPVDTEFGNYDYLMFADYDMDHPEVVNELRRWGEWYTNTLNLDGFRIDAVKHIKFSFTRDWLTHVRNATGKGMFAVAEFWKNDLGALENYLSYTNWNHSVFDVPLHYNLYNASNSRGNYDMAKLLNGTVVQKHPMHAVTFVDNHDSQPGESLESFVQEWFKPLAYALILTREQGYPSVFYGDYYGIPTHSVPAMKAKIDPILAARQNFAYGTQHDYFDHHNIIGWTREGNTTAPNSGLATIMSDGPGGEKWMYVGQNKAGQVWHDITGNKPGTVTINADGWANFSVLGGSVSIWVKR

SEQ ID NO: 20389 - protein, 484 aa, Synthetic construct
HHNGTNGTMMQYFEWYLPNDGNHWHRLRSDASNLKDKGITAVWIPPAWKGASQNDVGYGAYDLYDLGEFNQKGTVRTKYGTRNQLQAAVTALKSNGIQVYGDVVMNHKGGADATEWVRAVEVNPSNRNQEVSGDYTIEAWTKFDFPGRGNTHSNFKWRWYHFDGVDWDQSRQLQNKIYKFRGDGKEWDWEVDTENGNYDYLMYADYDMDHPEVVNELRNWGVWYTNTLGLDGFRIDAVKHIKYSFTRDWLTHVRNTTGKNMFAVAEFWKNDIGAIENYLSKTNWNHSVFDVPLHYNLYNASRSGGNYDMRQIFNGTVVQRHPTHAVTFVDNHDSQPEEALESFVEEWFKPLAYALTLTRDQGEPSVFYGDYYGIPTHGVPAMKSKIDPILEARQKYAYGKQNDYLDHHNMIGWTREGNTAHPNSGLATIMSDGPGGNKWMYVGRNKAGQVWRDITGNRSGTVTINADGWGNFSVNGGSVSIWVN

SEQ ID NO: 20390 - protein, 484 aa, Synthetic construct
HHNGTNGTMMQYFEWYLPNDGNHWHRLRSDASNLKDKGITAVWIPPAWKGASQNDVGYGAYDLYDLGEFNQKGTVRTKYGTRNQLQAAVTALKSNGIQVYGDVVMNHKGGADATEWVRAVEVNPSNRNQEVSGDYTIEAWTKFDFPGRGNTHSNFKWRWYHFDGVDWDQSRQLQNKIYKFQGDGKEWDWEVDTENGNYDYLMYADYDMDHPEVVNELRNWGVWYTNTLGLDGFRIDAVKHIKYSFTRDWLTHVRNTTGKNMFAVAEFWKNDIGAIENYLSKTNWNHSVFDVPLHYNLYNASRSGGNYDMRQIFNGTVVQRHPTHAVTFVDNHDSQPEEALESFVEEWFKPLAYALTLTRDQGYPSVFYGDYYGIPTHGVPAMKSKIDPILEARQKYAYGKQNDYLDHHNMIGWTREGNTAHPNSGLATIMSDGPGGNKWMYVGRNKAGQVWRDITGNRSGTVTINADGWGNFSVNGGSVSIWVN

SEQ ID NO: 20391 - protein, 484 aa, Synthetic construct
HHNQTNGTMMQYFEWYLPNDGNHWHRLRSDASNLKDKGITAVWIPPAWKGASQNDVGYGAYDLYDLGEFNQKGTVRTKYGTRNQLQAAVTALKSNGIQVYGDVVMNHKGGADATEWVRAVEVNPSNRNQEVSGDYTIEAWTKFDFPGRGNTHSNFKWRWYHFDGVDWDQSRQLQNKIYKFRGDGKEWDWEVDTENGNYDYLMYADYDMDHPEVVNELRNWGVWYTNTLGLDGFRIDAVKHIKYSFTRDWLEHVRNTTGKNMFAVAEFWKNDIGAIENYLSKTNWNHSVFDVPLHYNLYNASRSGGNYDMRQIFNGTVVQRHPTHAVTFVDNHDSQPEEALESFVEEWFKPLAYALTLTRDQGYPSVFYGDYYGIPTHGVPAMKSKIDPILEARQKYAYGKQNDYLDHHNMIGWTREGNTAHPNSGLATIMSDGPGGNKWMYVGRNKAGQVWRDITGNRSGTVTINADGWGNFSVNGGSVSIWVN

SEQ ID NO: 20392 - protein, 484 aa, Synthetic construct
HHNGTNGTMMQYFEWYLPNDGNHWHRLRSDASNLKDKGITAVWIPPAWKGASQNDVGYGAYDLYDLGEFNQKGTVRTKYGTRNQLQAAVTALKSNGIQVYGDVVMNHKGGADATEWVRAVEVNPSNRNQEVSGDYTIEAWTKFDFPGRGNTHSNFKWRWYHFDGVDWDQSRQLQNKIYKFDGDGKEWDWEVDTENGNYDYLMYADYDMDHPEVVNELRNWGVWYTNTLGLDGFRIDAVKHIKYSFTRDWLTHVRNTTGKNMFAVAEFWKNDIGAIENYLSKTNWNHSVFDVPLHYNLYNASRSGGNYDMRQIFNGTVVQRHPTHAVTFVDNHDSQPEEALESFVEEWFKPLAYALTLTRDQGYPSVFYGDYYGIPTHGVPAMKSKIDPILEARQKYAYGKQNDYLDHHNMIGWTREGNTAHPNSGLATIMSDGPGGNKWMYVGRNKAGQVWRDITGNRSGTVTINADGWGNFSVNGGSVSIWVN

SEQ ID NO: 20393 - protein, 484 aa, Synthetic construct
HHNGTNGTMMQYFEWYLPNDGNHWHRLRSDASNLKDKGITAVWIPPAWKGASQNDVGYGAYDLYDLGEFNQKGTVRTKYGTRNQLQAAVTALKSNGIQVYGDVVMNHKGGADATEWVRAVEVNPSNRNQEVSGDYTIEAWTKFDFPGRGNTHSNFKWRWYHFDGVDWDQSRQLQNRIYKFRGDGKEWDWEVDTENGNYDYLMYADYDMDHPEVVNELRNWGVWYTNTLGLDGFRIDAVKHIKYSFTRDWLTHVRNTTGKNMFAVAEFWKNDIGAIRNYLSKTNWNHSVFDVPLHYNLYNASRSGGNYDMRQIFNGTVVQRHPTHAVTFVDNHDSQPEEALESFVEEWFKPLAYALTLTRDQGYPSVFYGDYYGIPTHGVPAMKSKIDPILEARQKYAYGKQNDYMDHHNMIGWTREGNTAHPNSGLATIMSDGPGGNKWMYVGRNKAGQVWRDITGNRSGTVTINADGWGNFSVNGGSVSIWVN

SEQ ID NO: 20394 - protein, 484 aa, Synthetic construct
HHNGTNGTMMQYFEWYLPNDGNHWNRLRSDASNLKDKGITAVWIPPAWKGASQNDVGYGAYDLYDLGEFNQKGTVRTKYGTRNQLQAAVTALKSNGIQVYGDVVMNHKGGADATEWVRAVEVNPSNRNQEVSGDYTIEAWTKFDFPGRGNTHSNFKWRWWHFDGVDWDQSRQLQNKIYKFRGDGKEWDWEVDEENGNYDYLMYADYDMDHPEVVNELRNWGVWYTNTLGLDGFRIDAVKHIKYSFTRDWLTHVRNTTGKNMFAVAEFWKNDIGAIENYLSKTNWNHSVFDVPLHYNLYNASRSGGNYDMRQIFNGTVVQRHPTHAVTFVDNHDSQPEEALESFVEEWFKPLAYALTLTRDQGYPSVFYGDYYGIPTHGVPAMKSKIDPILEARQKYAYGKQNDYLDHHNMIGWTREGNTAHPNSGLATIMSDGPGGNKWMYVGRNKAGQVWRDITGNRSGTVTINADGWGNFSVNGGSVSIWVN

SEQ ID NO: 20395 - protein, 484 aa, Synthetic construct
HHNGTNHTMMQYFEWYLPNDGNHWHRLRSDASNLKDKGITAVWIPPAWKGASQNDVGYGAYDLYDLGEFNQKGTVRTKYGTRNQLQAAVTALKSNGIQVYGDVVMNHKGGADATEWVRAVEVNPSNRNQEVSGDYTIEAWTKFDFPGRGNTHSNFKWRWYHFDGVDWDQSRQLQNKIYKFRGDGKEWDWEVDTENGNYDYLMYADYDMDHPEVVNELRNWGVWYTNTLGLDGFRIDAVKHIKYSFTRDWLTHVRNTTGKNMFAVAEFWKNDIGAIENYLSKTNWNHSVFDVPLHYNLYNASRSGGNYDMRQIFNGTVVQRHPTHAVTFVDNHDSQPEEALESFVEEWFKPLAYALTLTRDQGYPSVFYGDYYGIPTHGVPAMKSKIDPILEARQKYAYGKQNDYLDHHNMIGWTREGNTAHPNSGLATIMSDGPGGNKWMYVGRNKAGQVWRDITGNRSGTVTINADGWGNFSVNGGSVSIWVN

SEQ ID NO: 20396 - protein, 484 aa, Synthetic construct
HHNQTNGTMMQYFEWYLPNDGNHWNRLRSDASNLKDKGITAVWIPPAWKGASQNDVGYGAYDLYDLGEFNQKGTVRTKYGTRNQLQAAVTALKSNGIQVYGDVVMNHKGGADATEWVRAVEVNPSNRNQEVSGDYTIEAWTKFDFPGRGNTHSNFKWRWYHFDGVDWDQSRQLQNRIYKFRGDGKEWDWEVDEENGNYDYLMYADYDMDHPEVVNELRNWGVWYTNTLGLDGFRIDAVKHIKYSFTRDWLEHVRNTTGKNMFAVAEFWKNDIGAIENYLSKTNWNHSVFDVPLHYNLYNASRSGGNYDMRQIFNGTVVQRHPTHAVTFVDNHDSQPEEALESFVEEWFKPLAYALTLTRDQGYPSVFYGDYYGIPTHGVPAMKSKIDPILEARQKYAYGKQNDYMDHHNMIGWTREGNTAHPNSGLATIMSDGPGGNKWMYVGRNKAGQVWRDITGNRSGTVTINADGWGNFSVNGGSVSIWVN

SEQ ID NO: 20397 - protein, 484 aa, Synthetic construct
HHNGTNGTMMQYFEWYLPNDGNHWHRLRSDASNLKDKGITAVWIPPAWKGASQNDVGYGAYDLYDLGEFNQKGTVRTKYGTRNQLQAAVTALKSNGIQVYGDVVMNHKGGADATEWVRAVEVNPSNRNQEVSGDYTIEAWTKFDFPGRGNTHSNFKWRWYHFDGVDWDQSRQLQNKIYKFRGDGKEWDWEVDEENGNYDYLMYADYDMDHPEVVNELRNWGVWYTNTLGLDGFRIDAVKHIKYSFTRDWLTHVRNTTGKNMFAVAEFWKNDIGAIENYLSKTNWNHSVFDVPLHYNLYNASRSGGNYDMRQIFNGTVVQRHPTHAVTFVDNHDSQPEEALESFVEEWFKPLAYALTLTRDQGYPSVFYGDYYGIPTHGVPAMKSKIDPILEARQKYAYGKQNDYLDHHNMIGWTREGNTAHPNSGLATIMSDGPGGNKWMYVGRNKAGQVWRDITGNRSGTVTINADGWGNFSVNGGSVSIWVN

SEQ ID NO: 20398 - protein, 484 aa, Synthetic construct
HHNQTNGTMMQYFEWYLPNDGNHWNRLRSDASNLKDKGITAVWIPPAWKGASQNDVGYGAYDLYDLGEFNQKGTVRTKYGTRNQLQAAVTALKSNGIQVYGDVVMNHKGGADATEWVRAVEVNPSNRNQEVSGDYTIEAWTKFDFPGRGNTHSNFKWRWWHFDGVDWDQSRQLQNKIYKFRGDGKGWDWEVDTENGNYDYLMYADYDMDHPEVVNELRNWGVWYTNTLGLDGFRIDAVKHIKYSFTRDWLEHVRNTTGKNMFAVAEFWKNDIGAIENYLSKTNWNHSVFDVPLHYNLYNASRSGGNYDMRQIFNGTVVQRHPGHAVTFVDNHDSQPEEALESFVEEWFKPLAYALTLTRDQGYPSVFYGDYYGIPTHGVPAMKSKIDPILEARQKYAYGKQNDYMDHHNMIGWTREGNTAHPNSGLATIMSDGPGGNKWMYVGRNKAGQVWRDITGNRSGTVTINADGWGNFSVNGGSVSIWVN

SEQ ID NO: 20399 - protein, 484 aa, Synthetic construct
HHNQTNGTMMQYFEWYLPNDGNHWNRLRSDASNLKDKGITAVWIPPAWKGASQNDVGYGAYDLYDLGEFNQKGTVRTKYGTRNQLQAAVTALKSNGIQVYGDVVMNHKGGADATEWVRAVEVNPSNRNQEVSGDYTIEAWTKFDFPGRGNTHSNFKWRWYHFDGVDWDQSRQLQNKIYKFRGDGKEWDWEVDTENGNYDYLMYADYDMDHPEVVNELRNWGVWYTNTLGLDGFRIDAVKHIKYSFTRDWLTHVRNTTGKNMFAVAEFWKNDIGAIRNYLSKTNWNHSVFDVPLHYNLYNASRSGGNYDMRQIFNGTVVQRHPTHAVTFVDNHDSQPEEALESFVEEWFKPLAYALTLTRDQGYPSVFYGDYYGIPTHGVPAMKSKIDPILEARQKYAYGKQNDYLDHHNMIGWTREGNTAHPNSGLATIMSDGPGGNKWMYVGRNKAGQVWRDITGNRSGTVTINADGWGNFSVNGGSVSIWVN

SEQ ID NO: 20400 - protein, 484 aa, Synthetic construct
HHNGTNGTMMQYFEWYLPNDGNHWHRLRSDASNLKDKGITAVWIPPAWKGASQNDVGYGAYDLYDLGEFNQKGTVRTKYGTRNQLQAAVTALKSNGIQVYGDVVMNHKGGADATEWVRAVEVNPSNRNQEVSGDYTIEAWTKFDFPGRGNTHSNFKWRWYHFDGVDWDQSRQLQNRIYKFRGDGKEWDWEVDTENGNYDYLMYADYDMDHPEVVNELRNWGVWYTNTLGLDGFRIDAVKHIKYSFTRDWLEHVRNTTGKNMFAVAEFWKNDIGAIRNYLSKTNWNHSVFDVPLHYNLYNASRSGGNYDMRQIFNGTVVQRHPGHAVTFVDNHDSQPEEALESFVEEWFKPLAYALTLTRDQGYPSVFYGDYYGIPTHGVPAMKSKIDPILEARQKYAYGKQNDYMDHHNMIGWTREGNTAHPNSGLATIMSDGPGGNKWMYVGRNKAGQVWRDITGNRSGTVTINADGWGNFSVNGGSVSIWVN

SEQ ID NO: 20401 - protein, 484 aa, Synthetic construct
HHNGTNGTMMQYFEWYLPNDGNHWNRLRSDASNLKDKGITAVWIPPAWKGASQNDVGYGAYDLYDLGEFNQKGTVRTKYGTRNQLQAAVTALKSNGIQVYGDVVMNHKGGADATEWVRAVEVNPSNRNQEVSGDYTIEAWTKFDFPGRGNTHSNFKWRWYHFDGVDWDQSRQLQNKIYKFRGDGKEWDWEVDTENGNYDYLMYADYDMDHPEVVNELRNWGVWYTNTLGLDGFRIDAVKHIKYSFTRDWLTHVRNTTGKNMFAVAEFWKNDIGAIRNYLSKTNWNHSVFDVPLHYNLYNASRSGGNYDMRQIFNGTVVQRHPTHAVTFVDNHDSQPEEALESFVEEWFKPLAYALTLTRDQGYPSVFYGDYYGIPTHGVPAMKSKIDPILEARQKYAYGKQNDYMDHHNMIGWTREGNTAHPNSGLATIMSDGPGGNKWMYVGRNKAGQVWRDITGNRSGTVTINADGWGNFSVNGGSVSIWVN

SEQ ID NO: 20402 - protein, 484 aa, Synthetic construct
HHNGTNGTMMQYFEWYLPNDGNHWNRLRSDASNLKDKGITAVWIPPAWKGASQNDVGYGAYDLYDLGEFNQKGTVRTKYGTREQLQAAVTALKSNGIQVYGDVVMNHKGGADATEWVRAVEVNPSNRNQEVSGDYTIEAWTKFDFPGRGNTHSNFKWRWYHFDGVDWDQSRQLQNRIYKFRGDGKEWDWEVDTENGNYDYLMYADIDMDHPEVVNELRRWGVWYTDTLGLDGFRIDAVKHIKYSFTRDWLTHVRNTTGKNMFAVAEFWKNDIGAIENYLSKTNWNHSVFDVPLHYNLYNASRSGGNYDMRQIFEGTVVQRHPTHAVTFVDNHDSQPEEALESFVEEWFKPLAYALTLTRDQGYPSVFYGDYYGIPTHGVPAMKSKIDPILEARQKYAYGKQNDYLDHHNMIGWTREGNTAHPNSGLATIMSDGPGGNKWMYVGRNKAGQVWRDITGNRSGTVTINADGWGNFSVNGGSVSIWVN

SEQ ID NO: 20403 - protein, 484 aa, Synthetic construct
HHNQTNGTMMQYFEWYLPNDGNHWNRLRSDASNLKDKGITAVWIPPAWKGASQNDVGYGAYDLYDLGEFNQKGTVRTKYGTRNQLQAAVTALKSNGIQVYGDVVMNHKGGADATEWVRAVEVNPSNRNQEVSGDYTIEAWTKFDFPGRGNTHSNFKWRWYHFDGVDWDQSRQLQNKIYKFRGDGKGWDWEVDTENGNYDYLMYADYDMDHPEVVNELRNWGVWYTNTLGLDGFRIDAVKHIKYSFTRDWLEHVRNTTGKNMFAVAEFWKNDIGAIRNYLSKTNWNHSVFDVPLHYNLYNASRSGGNYDMRQIFNGTVVQRHPTHAVTFVDNHDSQPEEALESFVEEWFKPLAYALTLTRDQGYPSVFYGDYYGIPTHGVPAMKSKIDPILEARQKYAYGKQNDYMDHHNMIGWTREGNTAHPNSGLATIMSDGPGGNKWMYVGRNKAGQVWRDITGNRSGTVTINADGWGNFSVNGGSVSIWVN

SEQ ID NO: 20404 - protein, 484 aa, Synthetic construct
HHNGTNGTMMQYFEWYLPNDGNHWHRLRSDASNLKDKGITAVWIPPAWKGASQNDVGYGAYDLYDLGEFNQKGTVRTKYGTRNQLQAAVTALKSNGIQVYGDVVMNHKGGADATEWVRAVEVNPSNRNQEVSGDYTIEAWTKFDFPGRGNTHSNFKWRWYHFDGVDWDQSRQLQNKIYKFRGDGKEWDWEVDEENGNYDYLMYADYDMDHPEVVNELRNWGVWYTNTLGLDGFRIDAVKHIKYSFTRDWLEHVRNTTGKNMFAVAEFWKNDIGAIENYLSKTNWNHSVFDVPLHYNLYNASRSGGNYDMRQIFNGTVVQRHPTHAVTFVDNHDSQPEEALESFVEEWFKPLAYALTLTRDQGYPSVFYGDYYGIPTHGVPAMKSKIDPILEARQKYAYGKQNDYLDHHNMIGWTREGNTAHPNSGLATIMSDGPGGNKWMYVGRNKAGQVWRDITGNRSGTVTINADGWGNFSVNGGSVSIWVN

SEQ ID NO: 20405 - protein, 484 aa, Synthetic construct
HHNGTNGTMMQYFEWYLPNDGNHWNRLRSDASNLKDKGITAVWIPPAWKGASQNDVGYGAYDLYDLGEFNQKGTVRTKYGTREQLQAAVTALKSNGIQVYGDVVMNHKGGADATEWVRAVEVNPSNRNQEVSGDYTIEAWTKFDFPGRGNTHSNFKWRWDHFDGVDWDQSRQLQNRIYKFRGDGKEWDWEVDTENGNYDYLMYADIDMDHPEVVNELRDWGVWYTRTLGLDGFRIDAVKHIKYSFTRDWLTHVRNTTGKNMFAVAEFWKNDIGAIENYLSKTNWNHSVFDVPLHYNLYNASRSGGNYDMRQIFNGTVVQRHPTHAVTFVDNHDSQPEEALESFVEEWFKPLAYALTLTRDQGYPSVFYGDYYGIPTHGVPAMKSKIDPILEARQKYAYGKQNDYLDHHNMIGWTREGNTAHPNSGLATIMSDGPGGNKWMYVGRNKAGQVWRDITGNRSGTVTINADGWGNFSVNGGSVSIWVN

SEQ ID NO: 20406 - protein, 484 aa, Synthetic construct
HHNGTNGTMMQYFEWYLPNDGNHWHRLRSDASNLKDKGITAVWIPPAWKGASQNDVGYGAYDLYDLGEFNQKGTVRTKYGTRNQLQAAVTALKSNGIQVYGDVVMNHKGGADATEWVRAVEVNPSNRNQEVSGDYTIEAWTKFDFPGRGNTHSNFKWRWWHFDGVDWDQSRQLQNKIYKFRGDGKEWDWEVDTENGNYDYLMYADIDMDHPEVVNELRNWGVWYTNTLGLDGFRIDAVKHIKYSFTRDWLTHVRNTTGKNMFAVAEFWKNDIGAIENYLSKTNWNHSVFDVPLHYNLYNASRSGGNYDMRQIFNGTVVQRHPTHAVTFVDNHDSQPEEALESFVEEWFKPLAYALTLTRDQGYPSVFYGDYYGIPTHGVPAMKSKIDPILEARQKYAYGKQNDYMDHHNMIGWTREGNTAHPNSGLATIMSDGPGGNKWMYVGRNKAGQVWRDITGNRSGTVTINADGWGNFSVNGGSVSIWVN

SEQ ID NO: 20407 - protein, 484 aa, Synthetic construct
HHNGTNGTMMQYFEWYLPNDGNHWHRLRSDASNLKDKGITAVWIPPAWKGASQNDVGYGAYDLYDLGEFNQKGTVRTKYGTRNQLQAAVTALKSNGIQVYGDVVMNHKGGADATEWVRAVEVNPSNRNQEVSGDYTIEAWTKFDFPGRGNTHSNFKWRWWHFDGVDWDQSRQLQNKIYKFRGDGKEWDWEVDTENGNYDYLMYADIDMDHPEVVNELRNWGVWYTNTLGLDGFRIDAVKHIKYSFTRDWLEHVRNTTGKNMFAVAEFWKNDIGAIENYLSKTNWNHSVFDVPLHYNLYNASRSGGNYDMRQIFNGTVVQRHPTHAVTFVDNHDSQPEEALESFVEEWFKPLAYALTLTRDQGYPSVFYGDYYGIPTHGVPAMKSKIDPILEARQKYAYGKQNDYMDHHNMIGWTREGNTAHPNSGLATIMSDGPGGNKWMYVGRNKAGQVWRDITGNRSGTVTINADGWGNFSVNGGSVSIWVN

SEQ ID NO: 20408 - protein, 484 aa, Synthetic construct
HHNQTNGTMMQYFEWYLPNDGNHWHRLRSDASNLKDKGITAVWIPPAWKGASQNDVGYGAYDLYDLGEFNQKGTVRTKYGTRNQLQAAVTALKSNGIQVYGDVVMNHKGGADATEWVRAVEVNPSNRNQEVSGDYTIEAWTKFDFPGRGNTHSNFKWRWYHFDGVDWDQSRQLQNRIYKFRGDGKEWDWEVDTENGNYDYLMYADYDMDHPEVVNELRNWGVWYTNTLGLDGFRIDAVKHIKYSFTRDWLTHVRNTTGKNMFAVAEFWKNDIGAIRNYLSKTNWNHSVFDVPLHYNLYNASRSGGNYDMRQIFNGTVVQRHPTHAVTFVDNHDSQPEEALESFVEEWFKPLAYALTLTRDQGYPSVFYGDYYGIPTHGVPAMKSKIDPILEARQKYAYGKQNDYLDHHNMIGWTREGNTAHPNSGLATIMSDGPGGNKWMYVGRNKAGQVWRDITGNRSGTVTINADGWGNFSVNGGSVSIWVN

SEQ ID NO: 20409 - protein, 484 aa, Synthetic construct
HHNQTNGTMMQYFEWYLPNDGNHWNRLRSDASNLKDKGITAVWIPPAWKGASQNDVGYGAYDLYDLGEFNQKGTVRTKYGTRNQLQAAVTALKSNGIQVYGDVVMNHKGGADATEWVRAVEVNPSNRNQEVSGDYTIEAWTKFDFPGRGNTHSNFKWRWYHFDGVDWDQSRQLQNKIYKFRGDGKEWDWEVDTENGNYDYLMYADYDMDHPEVVNELRNWGVWYTNTLGLDGFRIDAVKHIKYSFTRDWLEHVRNTTGKNMFAVAEFWKNDIGAIENYLSKTNWNHSVFDVPLHYNLYNASRSGGNYDMRQIFNGTVVQRHPTHAVTFVDNHDSQPEEALESFVEEWFKPLAYALTLTRDQGYPSVFYGDYYGIPTHGVPAMKSKIDPILEARQKYAYGKQNDYMDHHNMIGWTREGNTAHPNSGLATIMSDGPGGNKWMYVGRNKAGQVWRDITGNRSGTVTINADGWGNFSVNGGSVSIWVN

SEQ ID NO: 20410 - protein, 484 aa, Synthetic construct
HHNQTNGTMMQYFEWYLPNDGNHWHRLRSDASNLKDKGITAVWIPPAWKGASQNDVGYGAYDLYDLGEFNQKGTVRTKYGTRNQLQAAVTALKSNGIQVYGDVVMNHKGGADATEWVRAVEVNPSNRNQEVSGDYTIEAWTKFDFPGRGNTHSNFKWRWYHFDGVDWDQSRQLQNKIYKFRGDGKEWDWEVDEENGNYDYLMYADIDMDHPEVVNELRNWGVWYTNTLGLDGFRIDAVKHIKYSFTRDWLEHVRNTTGKNMFAVAEFWKNDIGAIENYLSKTNWNHSVFDVPLHYNLYNASRSGGNYDMRQIFNGTVVQRHPTHAVTFVDNHDSQPEEALESFVEEWFKPLAYALTLTRDQGYPSVFYGDYYGIPTHGVPAMKSKIDPILEARQKYAYGKQNDYLDHHNMIGWTREGNTAHPNSGLATIMSDGPGGNKWMYVGRNKAGQVWRDITGNRSGTVTINADGWGNFSVNGGSVSIWVN

SEQ ID NO: 20411 - protein, 484 aa, Synthetic construct
HHNQTNGTMMQYFEWYLPNDGNHWHRLRSDASNLKDKGITAVWIPPAWKGASQNDVGYGAYDLYDLGEFNQKGTVRTKYGTRNQLQAAVTALKSNGIQVYGDVVMNHKGGADATEWVRAVEVNPSNRNQEVSGDYTIEAWTKFDFPGRGNTHSNFKWRWYHFDGVDWDQSRQLQNRIYKFRGDGKEWDWEVDTENGNYDYLMYADYDMDHPEVVNELRNWGVWYTNTLGLDGFRIDAVKHIKYSFTRDWLTHVRNTTGKNMFAVAEFWKNDIGAIENYLSKTNWNHSVFDVPLHYNLYNASRSGGNYDMRQIFNGTVVQRHPGHAVTFVDNHDSQPEEALESFVEEWFKPLAYALTLTRDQGYPSVFYGDYYGIPTHGVPAMKSKIDPILEARQKYAYGKQNDYMDHHNMIGWTREGNTAHPNSGLATIMSDGPGGNKWMYVGRNKAGQVWRDITGNRSGTVTINADGWGNFSVNGGSVSIWVN

SEQ ID NO: 20412 - protein, 484 aa, Synthetic construct
HHNGTNGTMMQYFEWYLPNDGNHWNRLRSDASNLKDKGITAVWIPPAWKGASQNDVGYGAYDLYDLGEFNQKGTVRTKYGTRNQLQAAVTALKSNGIQVYGDVVMNHKGGADATEWVRAVEVNPSNRNQEVSGDYTIEAWTKFDFPGRGNTHSNFKWRWYHFDGVDWDQSRQLQNRIYKFRGDGKEWDWEVDTENGNYDYLMYADIDMDHPEVVNELRNWGVWYTDTLGLDGFRIDAVKHIKYSFTRDWLTHVRNTTGKNMFAVAEFWKNDIGAIENYLSKTNWNHSVFDVPLHYNLYNASRSGGNYDMRQIFEGTVVQRHPTHAVTFVDNHDSQPEEALESFVEEWFKPLAYALTLTRDQGYPSVFYGDYYGIPTHGVPAMKSKIDPILEARQKYAYGKQNDYLDHHNMIGWTREGNTAHPNSGLATIMSDGPGGNKWMYVGRNKAGQVWRDITGNRSGEVTINADGWGEFSVNGGSVSIWVN

SEQ ID NO: 20413 - protein, 484 aa, Synthetic construct
HHNGTNGTMMQYFEWYLPNDGNHWNRLRSDASNLKDKGITAVWIPPAWKGASQNDVGYGAYDLYDLGEFNQKGTVRTKYGTRNQLQAAVTALKSNGIQVYGDVVMNHKGGADATEWVRAVEVNPSNRNQEVSGDYTIEAWTKFDFPGRGNTHSNFKWRWYHFDGVDWDQSRQLQNKIYKFRGDGKEWDWEVDEENGNYDYLMYADYDMDHPEVVNELRNWGVWYTNTLGLDGFRIDAVKHIKYSFTRDWLTHVRNTTGKNMFAVAEFWKNDIGAIENYLSKTNWNHSVFDVPLHYNLYNASRSGGNYDMRQIFNGTVVQRHPTHAVTFVDNHDSQPEEALESFVEEWFKPLAYALTLTRDQGYPSVFYGDYYGIPTHGVPAMKSKIDPILEARQKYAYGKQNDYMDHHNMIGWTREGNTAHPNSGLATIMSDGPGGNKWMYVGRNKAGQVWRDITGNRSGTVTINADGWGNFSVNGGSVSIWVN

SEQ ID NO: 20414 - protein, 484 aa, Synthetic construct
HHNQTNGTMMQYFEWYLPNDGNHWHRLRSDASNLKDKGITAVWIPPAWKGASQNDVGYGAYDLYDLGEFNQKGTVRTKYGTRNQLQAAVTALKSNGIQVYGDVVMNHKGGADATEWVRAVEVNPSNRNQEVSGDYTIEAWTKFDFPGRGNTHSNFKWRWWHFDGVDWDQSRQLQNKIYKFRGDGKGWDWEVDTENGNYDYLMYADYDMDHPEVVNELRNWGVWYTNTLGLDGFRIDAVKHIKYSFTRDWLEHVRNTTGKNMFAVAEFWKNDIGAIENYLSKTNWNHSVFDVPLHYNLYNASRSGGNYDMRQIFNGTVVQRHPTHAVTFVDNHDSQPEEALESFVEEWFKPLAYALTLTRDQGYPSVFYGDYYGIPTHGVPAMKSKIDPILEARQKYAYGKQNDYLDHHNMIGWTREGNTAHPNSGLATIMSDGPGGNKWMYVGRNKAGQVWRDITGNRSGTVTINADGWGNFSVNGGSVSIWVN

SEQ ID NO: 20415 - protein, 484 aa, Synthetic construct
HHNGTNGTMMQYFEWYLPNDGNHWHRLRSDASNLKDKGITAVWIPPAWKGASQNDVGYGAYDLYDLGEFNQKGTVRTKYGTRNQLQAAVTALKSNGIQVYGDVVMNHKGGADATEWVRAVEVNPSNRNQEVSGDTTIEAWTKFDFPGRGNTHSNFKWRWYHFDGVDWDQSRQLQNKIYKFRGDGKEWDWEVDTENGNYDYLMYADYDMDHPEVVNELRNWGVWYTNTLGLDGFRIDAVKHIKYSFTRDWLTHVRNTTGKNMFAVAEFWKNDIGAIENYLSKTNWNHSVFDVPLHYNLYNASRSGGNYDMRQIFNGTVVQRHPTHAVTFVDNHDSQPEEALESFVEEWFKPLAYALTLTRDQGYPSVFYGDYYGIPTHGVPAMKSKIDPILEARQKYAYGKQNDYLDHHNMIGWTREGNTAHPNSGLATIMSDGPGGNKWMYVGRNKAGQVWRDITGNRSGTVTINADGWGNFSVNGGSVSIWVN

SEQ ID NO: 20416 - protein, 484 aa, Synthetic construct
HHNGTNGTMMQYFEWYLPNDGNHWNRLRSDASNLKDKGITAVWIPPAWKGASQNDVGYGAYDLYDLGEFNQKGTVRTKYGTRNQLQDAVTALKSNGIQVYGDVVMNHKGGADATEWVRAVEVNPSNRNQEVSGDYTIEAWTKFDFPGRGNTHSNFKWRWYHFDGVDWDQSRQLQNRIYKFRGDGKEWDWEVDTENGNYDYLMYADIDMDHPEVVNELRNWGVWYTDTLGLDGFRIDAVKHIKYSFTRDWLTHVRNTTGKNMFAVAEFWKNDIGAIENYLSKTNWNHSVFDVPLHYNLYNASRSGGNYDMRQIFNGTVVQRHPTHAVTFVDNHDSQPEEALESFVEEWFKPLAYALTLTRDQGYPSVFYGDYYGIPTHGVPAMKSKIDPILEARQKYAYGKQNDYLDHHNMIGWTREGNTEHPNSGLATIMSDGPGGNKWMYVGRNKAGQVWRDITGNRSGEVTINADGWGNFSVNGGSVSIWVN

SEQ ID NO: 20417 - protein, 484 aa, Synthetic construct
HHNGTNWTMMQYFEWYLPNDGNHWHRLRSDASNLKDKGITAVWIPPAWKGASQNDVGYGAYDLYDLGEFNQKGTVRTKYGTRNQLQAAVTALKSNGIQVYGDVVMNHKGGADATEWVRAVEVNPSNRNQEVSGDYTIEAWTKFDFPGRGNTHSNFKWRWYHFDGVDWDQSRQLQNKIYKFRGDGKEWDWEVDTENGNYDYLMYADYDMDHPEVVNELRNWGVWYTNTLGLDGFRIDAVKHIKYSFTRDWLTHVRNTTGKNMFAVAEFWKNDIGAIENYLSKTNWNHSVFDVPLHYNLYNASRSGGNYDMRQIFNGTVVQRHPTHAVTFVDNHDSQPEEALESFVEEWFKPLAYALTLTRDQGYPSVFYGDYYGIPTHGVPAMKSKIDPILEARQKYAYGKQNDYLDHHNMIGWTREGNTAHPNSGLATIMSDGPGGNKWMYVGRNKAGQVWRDITGNRSGTVTINADGWGNFSVNGGSVSIWVN

SEQ ID NO: 20418 - protein, 484 aa, Synthetic construct
HHNGTNGTMMQYFEWYLPNDGNHWNRLRSDASNLKDKGITAVWIPPAWKGASQNDVGYGAYDLYDLGEFNQKGTVRTKYGTRNQLQAAVTALKSNGIQVYGDVVMNHKGGADATEWVRAVEVNPSNRNQEVSGDYTIEAWTKFDFPGRGNTHSNFKWRWDHFDGVDWDQSRQLQNRIYKFRGDGKEWDWEVDTENGNYDYLMYADIDMDHPEVVNELRNWGVWYTDTLGLDGFRIDAVKHIKYSFTRDWLTHVRNTTGKNMFAVAEFWKNDIGAIENYLSKTNWNHSVFDVPLHYNLYNASRSGGNYDMRQIFKGTVVQRHPTHAVTFVDNHDSQPEEALESFVEEWFKPLAYALTLTRDQGYPSVFYGDYYGIPTHGVPAMKSKIDPILEARQKYAYGKQNDYLDHHNMIGWTREGNTEHPNSGLATIMSDGPGGNKWMYVGRNKAGQVWRDITGNRSGTVTINADGWGNFSVNGGSVSIWVN

SEQ ID NO: 20419 - protein, 484 aa, Synthetic construct
HHNQTNGTMMQYFEWYLPNDGNHWNRLRSDASNLKDKGITAVWIPPAWKGASQNDVGYGAYDLYDLGEFNQKGTVRTKYGTRNQLQAAVTALKSNGIQVYGDVVMNHKGGADATEWVRAVEVNPSNRNQEVSGDYTIEAWTKFDFPGRGNTHSNFKWRWWHFDGVDWDQSRQLQNKIYKFRGDGKGWDWEVDTENGNYDYLMYADYDMDHPEVVNELRNWGVWYTNTLGLDGFRIDAVKHIKYSFTRDWLEHVRNTTGKNMFAVAEFWKNDIGAIRNYLSKTNWNHSVFDVPLHYNLYNASRSGGNYDMRQIFNGTVVQRHPTHAVTFVDNHDSQPEEALESFVEEWFKPLAYALTLTRDQGYPSVFYGDYYGIPTHGVPAMKSKIDPILEARQKYAYGKQNDYLDHHNMIGWTREGNTAHPNSGLATIMSDGPGGNKWMYVGRNKAGQVWRDITGNRSGTVTINADGWGNFSVNGGSVSIWVN

SEQ ID NO: 20420 - protein, 484 aa, Synthetic construct
HHNGTNGTMMQYFEWYLPNDGNHWNRLRSDASNLKDKGITAVWIPPAWKGASQNDVGYGAYDLYDLGEFNQKGTVRTKYGTRNQLQAAVTALKSNGIQVYGDVVMNHKGGADATEWVRAVEVNPSNRNQEVSGDYTIEAWTKFDFPGRGNTHSNFKWRWWHFDGVDWDQSRQLQNKIYKFRGDGKGWDWEVDTENGNYDYLMYADYDMDHPEVVNELRNWGVWYTNTLGLDGFRIDAVKHIKYSFTRDWLTHVRNTTGKNMFAVAEFWKNDIGAIRNYLSKTNWNHSVFDVPLHYNLYNASRSGGNYDMRQIFNGTVVQRHPTHAVTFVDNHDSQPEEALESFVEEWFKPLAYALTLTRDQGYPSVFYGDYYGIPTHGVPAMKSKIDPILEARQKYAYGKQNDYMDHHNMIGWTREGNTAHPNSGLATIMSDGPGGNKWMYVGRNKAGQVWRDITGNRSGTVTINADGWGNFSVNGGSVSIWVN

SEQ ID NO: 20421 - protein, 484 aa, Synthetic construct
HHNGTNGTMMQYFEWYLPNDGNHWHRLRSDASNLKDKGITAVWIPPAWKGASQNDVGYGAYDLYDLGEFNQKGTVRTKYGTRNQLQAAVTALKSNGIQVYGDVVMNHKGGADATEWVRAVEVNPSNRNQEVSGDYTIEAWTKFDFPGRGNTHSNFKWRWYHFDGVDWDQSRQLQNKIYKFRGDGKEWDWEVDTENGNYDYLMYADYDMDHPEVVNELRNWGVWYTNTLGLDGFRIDAVKHIKYSFTRDWLTHVRNTTQKNMFAVAEFWKNDIGAIENYLSKTNWNHSVFDVPLHYNLYNASRSGGNYDMRQIFNGTVVQRHPTHAVTFVDNHDSQPEEALESFVEEWFKPLAYALTLTRDQGYPSVFYGDYYGIPTHGVPAMKSKIDPILEARQKYAYGKQNDYLDHHNMIGWTREGNTAHPNSGLATIMSDGPGGNKWMYVGRNKAGQVWRDITGNRSGTVTINADGWGNFSVNGGSVSIWVN

SEQ ID NO: 20422 - protein, 484 aa, Synthetic construct
HHNQTNGTMMQYFEWYLPNDGNHWHRLRSDASNLKDKGITAVWIPPAWKGASQNDVGYGAYDLYDLGEFNQKGTVRTKYGTRNQLQAAVTALKSNGIQVYGDVVMNHKGGADATEWVRAVEVNPSNRNQEVSGDYTIEAWTKFDFPGRGNTHSNFKWRWYHFDGVDWDQSRQLQNRIYKFRGDGKEWDWEVDTENGNYDYLMYADYDMDHPEVVNELRNWGVWYTNTLGLDGFRIDAVKHIKYSFTRDWLEHVRNTTGKNMFAVAEFWKNDIGAIENYLSKTNWNHSVFDVPLHYNLYNASRSGGNYDMRQIFNGTVVQRHPAHAVTFVDNHDSQPEEALESFVEEWFKPLAYALTLTRDQGYPSVFYGDYYGIPTHGVPAMKSKIDPILEARQKYAYGKQNDYMDHHNMIGWTREGNTAHPNSGLATIMSDGPGGNKWMYVGRNKAGQVWRDITGNRSGTVTINADGWGNFSVNGGSVSIWVN

SEQ ID NO: 20423 - protein, 484 aa, Synthetic construct
HHNGTNGTMMQYFEWYLPNDGNHWHRLRSDASNLKDKGITAVWIPPAWKGASQNDVGYGAYDLYDLGEFNQKGTVRTKYGTRNQLQAAVTALKSNGIQVYGDVVMNHKGGADATEWVRAVEVNPSNRNQEVSGDYTIEAWTKFDFPGRGNTHSNFKWRWYHFDGVDWDQSRQLQNRIYKFRGDGKEWDWEVDEENGNYDYLMYADYDMDHPEVVNELRNWGVWYTNTLGLDGFRIDAVKHIKYSFTRDWLTHVRNTTGKNMFAVAEFWKNDIGAIENYLSKTNWNHSVFDVPLHYNLYNASRSGGNYDMRQIFNGTVVQRHPTHAVTFVDNHDSQPEEALESFVEEWFKPLAYALTLTRDQGYPSVFYGDYYGIPTHGVPAMKSKIDPILEARQKYAYGKQNDYMDHHNMIGWTREGNTAHPNSGLATIMSDGPGGNKWMYVGRNKAGQVWRDITGNRSGTVTINADGWGNFSVNGGSVSIWVN

SEQ ID NO: 20424 - protein, 484 aa, Synthetic construct
HHNGTNGTMMQYFEWYLPNDGNHWHRLRSDASNLKDKGITAVWIPPAWKGASQNDVGYGAYDLYDLGEFNQKGTVRTKYGTRNQLQAAVTALKSNGIQVYGDVVMNHKGGADATEWVRAVEVNPSNRNQEVSGDYTIEAWTKFDFPGRGNTHSNFKWRWYHFDGVDWDQSRQLQNKIYKFRGDGKEWDWEVDTENGNYDYLMYADYDMDHPEVVNELRNWGVWYTNTLGLDGFRIDAVKHIKYSFTRDWLTHVRNTTGKNMFAVAEFWKNDIGAIRNYLSKTNWNHSVFDVPLHYNLYNASRSGGNYDMRQIFNGTVVQRHPTHAVTFVDNHDSQPEEALESFVEEWFKPLAYALTLTRDQGYPSVFYGDYYGIPTHGVPAMKSKIDPILEARQKYAYGKQNDYLDHHNMIGWTREGNTAHPNSGLATIMSDGPGGNKWMYVGRNKAGQVWRDITGNRSGTVTINADGWGNFSVNGGSVSIWVN

SEQ ID NO: 20425 - protein, 484 aa, Synthetic construct
HHNQTNGTMMQYFEWYLPNDGNHWHRLRSDASNLKDKGITAVWIPPAWKGASQNDVGYGAYDLYDLGEFNQKGTVRTKYGTRNQLQAAVTALKSNGIQVYGDVVMNHKGGADATEWVRAVEVNPSNRNQEVSGDYTIEAWTKFDFPGRGNTHSNFKWRWYHFDGVDWDQSRQLQNRIYKFRGDGKEWDWEVDTENGNYDYLMYADYDMDHPEVVNELRNWGVWYTNTLGLDGFRIDAVKHIKYSFTRDWLTHVRNTTGKNMFAVAEFWKNDIGAIENYLSKTNWNHSVFDVPLHYNLYNASRSGGNYDMRQIFNGTVVQRHPTHAVTFVDNHDSQPEEALESFVEEWFKPLAYALTLTRDQGYPSVFYGDYYGIPTHGVPAMKSKIDPILEARQKYAYGKQNDYMDHHNMIGWTREGNTAHPNSGLATIMSDGPGGNKWMYVGRNKAGQVWRDITGNRSGTVTINADGWGNFSVNGGSVSIWVN

SEQ ID NO: 20426 - protein, 484 aa, Synthetic construct
HHNQTNGTMMQYFEWYLPNDGNHWHRLRSDASNLKDKGITAVWIPPAWKGASQNDVGYGAYDLYDLGEFNQKGTVRTKYGTRNQLQAAVTALKSNGIQVYGDVVMNHKGGADATEWVRAVEVNPSNRNQEVSGDYTIEAWTKFDFPGRGNTHSNFKWRWWHFDGVDWDQSRQLQNKIYKFRGDGKGWDWEVDTENGNYDYLMYADYDMDHPEVVNELRNWGVWYTNTLGLDGFRIDAVKHIKYSFTRDWLTHVRNTTGKNMFAVAEFWKNDIGAIENYLSKTNWNHSVFDVPLHYNLYNASRSGGNYDMRQIFNGTVVQRHPTHAVTFVDNHDSQPEEALESFVEEWFKPLAYALTLTRDQGYPSVFYGDYYGIPTHGVPAMKSKIDPILEARQKYAYGKQNDYLDHHNMIGWTREGNTAHPNSGLATIMSDGPGGNKWMYVGRNKAGQVWRDITGNRSGTVTINADGWGNFSVNGGSVSIWVN

SEQ ID NO: 20427 - protein, 484 aa, Synthetic construct
HHNGTNGTMMQYFEWYLPNDGNHWHRLRSDASNLKDKGITAVWIPPAWKGASQNDVGYGAYDLYDLGEFNQKGTVRTKYGTRNQLQAAVTALKSNGIQVYGDVVMNHKGGADATEWVRAVEVNPSNRNQEVSGDYTIEAWTKFDFPGRGNTHSNFKWRWYHFDGVDWDQSRQLQNKIYKFRGDGKEWDWEVDTENGNYDYLMYADIDMDHPEVVNELRNWGVWYTNTLGLDGFRIDAVKHIKYSFTRDWLTHVRNTTGKNMFAVAEFWKNDIGAIRNYLSKTNWNHSVFDVPLHYNLYNASRSGGNYDMRQIFNGTVVQRHPGHAVTFVDNHDSQPEEALESFVEEWFKPLAYALTLTRDQGYPSVFYGDYYGIPTHGVPAMKSKIDPILEARQKYAYGKQNDYMDHHNMIGWTREGNTAHPNSGLATIMSDGPGGNKWMYVGRNKAGQVWRDITGNRSGTVTINADGWGNFSVNGGSVSIWVN

SEQ ID NO: 20428 - protein, 484 aa, Synthetic construct
HHNGTNGTMMQYFEWYLPNDGNHWHRLRSDASNLKDKGITAVWIPPAWKGASQNDVGYGAYDLYDLGEFNQKGTVRTKYGTRNQLQAAVTALKSNGIQVYGDVVMNHKGGADATEWVRAVEVNPSNRNQEVSGDYTIEAWTKFDFPGRGNTHSNFKWRWYHFDGVDWDQSRQLQNKIYKFRGDGKEWDWEVDTENGNYDYLMYADYDMDHPEVVNELRNWGVWYTNTLGLDGFRIDAVKHIKYSFTRDWLTHVRNTTGKNMFAVAEFWKNDIGAIENYLSNTNWNHSVFDVPLHYNLYNASRSGGNYDMRQIFNGTVVQRHPTHAVTFVDNHDSQPEEALESFVEEWFKPLAYALTLTRDQGYPSVFYGDYYGIPTHGVPAMKSKIDPILEARQKYAYGKQNDYLDHHNMIGWTREGNTAHPNSGLATIMSDGPGGNKWMYVGRNKAGQVWRDITGNRSGTVTINADGWGNFSVNGGSVSIWVN

SEQ ID NO: 20429 - protein, 484 aa, Synthetic construct
HHNQTNGTMMQYFEWYLPNDGNHWHRLRSDASNLKDKGITAVWIPPAWKGASQNDVGYGAYDLYDLGEFNQKGTVRTKYGTRNQLQAAVTALKSNGIQVYGDVVMNHKGGADATEWVRAVEVNPSNRNQEVSGDYTIEAWTKFDFPGRGNTHSNFKWRWWHFDGVDWDQSRQLQNRIYKFRGDGKEWDWEVDTENGNYDYLMYADIDMDHPEVVNELRNWGVWYTNTLGLDGFRIDAVKHIKYSFTRDWLTHVRNTTGKNMFAVAEFWKNDIGAIENYLSKTNWNHSVFDVPLHYNLYNASRSGGNYDMRQIFNGTVVQRHPTHAVTFVDNHDSQPEEALESFVEEWFKPLAYALTLTRDQGYPSVFYGDYYGIPTHGVPAMKSKIDPILEARQKYAYGKQNDYMDHHNMIGWTREGNTAHPNSGLATIMSDGPGGNKWMYVGRNKAGQVWRDITGNRSGTVTINADGWGNFSVNGGSVSIWVN

SEQ ID NO: 20430 - protein, 484 aa, Synthetic construct
HHNQTNGTMMQYFEWYLPNDGNHWNRLRSDASNLKDKGITAVWIPPAWKGASQNDVGYGAYDLYDLGEFNQKGTVRTKYGTRNQLQAAVTALKSNGIQVYGDVVMNHKGGADATEWVRAVEVNPSNRNQEVSGDYTIEAWTKFDFPGRGNTHSNFKWRWYHFDGVDWDQSRQLQNKIYKFRGDGKEWDWEVDTENGNYDYLMYADIDMDHPEVVNELRNWGVWYTNTLGLDGFRIDAVKHIKYSFTRDWLTHVRNTTGKNMFAVAEFWKNDIGAIRNYLSKTNWNHSVFDVPLHYNLYNASRSGGNYDMRQIFNGTVVQRHPTHAVTFVDNHDSQPEEALESFVEEWFKPLAYALTLTRDQGYPSVFYGDYYGIPTHGVPAMKSKIDPILEARQKYAYGKQNDYMDHHNMIGWTREGNTAHPNSGLATIMSDGPGGNKWMYVGRNKAGQVWRDITGNRSGTVTINADGWGNFSVNGGSVSIWVN

SEQ ID NO: 20431 - protein, 484 aa, Synthetic construct
HHNQTNGTMMQYFEWYLPNDGNHWNRLRSDASNLKDKGITAVWIPPAWKGASQNDVGYGAYDLYDLGEFNQKGTVRTKYGTRNQLQAAVTALKSNGIQVYGDVVMNHKGGADATEWVRAVEVNPSNRNQEVSGDYTIEAWTKFDFPGRGNTHSNFKWRWWHFDGVDWDQSRQLQNKIYKFRGDGKEWDWEVDTENGNYDYLMYADYDMDHPEVVNELRNWGVWYTNTLGLDGFRIDAVKHIKYSFTRDWLEHVRNTTGKNMFAVAEFWKNDIGAIENYLSKTNWNHSVFDVPLHYNLYNASRSGGNYDMRQIFNGTVVQRHPTHAVTFVDNHDSQPEEALESFVEEWFKPLAYALTLTRDQGYPSVFYGDYYGIPTHGVPAMKSKIDPILEARQKYAYGKQNDYLDHHNMIGWTREGNTAHPNSGLATIMSDGPGGNKWMYVGRNKAGQVWRDITGNRSGTVTINADGWGNFSVNGGSVSIWVN

SEQ ID NO: 20432 - protein, 484 aa, Synthetic construct
HHNGTNGTMMQYFEWYLPNDGNHWHRLRSDASNLKDKGITAVWIPPAWKGASQNDVGYGAYDLYDLGEFNQKGTVRTKYGTRNQLQAAVTALKSNGIQVYGDVVMNHKGGADATEWVRAVEVNPSNRNQEVSGDYTIEAWTKFDFPGRGNTHSNFKWRWYHFDGVDWDQSRQLQNKIYKFRGDGKGWDWEVDTENGNYDYLMYADYDMDHPEVVNELRNWGVWYTNTLGLDGFRIDAVKHIKYSFTRDWLTHVRNTTGKNMFAVAEFWKNDIGAIRNYLSKTNWNHSVFDVPLHYNLYNASRSGGNYDMRQIFNGTVVQRHPTHAVTFVDNHDSQPEEALESFVEEWFKPLAYALTLTRDQGYPSVFYGDYYGIPTHGVPAMKSKIDPILEARQKYAYGKQNDYMDHHNMIGWTREGNTAHPNSGLATIMSDGPGGNKWMYVGRNKAGQVWRDITGNRSGTVTINADGWGNFSVNGGSVSIWVN

SEQ ID NO: 20433 - protein, 484 aa, Synthetic construct
HHNGTNGTMMQYFEWYLPNDGNHWHRLRSDASNLKDKGITAVWIPPAWKGASQNDVGYGAYDLYDLGEFNQKGTVRTKYGTRNQLQAAVTALKSNGIQVYGDVVMNHKGGADATEWVRAVEVNPSNRNQEVSGDYTIEAWTKFDFPGRGNTHSNFKWRWWHFDGVDWDQSRQLQNRIYKFRGDGKEWDWEVDTENGNYDYLMYADIDMDHPEVVNELRNWGVWYTNTLGLDGFRIDAVKHIKYSFTRDWLEHVRNTTGKNMFAVAEFWKNDIGAIRNYLSKTNWNHSVFDVPLHYNLYNASRSGGNYDMRQIFNGTVVQRHPTHAVTFVDNHDSQPEEALESFVEEWFKPLAYALTLTRDQGYPSVFYGDYYGIPTHGVPAMKSKIDPILEARQKYAYGKQNDYMDHHNMIGWTREGNTAHPNSGLATIMSDGPGGNKWMYVGRNKAGQVWRDITGNRSGTVTINADGWGNFSVNGGSVSIWVN

SEQ ID NO: 20434 - protein, 484 aa, Synthetic construct
HHNQTNGTMMQYFEWYLPNDGNHWNRLRSDASNLKDKGITAVWIPPAWKGASQNDVGYGAYDLYDLGEFNQKGTVRTKYGTRNQLQAAVTALKSNGIQVYGDVVMNHKGGADATEWVRAVEVNPSNRNQEVSGDYTIEAWTKFDFPGRGNTHSNFKWRWWHFDGVDWDQSRQLQNRIYKFRGDGKEWDWEVDTENGNYDYLMYADIDMDHPEVVNELRNWGVWYTNTLGLDGFRIDAVKHIKYSFTRDWLTHVRNTTGKNMFAVAEFWKNDIGAIRNYLSKTNWNHSVFDVPLHYNLYNASRSGGNYDMRQIFNGTVVQRHPTHAVTFVDNHDSQPEEALESFVEEWFKPLAYALTLTRDQGYPSVFYGDYYGIPTHGVPAMKSKIDPILEARQKYAYGKQNDYMDHHNMIGWTREGNTAHPNSGLATIMSDGPGGNKWMYVGRNKAGQVWRDITGNRSGTVTINADGWGNFSVNGGSVSIWVN

SEQ ID NO: 20435 - protein, 484 aa, Synthetic construct
HHNQTNGTMMQYFEWYLPNDGNHWNRLRSDASNLKDKGITAVWIPPAWKGASQNDVGYGAYDLYDLGEFNQKGTVRTKYGTRNQLQAAVTALKSNGIQVYGDVVMNHKGGADATEWVRAVEVNPSNRNQEVSGDYTIEAWTKFDFPGRGNTHSNFKWRWYHFDGVDWDQSRQLQNKIYKFRGDGKEWDWEVDTENGNYDYLMYADYDMDHPEVVNELRNWGVWYTNTLGLDGFRIDAVKHIKYSFTRDWLTHVRNTTGKNMFAVAEFWKNDIGAIENYLSKTNWNHSVFDVPLHYNLYNASRSGGNYDMRQIFNGTVVQRHPTHAVTFVDNHDSQPEEALESFVEEWFKPLAYALTLTRDQGYPSVFYGDYYGIPTHGVPAMKSKIDPILEARQKYAYGKQNDYMDHHNMIGWTREGNTAHPNSGLATIMSDGPGGNKWMYVGRNKAGQVWRDITGNRSGTVTINADGWGNFSVNGGSVSIWVN

SEQ ID NO: 20436 - protein, 484 aa, Synthetic construct
HHNGTNGTMMQYFEWYLPNDGNHWHRLRSDASNLKDKGITAVWIPPAWKGASQNDVGYGAYDLYDLGEFNQKGTVRTKYGTRNQLQAAVTALKSNGIQVYGDVVMNHKGGADATEWVRAVEVNPSNRNQEVSGDETIEAWTKFDFPGRGNTHSNFKWRWYHFDGVDWDQSRQLQNKIYKFRGDGKEWDWEVDTENGNYDYLMYADYDMDHPEVVNELRNWGVWYTNTLGLDGFRIDAVKHIKYSFTRDWLTHVRNTTGKNMFAVAEFWKNDIGAIENYLSKTNWNHSVFDVPLHYNLYNASRSGGNYDMRQIFNGTVVQRHPTHAVTFVDNHDSQPEEALESFVEEWFKPLAYALTLTRDQGYPSVFYGDYYGIPTHGVPAMKSKIDPILEARQKYAYGKQNDYLDHHNMIGWTREGNTAHPNSGLATIMSDGPGGNKWMYVGRNKAGQVWRDITGNRSGTVTINADGWGNFSVNGGSVSIWVN

SEQ ID NO: 20437 - protein, 484 aa, Synthetic construct
HHNGTNGTMMQYFEWYLPNDGNHWHRLRSDASNLKDKGITAVWIPPAWKGASQNDVGYGAYDLYDLGEFNQKGTVRTKYGTRNQLQAAVTALKSNGIQVWGDVVMNHKGGADATEWVRAVEVNPSNRNQEVSGDYTIEAWTKFDFPGRGNTHSNFKWRWYHFDGVDWDQSRQLQNKIYKFRGDGKEWDWEVDTENGNYDYLMYADYDMDHPEVVNELRNWGVWYTNTLGLDGFRIDAVKHIKYSFTRDWLTHVRNTTGKNMFAVAEFWKNDIGAIENYLSKTNWNHSVFDVPLHYNLYNASRSGGNYDMRQIFNGTVVQRHPTHAVTFVDNHDSQPEEALESFVEEWFKPLAYALTLTRDQGYPSVFYGDYYGIPTHGVPAMKSKIDPILEARQKYAYGKQNDYLDHHNMIGWTREGNTAHPNSGLATIMSDGPGGNKWMYVGRNKAGQVWRDITGNRSGTVTINADGWGNFSVNGGSVSIWVN

SEQ ID NO: 20438 - protein, 484 aa, Synthetic construct
HHNGTNGTMMQYFEWYLPNDGNHWNRLRSDASNLKDKGITAVWIPPAWKGASQNDVGYGAYDLYDLGEFNQKGTVRTKYGTRNQLQDAVTALKSNGIQVYGDVVMNHKGGADATEWVRAVEVNPSNRNQEVSGDYTIEAWTKFDFPGRGNTHSNFKWRWYHFDGVDWDQSRQLQNRIYKFRGDGKEWDWEVDTENGNYDYLMYADIDMDHPEVVNELRNWGVWYTNTLGLDGFRIDAVKHIKYSFTRDWLTHVRNTTGKNMFAVAEFWKNDIGAIENYLSKTNWNHSVFDVPLHYNLYNASRSGGNYDMRKIFEGTVVQRHPTHAVTFVDNHDSQPEEALESFVEEWFKPLAYALTLTRDQGYPSVFYGDYYGIPTHGVPAMKSKIDPILEARQKYAYGKQNDYLDHHNMIGWTREGNTKHPNSGLATIMSDGPGGNKWMYVGRNKAGQVWRDITGNRSGTVTINADGWGNFSVNGGSVSIWVN

SEQ ID NO: 20439 - protein, 484 aa, Synthetic construct
HHNGTNGTMMQYFEWYLPNDGNHWHRLRSDASNLKDKGITAVWIPPAWKGASQNDVGYGAYDLYDLGEFNQKGTVRTKYGTRNQLQAAVTALKSNGIQVYGDVVMNHKGGADATEWVRAVEVNPSNRNQEVSGDYTIEAWTKFDFPGRGNTHSNFKWRWWHFDGVDWDQSRQLQNRIYKFRGDGKEWDWEVDTENGNYDYLMYADYDMDHPEVVNELRNWGVWYTNTLGLDGFRIDAVKHIKYSFTRDWLEHVRNTTGKNMFAVAEFWKNDIGAIENYLSKTNWNHSVFDVPLHYNLYNASRSGGNYDMRQIFNGTVVQRHPTHAVTFVDNHDSQPEEALESFVEEWFKPLAYALTLTRDQGYPSVFYGDYYGIPTHGVPAMKSKIDPILEARQKYAYGKQNDYMDHHNMIGWTREGNTAHPNSGLATIMSDGPGGNKWMYVGRNKAGQVWRDITGNRSGTVTINADGWGNFSVNGGSVSIWVN

SEQ ID NO: 20440 - protein, 484 aa, Synthetic construct
HHNQTNGTMMQYFEWYLPNDGNHWNRLRSDASNLKDKGITAVWIPPAWKGASQNDVGYGAYDLYDLGEFNQKGTVRTKYGTRNQLQAAVTALKSNGIQVYGDVVMNHKGGADATEWVRAVEVNPSNRNQEVSGDYTIEAWTKFDFPGRGNTHSNFKWRWWHFDGVDWDQSRQLQNRIYKFRGDGKEWDWEVDTENGNYDYLMYADYDMDHPEVVNELRNWGVWYTNTLGLDGFRIDAVKHIKYSFTRDWLTHVRNTTGKNMFAVAEFWKNDIGAIENYLSKTNWNHSVFDVPLHYNLYNASRSGGNYDMRQIFNGTVVQRHPTHAVTFVDNHDSQPEEALESFVEEWFKPLAYALTLTRDQGYPSVFYGDYYGIPTHGVPAMKSKIDPILEARQKYAYGKQNDYMDHHNMIGWTREGNTAHPNSGLATIMSDGPGGNKWMYVGRNKAGQVWRDITGNRSGTVTINADGWGNFSVNGGSVSIWVN

SEQ ID NO: 20441 - protein, 484 aa, Synthetic construct
HHNGTNGTMMQYFEWYLPNDGNHWHRLRSDASNLKDKGITAVWIPPAWKGASQNDVGYGAYDLYDLGEFNQKGTVRTKYGTRNQLQAAVTALKSNGIQVYGDVVMNHKGGADATEWVRAVEVNPSNRNQEVSGDYEIEAWTKFDFPGRGNTHSNFKWRWYHFDGVDWDQSRQLQNKIYKFRGDGKEWDWEVDTENGNYDYLMYADYDMDHPEVVNELRNWGVWYTNTLGLDGFRIDAVKHIKYSFTRDWLTHVRNTTGKNMFAVAEFWKNDIGAIENYLSKTNWNHSVFDVPLHYNLYNASRSGGNYDMRQIFNGTVVQRHPTHAVTFVDNHDSQPEEALESFVEEWFKPLAYALTLTRDQGYPSVFYGDYYGIPTHGVPAMKSKIDPILEARQKYAYGKQNDYLDHHNMIGWTREGNTAHPNSGLATIMSDGPGGNKWMYVGRNKAGQVWRDITGNRSGTVTINADGWGNFSVNGGSVSIWVN

SEQ ID NO: 20442 - protein, 484 aa, Synthetic construct
HHNGTNGTMMQYFEWYLPNDGNHWHRLRSDASNLKDKGITAVWIPPAWKGASQNDVGYGAYDLYDLGEFNQKGTVRTKYGTRNQLQAAVTALKSNGIQVYGDVVMNHKGGADATEWVRAVEVNPSNRNQEVSGDYTIEAWTKFDFPGRGNTHSNFKWRWDHFDGVDWDQSRQLQNKIYKFRGDGKEWDWEVDTENGNYDYLMYADYDMDHPEVVNELRNWGVWYTNTLGLDGFRIDAVKHIKYSFTRDWLTHVRNTTGKNMFAVAEFWKNDIGAIENYLSKTNWNHSVFDVPLHYNLYNASRSGGNYDMRQIFNGTVVQRHPTHAVTFVDNHDSQPEEALESFVEEWFKPLAYALTLTRDQGYPSVFYGDYYGIPTHGVPAMKSKIDPILEARQKYAYGKQNDYLDHHNMIGWTREGNTAHPNSGLATIMSDGPGGNKWMYVGRNKAGQVWRDITGNRSGTVTINADGWGNFSVNGGSVSIWVN

SEQ ID NO: 20443 - protein, 484 aa, Synthetic construct
HHNGTNGTMMQYFEWYLPNDGNHWNRLRSDASNLKDKGITAVWIPPAWKGASQNDVGYGAYDLYDLGEFNQKGTVRTKYGTRNQLQAAVTALKSNGIQVYGDVVMNHKGGADATEWVRAVEVNPSNRNQEVSGDYTIEAWTKFDFPGRGNTHSNFKWRWWHFDGVDWDQSRQLQNKIYKFRGDGKEWDWEVDTENGNYDYLMYADIDMDHPEVVNELRNWGVWYTNTLGLDGFRIDAVKHIKYSFTRDWLTHVRNTTGKNMFAVAEFWKNDIGAIRNYLSKTNWNHSVFDVPLHYNLYNASRSGGNYDMRQIFNGTVVQRHPTHAVTFVDNHDSQPEEALESFVEEWFKPLAYALTLTRDQGYPSVFYGDYYGIPTHGVPAMKSKIDPILEARQKYAYGKQNDYMDHHNMIGWTREGNTAHPNSGLATIMSDGPGGNKWMYVGRNKAGQVWRDITGNRSGTVTINADGWGNFSVNGGSVSIWVN

SEQ ID NO: 20444 - protein, 484 aa, Synthetic construct
HHNGTNGTMMQYFEWYLPNDGNHWHRLRSDASNLKDKGITAVWIPPAWKGASQNDVGYGAYDLYDLGEFNQKGTVRTKYGTRNQLQAAVTALKSNGIQVYGDVVMNHKGGADATEWVRAVEVNPSNRNQEVSGDYTIEAWTKFDFPGRGNTHSNFKWRWYHFDGVDWDQSRQLQNKIYKFNGDGKEWDWEVDTENGNYDYLMYADYDMDHPEVVNELRNWGVWYTNTLGLDGFRIDAVKHIKYSFTRDWLTHVRNTTGKNMFAVAEFWKNDIGAIENYLSKTNWNHSVFDVPLHYNLYNASRSGGNYDMRQIFNGTVVQRHPTHAVTFVDNHDSQPEEALESFVEEWFKPLAYALTLTRDQGYPSVFYGDYYGIPTHGVPAMKSKIDPILEARQKYAYGKQNDYLDHHNMIGWTREGNTAHPNSGLATIMSDGPGGNKWMYVGRNKAGQVWRDITGNRSGTVTINADGWGNFSVNGGSVSIWVN

SEQ ID NO: 20445 - protein, 484 aa, Synthetic construct
HHNGTNGTMMQYFEWYLPNDGNHWHRLRSDASNLKDKGITAVWIPPAWKGASQNDVGYGAYDLYDLGEFNQKGTVRTKYGTRNQLQAAVTALKSNGIQVYGDVVMNHKGGADATEWVRAVEVNPSNRNQEVSGDYTIEAWTKFDFPGRGNTHSNFKWRWWHFDGVDWDQSRQLQNKIYKFRGDGKGWDWEVDTENGNYDYLMYADYDMDHPEVVNELRNWGVWYTNTLGLDGFRIDAVKHIKYSFTRDWLEHVRNTTGKNMFAVAEFWKNDIGAIENYLSKTNWNHSVFDVPLHYNLYNASRSGGNYDMRQIFNGTVVQRHPGHAVTFVDNHDSQPEEALESFVEEWFKPLAYALTLTRDQGYPSVFYGDYYGIPTHGVPAMKSKIDPILEARQKYAYGKQNDYMDHHNMIGWTREGNTAHPNSGLATIMSDGPGGNKWMYVGRNKAGQVWRDITGNRSGTVTINADGWGNFSVNGGSVSIWVN

SEQ ID NO: 20446 - protein, 484 aa, Synthetic construct
HHNGTNGTMMQYFEWYLPNDGNHWNRLRSDASNLKDKGITAVWIPPAWKGASQNDVGYGAYDLYDLGEFNQKGTVRTKYGTRNQLQRAVTALKSNGIQVYGDVVMNHKGGADATEWVRAVEVNPSNRNQEVSGDYTIEAWTKFDFPGRGNTHSNFKWRWYHFDGVDWDQSRQLQNRIYKFRGDGKEWDWEVDTENGNYDYLMYADIDMDHPEVVNELRNWGVWYTRTLGLDGFRIDAVKHIKYSFTRDWLTHVRNTTGKNMFAVAEFWKNDIGAIENYLSKTNWNHSVFDVPLHYNLYNASRSGGNYDMRKIFNGTVVQRHPTHAVTFVDNHDSQPEEALESFVEEWFKPLAYALTLTRDQGYPSVFYGDYYGIPTHGVPAMKSKIDPILEARQKYAYGKQNDYLDHHNMIGWTREGNTKHPNSGLATIMSDGPGGNKWMYVGRNKAGQVWRDITGNRSGTVTINADGWGNFSVNGGSVSIWVN

SEQ ID NO: 20447 - protein, 484 aa, Synthetic construct
HHNQTNGTMMQYFEWYLPNDGNHWNRLRSDASNLKDKGITAVWIPPAWKGASQNDVGYGAYDLYDLGEFNQKGTVRTKYGTRNQLQAAVTALKSNGIQVYGDVVMNHKGGADATEWVRAVEVNPSNRNQEVSGDYTIEAWTKFDFPGRGNTHSNFKWRWYHFDGVDWDQSRQLQNRIYKFRGDGKEWDWEVDEENGNYDYLMYADYDMDHPEVVNELRNWGVWYTNTLGLDGFRIDAVKHIKYSFTRDWLTHVRNTTGKNMFAVAEFWKNDIGAIENYLSKTNWNHSVFDVPLHYNLYNASRSGGNYDMRQIFNGTVVQRHPTHAVTFVDNHDSQPEEALESFVEEWFKPLAYALTLTRDQGYPSVFYGDYYGIPTHGVPAMKSKIDPILEARQKYAYGKQNDYMDHHNMIGWTREGNTAHPNSGLATIMSDGPGGNKWMYVGRNKAGQVWRDITGNRSGTVTINADGWGNFSVNGGSVSIWVN

SEQ ID NO: 20448 - protein, 484 aa, Synthetic construct
HHNQTNGTMMQYFEWYLPNDGNHWHRLRSDASNLKDKGITAVWIPPAWKGASQNDVGYGAYDLYDLGEFNQKGTVRTKYGTRNQLQAAVTALKSNGIQVYGDVVMNHKGGADATEWVRAVEVNPSNRNQEVSGDYTIEAWTKFDFPGRGNTHSNFKWRWYHFDGVDWDQSRQLQNKIYKFRGDGKEWDWEVDTENGNYDYLMYADIDMDHPEVVNELRNWGVWYTNTLGLDGFRIDAVKHIKYSFTRDWLEHVRNTTGKNMFAVAEFWKNDIGAIENYLSKTNWNHSVFDVPLHYNLYNASRSGGNYDMRQIFNGTVVQRHPTHAVTFVDNHDSQPEEALESFVEEWFKPLAYALTLTRDQGYPSVFYGDYYGIPTHGVPAMKSKIDPILEARQKYAYGKQNDYMDHHNMIGWTREGNTAHPNSGLATIMSDGPGGNKWMYVGRNKAGQVWRDITGNRSGTVTINADGWGNFSVNGGSVSIWVN

SEQ ID NO: 20449 - protein, 484 aa, Synthetic construct
HHNGTNGTMMQYFEWYLPNDGNHWHRLRSDASNLKDKGITAVWIPPAWKGASQNDVGYGAYDLYDLGEFNQKGTVRTKYGTRNQLQAAVTALKSNGIQVYGDVVMNHKGGADATEWVRAVEVNPSNRNQEVSGDYTIEAWTKFDFPGRGNTHSNFKWRWYHFDGVDWDQSRQLQNKIYKFRGDGKEWDWEVDTENGNYDYLMYADYDMDHPEVVNELRNWGVWYTNTLGLDGFRIDAVKHIKYSFTRDWLTHVRNTTGKNMFAVAEFWKNDIGAIENYLSKTNWNHSVFDVPLHYNLYNASRSGGNYDMRQIFNGTVVQRHPTHAVTFVDNHDSQPEEALESFVEEWFKPLAYALTLTRDQGNPSVFYGDYYGIPTHGVPAMKSKIDPILEARQKYAYGKQNDYLDHHNMIGWTREGNTAHPNSGLATIMSDGPGGNKWMYVGRNKAGQVWRDITGNRSGTVTINADGWGNFSVNGGSVSIWVN

SEQ ID NO: 20450 - protein, 484 aa, Synthetic construct
HHNGTNGTMMQYFEWYLPNDGNHWHRLRSDASNLKDKGITAVWIPPAWKGASQNDVGYGAYDLYDLGEFNQKGTVRTKYGTRNQLQAAVTALKSNGIQVYGDVVMNHKGGADATEWVRAVEVNPSNRNQEVSGDYTIEAWTKFDFPGRGNTHSNFKWRWYHFDGVDWDQSRQLQNKIYKFRGDGKEWDWEVDTENGNYDYLMYADYDMDHPEVVNELRNWGVWYTNTLGLDGFRIDAVKHIKYSFTRDWLTHVRNTTGKNMFAVAEFWKNDIGAIENYLSKTNWNHSVFDVPLHYNLYNASRSGGNYDMRQIFNGTVVQRHPTHAVTFVDNHDSQPEEALESFVEEWFKPLAYALTLTRDQGHPSVFYGDYYGIPTHGVPAMKSKIDPILEARQKYAYGKQNDYLDHHNMIGWTREGNTAHPNSGLATIMSDGPGGNKWMYVGRNKAGQVWRDITGNRSGTVTINADGWGNFSVNGGSVSIWVN

SEQ ID NO: 20451 - protein, 484 aa, Synthetic construct
HHNGTNGTMMQYFEWYLPNDGNHWHRLRSDASNLKDKGITAVWIPPAWKGASQNDVGYGAYDLYDLGEFNQKGTVRTKYGTRNQLQAAVTALKSNGIQVYGDVVMNHKGGADATEWVRAVEVNPSNRNQEVSGDYTIEAWTKFDFPGRGNTHSNFKWRWWHFDGVDWDQSRQLQNRIYKFRGDGKEWDWEVDTENGNYDYLMYADYDMDHPEVVNELRNWGVWYTNTLGLDGFRIDAVKHIKYSFTRDWLEHVRNTTGKNMFAVAEFWKNDIGAIRNYLSKTNWNHSVFDVPLHYNLYNASRSGGNYDMRQIFNGTVVQRHPTHAVTFVDNHDSQPEEALESFVEEWFKPLAYALTLTRDQGYPSVFYGDYYGIPTHGVPAMKSKIDPILEARQKYAYGKQNDYLDHHNMIGWTREGNTAHPNSGLATIMSDGPGGNKWMYVGRNKAGQVWRDITGNRSGTVTINADGWGNFSVNGGSVSIWVN

SEQ ID NO: 20452 - protein, 484 aa, Synthetic construct
HHNGTNGTMMQYFEWYLPNDGNHWHRLRSDASNLKDKGITAVWIPPAWKGASQNDVGYGAYDLYDLGEFNQKGTVRTKYGTRNQLQAAVTALKSNGIQVYGDVVMNHKGGADATEWVRAVEVNPSNRNQEVSGDWTIEAWTKFDFPGRGNTHSNFKWRWYHFDGVDWDQSRQLQNKIYKFRGDGKEWDWEVDTENGNYDYLMYADYDMDHPEVVNELRNWGVWYTNTLGLDGFRIDAVKHIKYSFTRDWLTHVRNTTGKNMFAVAEFWKNDIGAIENYLSKTNWNHSVFDVPLHYNLYNASRSGGNYDMRQIFNGTVVQRHPTHAVTFVDNHDSQPEEALESFVEEWFKPLAYALTLTRDQGYPSVFYGDYYGIPTHGVPAMKSKIDPILEARQKYAYGKQNDYLDHHNMIGWTREGNTAHPNSGLATIMSDGPGGNKWMYVGRNKAGQVWRDITGNRSGTVTINADGWGNFSVNGGSVSIWVN

SEQ ID NO: 20453 - protein, 484 aa, Synthetic construct
HHNGTNGTMMQYFEWYLPNDGNHWHRLRSDASNLKDKGITAVWIPPAWKGASQNDVGYGAYDLYDLGEFNQKGTVRTKYGTRNQLQAAVTALKSNGIQVYGDVVMNHKGGADATEWVRAVEVNPSNRNQEVSGDYTIEAWTKFDFPGRGNTHSNFKWRWYHFDGVDWDQSRQLQNKIYKFRGDGKGWDWEVDTENGNYDYLMYADYDMDHPEVVNELRNWGVWYTNTLGLDGFRIDAVKHIKYSFTRDWLEHVRNTTGKNMFAVAEFWKNDIGAIRNYLSKTNWNHSVFDVPLHYNLYNASRSGGNYDMRQIFNGTVVQRHPTHAVTFVDNHDSQPEEALESFVEEWFKPLAYALTLTRDQGYPSVFYGDYYGIPTHGVPAMKSKIDPILEARQKYAYGKQNDYMDHHNMIGWTREGNTAHPNSGLATIMSDGPGGNKWMYVGRNKAGQVWRDITGNRSGTVTINADGWGNFSVNGGSVSIWVN

SEQ ID NO: 20454 - protein, 484 aa, Synthetic construct
HHNGTNGTMMQYFEWYLPNDGNHWHRLRSDASNLKDKGITAVWIPPAWKGASQNDVGYGAYDLYDLGEFNQKGTVRTKYGTRNQLQAAVTALKSNGIQVYGDVVMNHKGGADATEWVRAVEVNPSNRNQEVSGDYTIEAWTKFDFPGRGNTHSNFKWRWWHFDGVDWDQSRQLQNKIYKFRGDGKEWDWEVDTENGNYDYLMYADIDMDHPEVVNELRNWGVWYTNTLGLDGFRIDAVKHIKYSFTRDWLEHVRNTTGKNMFAVAEFWKNDIGAIRNYLSKTNWNHSVFDVPLHYNLYNASRSGGNYDMRQIFNGTVVQRHPTHAVTFVDNHDSQPEEALESFVEEWFKPLAYALTLTRDQGYPSVFYGDYYGIPTHGVPAMKSKIDPILEARQKYAYGKQNDYLDHHNMIGWTREGNTAHPNSGLATIMSDGPGGNKWMYVGRNKAGQVWRDITGNRSGTVTINADGWGNFSVNGGSVSIWVN

SEQ ID NO: 20455 - protein, 484 aa, Synthetic construct
HHNQTNGTMMQYFEWYLPNDGNHWNRLRSDASNLKDKGITAVWIPPAWKGASQNDVGYGAYDLYDLGEFNQKGTVRTKYGTRNQLQAAVTALKSNGIQVYGDVVMNHKGGADATEWVRAVEVNPSNRNQEVSGDYTIEAWTKFDFPGRGNTHSNFKWRWWHFDGVDWDQSRQLQNKIYKFRGDGKEWDWEVDTENGNYDYLMYADIDMDHPEVVNELRNWGVWYTNTLGLDGFRIDAVKHIKYSFTRDWLEHVRNTTGKNMFAVAEFWKNDIGAIENYLSKTNWNHSVFDVPLHYNLYNASRSGGNYDMRQIFNGTVVQRHPTHAVTFVDNHDSQPEEALESFVEEWFKPLAYALTLTRDQGYPSVFYGDYYGIPTHGVPAMKSKIDPILEARQKYAYGKQNDYMDHHNMIGWTREGNTAHPNSGLATIMSDGPGGNKWMYVGRNKAGQVWRDITGNRSGTVTINADGWGNFSVNGGSVSIWVN

SEQ ID NO: 20456 - protein, 484 aa, Synthetic construct
HHNQTNGTMMQYFEWYLPNDGNHWNRLRSDASNLKDKGITAVWIPPAWKGASQNDVGYGAYDLYDLGEFNQKGTVRTKYGTRNQLQAAVTALKSNGIQVYGDVVMNHKGGADATEWVRAVEVNPSNRNQEVSGDYTIEAWTKFDFPGRGNTHSNFKWRWYHFDGVDWDQSRQLQNRIYKFRGDGKEWDWEVDEENGNYDYLMYADYDMDHPEVVNELRNWGVWYTNTLGLDGFRIDAVKHIKYSFTRDWLTHVRNTTGKNMFAVAEFWKNDIGAIRNYLSKTNWNHSVFDVPLHYNLYNASRSGGNYDMRQIFNGTVVQRHPTHAVTFVDNHDSQPEEALESFVEEWFKPLAYALTLTRDQGYPSVFYGDYYGIPTHGVPAMKSKIDPILEARQKYAYGKQNDYLDHHNMIGWTREGNTAHPNSGLATIMSDGPGGNKWMYVGRNKAGQVWRDITGNRSGTVTINADGWGNFSVNGGSVSIWVN

SEQ ID NO: 20457 - protein, 484 aa, Synthetic construct
HHNGTNGTMMQYFEWYLPNDGNHWHRLRSDASNLKDKGITAVWIPPAWKGASQNDVGYGAYDLYDLGEFNQKGTVRTKYGTRNQLQAAVTALKSNGIQVYGDVVMNHKGGADATEWVRAVEVNPSNRNQEVSGDYTIEAWTKFDFPGRGNTHSNFKWRWWHFDGVDWDQSRQLQNKIYKFRGDGKEWDWEVDTENGNYDYLMYADIDMDHPEVVNELRNWGVWYTNTLGLDGFRIDAVKHIKYSFTRDWLTHVRNTTGKNMFAVAEFWKNDIGAIENYLSKTNWNHSVFDVPLHYNLYNASRSGGNYDMRQIFNGTVVQRHPGHAVTFVDNHDSQPEEALESFVEEWFKPLAYALTLTRDQGYPSVFYGDYYGIPTHGVPAMKSKIDPILEARQKYAYGKQNDYMDHHNMIGWTREGNTAHPNSGLATIMSDGPGGNKWMYVGRNKAGQVWRDITGNRSGTVTINADGWGNFSVNGGSVSIWVN

SEQ ID NO: 20458 - protein, 484 aa, Synthetic construct
HHNGTNGTMMQYFEWYLPNDGNHWHRLRSDASNLKDKGITAVWIPPAWKGASQNDVGYGAYDLYDLGEFNQKGTVRTKYGTRNQLQAAVTALKSNGIQVYGDVVMNHKGGADATEWVRAVEVNPSNRNQEVSGDYTIEAWTKFDFPGRGNTHSNFKWRWWHFDGVDWDQSRQLQNRIYKFRGDGKEWDWEVDTENGNYDYLMYADYDMDHPEVVNELRNWGVWYTNTLGLDGFRIDAVKHIKYSFTRDWLTHVRNTTGKNMFAVAEFWKNDIGAIENYLSKTNWNHSVFDVPLHYNLYNASRSGGNYDMRQIFNGTVVQRHPGHAVTFVDNHDSQPEEALESFVEEWFKPLAYALTLTRDQGYPSVFYGDYYGIPTHGVPAMKSKIDPILEARQKYAYGKQNDYMDHHNMIGWTREGNTAHPNSGLATIMSDGPGGNKWMYVGRNKAGQVWRDITGNRSGTVTINADGWGNFSVNGGSVSIWVN

SEQ ID NO: 20459 - protein, 484 aa, Synthetic construct
HHNGTNGTMMQYFEWYLPNDGNHWNRLRSDASNLKDKGITAVWIPPAWKGASQNDVGYGAYDLYDLGEFNQKGTVRTKYGTRNQLQAAVTALKSNGIQVYGDVVMNHKGGADATEWVRAVEVNPSNRNQEVSGDYTIEAWTKFDFPGRGNTHSNFKWRWWHFDGVDWDQSRQLQNRIYKFRGDGKEWDWEVDTENGNYDYLMYADYDMDHPEVVNELRNWGVWYTNTLGLDGFRIDAVKHIKYSFTRDWLTHVRNTTGKNMFAVAEFWKNDIGAIRNYLSKTNWNHSVFDVPLHYNLYNASRSGGNYDMRQIFNGTVVQRHPTHAVTFVDNHDSQPEEALESFVEEWFKPLAYALTLTRDQGYPSVFYGDYYGIPTHGVPAMKSKIDPILEARQKYAYGKQNDYMDHHNMIGWTREGNTAHPNSGLATIMSDGPGGNKWMYVGRNKAGQVWRDITGNRSGTVTINADGWGNFSVNGGSVSIWVN

SEQ ID NO: 20460 - protein, 484 aa, Synthetic construct
HHNQTNGTMMQYFEWYLPNDGNHWNRLRSDASNLKDKGITAVWIPPAWKGASQNDVGYGAYDLYDLGEFNQKGTVRTKYGTRNQLQAAVTALKSNGIQVYGDVVMNHKGGADATEWVRAVEVNPSNRNQEVSGDYTIEAWTKFDFPGRGNTHSNFKWRWYHFDGVDWDQSRQLQNRIYKFRGDGKEWDWEVDTENGNYDYLMYADYDMDHPEVVNELRNWGVWYTNTLGLDGFRIDAVKHIKYSFTRDWLTHVRNTTGKNMFAVAEFWKNDIGAIRNYLSKTNWNHSVFDVPLHYNLYNASRSGGNYDMRQIFNGTVVQRHPTHAVTFVDNHDSQPEEALESFVEEWFKPLAYALTLTRDQGYPSVFYGDYYGIPTHGVPAMKSKIDPILEARQKYAYGKQNDYMDHHNMIGWTREGNTAHPNSGLATIMSDGPGGNKWMYVGRNKAGQVWRDITGNRSGTVTINADGWGNFSVNGGSVSIWVN

SEQ ID NO: 20461 - protein, 484 aa, Synthetic construct
HHNGTNGTMMQYFEWYLPNDGNHWHRLRSDASNLKDMGITAVWIPPAWKGASQNDVGYGAYDLYDLGEFNQKGTVRTKYGTRNQLQAAVTALKSNGIQVYGDVVMNHKGGADATEWVRAVEVNPSNRNQEVSGDYTIEAWTKFDFPGRGNTHSNFKWRWYHFDGVDWDQSRQLQNKIYKFRGDGKEWDWEVDTENGNYDYLMYADYDMDHPEVVNELRNWGVWYTNTLGLDGFRIDAVKHIKYSFTRDWLTHVRNTTGKNMFAVAEFWKNDIGAIENYLSKTNWNHSVFDVPLHYNLYNASRSGGNYDMRQIFNGTVVQRHPTHAVTFVDNHDSQPEEALESFVEEWFKPLAYALTLTRDQGYPSVFYGDYYGIPTHGVPAMKSKIDPILEARQKYAYGKQNDYLDHHNMIGWTREGNTAHPNSGLATIMSDGPGGNKWMYVGRNKAGQVWRDITGNRSGTVTINADGWGNFSVNGGSVSIWVN

SEQ ID NO: 20462 - protein, 484 aa, Synthetic construct
HHNQTNGTMMQYFEWYLPNDGNHWNRLRSDASNLKDKGITAVWIPPAWKGASQNDVGYGAYDLYDLGEFNQKGTVRTKYGTRNQLQAAVTALKSNGIQVYGDVVMNHKGGADATEWVRAVEVNPSNRNQEVSGDYTIEAWTKFDFPGRGNTHSNFKWRWYHFDGVDWDQSRQLQNRIYKFRGDGKEWDWEVDTENGNYDYLMYADYDMDHPEVVNELRNWGVWYTNTLGLDGFRIDAVKHIKYSFTRDWLEHVRNTTGKNMFAVAEFWKNDIGAIRNYLSKTNWNHSVFDVPLHYNLYNASRSGGNYDMRQIFNGTVVQRHPTHAVTFVDNHDSQPEEALESFVEEWFKPLAYALTLTRDQGYPSVFYGDYYGIPTHGVPAMKSKIDPILEARQKYAYGKQNDYMDHHNMIGWTREGNTAHPNSGLATIMSDGPGGNKWMYVGRNKAGQVWRDITGNRSGTVTINADGWGNFSVNGGSVSIWVN

SEQ ID NO: 20463 - protein, 484 aa, Synthetic construct
HHNGTNGTMMQYFEWYLPNDGNHWHRLRSDASNLKDKGITAVWIPPAWKGASQNDVGYGAYDLYDLGEFNQKGTVRTKYGTRNQLQAAVTALKSNGIQVYGDVVMNHKGGADATEWVRAVEVNPSNRNQEVSGDYTIEAWTKFDFPGRGNTHSNFKWRWEHFDGVDWDQSRQLQNKIYKFRGDGKEWDWEVDTENGNYDYLMYADYDMDHPEVVNELRNWGVWYTNTLGLDGFRIDAVKHIKYSFTRDWLTHVRNTTGKNMFAVAEFWKNDIGAIENYLSKTNWNHSVFDVPLHYNLYNASRSGGNYDMRQIFNGTVVQRHPTHAVTFVDNHDSQPEEALESFVEEWFKPLAYALTLTRDQGYPSVFYGDYYGIPTHGVPAMKSKIDPILEARQKYAYGKQNDYLDHHNMIGWTREGNTAHPNSGLATIMSDGPGGNKWMYVGRNKAGQVWRDITGNRSGTVTINADGWGNFSVNGGSVSIWVN

SEQ ID NO: 20464 - protein, 484 aa, Synthetic construct
HHNGTNGTMMQYFEWYLPNDGNHWNRLRSDASNLKDKGITAVWIPPAWKGASQNDVGYGAYDLYDLGEFNQKGTVRTKYGTRNQLQAAVTALKSNGIQVYGDVVMNHKGGADATEWVRAVEVNPSNRNQEVSGDYTIEAWTKFDFPGRGNTHSNFKWRWWHFDGVDWDQSRQLQNRIYKFRGDGKEWDWEVDEENGNYDYLMYADYDMDHPEVVNELRNWGVWYTNTLGLDGFRIDAVKHIKYSFTRDWLTHVRNTTGKNMFAVAEFWKNDIGAIENYLSKTNWNHSVFDVPLHYNLYNASRSGGNYDMRQIFNGTVVQRHPTHAVTFVDNHDSQPEEALESFVEEWFKPLAYALTLTRDQGYPSVFYGDYYGIPTHGVPAMKSKIDPILEARQKYAYGKQNDYMDHHNMIGWTREGNTAHPNSGLATIMSDGPGGNKWMYVGRNKAGQVWRDITGNRSGTVTINADGWGNFSVNGGSVSIWVN

SEQ ID NO: 20465 - protein, 484 aa, Synthetic construct
HHNGTNGTMMQYFEWYLPNDGNHWNRLRSDASNLKDKGITAVWIPPAWKGASQNDVGYGAYDLYDLGEFNQKGTVRTKYGTRNQLQAAVTALKSNGIQVYGDVVMNHKGGADATEWVRAVEVNPSNRNQEVSGDYTIEAWTKFDFPGRGNTHSNFKWRWYHFDGVDWDQSRQLQNKIYKFRGDGKEWDWEVDEENGNYDYLMYADYDMDHPEVVNELRNWGVWYTNTLGLDGFRIDAVKHIKYSFTRDWLEHVRNTTGKNMFAVAEFWKNDIGAIENYLSKTNWNHSVFDVPLHYNLYNASRSGGNYDMRQIFNGTVVQRHPTHAVTFVDNHDSQPEEALESFVEEWFKPLAYALTLTRDQGYPSVFYGDYYGIPTHGVPAMKSKIDPILEARQKYAYGKQNDYMDHHNMIGWTREGNTAHPNSGLATIMSDGPGGNKWMYVGRNKAGQVWRDITGNRSGTVTINADGWGNFSVNGGSVSIWVN

SEQ ID NO: 20466 - protein, 484 aa, Synthetic construct
HHNQTNGTMMQYFEWYLPNDGNHWNRLRSDASNLKDKGITAVWIPPAWKGASQNDVGYGAYDLYDLGEFNQKGTVRTKYGTRNQLQAAVTALKSNGIQVYGDVVMNHKGGADATEWVRAVEVNPSNRNQEVSGDYTIEAWTKFDFPGRGNTHSNFKWRWWHFDGVDWDQSRQLQNRIYKFRGDGKEWDWEVDTENGNYDYLMYADYDMDHPEVVNELRNWGVWYTNTLGLDGFRIDAVKHIKYSFTRDWLTHVRNTTGKNMFAVAEFWKNDIGAIRNYLSKTNWNHSVFDVPLHYNLYNASRSGGNYDMRQIFNGTVVQRHPGHAVTFVDNHDSQPEEALESFVEEWFKPLAYALTLTRDQGYPSVFYGDYYGIPTHGVPAMKSKIDPILEARQKYAYGKQNDYLDHHNMIGWTREGNTAHPNSGLATIMSDGPGGNKWMYVGRNKAGQVWRDITGNRSGTVTINADGWGNFSVNGGSVSIWVN

SEQ ID NO: 20467 - protein, 484 aa, Synthetic construct
HHNGTNGTMMQYFEWYLPNDGNHWHRLRSDASNLKDKGITAVWIPPAWKGASQNDVGYGAYDLYDLGEFNQKGTVRTKYGTRNQLQAAVTALKSNGIQVYGDVVMNHKGGADATEWVRAVEVNPSNRNQEVSGDYTIEAWTKFDFPGRGNTHSNFKWRWYHFDGVDWDQSRQLQNRIYKFRGDGKEWDWEVDTENGNYDYLIYADYDMDHPEVVNELRNWGVWYTNTLGLDGFRIDAVKHIKYSFTRDWLTHVRNTTGKNMFAVAEFWKNDIGAIENYLSKTNWNHSVFDVPLHYNLYNASRSGGNYDMRQIFNGTVVQRHPTHAVTFVDNHDSQPEEALESFVEEWFKPLAYALTLTRDQGYPSVFYGDYYGIPTHGVPAMKSKIDPILEARQKYAYGKQNDYMDHHNMIGWTREGNTAHPNSGLATIMSDGPGGNKWMYVGRNKAGQVWRDITGNRSGTVTINADGWGNFSVNGGSVSIWVN

SEQ ID NO: 20468 - protein, 484 aa, Synthetic construct
HHNGTNGTMMQYFEWYLPNDGNHWNRLRSDASNLKDKGITAVWIPPAWKGASQNDVGYGAYDLYDLGEFNQKGTVRTKYGTRNQLQAAVTALKSNGIQVYGDVVMNHKGGADATEWVRAVEVNPSNRNQEVSGDYTIEAWTKFDFPGRGNTHSNFKWRWWHFDGVDWDQSRQLQNKIYKFRGDGKEWDWEVDTENGNYDYLMYADYDMDHPEVVNELRNWGVWYTNTLGLDGFRIDAVKHIKYSFTRDWLEHVRNTTGKNMFAVAEFWKNDIGAIENYLSKTNWNHSVFDVPLHYNLYNASRSGGNYDMRQIFNGTVVQRHPTHAVTFVDNHDSQPEEALESFVEEWFKPLAYALTLTRDQGYPSVFYGDYYGIPTHGVPAMKSKIDPILEARQKYAYGKQNDYMDHHNMIGWTREGNTAHPNSGLATIMSDGPGGNKWMYVGRNKAGQVWRDITGNRSGTVTINADGWGNFSVNGGSVSIWVN

SEQ ID NO: 20469 - protein, 484 aa, Synthetic construct
HHNQTNGTMMQYFEWYLPNDGNHWHRLRSDASNLKDKGITAVWIPPAWKGASQNDVGYGAYDLYDLGEFNQKGTVRTKYGTRNQLQAAVTALKSNGIQVYGDVVMNHKGGADATEWVRAVEVNPSNRNQEVSGDYTIEAWTKFDFPGRGNTHSNFKWRWWHFDGVDWDQSRQLQNRIYKFRGDGKEWDWEVDTENGNYDYLMYADYDMDHPEVVNELRNWGVWYTNTLGLDGFRIDAVKHIKYSFTRDWLEHVRNTTGKNMFAVAEFWKNDIGAIENYLSKTNWNHSVFDVPLHYNLYNASRSGGNYDMRQIFNGTVVQRHPTHAVTFVDNHDSQPEEALESFVEEWFKPLAYALTLTRDQGYPSVFYGDYYGIPTHGVPAMKSKIDPILEARQKYAYGKQNDYLDHHNMIGWTREGNTAHPNSGLATIMSDGPGGNKWMYVGRNKAGQVWRDITGNRSGTVTINADGWGNFSVNGGSVSIWVN

SEQ ID NO: 20470 - protein, 484 aa, Synthetic construct
HHNQTNGTMMQYFEWYLPNDGNHWNRLRSDASNLKDKGITAVWIPPAWKGASQNDVGYGAYDLYDLGEFNQKGTVRTKYGTRNQLQAAVTALKSNGIQVYGDVVMNHKGGADATEWVRAVEVNPSNRNQEVSGDYTIEAWTKFDFPGRGNTHSNFKWRWYHFDGVDWDQSRQLQNKIYKFRGDGKEWDWEVDTENGNYDYLMYADIDMDHPEVVNELRNWGVWYTNTLGLDGFRIDAVKHIKYSFTRDWLEHVRNTTGKNMFAVAEFWKNDIGAIRNYLSKTNWNHSVFDVPLHYNLYNASRSGGNYDMRQIFNGTVVQRHPTHAVTFVDNHDSQPEEALESFVEEWFKPLAYALTLTRDQGYPSVFYGDYYGIPTHGVPAMKSKIDPILEARQKYAYGKQNDYMDHHNMIGWTREGNTAHPNSGLATIMSDGPGGNKWMYVGRNKAGQVWRDITGNRSGTVTINADGWGNFSVNGGSVSIWVN

SEQ ID NO: 20471 - protein, 484 aa, Synthetic construct
HHNQTNGTMMQYFEWYLPNDGNHWHRLRSDASNLKDKGITAVWIPPAWKGASQNDVGYGAYDLYDLGEFNQKGTVRTKYGTRNQLQAAVTALKSNGIQVYGDVVMNHKGGADATEWVRAVEVNPSNRNQEVSGDYTIEAWTKFDFPGRGNTHSNFKWRWYHFDGVDWDQSRQLQNKIYKFRGDGKGWDWEVDTENGNYDYLMYADYDMDHPEVVNELRNWGVWYTNTLGLDGFRIDAVKHIKYSFTRDWLTHVRNTTGKNMFAVAEFWKNDIGAIENYLSKTNWNHSVFDVPLHYNLYNASRSGGNYDMRQIFNGTVVQRHPTHAVTFVDNHDSQPEEALESFVEEWFKPLAYALTLTRDQGYPSVFYGDYYGIPTHGVPAMKSKIDPILEARQKYAYGKQNDYMDHHNMIGWTREGNTAHPNSGLATIMSDGPGGNKWMYVGRNKAGQVWRDITGNRSGTVTINADGWGNFSVNGGSVSIWVN

SEQ ID NO: 20472 - protein, 484 aa, Synthetic construct
HHNGTNGTMMQYFEWYLPNDGNHWNRLRSDASNLKDKGITAVWIPPAWKGASQNDVGYGAYDLYDLGEFNQKGTVRTKYGTRNQLQAAVTALKSNGIQVYGDVVMNHKGGADATEWVRAVEVNPSNRNQEVSGDYTIEAWTKFDFPGRGNTHSNFKWRWWHFDGVDWDQSRQLQNKIYKFRGDGKEWDWEVDEENGNYDYLMYADYDMDHPEVVNELRNWGVWYTNTLGLDGFRIDAVKHIKYSFTRDWLEHVRNTTGKNMFAVAEFWKNDIGAIENYLSKTNWNHSVFDVPLHYNLYNASRSGGNYDMRQIFNGTVVQRHPTHAVTFVDNHDSQPEEALESFVEEWFKPLAYALTLTRDQGYPSVFYGDYYGIPTHGVPAMKSKIDPILEARQKYAYGKQNDYLDHHNMIGWTREGNTAHPNSGLATIMSDGPGGNKWMYVGRNKAGQVWRDITGNRSGTVTINADGWGNFSVNGGSVSIWVN

SEQ ID NO: 20473 - protein, 484 aa, Synthetic construct
HHNGTNGTMMQYFEWYLPNDGNHWHRLRSDASNLKDKGITAVWIPPAWKGASQNDVGYGAYDLYDLGEFNQKGTVRTKYGTRNQLQAAVTALKSNGIQVYGDVVMNHKGGADATEWVRAVEVNPSNRNQEVSGDYTIEAWTKFDFPGRGNTHSNFKWRWYHFDGVDWDQSRQLQNKIYKFRGDGKEWDWEVDTENGNYDYLMYADYDMDHPEVVNELRNWGVWYTNTLGLDGFRIDAVKHIKYSFTRDWLEHVRNTTGKNMFAVAEFWKNDIGAIENYLSKTNWNHSVFDVPLHYNLYNASRSGGNYDMRQIFNGTVVQRHPTHAVTFVDNHDSQPEEALESFVEEWFKPLAYALTLTRDQGYPSVFYGDYYGIPTHGVPAMKSKIDPILEARQKYAYGKQNDYMDHHNMIGWTREGNTAHPNSGLATIMSDGPGGNKWMYVGRNKAGQVWRDITGNRSGTVTINADGWGNFSVNGGSVSIWVN

SEQ ID NO: 20474 - protein, 484 aa, Synthetic construct
AAAPFNGTMMQYFEWYLPDDGTLWTKVANEANNLSSLGITALWLPPAYKGTSRSDVGYGVYDLYDLGEFNQKGAVRTKYGTKAQYLQAIQAAHAAGMQVYADVVFNHKAGADATEWVDAVEVNPSNRNQEVSGTYKIQAWTKFDFPGRGNTYSSFKWRWYHFDGTDWDQSRQLNRIYKFRGTGKAWDWEVDTENGNYDYLMFADLDMDHPEVVTELKNWGKWYVNTTNIDGFRLDAVKHIKFSFFPDWLSYVRSQTGKPLFTVGEYWSYDINKLHNYIMKTNGTMSLFDAPLHNKFYTASKSGGTFDMRTLMTNTLMKDQPTLAVTFVDNHDTEPGQALQSWVDPWFKPLAYAFILTRQEGYPCVFYGDYYGIPQYNIPSLKSKIDPLLIARRDYAYGTQHDYLDHSDIIGWTREGVTEKPGSGLAALITDGPGGSKWMYVGKQHAGKVFYDLTGNRSDTVTINSDGWGEFKVNGGSVSVWVPR

SEQ ID NO: 20475 - protein, 481 aa, Bacillus sp.
HNGTNATMMQYFEWHLPNDGNHWNRLRDDASNLRNRGITAIWIPPAWKGTSQNDVGYGAYDLYDLGEFNQKGTVRTKYGTRSQLESAIHALKNNGVQVYGDVVMNHKAGADGTEFVTAVEVDPSNRNQETLGTYQIQAYTKFDFPGRGNTYSSFKWRWYHFDGTDWDESRKLNRIYKFSGKAWDWPVDTEFGNYDYLMFADYDMDHPEVVNELRRWGEWYTNTLNLDGFRIDAVKHIKFSFTRDWLTHVRNATGKGDFAVAEFWKNDLGALENYLSYTNWNHSVFDVPLHYNLYNASNSRGNYDMAKLLNGTVVQKHPMHAVTFVDNHDSQPGESLESFVQEWFKPLAYALILTREQGYPSVFYGDYYGIPTHSVPAMKAKIDPILAARQNFAYGTQHDYFDHHNIIGWTREGNTTHPNSGLATIMSDGPGGEKWMYVGQNKAGQVWHDITGNKPGTVTINADGWANFSVNKGSVSIWVKR

SEQ ID NO: 20476 - protein, 481 aa, Bacillus sp.
HDGTNATMMQYFEWHLPNDGNHWNRLRDDASNLRNRGITAIWIPPAWKGTSQNDVGYGAYDLYDLGEFNQKGTVRTKYGTRSQLESAIHALKNNGVQVYGDVVMNHKAGADGTEFVTAVEVDPSNRNQETSGTYQIQAYTKFDFPGRGNTYSSFKWRWYHFDGTDWDESRKLNRIYKFSGKAWDWPVDTEFGNYDYLMFADYDMDHPEVVNELRRWGEWYTNTLNLDGFRIDAVKHIKFSFTRDWLTHVRNATGKGMFAVAEFWKNDLGALENYLSYTNWNHSVFDVPLHYNLYNASNYGGNYDMAKLLNGTVVQKHPMHAVTFVDNHDSQPGESLESFVQEWFKPLAYALILTREQGYPSVFYGDYYGIPTHSVPAMKAKIDPILAARQNFAYGTQHDYFDHHNIIGWTREGNTTAPNSGLATIMSDGPGGEKWMYVGQNKAGQVWHDITGNKPGTVTINADGWANFSVNKGSVSIWVKR

SEQ ID NO: 20477 - protein, 481 aa, Bacillus sp.
HNGTNATMMQYFEWHLPNDGNHWNRLRDDASNLRNRGITAIWIPPAWKGTSQNDVGYGAYDLYDLGEFNQKGTVRTKYGTRSQLESAIHALKNNGVQVYGDVVMNHKAGADGTEFVTAVEVDPSNRNQETSGTYQIQAYTKFDFPGRGNTYSSFKWRWYHFDGTDWDESRKLNRIYKFSGKAWDWPVDTEFGNYDYLMFADLDMDHPEVVNELRRWGEWYTNTLNLDGFRIDAVKHIKFSFTRDWLTHVRNATGKGWFAVAEYWKNDLGALENYLSYTNWNHSVFDVPLHYNLYNASNSRGNYDMAKLLNGTVVQKHPMHAVTFVDNHDSQPGESLESFVQEWFKPLAYALILTREQGYPSVFYGDYYGIPTHSVPAMKAKIDPILAARQNFAYGTQHDYFDHHNIIGWTREGNTTHPNSGLATIMSDGPGGEKWMYVGQNKAGQVWHDITGNKPGTVTINADGWANFSVNGASVSIWVKR

SEQ ID NO: 20478 - protein, 481 aa, Bacillus sp.
HNGTNATMMQYFEWHLPNDGNHWNRLRDDASNLRNAGITAIWIPPAWKGTSQNDVGYGAYDLYDLGEFNQKGTVRTKYGTRSQLESAIHALKNNGVQVYGDVVMNHKAGADGTEFVTAVEVDPSNRNQETSGTYQIQAYTKFDFPGRGNTYSSFKWRWYHFDGTDWDESRKLNRIYKFSGKAWDWPVDTEFGNYDYLMFADYDMDHPEVVNELRRWGEWYTNTLNLDGFRIDAVKHIKFSFTRDWLTHVRNATGKGDFAVAEFWKNDLGALENYLSYTNWNHSVFDVPLHYNLYNASNSRGNYDMAKLLNGTVVQKHPMHAVTFVDNHDSQPGESLESFVQEWFKPLAYALILTREQGYPSVFYGDYYGIPTHSVPAMKAKIDPILEARQDFAYGTQHDYFDHHNIIGWTREGNTTHPNSGLATIMSDGPGGEKWMYVGQNKAGQVWHDITGNKPGTVTINADGWANFSVNKGSVSIWVKR

SEQ ID NO: 20479 - protein, 481 aa, Bacillus sp.
HNGTNATMMQYFEWHLPNDGNHWNRLRDDASNLRNRGITAIWIPPAWKGTSQNDVGYGAYDLYDLGEFNQKGTVRTKYGTRSQLESAIHALKNNGVQVYGDVVMNHKAGADGTEFVDAVEVDPSNRNQETSGTYQIQAYTKFDFPGRGNTYSSFKWRWYHFDGTDWDESRKLNRIYKFTGKQWDWPVDTEFGNYDYLMFADYDMDHPEVVNELRRWGEWYTNTLNLDGFRIDAVKHIKFQFTRDWLTHVRNATGKGMFAVAEFWKNDLGALENYLSYTNWNHSVFDVPLHYNLYNASNSRGNYDMAKLLNGTVVQKHPMHAVTFVDNHDSQPGESLESFVQEWFKPLAYALILTREQGYPSVFYGDYYGIPTHSVPAMKAKIDPILAARQNFAYGTQHDYFDHHNIIGWTREGNTTHPNSGLATIMSDGPGGEKWMYVGQNKAGQVWHDITGNKPGTVTINADGWANFSVNKGSVSIWVKR

SEQ ID NO: 20480 - protein, 481 aa, Bacillus sp.
HNGTNATMMQYFEWHLPNDGNHWNRLRDDASNLRNRGITAIWIPPAWKGTSQNDVGYGAYDLYDLGEFNQKGTVRTKYGTRSQLESAIHALKNNGVQVYGDVVMNHKAGADGTEFVTAVEVDPSNRNQETSGTYQIQAYTKFDFPGRGNTYSSFKWRWYHFDGTDWDESRKLNRIYKFSGKAWDWPVDTEFGNYDYLMFADYDMDHPEVVNELRRWGEWYFNTLNLDGFRIDAVKHIKFSFTRDWLTHVRNATGKGMFAVAEFWKNDLGALENYLSYTNWNHSVFDVPLHYNLYNASNSRGNYDMAKLLNGTVVQKHPMHAVTFVDNHDSQPGESLESFVQEWFKPLAYALILTREQGYPSVFYGDYYGIPTHSVPAMKAKIDPILEARQWFAYGTQHDYFDHHNIIGWTREGNTTAPNSGLATIMSDGPGGEKWMYVGQNKAGQVWHDITGNKPGTVTINADGWANFSVNKGSVSIWVKR

SEQ ID NO: 20481 - protein, 481 aa, Bacillus sp.
HGGTNATMMQYFEWHLPNDGNHWNRLRDDASNLRNNGITAIWIPPAWKGTSQNDVGYGAYDLYDLGEFNQKGTVRTKYGTRSQLESAIHALKNNGVQVYGDVVMNHKAGADGTEFVTAVEVDPSNRNQETSGTYQIQAYTKFDFPGRGNTYSSFKWRWYHFDGTDWDESRKLNRIYKFSGKAWDWPVDTEFGNYDYLMFADYDMDHPEVVNELRRWGEWYTNTLNLDGFRIDAVKHIKFSFTRDWLTHVRNATGKGMFAVAEFWKNDLGALENYLSYTNWNHSVFDVPLHYNLYNASNSRGNYDMAKLLNGTVVQKHPMHAVTFVDNHDSQPGESLESFVQEWFKPLAYALILTREQGYPSVFYGDYYGIPTHSVPAMKAKIDPILAARQNFAYGTQHDYFDHHNIIGWTREGNTTHPNSGLATIMSDGPGGEKWMYVGQNKAGQVWHDITGNKPGTVTINADGWANFSVNKGSVSIWVKR

SEQ ID NO: 20482 - protein, 481 aa, Bacillus sp.
HNGTNATMMQYFEWHLPNDGNHWNRLRDDASNLRNNGITAIWIPPAWKGTSQNDVGYGAYDLYDLGEFNQKGTVRTKYGTRSQLESAIHALKNNGVQVYGDVVMNHKAGADGTEFVTAVEVDPSNRNQETSGTYQIQAYTKFDFPGRGNTYSSFKWRWYHFDGTDWDESRKLNRIYKFSGKAWDWPVDTEFGNYDYLMFADYDMDHPEVVNELRRWGEWYTNTLNLDGFRIDAVKHIKFSFTRDWLTHVRNATGKGDFAVAEFWKNDLGALENYLSYTNWNHSVFDVPLHYNLYNASNSRGNYDMAKLLNGTVVQKHPMHAVTFVDNHDSQPGESLESFVQEWFKPLAYALILTREQGYPSVFYGDYYGIPTHSVPAMKAKIDPILAARQNFAYGTQHDYFDHHNIIGWTREGNTTHPNSGLATIMSDGPGGEKWMYVGQNKAGQVWHDITGNKPGTVTINADGWANFSVNKGSVSIWVKR

SEQ ID NO: 20483 - protein, 481 aa, Bacillus sp.
HDGTNATMMQYFEWHLPNDGNHWNRLRDDASNLRNAGITAIWIPPAWKGTSQNDVGYGAYDLYDLGEFNQKGTVRTKYGTRSQLESAIHALKNNGVQVYGDVVMNHKAGADGTEFVTAVEVDPSNRNQETSGTYQIQAYTKFDFPGRGNTYSSFKWRWYHFDGTDWDESRKLNRIYKFSGKAWDWPVDTEFGNYDYLMFADYDMDHPEVVNELRRWGEWYTNTLNLDGFRIDAVKHIKFSFTRDWLTHVRNATGKGMFAVAEFWKNDLGALENYLSYTNWNHSVFDVPLHYNLYNASNSRGNYDMAKLLNGTVVQKHPMHAVTFVDNHDSQPGESLESFVQEWFKPLAYALILTREQGYPSVFYGDYYGIPTHSVPAMKAKIDPILEARQDFAYGTQHDYFDHHNIIGWTREGNTTHPNSGLATIMSDGPGGEKWMYVGQNKAGQVWHDITGNKPGTVTINADGWANFSVFGGSVSIWVKR

SEQ ID NO: 20484 - protein, 481 aa, Bacillus sp.
HDGTNATMMQYFEWHLPNDGNHWNRLRDDASNLRNRGITAIWIPPAWKGTSQNDVGYGAYDLYDLGEFNQKGTVRTKYGTRSQLESAIHALKNNGVQVYGDVVMNHKAGADGTEFVTAVEVDPSNRNQETSGTYQIQAYTKFDFPGRGNTYSSFKWRWYHFDGTDWDESRKLNRIYKFDGKAWDWPVDTEFGNYDYLMFADLDMDHPEVVNELRRWGEWYTNTLNLDGFRIDAVKHIKFSFTRDWLTHVRNATGKGMFAVAEFWKNDLGALENYLSYTNWNHSVFDVPLHYNLYNASNTGGNYDMAKLLNGTVVQKHPMHAVTFVDNHDSQPGESLESFVQEWFKPLAYALILTREQGYPSVFYGDYYGIPTHSVPAMKAKIDPILAARQNFAYGTQHDYFDHHNIIGWTREGNTTAPNSGLATIMSDGPGGEKWMYVGQNKAGQVWHDITGNKPGTVTINADGWANFSVNKGSVSIWVKR

SEQ ID NO: 20485 - protein, 481 aa, Bacillus sp.
HNGTNATMMQYFEWHLPNDGNHWNRLRDDASNLRNAGITAIWIPPAWKGTSQNDVGYGAYDLYDLGEFNQKGTVRTKYGTRSQLESAIHALKNNGVQVYGDVVMNHKAGADGTEFVTAVEVDPSNRNQETSGTYQIQAYTKFDFPGRGNTYSSFKWRWYHFDGTDWDESRKLNRIYKFSGKAWDWPVDTEFGNYDYLMFADYDMDHPEVVNELRRWGEWYTNTLNLDGFRIDAVKHIKFSFTRDWLTHVRNATGKGMFAVAEFWKNDLGALENYLSYTNWNHSVFDVPLHYNLYNASNYGGNYDMAKLLNGTVVQKHPMHAVTFVDNHDSQPGESLESFVQEWFKPLAYALILTREQGYPSVFYGDYYGIPTHSVPAMKAKIDPILAARQNFAYGTQHDYFDHHNIIGWTREGNTTAPNSGLATIMSDGPGGEKWMYVGQNKAGQVWHDITGNKPGTVTINADGWANFSVNKGSVSIWVKR

SEQ ID NO: 20486 - protein, 481 aa, Bacillus sp.
HDGTNATMMQYFEWHLPNDGNHWNRLRDDASNLRNNGITAIWIPPAWKGTSQNDVGYGAYDLYDLGEFNQKGTVRTKYGTRSQLESAIHALKNNGVQVYGDVVMNHKAGADGTEFVTAVEVDPSNRNQETSGTYQIVAYTKFDFPGRGNTYSSFKWRWYHFDGTDWDESRKLNRIYKFSGKAWDWPVDTEFGNYDYLMFADYDMDHPEVVNELRRWGEWYTNTLNLDGFRIDAVKHIKFSFTRDWLTHVRNATGKGMFAVAEFWKNDLGALENYLSYTNWNHSVFDVPLHYNLYNASNSRGNYDMAKLLNGTVVQKHPMHAVTFVDNHDSQPGESLESFVQEWFKPLAYALILTREQGYPSVFYGDYYGIPTHSVPAMKAKIDPILAARQNFAYGTQHDYFDHHNIIGWTREGNTTHPNSGLATIMSDGPGGEKWMYVGQNKAGQVWHDITGNKPGTVTINADGWANFSVNKGSVSIWVKR

SEQ ID NO: 20487 - protein, 481 aa, Bacillus sp.
HNGTNATMMQYFEWHLPNDGNHWNRLRDDASNLRNRGITAIWIPPAWKGTSQNDVGYGAYDLYDLGEFNQKGTVRTKYGTRSQLESAIHALKNNGVQVYGDVVMNHKAGADGTEFVTAVEVDPSNRNQETSGTYQIQAYTKFDFPGRGNTYSSFKWRWYHFDGTDWDESRKLNRIYKFSGKAWDWPVDTEFGNYDYLMFADLDMDHPEVVNELRRWGEWYTNTLNLDGFRIDAVKHIKFSFTRDWLTHVRNATGKGDFAVAEYWKNDLGALENYLSYTNWNHSVFDVPLHYNLYNASNTGGNYDMAKLLNGTVVQKHPMHAVTFVDNHDSQPGESLESFVQEWFKPLAYALILTREQGYPSVFYGDYYGIPTHSVPAMKAKIDPILAARQNFAYGTQHDYFDHHNIIGWTREGNTTHPNSGLATIMSDGPGGEKWMYVGQNKAGQVWHDITGNKPGTVTINADGWANFSVNKGSVSIWVKR

SEQ ID NO: 20488 - protein, 481 aa, Bacillus sp.
HNGTNATMMQYFEWHLPNDGNHWNRLRDDASNLRNRGITAIWIPPAWKGTSQNDVGYGAYDLYDLGEFNQKGTVRTKYGTRSQLESAIHALKNNGVQVYGDVVMNHKAGADGTEFVTAVEVDPSNRNQETSGTEQIQAYTKFDFPGRGNTYSSFKWRWYHFDGTDWDESRKLNRIYKFSGKAWDWPVDTEFGNYDYLMFADYDMDHPEVVNELRRWGEWYTNTLNLDGFRIDAVKHIKFSFTRDWLTHVRNATGKGMFAVAEFWKNDLGALENYLSYTNWNHSVFDVPLHYNLYNASNSRGNYDMAKLLNGTVVQKHYMHAVTFVDNHDSQPGESLESFVQEWFKPLAYALILTREQGYPSVFYGDYYGIPTHSVPAMKAKIDPILAARQNFAYGTQHDYFDHHNIIGWTREGNTTHPNSGLATIMSDGPGGEKWMYVGQNKAGQVWHDITGNKPGTVTINADGWANFSVNKGSVSIWVKR

SEQ ID NO: 20489 - protein, 481 aa, Bacillus sp.
HNGTNATMMQYFEWHLPNDGNHWNRLRDDASNLRNNGITAIWIPPAWKGTSQNDVGYGAYDLYDLGEFNQKGTVRTKYGTRSQLESAIHALKNNGVQVYGDVVMNHKAGADGTEFVTAVEVDPSNRNQETSGTYQIQAYTKFDFPGRGNTYSSFKWRWYHFDGTDWDESRKLNRIYKFSGKAWDWPVDTEFGNYDYLMFADYDMDHPEVVNELRRWGEWYTNTLNLDGFRIDAVKHIKFSFTRDWLTHVRNATGKGMFAVAEFWKNDLGALENYLSYTNWNHSVFDVPLHYNLYNASNSRGNYDMAKLLNGTVVQKHPMHAVTFVDNHDSQPGESLESFVQEWFKPLAYALILTREQGYPSVFYGDYYGIPTHSVPAMKAKIDPILEARQWFAYGTQHDYFDHHNIIGWTREGNTTAPNSGLATIMSDGPGGEKWMYVGQNKAGQVWHDITGNKPGTVTINADGWANFSVNKGSVSIWVKR

SEQ ID NO: 20490 - protein, 481 aa, Bacillus sp.
HNGTNATMMQYFEWHLPNDGNHWNRLRDDASNLRNRGITAIWIPPAWKGTSQNDVGYGAYDLYDLGEFNQKGTVRTKYGTRSQLESAIHALKNNGVQVYGDVVMNHKAGADGTEFVTAVEVDPSNRNQETSGTYQIQAYTKFDFPGRGNTYSSFKWRWYHFDGTDWDESRKLNRIYKFSGKAWDWPVDTEFGNYDYLMFADYDMDHPEVVNELRRWGEWYTNTLNLDGFRIDAVKHIKFSFTRDWLTHVRNATGKGDFAVAEFWKNDLGALENYLSYTNWNHSVFDVPLHYNLYNASNYGGNYDMAKLLNGTVVQKHPMHAVTFVDNHDSQPGESLESFVQEWFKPLAYALILTREQGYPSVFYGDYYGIPTHSVPAMKAKIDPILAARQNFAYGTQHDYFDHHNIIGWTREGNTTHPNSGLATIMSDGPGGEKWMYVGQNKAGQVWHDITGNKPGTVTINADGWAMFSVNKGSVSIWVKR

SEQ ID NO: 20491 - protein, 481 aa, Bacillus sp.
HNGTNATMMQYFEWHLPNDGNHWNRLRDDASNLRNRGITAIWIPPAWKGTSQNDVGYGAYDLYDLGEFNQKGTVRTKYGTRSQLESAIHALKNNGVQVYGDVVMNHKAGADGTEFVDAVEVDPSNRNQETSGTYQIQAYTKFDFPGRGNTYSSFKWRWYHFDGTDWDESRKLNRIYKFDGKQWDWPVDTEFGNYDYLMFADYDMDHPEVVNELRRWGEWYTNTLNLDGFRIDAVKHIKFQFTRDWLTHVRNATGKGMFAVAEFWKNDLGALENYLSYTNWNHSVFDVPLHYNLYNASNSRGNYDMAKLLNGTVVQKHPMHAVTFVDNHDSQPGESLESFVQEWFKPLAYALILTREQGYPSVFYGDYYGIPTHSVPAMKAKIDPILAARQNFAYGTQHDYFDHHNIIGWTREGNTTHPNSGLATIMSDGPGGEKWMYVGQNKAGQVWHDITGNKPGTVTINADGWANFSVNKGSVSIWVKR

SEQ ID NO: 20492 - protein, 481 aa, Bacillus sp.
HNGTNATMMQYFEWHLPNDGNHWNRLRDDASNLRNRGITAIWIPPAWKGTSQNDVGYGAYDLYDLGEFNQKGTVRTKYGTRSQLESAIHALKNNGVQVYGDVVMNHKAGADGTEFVTAVEVDPSNRNQETSGTYQIQAYTKFDFPGRGNTYSSFKWRWYHFDGTDWDESRKLNRIYKFSGKQWDWPVDTEFGNYDYLMFADLDMDHPEVVNELRRWGEWYTNTLNLDGFRIDAVKHIKFSFTRDWLTHVRNATGKGDFAVAEFWKNDLGALENYLSYTNWNHSVFDVPLHYNLYNASNTGGNYDMAKLLNGTVVQKHPMHAVTFVDNHDSQPGESLESFVQEWFKPLAYALILTREQGYPSVFYGDYYGIPTHSVPAMKAKIDPILAARQNFAYGTQHDYFDHHNIIGWTREGNTTHPNSGLATIMSDGPGGEKWMYVGQNKAGQVWHDITGNKPGTVTINADGWANFSVNKGSVSIWVKR

SEQ ID NO: 20493 - protein, 481 aa, Bacillus sp.
HNGTNATMMQYFEWHLPNDGNHWNRLRDDASNLRNRGITAIWIPPAWKGTSQNDVGYGAYDLYDLGEFNQKGTVRTKYGTRSQLESAIHALKNNGVQVYGDVVMNHKAGADGTEFVTAVEVDPSNRNQETSGTYQIQAYTKFDFPGRGNTYSSFKWRWYHFDGTDWDESRKLNRIYKFSGKAWDWPVDTEFGNYDYLMFADYDMDHPEVVNELRRWGEWYTNTLNLDGFRIDAVKHIKFSFTRDWLTHVRNATGKGDFAVAEFWKNDLGALENYLSYTNWNHSVFDVPLHYNLYNASNSRGNYDMAKLLNGTVVQKHPMHAVTFVDNHDSQPGESLESFVQEWFKPLAYALILTREQGVPSVFYGDYYGIPTHSVPAMKAKIDPILAARQNFAYGTQHDYFDHHNIIGWTREGNTTHPNSGLATIMSDGPGGEKWMYVGQNKAGQVWHDITGNKPGTVTINADGWANFSVNKGSVSIWVKR

SEQ ID NO: 20494 - protein, 481 aa, Bacillus sp.
HNGTNATMMQYFEWHLPNDGNHWNRLRDDASNLRNRGITAIWIPPAWKGTSQNDVGYGAYDLYDLGEFNQKGTVRTKYGTRSQLESAIHALKNNGVQVYGDVVMNHKAGADGTEFVTAVEVDPSNRNQETSGTYQIQAYTKFDFPGRGNTYSSFKWRWYHFDGTDWDESRKLNRIYKFDGKAWDWPVDTEFGNYDYLMFADLDMDHPEVVNELRRWGEWYTNTLNLDGFRIDAVKHIKFSFTRDWLTHVRNATGKGDFAVAEYWKNDLGALENYLSYTNWNHSVFDVPLHYNLYNASNTGGNYDMAKLLNGTVVQKHPMHAVTFVDNHDSQPGESLESFVQEWFKPLAYALILTREQGYPSVFYGDYYGIPTHSVPAMKAKIDPILAARQNFAYGTQHDYFDHHNIIGWTREGNTTHPNSGLATIMSDGPGGEKWMYVGQNKAGQVWHDITGNKPGTVTINADGWANFSVNKGSVSIWVKR

SEQ ID NO: 20495 - protein, 481 aa, Bacillus sp.
HGGTNATMMQYFEWHLPNDGNHWNRLRDDASNLRNRGITAIWIPPAWKGTSQNDVGYGAYDLYDLGEFNQKGTVRTKYGTRSQLESAIHALKNNGVQVYGDVVMNHKAGADGTEFVTAVEVDPSNRNQETSGTYQIVAYTKFDFPGRGNTYSSFKWRWYHFDGTDWDESRKLNRIYKFSGKAWDWPVDTEFGNYDYLMFADYDMDHPEVVNELRRWGEWYTNTLNLDGFRIDAVKHIKFSFTRDWLTHVRNATGKGMFAVAEFWKNDLGALENYLSYTNWNHSVFDVPLHYNLYNASNSRGNYDMAKLLNGTVVQKHPMHAVTFVDNHDSQPGESLESFVQEWFKPLAYALILTREQGYPSVFYGDYYGIPTHSVPAMKAKIDPILAARQNFAYGTQHDYFDHHNIIGWTREGNTTAPNSGLATIMSDGPGGEKWMYVGQNKAGQVWHDITGNKPGTVTINADGWANFSVNGASVSIWVKR

SEQ ID NO: 20496 - protein, 481 aa, Bacillus sp.
HGGTNATMMQYFEWHLPNDGNHWNRLRDDASNLRNRGITAIWIPPAWKGTSQNDVGYGAYDLYDLGEFNQKGTVRTKYGTRSQLESAIHALKNNGVQVYGDVVMNHKAGADGTEFVTAVEVDPSNRNQETSGTYQIQAYTKFDFPGRGNTYSSFKWRWYHFDGTDWDESRKLNRIYKFSGKAWDWPVDTEFGNYDYLMFADYDMDHPEVVNELRRWGEWYTNTLNLDGFRIDAVKHIKFSFTRDWLTHVRNATGKGMFAVAEFWKNDLGALENYLSYTNWNHSVFDVPLHYNLYNASNTGGNYDMAKLLNGTVVQKHPMHAVTFVDNHDSQPGESLESFVQEWFKPLAYALILTREQGYPSVFYGDYYGIPTHSVPAMKAKIDPILAARQNFAYGTQHDYFDHHNIIGWTREGNTTAPNSGLATIMSDGPGGEKWMYVGQNKAGQVWHDITGNKPGTVTINADGWANFSVNKGSVSIWVKR

SEQ ID NO: 20497 - protein, 481 aa, Bacillus sp.
HNGTNATMMQYFEWHLPNDGNHWNRLRDDASNLRNRGITAIWIPPAWKGTSQNDVGYGAYDLYDLGEFNQKGTVRTKYGTRSQLESAIHALKNNGVQVYGDVVMNHKAGADGTEFVDAVEVDPSNRNQETSGTYQIQAYTKFDFPGRGNTYSSFKWRWYHFDGTDWDESRKLNRIYKFTGKQWDWPVDTEFGNYDYLMFADLDMDHPEVVNELRRWGEWYTNTLNLDGFRIDAVKHIKFSFTRDWLTHVRNATGKGMFAVAEYWKNDLGALENYLSYTNWNHSVFDVPLHYNLYNASNSRGNYDMAKLLNGTVVQKHPMHAVTFVDNHDSQPGESLESFVQEWFKPLAYALILTREQGYPSVFYGDYYGIPTHSVPAMKAKIDPILAARQNFAYGTQHDYFDHHNIIGWTREGNTTHPNSGLATIMSDGPGGEKWMYVGQNKAGQVWHDITGNKPGTVTINADGWANFSVNKGSVSIWVKR

SEQ ID NO: 20498 - protein, 481 aa, Bacillus sp.
HGGTNATMMQYFEWHLPNDGNHWNRLRDDASNLRNRGITAIWIPPAWKGTSQNDVGYGAYDLYDLGEFNQKGTVRTKYGTRSQLESAIHALKNNGVQVYGDVVMNHKAGADGTEFVTAVEVDPSNRNQETSGTYQIQAYTKFDFPGRGNTYSSFKWRWYHFDGTDWDESRKLNRIYKFSGKAWDWPVDTEFGNYDYLMFADYDMDHPEVVNELRRWGEWYTNTLNLDGFRIDAVKHIKFSFTRDWLTHVRNATGKGMFAVAEFWKNDLGALENYLSYTNWNHSVFDVPLHYNLYNASNSRGNYDMAKLLNGTVVQKHPMHAVTFVDNHDSQPGESLESFVQEWFKPLAYALILTREQGYPSVFYGDYYGIPTHSVPAMKAKIDPILEARQWFAYGTQHDYFDHHNIIGWTREGNTTAPNSGLATIMSDGPGGEKWMYVGQNKAGQVWHDITGNKPGTVTINADGWANFSVNKGSVSIWVKR

SEQ ID NO: 20499 - protein, 481 aa, Bacillus sp.
HDGTNATMMQYFEWHLPNDGNHWNRLRDDASNLRNRGITAIWIPPAWKGTSQNDVGYGAYDLYDLGEFNQKGTVRTKYGTRSQLESAIHALKNNGVQVYGDVVMNHKAGADGTEFVTAVEVDPSNRNQETSGTYQIQAYTKFDFPGRGNTYSSFKWRWYHFDGTDWDESRKLNRIYKFSGKAWDWPVDTEFGNYDYLMFADYDMDHPEVVNELRRWGEWYYNTLNLDGFRIDAVKHIKFSFTRDWLTHVRNATGKGMFAVAEFWKNDLGALENYLSYTNWNHSVFDVPLHYNLYNASNSRGNYDMAKLLNGTVVQKHPMHAVTFVDNHDSQPGESLESFVQEWFKPLAYALILTREQGYPSVFYGDYYGIPTHSVPAMKAKIDPILAARQNFAYGTQHDYFDHHNIIGWTREGNTTHPNSGLATIMSDGPGGEKWMYVGQNKAGQVWHDITGNKPGTVTINADGWANFSVNKGSVSIWVKR

SEQ ID NO: 20500 - protein, 481 aa, Bacillus sp.
HDGTNATMMQYFEWHLPNDGNHWNRLRDDASNLRNRGITAIWIPPAWKGTSQNDVGYGAYDLYDLGEFNQKGTVRTKYGTRSQLESAIHALKNNGVQVYGDVVMNHKAGADGTEFVTAVEVDPSNRNQETSGTYQIQAYTKFDFPGRGNTYSSFKWRWYHFDGTDWDESRKLNRIYKFSGKAWDWPVDTEFGNYDYLMFADYDMDHPEVVNELRRWGEWYTNTLNLDGFRIDAVKHIKFSFTRDWLTHVRNATGKGMFAVAEFWKNDLGALENYLSYTNWNHSVFDVPLHYNLYNASNTGGNYDMAKLLNGTVVQKHPMHAVTFVDNHDSQPGESLESFVQEWFKPLAYALILTREQGYPSVFYGDYYGIPTHSVPAMKAKIDPILAARQNFAYGTQHDYFDHHNIIGWTREGNTTAPNSGLATIMSDGPGGEKWMYVGQNKAGQVWHDITGNKPGTVTINADGWANFSVNKGSVSIWVKR

SEQ ID NO: 20501 - protein, 481 aa, Bacillus sp.
HNGTNATMMQYFEWHLPNDGNHWNRLRDDASNLRNRGITAIWIPPAWKGTSQNDVGYGAYDLYDLGEFNQKGTVRTKYGTRSQLESAIHALKNNGVQVYGDVVMNHKAGADGTEFVDAVEVDPSNRNQETSGTYQIQAYTKFDFPGRGNTYSSFKWRWYHFDGTDWDESRKLNRIYKFDGKQWDWPVDTEFGNYDYLMFADLDMDHPEVVNELRRWGEWYTNTLNLDGFRIDAVKHIKFSFTRDWLTHVRNATGKGMFAVAEYWKNDLGALENYLSYTNWNHSVFDVPLHYNLYNASNSRGNYDMAKLLNGTVVQKHPMHAVTFVDNHDSQPGESLESFVQEWFKPLAYALILTREQGYPSVFYGDYYGIPTHSVPAMKAKIDPILAARQNFAYGTQHDYFDHHNIIGWTREGNTTHPNSGLATIMSDGPGGEKWMYVGQNKAGQVWHDITGNKPGTVTINADGWANFSVNKGSVSIWVKR

SEQ ID NO: 20502 - protein, 481 aa, Bacillus sp.
HDGTNATMMQYFEWHLPNDGNHWNRLRDDASNLRNRGITAIWIPPAWKGTSQNDVGYGAYDLYDLGEFNQKGTVRTKYGTRSQLESAIHALKNNGVQVYGDVVMNHKAGADGTEFVTAVEVDPSNRNQETSGTYQIQAYTKFDFPGRGNTYSSFKWRWYHFDGTDWDESRKLNRIYKFSGKAWDWPVDTEFGNYDYLMFADYDMDHPEVVNELRRWGEWYTNTLNLDGFRIDAVKHIKFSFTRDWLTHVRNATGKGMFAVAEFWKNDLGALENYLSYTNWNHSVFDVPLHYNLYNASNSRGNYDMAKLLNGTVVQKHPMHAVTFVDNHDSQPGESLESFVQEWFKPLAYALILTREQGYPSVFYGDYYGIPTHSVPAMKAKIDPILAARQNFAYGTQHDYFDHHNIIGWTREGNTTAPNSGLATIMSDGPGGEKWMYVGQNKAGQVWHDITGNKPGTVTINADGWANFSVNKGSVSIWVKR

SEQ ID NO: 20503 - protein, 481 aa, Bacillus sp.
HNGTNATMMQYFEWHLPNDGNHWNRLRDDASNLRNAGITAIWIPPAWKGTSQNDVGYGAYDLYDLGEFNQKGTVRTKYGTRSQLESAIHALKNNGVQVYGDVVMNHKAGADGTEFVTAVEVDPSNRNQETSGTYQIQAYTKFDFPGRGNTYSSFKWRWYHFDGTDWDESRKLNRIYKFSGKAWDWPVDTEFGNYDYLMFADYDMDHPEVVNELRRWGEWYTNTLNLDGFRIDAVKHIKFSFTRDWLTHVRNATGKGDFAVAEFWKNDLGALENYLSYTNWNHSVFDVPLHYNLYNASNSRGNYDMAKLLNGTVVQKHPMHAVTFVDNHDSQPGESLESFVQEWFKPLAYALILTREQGYPSVFYGDYYGIPTHSVPAMKAKIDPILEARQWFAYGTQHDYFDHHNIIGWTREGNTTHPNSGLATIMSDGPGGEKWMYVGQNKAGQVWHDITGNKPGTVTINADGWANFSVNKGSVSIWVKR

SEQ ID NO: 20504 - protein, 481 aa, Bacillus sp.
HNGTNATMMQYFEWHLPNDGNHWNRLRDDASNLRNRGITAIWIPPAWKGTSQNDVGYGAYDLYDLGEFNQKGTVRTKYGTRSQLESAIHALKNNGVQVYGDVVMNHKAGADGTEFVTAVEVDPSNRNQETSGTYQIQAYTKFDFPGRGNTYSSFKWRWYHFDGTDWDESRKLNRIYKFSGKQWDWPVDTEFGNYDYLMFADLDMDHPEVVNELRRWGEWYTNTLNLDGFRIDAVKHIKFSFTRDWLTHVRNATGKGMFAVAEYWKNDLGALENYLSYTNWNHSVFDVPLHYNLYNASNSRGNYDMAKLLNGTVVQKHPMHAVTFVDNHDSQPGESLESFVQEWFKPLAYALILTREQGYPSVFYGDYYGIPTHSVPAMKAKIDPILAARQNFAYGTQHDYFDHHNIIGWTREGNTTHPNSGLATIMSDGPGGEKWMYVGQNKAGQVWHDITGNKPGTVTINADGWANFSVNKGSVSIWVKR

SEQ ID NO: 20505 - protein, 481 aa, Bacillus sp.
HNGTNATMMQYFEWHLPNDGNHWNRLRDDASNLRNRGITAIWIPPAWKGTSQNDVGYGAYDLYDLGEFNQKGTVRTKYGTRSQLESAIHALKNNGVQVYGDVVMNHKAGADGTEFVTAVEVDPSNRNQETSGTYQIQAYTKFDFPGRGNTYSSFKWRWYHFDGTDWDESRKLNRIYKFSGKAWDWPVDTEFGNYDYLMFADYDMDHPEVVNELRRWGEWYFNTLNLDGFRIDAVKHIKFSFTRDWLTHVRNATGKGMFAVAEFWKNDLGALENYLSYTNWNHSVFDVPLHYNLYNASNSRGNYDMAKLLNGTVVQKHPMHAVTFVDNHDSQPGESLESFVQEWFKPLAYALILTREQGYPSVFYGDYYGIPTHSVPAMKAKIDPILAARQNFAYGTQHDYFDHHNIIGWTREGNTTAPNSGLATIMSDGPGGEKWMYVGQNKAGQVWHDITGNKPGTVTINADGWANFSVNKGSVSIWVKR

SEQ ID NO: 20506 - protein, 481 aa, Bacillus sp.
HNGTNATMMQYFEWHLPNDGNHWNRLRDDASNLRNRGITAIWIPPAWKGTSQNDVGYGAYDLYDLGEFNQKGTVRTKYGTRSQLESAIHALKNNGVQVYGDVVMNHKAGADGTEFVTAVEVDPSNRNQETSGTYQIQAYTKFDFPGRGNTYSSFKWRWYHFDGTDWDESRKLNRIYKFSGKQWDWPVDTEFGNYDYLMFADQDMDHPEVVNELRRWGEWYTNTLNLDGFRIDAVKHIKFSFTRDWLTHVRNATGKGMFAVAEYWKNDLGALENYLSYTNWNHSVFDVPLHYNLYNASNSRGNYDMAKLLNGTVVQKHPMHAVTFVDNHDSQPGESLESFVQEWFKPLAYALILTREQGYPSVFYGDYYGIPTHSVPAMKAKIDPILAARQNFAYGTQHDYFDHHNIIGWTREGNTTHPNSGLATIMSDGPGGEKWMYVGQNKAGQVWHDITGNKPGTVTINADGWANFSVNKGSVSIWVKR

SEQ ID NO: 20507 - protein, 481 aa, Bacillus sp.
HNGTNATMMQYFEWHLPNDGNHWNRLRDDASNLRNRGITAIWIPPAWKGTSQNDVGYGAYDLYDLGEFNQKGTVRTKYGTRSQLESAIHALKNNGVQVYGDVVMNHKAGADGTEFVTAVEVDPSNRNQETLGTYQIQAYTKFDFPGRGNTYSSFKWRWYHFDGTDWDESRKLNRIYKFDGKAWDWPVDTEFGNYDYLMFADYDMDHPEVVNELRRWGEWYTNTLNLDGFRIDAVKHIKFSFTRDWLTHVRNATGKGDFAVAEFWKNDLGALENYLSYTNWNHSVFDVPLHYNLYNASNSRGNYDMAKLLNGTVVQKHPMHAVTFVDNHDSQPGESLESFVQEWFKPLAYALILTREQGYPSVFYGDYYGIPTHSVPAMKAKIDPILAARQNFAYGTQHDYFDHHNIIGWTREGNTTHPNSGLATIMSDGPGGEKWMYVGQNKAGQVWHDITGNKPGTVTINADGWANFSVNKGSVSIWVKR

SEQ ID NO: 20508 - protein, 481 aa, Bacillus sp.
HNGTNATMMQYFEWHLPNDGNHWNRLRDDASNLRNAGITAIWIPPAWKGTSQNDVGYGAYDLYDLGEFNQKGTVRTKYGTRSQLESAIHALKNNGVQVYGDVVMNHKAGADGTEFVTAVEVDPSNRNQETSGTYQIQAYTKFDFPGRGNTYSSFKWRWYHFDGTDWDESRKLNRIYKFSGKAWDWPVDTEFGNYDYLMFADYDMDHPEVVNELRRWGEWYTNTLNLDGFRIDAVKHIKFSFTRDWLTHVRNATGKGMPAVAEFWKNDLGALENYLSYTNWNHSVFDVPLHYNLYNASNSRGNYDMAKLLNGTVVQKHPMHAVTFVDNHDSQPGESLESFVQEWFKPLAYALILTREQGYPSVFYGDYYGIPTHSVPAMKAKIDPILAARQNFAYGTQHDYFDHHNIIGWTREGNTTHPNSGLATIMSDGPGGEKWMYVGQNKAGQVWHDITGNKPGTVTINADGWANFSVNKGSVSIWVKR

SEQ ID NO: 20509 - protein, 481 aa, Bacillus sp.
HNGTNATMMQYFEWHLPNDGNHWNRLRDDASNLRNRGITAIWIPPAWKGTSQNDVGYGAYDLYDLGEFNQKGTVRTKYGTRSQLESAIHALKNNGVQVYGDVVMNHKAGADGTEFVTAVEVDPSNRNQETLGTYQIQAYTKFDFPGRGNTYSSFKWRWYHFDGTDWDESRKLNRIYKFSGKAWDWPVDTEFGNYDYLMFADYDMDHPEVVNELRRWGEWYFNTLNLDGFRIDAVKHIKFSFTRDWLTHVRNATGKGMFAVAEFWKNDLGALENYLSYTNWNHSVFDVPLHYNLYNASNYGGNYDMAKLLNGTVVQKHPMHAVTFVDNHDSQPGESLESFVQEWFKPLAYALILTREQGYPSVFYGDYYGIPTHSVPAMKAKIDPILAARQNFAYGTQHDYFDHHNIIGWTREGNTTHPNSGLATIMSDGPGGEKWMYVGQNKAGQVWHDITGNKPGTVTINADGWANFSVNKGSVSIWVKR

SEQ ID NO: 20510 - protein, 481 aa, Bacillus sp.
HDGTNATMMQYFEWHLPNDGNHWNRLRDDASNLRNRGITAIWIPPAWKGTSQNDVGYGAYDLYDLGEFNQKGTVRTKYGTRSQLESAIHALKNNGVQVYGDVVMNHKAGADGTEFVTAVEVDPSNRNQETSGTYQIQAYTKFDFPGRGNTYSSFKWRWYHFDGTDWDESRKLNRIYKFSGKAWDWPVDTEFGNYDYLMFADYDMDHPEVVNELRRWGEWYTNTLNLDGFRIDAVKHIKFSFTRDWLTHVRNATGKGDFAVAEFWKNDLGALENYLSYTNWNHSVFDVPLHYNLYNASNSRGNYDMAKLLNGTVVQKHPMHAVTFVDNHDSQPGESLESFVQEWFKPLAYALILTREQGYPSVFYGDYYGIPTHSVPAMKAKIDPILAARQNFAYGTQHDYFDHHNIIGWTREGNTTHPNSGLATIMSDGPGGEKWMYVGQNKAGQVWHDITGNKPGTVTINADGWANFSVNKGSVSIWVKR

SEQ ID NO: 20511 - protein, 481 aa, Bacillus sp.
HNGTNATMMQYFEWHLPNDGNHWNRLRDDASNLRNRGITAIWIPPAWKGTSQNDVGYGAYDLYDLGEFNQKGTVRTKYGTRSQLESAIHALKNNGVQVYGDVVMNHKAGADGTEFVTAVEVDPSNRNQETDGTYQIQAYTKFDFPGRGNTYSSFKWRWYHFDGTDWDESRKLNRIYKFSGKAWDWPVDTEFGNYDYLMFADYDMDHPEVVNELRRWGEWYTNTLNLDGFRIDAVKHIKFSFTRDWLTHVRNATGKGMFAVAEFWKNDLGALENYLSYTNWNHSVFDVPLHYNLYNASNSRGNYDMAKLLNGTVVQKHYMHAVTFVDNHDSQPGESLESFVQEWFKPLAYALILTREQGYPSVFYGDYYGIPTHSVPAMKAKIDPILAARQNFAYGTQHDYFDHHNIIGWTREGNTTHPNSGLATIMSDGPGGEKWMYVGQNKAGQVWHDITGNKPGTVTINADGWANFSVNKGSVSIWVKR

SEQ ID NO: 20512 - protein, 481 aa, Bacillus sp.
HNGTNATMMQYFEWHLPNDGNHWNRLRDDASNLRNRGITAIWIPPAWKGTSQNDVGYGAYDLYDLGEFNQKGTVRTKYGTRSQLESAIHALKNNGVQVYGDVVMNHKAGADGTEFVTAVEVDPSNRNQETSGTYQIQAYTKFDFPGRGNTYSSFKWRWYHFDGTDWDESRKLNRIYKFSGKQWDWPVDTEFGNYDYLMFADLDMDHPEVVNELRRWGEWYTNTLNLDGFRIDAVKHIKFSFTRDWLTHVRNATGKGMFAVAEYWKNDLGALENYLSYTNWNHSVFDVPLHYNLYNASNTGGNYDMAKLLNGTVVQKHPMHAVTFVDNHDSQPGESLESFVQEWFKPLAYALILTREQGYPSVFYGDYYGIPTHSVPAMKAKIDPILAARQNFAYGTQHDYFDHHNIIGWTREGNTTHPNSGLATIMSDGPGGEKWMYVGQNKAGQVWHDITGNKPGTVTINADGWANFSVNKGSVSIWVKR

SEQ ID NO: 20513 - protein, 481 aa, Bacillus sp.
HNGTNATMMQYFEWHLPNDGNHWNRLRDDASNLRNRGITAIWIPPAWKGTSQNDVGYGAYDLYDLGEFNQKGTVRTKYGTRSQLESAIHALKNNGVLVYGDVVMNHKAGADGTEFVTAVEVDPSNRNQETSGTYQIQAYTKFDFPGRGNTYSSFKWRWYHFDGTDWDESRKLNRIYKFSGKAWDWPVDTEFGNYDYLMFADYDMDHPEVVNELRRWGEWYTNTLNLDGFRIDAVKHIKFSFTRDWLTHVRNATGKGMFAVAEFWKNDLGALENYLSYTNWNHSVFDVPLHYNLYNASNSRGNYDMAKLLNGTVVQKHPMHAVTFVDNHDSQPGESLESFVQEWFKPLAYALILTREQGYPSVFYGDYYGIPTHSVPAMKAKIDPILEARQDFAYGTQHDYFDHHNIIGWTREGNTTAPNSGLATIMSDGPGGEKWMYVGQNKAGQVWHDITGNKPGTVTINADGWANFSVNKGSVSIWVKR

SEQ ID NO: 20514 - protein, 481 aa, Bacillus sp.
HDGTNATMMQYFEWHLPNDGNHWNRLRDDASNLRNRGITAIWIPPAWKGTSQNDVGYGAYDLYDLGEFNQKGTVRTKYGTRSQLESAIHALKNNGVQVYGDVVMNHKAGADGTEFVTAVEVDPSNRNQETSGTYQIQAYTKFDFPGRGNTYSSFKWRWYHFDGTDWDESRKLNRIYKFDGKAWDWPVDTEFGNYDYLMFADYDMDHPEVVNELRRWGEWYTNTLNLDGFRIDAVKHIKFSFTRDWLTHVRNATGKGMFAVAEFWKNDLGALENYLSYTNWNHSVFDVPLHYNLYNASNTGGNYDMAKLLNGTVVQKHPMHAVTFVDNHDSQPGESLESFVQEWFKPLAYALILTREQGYPSVFYGDYYGIPTHSVPAMKAKIDPILAARQNFAYGTQHDYFDHHNIIGWTREGNTTAPNSGLATIMSDGPGGEKWMYVGQNKAGQVWHDITGNKPGTVTINADGWANFSVNKGSVSIWVKR

SEQ ID NO: 20515 - protein, 481 aa, Bacillus sp.
HNGTNATMMQYFEWHLPNDGNHWNRLRDDASNLRNNGITAIWIPPAWKGTSQNDVGYGAYDLYDLGEFNQKGTVRTKYGTRSQLESAIHALKNNGVQVYGDVVMNHKAGADGTEFVTAVEVDPSNRNQETSGTYQIQAYTKFDFPGRGNTYSSFKWRWYHFDGTDWDESRKLNRIYKFSGKQWDWPVDTEFGNYDYLMFADLDMDHPEVVNELRRWGEWYTNTLNLDGFRIDAVKHIKFSFTRDWLTHVRNATGKGMFAVAEFWKNDLGALENYLSYTNWNHSVFDVPLHYNLYNASNYGGNYDMAKLLNGTVVQKHPMHAVTFVDNHDSQPGESLESFVQEWFKPLAYALILTREQGYPSVFYGDYYGIPTHSVPAMKAKIDPILAARQNFAYGTQHDYFDHHNIIGWTREGNTTHPNSGLATIMSDGPGGEKWMYVGQNKAGQVWHDITGNKPGTVTINADGWANFSVNKGSVSIWVKR

SEQ ID NO: 20516 - protein, 481 aa, Bacillus sp.
HNGTNATMMQYFEWHLPNDGNHWNRLRDDASNLRNRGITAIWIPPAWKGTSQNDVGYGAYDLYDLGEFNQKGTVRTKYGTRSQLESAIHALKNNGVQVYGDVVMNHKAGADGTEFVTAVEVDPSNRNQETSGTYQIQAYTKFDFPGRGNTYSSFKWRWYHFDGTDWDESRKLNRIYKFSGKDWDWPVDTENGNYDYLMFADLDMDHPEVVNELRRWGEWYTNTLNLDGFRIDAVKHIKFSFTRDWLTHVRNATGKGMFAVAEYWKNDLGALENYLSYTNWNHSVFDVPLHYNLYNASNSRGNYDMAKLLNGTVVQKHPMHAVTFVDNHDSQPGESLESFVQEWFKPLAYALILTREQGYPSVFYGDYYGIPTHSVPAMKAKIDPILAARQNFAYGTQHDYFDHHNIIGWTREGNTTYPNSGLATIMSDGPGGEKWMYVGQNKAGQVWHDITGNKPGTVTINADGWANFSVNKGSVSIWVKR

SEQ ID NO: 20517 - protein, 481 aa, Bacillus sp.
HDGTNATMMQYFEWHLPNDGNHWNRLRDDASNLRNRGITAIWIPPAWKGTSQNDVGYGAYDLYDLGEFNQKGTVRTKYGTRSQLESAIHALKNNGVQVYGDVVMNHKAGADGTEFVTAVEVDPSNRNQETSGTYQIQAYTKFDFPGRGNTYSSFKWRWYHFDGTDWDESRKLNRIYKFSGKAWDWPVDTEFGNYDYLMFADYDMDHPEVVNELRRWGEWYTNTLNLDGFRIDAVKHIKFSFTRDWLTHVRNATGKGMFAVAEFWKNDLGALENYLSYTNWNHSVFDVPLHYNLYNASNSRGNYDMAKLLNGTVVQKHPMHAVTFVDNHDSQPGESLESFVQEWFKPLAYALILTREQGYPSVFYGDYYGIPTHSVPAMKAKIDPILEARQWFAYGTQHDYFDHHNIIGWTREGNTTAPNSGLATIMSDGPGGEKWMYVGQNKAGQVWHDITGNKPGTVTINADGWANFSVNKGSVSIWVKR

SEQ ID NO: 20518 - protein, 481 aa, Bacillus sp.
HNGTNATMMQYFEWHLPNDGNHWNRLRDDASNLRNNGITAIWIPPAWKGTSQNDVGYGAYDLYDLGEFNQKGTVRTKYGTRSQLESAIHALKNNGVQVYGDVVMNHKAGADGTEFVTAVEVDPSNRNQETSGTYQIQAYTKFDFPGRGNTYSSFKWRWYHFDGTDWDESRKLNRIYKFSGKAWDWPVDTEFGNYDYLMFADYDMDHPEVVNELRRWGEWYTNTLNLDGFRIDAVKHIKFSFTRDWLTHVRNADGKGMFAVAEFWKNDLGALENYLSYTNWNHSVFDVPLHYNLYNASNSRGNYDMAKLLNGTVVQKHPMHAVTFVDNHDSQPGESLESFVQEWFKPLAYALILTREQGYPSVFYGDYYGIPTHSVPAMKAKIDPILAARQNFAYGTQHDYFDHHNIIGWTREGNTTHPNSGLATIMSDGPGGEKWMYVGQNKAGQVWHDITGNKPGTVTINADGWANFSVNKGSVSIWVKR

SEQ ID NO: 20519 - protein, 481 aa, Bacillus sp.
HNGTNATMMQYFEWHLPNDGNHWNRLRDDASNLRNRGITAIWIPPAWKGTSQNDVGYGAYDLYDLGEFNQKGTVRTKYGTRSQLESAIHALKNNGVQVYGDVVMNHKAGADGTEFVDAVEVDPSNRNQETLGTYQIQAYTKFDFPGRGNTYSSFKWRWYHFDGTDWDESRKLNRIYKFTGKAWDWPVDTEFGNYDYLMFADLDMDHPEVVNELRRWGEWYTNTLNLDGFRIDAVKHIKFSFTRDWLTHVRNATGKGDFAVAEFWKNDLGALENYLSYTNWNHSVFDVPLHYNLYNASNSRGNYDMAKLLNGTVVQKHPMHAVTFVDNHDSQPGESLESFVQEWFKPLAYALILTREQGYPSVFYGDYYGIPTHSVPAMKAKIDPILAARQNFAYGTQHDYFDHHNIIGWTREGNTTHPNSGLATIMSDGPGGEKWMYVGQNKAGQVWHDITGNKPGTVTINADGWANFSVNKGSVSIWVKR

SEQ ID NO: 20520 - protein, 481 aa, Bacillus sp.
HNGTNATMMQYFEWHLPNDGNHWNRLRDDASNLRNAGITAIWIPPAWKGTSQNDVGYGAYDLYDLGEFNQKGTVRTKYGTRSQLESAIHALKNNGVQVYGDVVMNHKAGADGTEFVTAVEVDPSNRNQETSGTYQIQAYTKFDFPGRGNTYSSFKWRWYHFDGTDWDESRKLNRIYKFSGKAWDWPVDTEFGNYDYLMFADYDMDHPEVVNELRRWGEWYTNTLNLDGFRIDAVKHIKFSFTRDWLTHVRNATGKGMFAVAEFWKNDLGALENYLSYTNWNHSVFDVPLHYNLYNASNYGGNYDMAKLLNGTVVQKHPMHAVTFVDNHDSQPGESLESFVQEWFKPLAYALILTREQGYPSVFYGDYYGIPTHSVPAMKAKIDPILEARQDFAYGTQHDYFDHHNIIGWTREGNTTAPNSGLATIMSDGPGGEKWMYVGQNKAGQVWHDITGNKPGTVTINADGWANFSVNKGSVSIWVKR

SEQ ID NO: 20521 - protein, 481 aa, Bacillus sp.
HDGTNATMMQYFEWHLPNDGNHWNRLRDDASNLRNRGITAIWIPPAWKGTSQNDVGYGAYDLYDLGEFNQKGTVRTKYGTRSQLESAIHALKNNGVQVYGDVVMNHKAGADGTEFVTAVEVDPSNRNQETSGTYQIQAYTKFDFPGRGNTYSSFKWRWYHFDGTDWDESRKLNRIYKFSGKAWDWPVDTEFGNYDYLMFADYDMDHPEVVNELRRWGEWYTNTLNLDGFRIDAVKHIKFSFTRDWLTHVRNATGKGMFAVAEFWKNDLGALENYLSYTNWNHSVFDVPLHYNLYNASNSRGNYDMAKLLNGTVVQKHPMHAVTFVDNHDSQPGESLESFVQEWFKPLAYALILTREQGYPSVFYGDYYGIPTHSVPAMKAKIDPILAARQNFAYGTQHDYFDHHNIIGWTREGNTTPPNSGLATIMSDGPGGEKWMYVGQNKAGQVWHDITGNKPGTVTINADGWANFSVNKGSVSIWVKR

SEQ ID NO: 20522 - protein, 481 aa, Bacillus sp.
HNGTNATMMQYFEWHLPNDGNHWNRLRDDASNLRNRGITAIWIPPAWKGTSQNDVGYGAYDLYDLGEFNQKGTVRTKYGTRSQLESAIHALKNNGVQVYGDVVMNHKAGADGTEFVTAVEVDPSNRNQETSGTYQIQAYTKFDFPGRGNTYSSFKWRWYHFDGTDWDESRKLNRIYKFSGKAWDWPVDTEFGNYDYLMFADYDMDHPEVVNELRRWGEWYTNTLNLDGFRIDAVKHIKFSFTRDWLTHVRNATGKGDFAVAEFWKNDLGALENYLSYTNWNHSVFDVPLHYNLYNASNSRGNYDMAKLLNGTVVQKHPMHAVTFVDNHDSQPGESLESFVQEWFKPLAYALILTREQGYPSVFYGDYYGIPTHSVPAMKAKIDPILAARQNFAYGTQHDYFDHHNIIGWTREGNTTAPNSGLATIMSDGPGGEKWMYVGQNKAGQVWHDITGNKPGTVTINADGWANFSVNKGSVSIWVKR

SEQ ID NO: 20523 - protein, 481 aa, Bacillus sp.
HNGTNATMMQYFEWHLPNDGNHWNRLRDDASNLRNRGITAIWIPPAWKGTSQNDVGYGAYDLYDLGEFNQKGTVRTKYGTRSQLESAIHALKNNGVQVYGDVVMNHKAGADGTEFVDAVEVDPSNRNQETSGTYQIQAYTKFDFPGRGNTYSSFKWRWYHFDGTDWDESRKLNRIYKFTGKQWDWEVDTEFGNYDYLMFADLDMDHPEVVNELRRWGEWYTNTLNLDGFRIDAVKHIKFQFTRDWLTHVRNATGKGMFAVAEYWKNDLGALENYLSYTNWNHSVFDVPLHYNLYNASNSRGNYDMAKLLNGTVVQKHPMHAVTFVDNHDSQPGESLESFVQEWFKPLAYALILTREQGYPSVFYGDYYGIPTHSVPAMKAKIDPILAARQNFAYGTQHDYFDHHNIIGWTREGNTTHPNSGLATIMSDGPGGEKWMYVGQNKAGQVWHDITGNKPGTVTINADGWANFSVNKGSVSIWVKR

SEQ ID NO: 20524 - protein, 481 aa, Bacillus sp.
HNGTNATMMQYFEWHLPNDGNHWNRLRDDASNLRNRGITAIWIPPAWKGTSQNDVGYGAYDLYDLGEFNQKGTVRTKYGTRSQLESAIHALKNNGVQVYGDVVMNHKAGADGTEFVTAVEVDPSNRNQETSGTYQIQAYTKFDFPGRGNTYSSFKWRWYHFDGTDWDESRKLNRIYKFQGKQWDWPVDTENGNYDYLMFADLDMDHPEVVNELRRWGEWYTNTLNLDGFRIDAVKHIKFQFTRDWLTHVRNATGKGMFAVAEYWKNDLGALENYLSYTNWNHSVFDVPLHYNLYNASNSRGNYDMAKLLNGTVVQKHPMHAVTFVDNHDSQPGESLESFVQEWFKPLAYALILTREQGYPSVFYGDYYGIPTHSVPAMKAKIDPILAARQNFAYGTQHDYFDHHNIIGWTREGNTTHPNSGLATIMSDGPGGEKWMYVGQNKAGQVWHDITGNKPGTVTINADGWANFSVNKGSVSIWVKR

SEQ ID NO: 20525 - protein, 481 aa, Bacillus sp.
HNGTNATMMQYFEWHLPNDGNHWNRLRDDASNLRNRGITAIWIPPAWKGTSQNDVGYGAYDLYDLGEFNQKGTVRTKYGTRSQLESAIHALKNNGVQVYGDVVMNHKAGADGTEFVTAVEVDPSNRNQETSGTYQIQAYTKFDFPGRGNTYSSFKWRWYHFDGTDWDESRKLNRIYKFSGKDWDWPVDTENGNYDYLMFADLDMDHPEVVNELRRWGEWYTNTLNLDGFRIDAVKHIKFQFTRDWLTHVRNATGKGMFAVAEYWKNDLGALENYLSYTNWNHSVFDVPLHYNLYNASNSRGNYDMAKLLNGTVVQKHPMHAVTFVDNHDSQPGESLESFVQEWFKPLAYALILTREQGYPSVFYGDYYGIPTHSVPAMKAKIDPILAARQNFAYGTQHDYFDHHNIIGWTREGNTTHPNSGLATIMSDGPGGEKWMYVGQNKAGQVWHDITGNKPGTVTINADGWANFSVNKGSVSIWVKR

SEQ ID NO: 20526 - protein, 481 aa, Bacillus sp.
HNGTNATMMQYFEWHLPNDGNHWNRLRDDASNLRNAGITAIWIPPAWKGTSQNDVGYGAYDLYDLGEFNQKGTVRTKYGTRSQLESAIHALKNNGVQVYGDVVMNHKAGADGTEFVTAVEVDPSNRNQETSGTYQIQAYTKFDFPGRGNTYSSFKWRWYHFDGTDWDESRKLNRIYKFSGKAWDWPVDTEFGNYDYLMFADYDMDHPEVVNELRRWGEWYTNTLNLDGFRIDAVKHIKFSFTRDWLTHVRNATGKGMFAVAEFWKNDLGALENYLSYTNWNHSVFDVPLHYNLYNASNYGGNYDMAKLLNGTVVQKHPMHAVTFVDNHDSQPGESLESFVQEWFKPLAYALILTREQGYPSVFYGDYYGIPTHSVPAMKAKIDPILAARQNFAYGTQHDYFDHHNIIGWTREGNTTAPNSGLATIMSDGPGGEKWMYVGQNKAGQVWHDITGNKPGTVTINADGWANFSVNGHSVSIWVKR

SEQ ID NO: 20527 - protein, 481 aa, Bacillus sp.
HNGTNATMMQYFEWHLPNDGNHWNRLRDDASNLRNAGITAIWIPPAWKGTSQNDVGYGAYDLYDLGEFNQKGTVRTKYGTRSQLESAIHALKNNGVQVYGDVVMNHKAGADGTEFVTAVEVDPSNRNQETSGTYQIQAYTKFDFPGRGNTYSSFKWRWYHFDGTDWDESRKLNRIYKFSGKAWDWPVDTEFGNYDYLMFADYDMDHPEVVNELRRWGEWYYNTLNLDGFRIDAVKHIKFSFTRDWLTHVRNATGKGMFAVAEFWKNDLGALENYLSYTNWNHSVFDVPLHYNLYNASNSRGNYDMAKLLNGTVVQKHPMHAVTFVDNHDSQPGESLESFVQEWFKPLAYALILTREQGYPSVFYGDYYGIPTHSVPAMKAKIDPILEARQWFAYGTQHDYFDHHNIIGWTREGNTTHPNSGLATIMSDGPGGEKWMYVGQNKAGQVWHDITGNKPGTVTINADGWANFSVNKGSVSIWVKR

SEQ ID NO: 20528 - protein, 481 aa, Bacillus sp.
HNGTNATMMQYFEWHLPNDGNHWNRLRDDASNLRNAGITAIWIPPAWKGTSQNDVGYGAYDLYDLGEFNQKGTVRTKYGTRSQLESAIHALKNNGVQVYGDVVMNHKAGADGTEFVTAVEVDPSNRNQETSGTYQIQAYTKFDFPGRGNTYSSFKWRWYHFDGTDWDESRKLNRIYKFSGKAWDWPVDTEFGNYDYLMFADYDMDHPEVVNELRRWGEWYYNTLNLDGFRIDAVKHIKFSFTRDWLTHVRNATGKGMFAVAEFWKNDLGALENYLSYTNWNHSVFDVPLHYNLYNASNSRGNYDMAKLLNGTVVQKHPMHAVTFVDNHDSQPGESLESFVQEWFKPLAYALILTREQGYPSVFYGDYYGIPTHSVPAMKAKIDPILAARQNFAYGTQHDYFDHHNIIGWTREGNTTHPNSGLATIMSDGPGGEKWMYVGQNKAGQVWHDITGNKPGTVTINADGWANFSVNKGSVSIWVKR

SEQ ID NO: 20529 - protein, 481 aa, Bacillus sp.
HDGTNATMMQYFEWHLPNDGNHWNRLRDDASNLRNRGITAIWIPPAWKGTSQNDVGYGAYDLYDLGEFNQKGTVRTKYGTRSQLESAIHALKNNGVQVYGDVVMNHKAGADGTEFVTAVEVDPSNRNQETSGTYQIQAYTKFDFPGRGNTYSSFKWRWYHFDGTDWDESRKLNRIYKFSGKAWDWPVDTEFGNYDYLMFADYDMDHPEVVNELRRWGEWYTNTLNLDGFRIDAVKHIKFSFTRDWLTHVRNATGKGMFAVAEFWKNDLGALENYLSYTNWNHSVFDVPLHYNLYNASNSRGNYDMAKLLNGTVVQKHPMHAVTFVDNHDSQPGESLESFVQEWFKPLAYALILTREQGYPSVFYGDYYGIPTHSVPAMKAKIDPILDARQNFAYGTQHDYFDHHNIIGWTREGNTTPPNSGLATIMSDGPGGEKWMYVGQNKAGQVWHDITGNKPGTVTINADGWANFSVNKGSVSIWVKR

SEQ ID NO: 20530 - protein, 481 aa, Bacillus sp.
HNGTNATMMQYFEWHLPNDGNHWNRLRDDASNLRNRGITAIWIPPAWKGTSQNDVGYGAYDLYDLGEFNQKGTVRTKYGTRSQLESAIHALKNNGVQVYGDVVMNHKAGADGTEFVTAVEVDPSNRNQETSGTYQIQAYTKFDFPGRGNTYSSFKWRWYHFDGTDWDESRKLNRIYKFSGKQWDWPVDTEFGNYDYLMFADYDMDHPEVVNELRRWGEWYTNTLNLDGFRIDAVKHIKFSFTRDWLTHVRNATGKGMFAVAEYWKNDLGALENYLSYTNWNHSVFDVPLHYNLYNASNSRGNYDMAKLLNGTVVQKHPMHAVTFVDNHDSQPGESLESFVQEWFKPLAYALILTREQGYPSVFYGDYYGIPTHSVPAMKAKIDPILAARQNFAYGTQHDYFDHHNIIGWTREGNTTHPNSGLATIMSDGPGGEKWMYVGQNKAGQVWHDITGNKPGTVTINADGWANFSVNKGSVSIWVKR

SEQ ID NO: 20531 - protein, 481 aa, Bacillus sp.
HNGTNATMMQYFEWHLPNDGNHWNRLRDDASNLRNNGITAIWIPPAWKGTSQNDVGYGAYDLYDLGEFNQKGTVRTKYGTRSQLESAIHALKNNGVQVYGDVVMNHKAGADGTEFVTAVEVDPSNRNQETSGTYQIQAYTKFDFPGRGNTYSSFKWRWYHFDGTDWDESRKLNRIYKFSGKAWDWPVDTEFGNYDYLMFADYDMDHPEVVNELRRWGEWYTNTLNLDGFRIDAVKHIKFSFTRDWLTHVRNATGKGMFAVAEFWKNDLGALENYLSYTNWNHSVFDVPLHYNLYNASNYGGNYDMAKLLNGTVVQKHPMHAVTFVDNHDSQPGESLESFVQEWFKPLAYALILTREQGYPSVFYGDYYGIPTHSVPAMKAKIDPILAARQNFAYGTQHDYFDHHNIIGWTREGNTTAPNSGLATIMSDGPGGEKWMYVGQNKAGQVWHDITGNKPGTVTINADGWANFSVNGHSVSIWVKR

SEQ ID NO: 20532 - protein, 481 aa, Bacillus sp.
HDGTNATMMQYFEWHLPNDGNHWNRLRDDASNLRNRGITAIWIPPAWKGTSQNDVGYGAYDLYDLGEFNQKGTVRTKYGTRSQLESAIHALKNNGVQVYGDVVMNHKAGADGTEFVTAVEVDPSNRNQETSGTYQIQAYTKFDFPGRGNTYSSFKWRWYHFDGTDWDESRKLNRIYKFSGKAWDWPVDTEFGNYDYLMFADYDMDHPEVVNELRRWGEWYTNTLNLDGFRIDAVKHIKFSFTRDWLTHVRNATGKGMFAVAEFWKNDLGALENYLSYTNWNHSVFDVPLHYNLYNASNSRGNYDMAKLLNGTVVQKHPMWAVTFVDNHDSQPGESLESFVQEWFKPLAYALILTREQGYPSVFYGDYYGIPTHSVPAMKAKIDPILAARQNFAYGTQHDYFDHHNIIGWTREGNTTHPNSGLATIMSDGPGGEKWMYVGQNKAGQVWHDITGNKPGTVTINADGWANFSVNKGSVSIWVKR

SEQ ID NO: 20533 - protein, 481 aa, Bacillus sp.
HNGTNATMMQYFEWHLPNDGNHWNRLRDDASNLRNNGITAIWIPPAWKGTSQNDVGYGAYDLYDLGEFNQKGTVRTKYGTRSQLESAIHALKNNGVQVYGDVVMNHKAGADGTEFVTAVEVDPSNRNQETSGTYQIQAYTKFDFPGRGNTYSSFKWRWYHFDGTDWDESRKLNRIYKFSGKAWDWPVDTEFGNYDYLMFADYDMDHPEVVNELRRWGEWYTNTLNLDGFRIDAVKHIKFSFTRDWLTHVRNATGKGDFAVAEFWKNDLGALENYLSYTNWNHSVFDVPLHYNLYNASNSRGNYDMAKLLNGTVVQKHPMHAVTFVDNHDSQPGESLESFVQEWFKPLAYALILTREQGYPSVFYGDYYGIPTHSVPAMKAKIDPILEARQDFAYGTQHDYFDHHNIIGWTREGNTTHPNSGLATIMSDGPGGEKWMYVGQNKAGQVWHDITGNKPGTVTINADGWANFSVNKGSVSIWVKR

SEQ ID NO: 20534 - protein, 481 aa, Bacillus sp.
HNGTNATMMQYFEWHLPNDGNHWNRLRDDASNLRNRGITAIWIPPAWKGTSQNDVGYGAYDLYDLGEFNQKGTVRTKYGTRSQLESAIHALKNNGVQVYGDVVMNHKAGADGTEFVTAVEVDPSNRNQETSGTYQIQAYTKFDFPGRGNTYSSFKWRWYHFDGTDWDESRKLNRIYKFSGKDWDWPVDTEFGNYDYLMFADLDMDHPEVVNELRRWGEWYTNTLNLDGFRIDAVKHIKFSFTRDWLTHVRNATGKGMFAVAEYWKNDLGALENYLSYTNWNHSVFDVPLHYNLYNASNSRGNYDMAKLLNGTVVQKHPMHAVTFVDNHDSQPGESLESFVQEWFKPLAYALILTREQGYPSVFYGDYYGIPTHSVPAMKAKIDPILAARQNFAYGTQHDYFDHHNIIGWTREGNTTHPNSGLATIMSDGPGGEKWMYVGQNKAGQVWHDITGNKPGTVTINADGWANFSVNKGSVSIWVKR

SEQ ID NO: 20535 - protein, 481 aa, Bacillus sp.
HNGTNATMMQYFEWHLPNDGNHWNRLRDDASNLRNRGITAIWIPPAWKGTSQNDVGYGAYDLYDLGEFNQKGTVRTKYGTRSQLESAIHALKNNGVQVYGDVVMNHKAGADGTEFVTAVEVDPSNRNQETSGTYQIQAYTKFDFPGRGNTYSSFKWRWYHFDGTDWDESRKLNRIYKFSGKQWDWPVDTEFGNYDYLMFADYDMDHPEVVNELRRWGEWYTNTLNLDGFRIDAVKHIKFSFTRDWLTHVRNATGKGWFAVAEFWKNDLGALENYLSYTNWNHSVFDVPLHYNLYNASNSRGNYDMAKLLNGTVVQKHPMHAVTFVDNHDSQPGESLESFVQEWFKPLAYALILTREQGYPSVFYGDYYGIPTHSVPAMKAKIDPILAARQNFAYGTQHDYFDHHNIIGWTREGNTTHPNSGLATIMSDGPGGEKWMYVGQNKAGQVWHDITGNKPGTVTINADGWANFSVNGASVSIWVKR

SEQ ID NO: 20536 - protein, 481 aa, Bacillus sp.
HNGTNATMMQYFEWHLPNDGNHWNRLRDDASNLRNRGITAIWIPPAWKGTSQNDVGYGAYDLYDLGEFNQKGTVRTKYGTRSQLESAIHALKNNGVQVYGDVVMNHKAGADGTEFVTAVEVDPSNRNQETSGTYQIQAYTKFDFPGRGNTYSSFKWRWYHFDGTDWDESRKLNRIYKFSGKAWDWPVDTEFGNYDYLMFADYDMDHPEVVNELRRWGEWYTNTLNLDGFRIDAVKHIKFSFTRDWLTHVRNATGKGDFAVAEFWKNDLGALENYLSYTNWNHSVFDVPLHYNLYNASNSRGNYDMAKLLNGTVVQKHPMHAVTFVDNHDSQPGESLESFVQEWFKPLAYALILTREQGYPSVFYGDYNGIPTHSVPAMKAKIDPILAARQNFAYGTQHDYFDHHNIIGWTREGNTTHPNSGLATIMSDGPGGEKWMYVGQNKAGQVWHDITGNKPGTVTINADGWANFSVNKGSVSIWVKR

SEQ ID NO: 20537 - protein, 481 aa, Bacillus sp.
HNGTNATMMQYFEWHLPNDGNHWNRLRDDASNLRNRGITAIWIPPAWKGTSQNDVGYGAYDLYDLGEFNQKGTVRTKYGTRSQLESAIHALKNNGVQVYGDVVMNHKAGADGTEFVTAVEVDPSNRNQETSGTYQIQAYTKFDFPGRGNTYSSFKWRWYHFDGTDWDESRKLNRIYKFQGKQWDWPVDTEFGNYDYLMFADLDMDHPEVVNELRRWGEWYTNTLNLDGFRIDAVKHIKFSFTRDWLTHVRNATGKGMFAVAEYWKNDLGALENYLSYTNWNHSVFDVPLHYNLYNASNSRGNYDMAKLLNGTVVQKHPMHAVTFVDNHDSQPGESLESFVQEWFKPLAYALILTREQGYPSVFYGDYYGIPTHSVPAMKAKIDPILAARQNFAYGTQHDYFDHHNIIGWTREGNTTHPNSGLATIMSDGPGGEKWMYVGQNKAGQVWHDITGNKPGTVTINADGWANFSVNKGSVSIWVKR

SEQ ID NO: 20538 - protein, 481 aa, Bacillus sp.
HNGTNATMMQYFEWHLPNDGNHWNRLRDDASNLRNRGITAIWIPPAWKGTSQNDVGYGAYDLYDLGEFNQKGTVRTKYGTRSQLESAIHALKNNGVQVYGDVVMNHKAGADGTEFVTAVEVDPSNRNQETSGTEQIQAYTKFDFPGRGNTYSSFKWRWYHFDGTDWDESRKLNRIYKFSGKAWDWPVDTEFGNYDYLMFADYDMDHPEVVNELRRWGEWYTNTLNLDGFRIDAVKHIKFSFTRDWLTHVRNATGKGMFAVAEFWKNDLGALENYLSYTNWNHSVFDVPLHYNLYNASNTGGNYDMAKLLNGTVVQKHPMHAVTFVDNHDSQPGESLESFVQEWFKPLAYALILTREQGYPSVFYGDYNGIPTHSVPAMKAKIDPILAARQNFAYGTQHDYFDHHNIIGWTREGNTTHPNSGLATIMSDGPGGEKWMYVGQNKAGQVWHDITGNKPGTVTINADGWANFSVNKGSVSIWVKR

SEQ ID NO: 20539 - protein, 481 aa, Bacillus sp.
HNGTNATMMQYFEWHLPNDGNHWNRLRDDASNLRNRGITAIWIPPAWKGTSQNDVGYGAYDLYDLGEFNQKGTVRTKYGTRSQLESAIHALKNNGVQVYGDVVMNHKAGADGTEFVTAVEVDPSNRNQETSGTEQIQAYTKFDFPGRGNTYSSFKWRWYHFDGTDWDESRKLNRIYKFSGKAWDWPVDTEFGNYDYLMFADYDMDHPEVVNELRRWGEWYFNTLNLDGFRIDAVKHIKFSFTRDWLTHVRNATGKGMFAVAEFWKNDLGALENYLSYTNWNHSVFDVPLHYNLYNASNSRGNYDMAKLLNGTVVQKHPMHAVTFVDNHDSQPGESLESFVQEWFKPLAYALILTREQGYPSVFYGDYYGIPTHSVPAMKAKIDPILAARQNFAYGTQHDYFDHHNIIGWTREGNTTHPNSGLATIMSDGPGGEKWMYVGQNKAGQVWHDITGNKPGTVTINADGWANFSVNKGSVSIWVKR

SEQ ID NO: 20540 - protein, 481 aa, Bacillus sp.
HGGTNATMMQYFEWHLPNDGNHWNRLRDDASNLRNRGITAIWIPPAWKGTSQNDVGYGAYDLYDLGEFNQKGTVRTKYGTRSQLESAIHALKNNGVQVYGDVMMNHKAGADGTEFVTAVEVDPSNRNQETSGTYQIQAYTKFDFPGRGNTYSSFKWRWYHFDGTDWDESRKLNRIYKFSGKAWDWPVDTEFGNYDYLMFADYDMDHPEVVNELRRWGEWYTNTLNLDGFRIDAVKHIKFSFTRDWLTHVRNATGKGMFAVAEFWKNDLGALENYLSYTNWNHSVFDVPLHYNLYNASNYGGNYDMAKLLNGTVVQKHPMHAVTFVDNHDSQPGESLESFVQEWFKPLAYALILTREQGYPSVFYGDYYGIPTHSVPAMKAKIDPILEARQWFAYGTQHDYFDHHNIIGWTREGNTTHPNSGLATIMSDGPGGEKWMYVGQNKAGQVWHDITGNKPGTVTINADGWANFSVNKGSVSIWVKR

SEQ ID NO: 20541 - protein, 481 aa, Bacillus sp.
HNGTNATMMQYFEWHLPNDGNHWNRLRDDASNLRNRGITAIWIPPAWKGTSQNDVGYGAYDLYDLGEFNQKGTVRTKYGTRSQLESAIHALKNNGVQVYGDVVMNHKAGADGTEFVDAVEVDPSNRNQETSGTYQIQAYTKFDFPGRGNTYSSFKWRWYHFDGTDWDESRKLNRIYKFDGKQWDWPVDTEFGNYDYLMFADYDMDHPEVVNELRRWGEWYTNTLNLDGFRIDAVKHIKFSFTRDWLTHVRNATGKGMFAVAEYWKNDLGALENYLSYTNWNHSVFDVPLHYNLYNASNSRGNYDMAKLLNGTVVQKHPMHAVTFVDNHDSQPGESLESFVQEWFKPLAYALILTREQGYPSVFYGDYYGIPTHSVPAMKAKIDPILAARQNFAYGTQHDYFDHHNIIGWTREGNTTHPNSGLATIMSDGPGGEKWMYVGQNKAGQVWHDITGNKPGTVTINADGWANFSVNKGSVSIWVKR

SEQ ID NO: 20542 - protein, 481 aa, Bacillus sp.
HDGTNATMMQYFEWHLPNDGNHWNRLRDDASNLRNRGITAIWIPPAWKGTSQNDVGYGAYDLYDLGEFNQKGTVRTKYGTRSQLESAIHALKNNGVQVYGDVVMNHKAGADGTEFVTAVEVDPSNRNQETSGTYQIQAYTKFDFPGRGNTYSSFKWRWYHFDGTDWDESRKLNRIYKFSGKAWDWPVDTEFGNYDYLMFADYDMDHPEVVNELRRWGEWYTNTLNLDGFRIDAVKHIKFSFTRDWLTHVRNATGKGMFAVAEFWKNDLGALENYLSYTNWNHSVFDVPLHYNLYNASNSRGNYDMAKLLNGTVVQKHPMHAVTFVDNHDSQPGESLESFVQEWFKPLAYALILTREQGYPSVFYGDYYGIPTHSVPAMKAKIDPILEARQDFAYGTQHDYFDHHNIIGWTREGNTTAPNSGLATIMSDGPGGEKWMYVGQNKAGQVWHDITGNKPGTVTINADGWANFSVNKGSVSIWVKR

SEQ ID NO: 20543 - protein, 481 aa, Bacillus sp.
HNGTNATMMQYFEWHLPNDGNHWNRLRDDASNLRNRGITAIWIPPAWKGTSQNDVGYGAYDLYDLGEFNQKGTVRTKYGTRSQLESAIHALKNNGVQVYGDVVMNHKAGADGTEFVTAVEVDPSNRNQETSGTYQIQAYTKFDFPGRGNTYSSFKWRWYHFDGTDWDESRKLNRIYKFQGKQWDWPVDTEFGNYDYLMFADYDMDHPEVVNELRRWGEWYTNTLNLDGFRIDAVKHIKFSFTRDWLTHVRNATGKGMFAVAEYWKNDLGALENYLSYTNWNHSVFDVPLHYNLYNASNSRGNYDMAKLLNGTVVQKHPMHAVTFVDNHDSQPGESLESFVQEWFKPLAYALILTREQGYPSVFYGDYYGIPTHSVPAMKAKIDPILAARQNFAYGTQHDYFDHHNIIGWTREGNTTHPNSGLATIMSDGPGGEKWMYVGQNKAGQVWHDITGNKPGTVTINADGWANFSVNKGSVSIWVKR

SEQ ID NO: 20544 - protein, 481 aa, Bacillus sp.
HNGTNATMMQYFEWHLPNDGNHWNRLRDDASNLRNRGITAIWIPPAWKGTSQNDVGYGAYDLYDLGEFNQKGTVRTKYGTRSQLESAIHALKNNGVQVYGDVVMNHKAGADGTEFVTAVEVDPSNRNQETSGTYQIQAYTKFDFPGRGNTYSSFKWRWYHFDGTDWDESRKLNRIYKFSGKQWDWPVDTEFGNYDYLMFADLDMDHPEVVNELRRWGEWYYNTLNLDGFRIDAVKHIKFSFTRDWLTHVRNATGKEMFAVAEYWKNDLGALENYLSYTNWNHSVFDVPLHYNLYNASNSRGNYDMAKLLNGTVVQKHPMHAVTFVDNHDSQPGESLESFVQEWFKPLAYALILTREQGYPSVFYGDYYGIPTHSVPAMKAKIDPILAARQNFAYGTQHDYFDHHNIIGWTREGNTTHPNSGLATIMSDGPGGEKWMYVGQNKAGQVWHDITGNKPGTVTINADGWANFSVNGASVSIWVKR

SEQ ID NO: 20545 - protein, 481 aa, Bacillus sp.
HNGTNATMMQYFEWHLPNDGNHWNRLRDDASNLRNRGITAIWIPPAWKGTSQNDVGYGAYDLYDLGEFNQKGTVRTKYGTRSQLESAIHALKNNGVQVYGDVVMNHKAGADGTEFVTAVEVDPSNRNQETSGTYQIQAYTKFDFPGRGNTYSSFKWRWYHFDGTDWDESRKLNRIYKFTGKQWDWPVDTEFGNYDYLMFADYDMDHPEVVNELRRWGEWYTNTLNLDGFRIDAVKHIKFSFTRDWLTHVRNATGKGMFAVAEYWKNDLGALENYLSYTNWNHSVFDVPLHYNLYNASNSRGNYDMAKLLNGTVVQKHPMHAVTFVDNHDSQPGESLESFVQEWFKPLAYALILTREQGYPSVFYGDYYGIPTHSVPAMKAKIDPILAARQNFAYGTQHDYFDHHNIIGWTREGNTTHPNSGLATIMSDGPGGEKWMYVGQNKAGQVWHDITGNKPGTVTINADGWANFSVNKGSVSIWVKR

SEQ ID NO: 20546 - protein, 481 aa, Bacillus sp.
HNGTNATMMQYFEWHLPNDGNHWNRLRDDASNLRNNGITAIWIPPAWKGTSQNDVGYGAYDLYDLGEFNQKGTVRTKYGTRSQLESAIHALKNNGVQVYGDVVMNHKAGADGTEFVTAVEVDPSNRNQETSGTYQIQAYTKFDFPGRGNTYSSFKWRWYHFDGTDWDESRKLNRIYKFSGKQWDWPVDTEFGNYDYLMFADYDMDHPEVVNELRRWGEWYTNTLNLDGFRIDAVKHIKFSFTRDWLTHVRNATGKGMFAVAEFWKNDLGALENYLSYTNWNHSVFDVPLHYNLYNASNYGGNYDMAKLLNGTVVQKHPMHAVTFVDNHDSQPGESLESFVQEWFKPLAYALILTREQGYPSVFYGDYYGIPTHSVPAMKAKIDPILAARQNFAYGTQHDYFDHHNIIGWTREGNTTHPNSGLATIMSDGPGGEKWMYVGQNKAGQVWHDITGNKPGTVTINADGWANFSVNKGSVSIWVKR

SEQ ID NO: 20547 - protein, 481 aa, Bacillus sp.
HNGTNATMMQYFEWHLPNDGNHWNRLRDDASNLRNAGITAIWIPPAWKGTSQNDVGYGAYDLYDLGEFNQKGTVRTKYGTRSQLESAIHALKNNGVQVYGDVVMNHKAGADGTEFVTAVEVDPSNRNQETSGTYQIQAYTKFDFPGRGNTYSSFKWRWYHFDGTDWDESRKLNRIYKFSGKAWDWPVDTEFGNYDYLMFADYDMDHPEVVNELRRWGEWYTNTLNLDGFRIDAVKHIKFSFTRDWLTHVRNATGKGMFAVAEFWKNDLGALENYLSYTNWNHSVFDVPLHYNLYNASNTGGNYDMAKLLNGTVVQKHPMHAVTFVDNHDSQPGESLESFVQEWFKPLAYALILTREQGYPSVFYGDYYGIPTHSVPAMKAKIDPILAARQNFAYGTQHDYFDHHNIIGWTREGNTTAPNSGLATIMSDGPGGEKWMYVGQNKAGQVWHDITGNKPGTVTINADGWANFSVNKGSVSIWVKR

SEQ ID NO: 20548 - protein, 481 aa, Bacillus sp.
HNGTNATMMQYFEWHLPNDGNHWNRLRDDASNLRNNGITAIWIPPAWKGTSQNDVGYGAYDLYDLGEFNQKGTVRTKYGTRSQLESAIHALKNNGVQVYGDVVMNHKAGADGTEFVTAVEVDPSNRNQETSGTYQIQAYTKFDFPGRGNTYSSFKWRWYHFDGTDWDESRKLNRIYKFSGKAWDWPVDTEFGNYDYLMFADYDMDHPEVVNELRRWGEWYTNTLNLDGFRIDAVKHIKFSFTRDWLTHVRNATGKGDFAVAEFWKNDLGALENYLSYTNWNHSVFDVPLHYNLYNASNSRGNYDMAKLLNGTVVQKHPMHAVTFVDNHDSQPGESLESFVQEWFKPLAYALILTREQGYPSVFYGDYYGIPTHSVPAMKAKIDPILEARQNFAYGTQHDYFDHHNIIGWTREGNTTAPNSGLATIMSDGPGGEKWMYVGQNKAGQVWHDITGNKPGTVTINADGWANFSVNKGSVSIWVKR

SEQ ID NO: 20549 - protein, 481 aa, Bacillus sp.
HNGTNATMMQYFEWHLPNDGNHWNRLRDDASNLRNRGITAIWIPPAWKGTSQNDVGYGAYDLYDLGEFNQKGTVRTKYGTRSQLESAIHALKNNGVQVYGDVVMNHKAGADGTEFVTAVEVDPSNRNQETSGTYQIQAYTKFDFPGRGNTYSSFKWRWYHFDGTDWDESRKLNRIYKFSGKAWDWPVDTEFGNYDYLMFADYDMDHPEVVNELRRWGEWYTNTLNLDGFRIDAVKHIKFSFTRDWLTHVRNATGKGMFAVAEFWKNDLGALENYLSYTNWNHSVFDVPLHYNLYNASNSRGNYDMAKLLNGTVVQKHPMWAVTFVDNHDSQPGESLESFVQEWFKPLAYALILTREQGYPSVFYGDYYGIPTHSVPAMKAKIDPILAARQNFAYGTQHDYFDHHNIIGWTREGNTTAPNSGLATIMSDGPGGEKWMYVGQNKAGQVWHDITGNKPGTVTINADGWANFSVLGGSVSIWVKR

SEQ ID NO: 20550 - protein, 481 aa, Bacillus sp.
HNGTNATMMQYFEWHLPNDGNHWNRLRDDASNLRNNGITAIWIPPAWKGTSQNDVGYGAYDLYDLGEFNQKGTVRTKYGTRSQLESAIHALKNNGVQVYGDVVMNHKAGADGTEFVTAVEVDPSNRNQETSGTYQIQAYTKFDFPGRGNTYSSFKWRWYHFDGTDWDESRKLNRIYKFSGKAWDWPVDTEFGNYDYLMFADYDMDHPEVVNELRRWGEWYTNTLNLDGFRIDAVKHIKFSFTRDWLTHVRNATGKGMFAVAEFWKNDLGALENYLSYTNWNHSVFDVPLHYNLYNASNSRGNYDMAKLLNGTVVQKHPMWAVTFVDNHDSQPGESLESFVQEWFKPLAYALILTREQGYPSVFYGDYYGIPTHSVPAMKAKIDPILEARQDFAYGTQHDYFDHHNIIGWTREGNTTHPNSGLATIMSDGPGGEKWMYVGQNKAGQVWHDITGNKPGTVTINADGWANFSVNKGSVSIWVKR

SEQ ID NO: 20551 - protein, 481 aa, Bacillus sp.
HNGTNATMMQYFEWHLPNDGNHWNRLRDDASNLRNNGITAIWIPPAWKGTSQNDVGYGAYDLYDLGEFNQKGTVRTKYGTRSQLESAIHALKNNGVQVYGDVVMNHKAGADGTEFVTAVEVDPSNRNQETSGTYQIQAYTKFDFPGRGNTYSSFKWRWYHFDGTDWDESRKLNRIYKFSGKAWDWPVDTEFGNYDYLMFADYDMDHPEVVNELRRWGEWYTNTLNLDGFRIDAVKHIKFSFTRDWLTHVRNATGKGMFAVAEFWKNDLGALENYLSYTNWNHSVFDVPLHYNLYNASNTGGNYDMAKLLNGTVVQKHPMHAVTFVDNHDSQPGESLESFVQEWFKPLAYALILTREQGYPSVFYGDYYGIPTHSVPAMKAKIDPILEARQDFAYGTQHDYFDHHNIIGWTREGNTTAPNSGLATIMSDGPGGEKWMYVGQNKAGQVWHDITGNKPGTVTINADGWANFSVNKGSVSIWVKR

SEQ ID NO: 20552 - protein, 481 aa, Bacillus sp.
HNGTNATMMQYFEWHLPNDGNHWNRLRDDASNLRNRGITAIWIPPAWKGTSQNDVGYGAYDLYDLGEFNQKGTVRTKYGTRSQLESAIHALKNNGVQVYGDVVMNHKAGADGTEFVTAVEVDPSNRNQETSGTYQIQAYTKFDFPGRGNTYSSFKWRWYHFDGTDWDESRKLNRIYKFDGKAWDWPVDTEFGNYDYLMFADLDMDHPEVVNELRRWGEWYTNTLNLDGFRIDAVKHIKFSFTRDWLTHVRNATGKGDFAVAEFWKNDLGALENYLSYTNWNHSVFDVPLHYNLYNASNYGGNYDMAKLLNGTVVQKHPMHAVTFVDNHDSQPGESLESFVQEWFKPLAYALILTREQGYPSVFYGDYYGIPTHSVPAMKAKIDPILAARQNFAYGTQHDYFDHHNIIGWTREGNTTHPNSGLATIMSDGPGGEKWMYVGQNKAGQVWHDITGNKPGTVTINADGWAMFSVNKGSVSIWVKR

SEQ ID NO: 20553 - protein, 481 aa, Bacillus sp.
HNGTNATMMQYFEWHLPNDGNHWNRLRDDASNLRNRGITAIWIPPAWKGTSQNDVGYGAYDLYDLGEFNQKGTVRTKYGTRSQLESAIHALKNNGVQVYGDVVMNHKAGADGTEFVTAVEVDPSNRNQETSGTYQIQAYTKFDFPGRGNTYSSFKWRWYHFDGTDWDESRKLNRIYKFSGKAWDWPVDTEFGNYDYLMFADYDMDHPEVVNELRRWGEWYTNTLNLDGFRIDAVKHIKFSFTRDWLTHVRNATGKGMFAVAEFWKNDLGALENYLSYTNWNHSVFDVPLHYNLYNASNSRGNYDMAKLLNGTVVQKHHMHAVTFVDNHDSQPGESLESFVQEWFKPLAYALILTREYGYPSVFYGDYYGIPTHSVPAMKAKIDPILAARQNFAYGTQHDYFDHHNIIGWTREGNTTHPNSGLATIMSDGPGGEKWMYVGQNKAGQVWHDITGNKPGTVTINADGWANFSVNGASVSIWVKR

SEQ ID NO: 20554 - protein, 481 aa, Bacillus sp.
HNGTNATMMQYFEWHLPNDGNHWNRLRDDASNLRNRGITAIWIPPAWKGTSQNDVGYGAYDLYDLGEFNQKGTVRTKYGTRSQLESAIHALKNNGVQVYGDVVMNHKAGADGTEFVDAVEVDPSNRNQETSGTYQIQAYTKFDFPGRGNTYSSFKWRWYHFDGTDWDESRKLNRIYKFTGKAWDWPVDTEFGNYDYLMFADLDMDHPEVVNELRRWGEWYTNTLNLDGFRIDAVKHIKFSFTRDWLTHVRNATGKGDFAVAEFWKNDLGALENYLSYTNWNHSVFDVPLHYNLYNASNYGGNYDMAKLLNGTVVQKHPMHAVTFVDNHDSQPGESLESFVQEWFKPLAYALILTREQGYPSVFYGDYYGIPTHSVPAMKAKIDPILAARQNFAYGTQHDYFDHHNIIGWTREGNTTHPNSGLATIMSDGPGGEKWMYVGQNKAGQVWHDITGNKPGTVTINADGWAAFSVNKGSVSIWVKR

SEQ ID NO: 20555 - protein, 481 aa, Bacillus sp.
HNGTNATMMQYFEWHLPNDGNHWNRLRDDASNLRNAGITAIWIPPAWKGTSQNDVGYGAYDLYDLGEFNQKGTVRTKYGTRSQLESAIHALKNNGVQVYGDVVMNHKAGADGTEFVTAVEVDPSNRNQETSGTYQIQAYTKFDFPGRGNTYSSFKWRWYHFDGTDWDESRKLNRIYKFSGKAWDWPVDTEFGNYDYLMFADYDMDHPEVVNELRRWGEWYTNTLNLDGFRIDAVKHIKFSFTRDWLTHVRNATGKGMFAVAEFWKNDLGALENYLSYTNWNHSVFDVPLHYNLYNASNTGGNYDMAKLLNGTVVQKHPMHAVTFVDNHDSQPGESLESFVQEWFKPLAYALILTREQGYPSVFYGDYYGIPTHSVPAMKAKIDPILAARQNFAYGTQHDYFDHHNIIGWTREGNTTAPNSGLATIMSDGPGGEKWMYVGQNKAGQVWHDITGNKPGTVTINADGWANFSVNGASVSIWVKR

SEQ ID NO: 20556 - protein, 481 aa, Bacillus sp.
HNGTNATMMQYFEWHLPNDGNHWNRLRDDASNLRNNGITAIWIPPAWKGTSQNDVGYGAYDLYDLGEFNQKGTVRTKYGTRSQLESAIHALKNNGVQVYGDVVMNHKAGADGTEFVTAVEVDPSNRNQETSGTYQIQAYTKFDFPGRGNTYSSFKWRWYHFDGTDWDESRKLNRIYKFSGKAWDWPVDTEFGNYDYLMFADYDMDHPEVVNELRRWGEWYTNTLNLDGFRIDAVKHIKFSFTRDWLTHVRNATGKGMFAVAEFWKNDLGALENYLSYTNWNHSVFDVPLHYNLYNASNSRGNYDMAKLLNGTVVQKHPMHAVTFVDNHDSQPGESLESFVQEWFKPLAYALILTREQGYPSVFYGDYYGIPTHSVPAMKAKIDPILAARQNFAYGTQHDYFDHHNIIGWTREGNTTAPNSGLATIMSDGPGGEKWMYVGQNKAGQVWHDITGNKPGTVTINADGWANFSVNKGSVSIWVKR

SEQ ID NO: 20557 - protein, 481 aa, Bacillus sp.
HNGTNATMMQYFEWHLPNDGNHWNRLRDDASNLRNNGITAIWIPPAWKGTSQNDVGYGAYDLYDLGEFNQKGTVRTKYGTRSQLESAIHALKNNGVQVYGDVVMNHKAGADGTEFVTAVEVDPSNRNQETSGTYQIQAYTKFDFPGRGNTYSSFKWRWYHFDGTDWDESRKLNRIYKFSGKAWDWPVDTEFGNYDYLMFADYDMDHPEVVNELRRWGEWYTNTLNLDGFRIDAVKHIKFSFTRDWLTHVRNATGKGMFAVAEFWKNDLGALENYLSYTNWNHSVFDVPLHYNLYNASNYGGNYDMAKLLNGTVVQKHPMHAVTFVDNHDSQPGESLESFVQEWFKPLAYALILTREQGYPSVFYGDYYGIPTHSVPAMKAKIDPILAARQNFAYGTQHDYFDHHNIIGWTREGNTTAPNSGLATIMSDGPGGEKWMYVGQNKAGQVWHDITGNKPGTVTINADGWANFSVNKGSVSIWVKR

SEQ ID NO: 20558 - protein, 481 aa, Bacillus sp.
HNGTNATMMQYFEWHLPNDGNHWNRLRDDASNLRNAGITAIWIPPAWKGTSQNDVGYGAYDLYDLGEFNQKGTVRTKYGTRSQLESAIHALKNNGVQVYGDVVMNHKAGADGTEFVTAVEVDPSNRNQETSGTYQIQAYTKFDFPGRGNTYSSFKWRWYHFDGTDWDESRKLNRIYKFSGKAWDWPVDTEFGNYDYLMFADYDMDHPEVVNELRRWGEWYTNTLNLDGFRIDAVKHIKFSFTRDWLTHVRNATGKGDFAVAEFWKNDLGALENYLSYTNWNHSVFDVPLHYNLYNASNSRGNYDMAKLLNGTVVQKHPMHAVTFVDNHDSQPGESLESFVQEWFKPLAYALILTREQGYPSVFYGDYYGIPTHSVPAMKAKIDPILAARQNFAYGTQHDYFDHHNIIGWTREGNTTHPNSGLATIMSDGPGGEKWMYVGQNKAGQVWHDITGNKPGTVTINADGWANFSVNKGSVSIWVKR

SEQ ID NO: 20559 - protein, 481 aa, Bacillus sp.
HNGTNATMMQYFEWHLPNDGNHWNRLRDDASNLRNNGITAIWIPPAWKGTSQNDVGYGAYDLYDLGEFNQKGTVRTKYGTRSQLESAIHALKNNGVQVYGDVVMNHKAGADGTEFVTAVEVDPSNRNQETSGTYQIQAYTKFDFPGRGNTYSSFKWRWYHFDGTDWDESRKLNRIYKFDGKAWDWPVDTEFGNYDYLMFADLDMDHPEVVNELRRWGEWYTNTLNLDGFRIDAVKHIKFSFTRDWLTHVRNATGKGMFAVAEYWKNDLGALENYLSYTNWNHSVFDVPLHYNLYNASNYGGNYDMAKLLNGTVVQKHPMHAVTFVDNHDSQPGESLESFVQEWFKPLAYALILTREQGYPSVFYGDYYGIPTHSVPAMKAKIDPILAARQNFAYGTQHDYFDHHNIIGWTREGNTTHPNSGLATIMSDGPGGEKWMYVGQNKAGQVWHDITGNKPGTVTINADGWANFSVNKGSVSIWVKR

SEQ ID NO: 20560 - protein, 481 aa, Bacillus sp.
HDGTNATMMQYFEWHLPNDGNHWNRLRDDASNLRNAGITAIWIPPAWKGTSQNDVGYGAYDLYDLGEFNQKGTVRTKYGTRSQLESAIHALKNNGVQVYGDVVMNHKAGADGTEFVTAVEVDPSNRNQETSGTYQIQAYTKFDFPGRGNTYSSFKWRWYHFDGTDWDESRKLNRIYKFSGKAWDWPVDTEFGNYDYLMFADYDMDHPEVVNELRRWGEWYTNTLNLDGFRIDAVKHIKFSFTRDWLTHVRNATGKGMFAVAEFWKNDLGALENYLSYTNWNHSVFDVPLHYNLYNASNSRGNYDMAKLLNGTVVQKHPMHAVTFVDNHDSQPGESLESFVQEWFKPLAYALILTREQGYPSVFYGDYYGIPTHSVPAMKAKIDPILAARQNFAYGTQHDYFDHHNIIGWTREGNTTHPNSGLATIMSDGPGGEKWMYVGQNKAGQVWHDITGNKPGTVTINADGWANFSVNKGSVSIWVKR

SEQ ID NO: 20561 - protein, 481 aa, Bacillus sp.
HNGTNATMMQYFEWHLPNDGNHWNRLRDDASNLRNRGITAIWIPPAWKGTSQNDVGYGAYDLYDLGEFNQKGTVRTKYGTRSQLESAIHALKNNGVQVYGDVVMNHKAGADGTEFVTAVEVDPSNRNQETSGTYQIQAYTKFDFPGRGNTYSSFKWRWYHFDGTDWDESRKLNRIYKFDGKQWDWPVDTEFGNYDYLMFADLDMDHPEVVNELRRWGEWYTNTLNLDGFRIDAVKHIKFSFTRDWLTHVRNATGKGMFAVAEYWKNDLGALENYLSYTNWNHSVFDVPLHYNLYNASNSRGNYDMAKLLNGTVVQKHPMHAVTFVDNHDSQPGESLESFVQEWFKPLAYALILTREQGYPSVFYGDYYGIPTHSVPAMKAKIDPILAARQNFAYGTQHDYFDHHNIIGWTREGNTTHPNSGLATIMSDGPGGEKWMYVGQNKAGQVWHDITGNKPGTVTINADGWANFSVNKGSVSIWVKR

SEQ ID NO: 20562 - protein, 481 aa, Bacillus sp.
HNGTNATMMQYFEWHLPNDGNHWNRLRDDASNLRNRGITAIWIPPAWKGTSQNDVGYGAYDLYDLGEFNQKGTVRTKYGTRSQLESAIHALKNNGVQVYGDVVMNHKAGADGTEFVTAVEVDPSNRNQETSGTYQIQAYTKFDFPGRGNTYSSFKWRWYHFDGTDWDESRKLNRIYKFSGKAWDWPVDTEFGNYDYLMFADYDMDHPEVVNELRRWGEWYTNTLNLDGFRIDAVKHIKFSFTRDWLTHVRNATGKGDFAVAEFWKNDLGALENYLSYTNWNHSVFDVPLHYNLYNASNSRGNYDMAKLLNGTVVQKHPMHAVTFVDNHDSQPGESLESFVQEWFKPLAYALILTREQGYPSVFYGDYYGIPTHSVPAMKAKIDPILAARQNFAYGTQHDYFDHHNIIGWTREGNTTHPNSGLATIMSDGPGGEKWMYVGQNKAGQVWHDITGNKPGTVTINADGWAMFSVNKGSVSIWVKR

SEQ ID NO: 20563 - protein, 481 aa, Bacillus sp.
HNGTNATMMQYFEWHLPNDGNHWNRLRDDASNLRNRGITAIWIPPAWKGTSQNDVGYGAYDLYDLGEFNQKGTVRTKYGTRSQLESAIHALKNNGVQVYGDVVMNHKAGADGTEFVTAVEVDPSNRNQETSGTYQIQAYTKFDFPGRGNTYSSFKWRWYHFDGTDWDESRKLNRIYKFSGKQWDWPVDTEFGNYDYLMFADLDMDHPEVVNELRRWGEWYTNTLNLDGFRIDAVKHIKFSFTRDWLTHVRNATGKGMFAVAEYWKNDLGALENYLSYTNWNHSVFDVPLHYNLYNASNSRGNYDMAKLLNGTVVQKHPMHAVTFVDNHDSQPGESLESFVQEWFKPLAYALILTREQGYPSVFYGDYYGIPTHSVPAMKAKIDPILAARQNFAYGTQHDYFDHHNIIGWTREGNTTHPNSGLATIMSDGPGGEKWMYVGQNKAGQVWHDITGNKPGTVTINADGWANFSVNGASVSIWVKR

SEQ ID NO: 20564 - protein, 481 aa, Bacillus sp.
HNGTNATMMQYFEWHLPNDGNHWNRLRDDASNLRNNGITAIWIPPAWKGTSQNDVGYGAYDLYDLGEFNQKGTVRTKYGTRSQLESAIHALKNNGVQVYGDVVMNHKAGADGTEFVTAVEVDPSNRNQETSGTYQIQAYTKFDFPGRGNTYSSFKWRWYHFDGTDWDESRKLNRIYKFSGKAWDWPVDTEFGNYDYLMFADYDMDHPEVVNELRRWGEWYTNTLNLDGFRIDAVKHIKFSFTRDWLTHVRNATGKGMFAVAEFWKNDLGALENYLSYTNWNHSVFDVPLHYNLYNASNSRGNYDMAKLLNGTVVQKHPMHAVTFVDNHDSQPGESLESFVQEWFKPLAYALILTREQGYPSVFYGDYYGIPTHSVPAMKAKIDPILAARQNFAYGTQHDYFDHHNIIGWTREGNTTPPNSGLATIMSDGPGGEKWMYVGQNKAGQVWHDITGNKPGTVTINADGWANFSVNGHSVSIWVKR

SEQ ID NO: 20565 - protein, 481 aa, Bacillus sp.
HDGTNATMMQYFEWHLPNDGNHWNRLRDDASNLRNRGITAIWIPPAWKGTSQNDVGYGAYDLYDLGEFNQKGTVRTKYGTRSQLESAIHALKNNGVQVYGDVVMNHKAGADGTEFVTAVEVDPSNRNQETSGTYQIQAYTKFDFPGRGNTYSSFKWRWYHFDGTDWDESRKLNRIYKFSGKAWDWPVDTEFGNYDYLMFADYDMDHPEVVNELRRWGEWYTNTLNLDGFRIDAVKHIKFSFTRDWLTHVRNATGKGMFAVAEFWKNDLGALENYLSYTNWNHSVFDVPLHYNLYNASNSRGNYDMAKLLNGTVVQKHPMHAVTFVDNHDSQPGESLESFVQEWFKPLAYALILTREQGYPSVFYGDYYGIPTHSVPAMKAKIDPILAARQNFAYGTQHDYFDHHNIIGWTREGNTTAPNSGLATIMSDGPGGEKWMYVGQNKAGQVWHDITGNKPGTVTINADGWANFSVLGGSVSIWVKR

SEQ ID NO: 20566 - protein, 481 aa, Bacillus sp.
HNGTNATMMQYFEWHLPNDGNHWNRLRDDASNLRNNGITAIWIPPAWKGTSQNDVGYGAYDLYDLGEFNQKGTVRTKYGTRSQLESAIHALKNNGVQVYGDVVMNHKAGADGTEFVTAVEVDPSNRNQETSGTYQIQAYTKFDFPGRGNTYSSFKWRWYHFDGTDWDESRKLNRIYKFSGKAWDWPVDTEFGNYDYLMFADYDMDHPEVVNELRRWGEWYTNTLNLDGFRIDAVKHIKFSFTRDWLTHVRNATGKGMFAVAEFWKNDLGALENYLSYTNWNHSVFDVPLHYNLYNASNTGGNYDMAKLLNGTVVQKHPMHAVTFVDNHDSQPGESLESFVQEWFKPLAYALILTREQGYPSVFYGDYYGIPTHSVPAMKAKIDPILAARQNFAYGTQHDYFDHHNIIGWTREGNTTAPNSGLATIMSDGPGGEKWMYVGQNKAGQVWHDITGNKPGTVTINADGWANFSVNKGSVSIWVKR

SEQ ID NO: 20567 - protein, 481 aa, Bacillus sp.
HNGTNATMMQYFEWHLPNDGNHWNRLRDDASNLRNRGITAIWIPPAWKGTSQNDVGYGAYDLYDLGEFNQKGTVRTKYGTRSQLESAIHALKNNGVQVYGDVVMNHKAGADGTEFVTAVEVDPSNRNQETSGTEQIQAYTKFDFPGRGNTYSSFKWRWYHFDGTDWDESRKLNRIYKFSGKAWDWPVDTEFGNYDYLMFADYDMDHPEVVNELRRWGEWYTNTLNLDGFRIDAVKHIKFSFTRDWLTHVRNATGKGMFAVAEFWKNDLGALENYLSYTNWNHSVFDVPLHYNLYNASNSRGNYDMAKLLNGTVVQKHPMHAVTFVDNHDSQPGESLESFVQEWFKPLAYALILTREQGYPSVFYGDYYGIPTHSVPAMKAKIDPILEARQWFAYGTQHDYFDHHNIIGWTREGNTTAPNSGLATIMSDGPGGEKWMYVGQNKAGQVWHDITGNKPGTVTINADGWANFSVNKGSVSIWVKR

SEQ ID NO: 20568 - protein, 481 aa, Bacillus sp.
HNGTNATMMQYFEWHLPNDGNHWNRLRDDASNLRNAGITAIWIPPAWKGTSQNDVGYGAYDLYDLGEFNQKGTVRTKYGTRSQLESAIHALKNNGVLVYGDVVMNHKAGADGTEFVTAVEVDPSNRNQETSGTYQIQAYTKFDFPGRGNTYSSFKWRWYHFDGTDWDESRKLNRIYKFSGKAWDWPVDTEFGNYDYLMFADYDMDHPEVVNELRRWGEWYTNTLNLDGFRIDAVKHIKFSFTRDWLTHVRNATGKGMFAVAEFWKNDLGALENYLSYTNWNHSVFDVPLHYNLYNASNYGGNYDMAKLLNGTVVQKHPMHAVTFVDNHDSQPGESLESFVQEWFKPLAYALILTREQGYPSVFYGDYYGIPTHSVPAMKAKIDPILAARQNFAYGTQHDYFDHHNIIGWTREGNTTHPNSGLATIMSDGPGGEKWMYVGQNKAGQVWHDITGNKPGTVTINADGWANFSVNKGSVSIWVKR

SEQ ID NO: 20569 - protein, 481 aa, Bacillus sp.
HNGTNATMMQYFEWHLPNDGNHWNRLRDDASNLRNNGITAIWIPPAWKGTSQNDVGYGAYDLYDLGEFNQKGTVRTKYGTRSQLESAIHALKNNGVQVYGDVVMNHKAGADGTEFVDAVEVDPSNRNQETSGTYQIQAYTKFDFPGRGNTYSSFKWRWYHFDGTDWDESRKLNRIYKFTGKAWDWPVDTEFGNYDYLMFADLDMDHPEVVNELRRWGEWYTNTLNLDGFRIDAVKHIKFSFTRDWLTHVRNATGKGMFAVAEYWKNDLGALENYLSYTNWNHSVFDVPLHYNLYNASNYGGNYDMAKLLNGTVVQKHPMHAVTFVDNHDSQPGESLESFVQEWFKPLAYALILTREQGYPSVFYGDYYGIPTHSVPAMKAKIDPILAARQNFAYGTQHDYFDHHNIIGWTREGNTTHPNSGLATIMSDGPGGEKWMYVGQNKAGQVWHDITGNKPGTVTINADGWANFSVNKGSVSIWVKR

SEQ ID NO: 20570 - protein, 481 aa, Bacillus sp.
HNGTNATMMQYFEWHLPNDGNHWNRLRDDASNLRNRGITAIWIPPAWKGTSQNDVGYGAYDLYDLGEFNQKGTVRTKYGTRSQLESAIHALKNNGVQVYGDVVMNHKAGADGTEFVDAVEVDPSNRNQETSGTYQIQAYTKFDFPGRGNTYSSFKWRWYHFDGTDWDESRKLNRIYKFDGKQWDWPVDTEFGNYDYLMFADLDMDHPEVVNELRRWGEWYTNTLNLDGFRIDAVKHIKFQFTRDWLTHVRNATGKGMFAVAEFWKNDLGALENYLSYTNWNHSVFDVPLHYNLYNASNSRGNYDMAKLLNGTVVQKHPMHAVTFVDNHDSQPGESLESFVQEWFKPLAYALILTREQGYPSVFYGDYYGIPTHSVPAMKAKIDPILAARQNFAYGTQHDYFDHHNIIGWTREGNTTHPNSGLATIMSDGPGGEKWMYVGQNKAGQVWHDITGNKPGTVTINADGWANFSVNKGSVSIWVKR

SEQ ID NO: 20571 - protein, 481 aa, Bacillus sp.
HNGTNATMMQYFEWHLPNDGNHWNRLRDDASNLRNRGITAIWIPPAWKGTSQNDVGYGAYDLYDLGEFNQKGTVRTKYGTRSQLESAIHALKNNGVQVYGDVVMNHKAGADGTEFVTAVEVDPSNRNQETSGTYQIQAYTKFDFPGRGNTYSSFKWRWYHFDGTDWDESRKLNRIYKFSGKAWDWPVDTEFGNYDYLMFADLDMDHPEVVNELRRWGEWYTNTLNLDGFRIDAVKHIKFSFTRDWLTHVRNATGKGDFAVAEFWKNDLGALENYLSYTNWNHSVFDVPLHYNLYNASNYGGNYDMAKLLNGTVVQKHPMHAVTFVDNHDSQPGESLESFVQEWFKPLAYALILTREQGYPSVFYGDYYGIPTHSVPAMKAKIDPILAARQNFAYGTQHDYFDHHNIIGWTREGNTTHPNSGLATIMSDGPGGEKWMYVGQNKAGQVWHDITGNKPGTVTINADGWAMFSVNKGSVSIWVKR

SEQ ID NO: 20572 - protein, 481 aa, Bacillus sp.
HNGTNATMMQYFEWHLPNDGNHWNRLRDDASNLRNRGITAIWIPPAWKGTSQNDVGYGAYDLYDLGEFNQKGTVRTKYGTRSQLESAIHALKNNGVQVYGDVVMNHKAGADGTEFVTAVEVDPSNRNQETDGTYQIQAYTKFDFPGRGNTYSSFKWRWYHFDGTDWDESRKLNRIYKFSGKAWDWPVDTEFGNYDYLMFADYDMDHPEVVNELRRWGEWYTNTLNLDGFRIDAVKHIKFSFTRDWLTHVRNATGKGMFAVAEFWKNDLGALENYLSYTNWNHSVFDVPLHYNLYNASNSRGNYDMAKLLNGTVVQKHPMHAVTFVDNHDSQPGESLESFVQEWFKPLAYALILTREQGVPSVFYGDYYGIPTHSVPAMKAKIDPILAARQNFAYGTQHDYFDHHNIIGWTREGNTTHPNSGLATIMSDGPGGEKWMYVGQNKAGQVWHDITGNKPGTVTINADGWANFSVLGGSVSIWVKR

SEQ ID NO: 20573 - protein, 481 aa, Bacillus sp.
HNGTNATMMQYFEWHLPNDGNHWNRLRDDASNLRNAGITAIWIPPAWKGTSQNDVGYGAYDLYDLGEFNQKGTVRTKYGTRSQLESAIHALKNNGVQVYGDVVMNHKAGADGTEFVTAVEVDPSNRNQETSGTYQIQAYTKFDFPGRGNTYSSFKWRWYHFDGTDWDESRKLNRIYKFSGKAWDWPVDTEFGNYDYLMFADYDMDHPEVVNELRRWGEWYTNTLNLDGFRIDAVKHIKFSFTRDWLTHVRNATGKGMFAVAEFWKNDLGALENYLSYTNWNHSVFDVPLHYNLYNASNSRGNYDMAKLLNGTVVQKHPMHAVTFVDNHDSQPGESLESFVQEWFKPLAYALILTREQGYPSVFYGDYYGIPTHSVPAMKAKIDPILAARQNFAYGTQHDYFDHHNIIGWTREGNTTAPNSGLATIMSDGPGGEKWMYVGQNKAGQVWHDITGNKPGTVTINADGWANFSVNKGSVSIWVKR

SEQ ID NO: 20574 - protein, 481 aa, Bacillus sp.
HNGTNATMMQYFEWHLPNDGNHWNRLRDDASNLRNRGITAIWIPPAWKGTSQNDVGYGAYDLYDLGEFNQKGTVRTKYGTRSQLESAIHALKNNGVQVYGDVVMNHKAGADGTEFVTAVEVDPSNRNQETSGTYQIQAYTKFDFPGRGNTYSSFKWRWYHFDGTDWDESRKLNRIYKFSGKQWDWPVDTEFGNYDYLMFADNDMDHPEVVNELRRWGEWYTNTLNLDGFRIDAVKHIKFSFTRDWLTHVRNATGKGMFAVAEYWKNDLGALENYLSYTNWNHSVFDVPLHYNLYNASNSRGNYDMAKLLNGTVVQKHPMHAVTFVDNHDSQPGESLESFVQEWFKPLAYALILTREQGYPSVFYGDYYGIPTHSVPAMKAKIDPILAARQNFAYGTQHDYFDHHNIIGWTREGNTTHPNSGLATIMSDGPGGEKWMYVGQNKAGQVWHDITGNKPGTVTINADGWANFSVNKGSVSIWVKR

SEQ ID NO: 20575 - protein, 481 aa, Bacillus sp.
HNGTNATMMQYFEWHLPNDGNHWNRLRDDASNLRNRGITAIWIPPAWKGTSQNDVGYGAYDLYDLGEFNQKGTVRTKYGTRSQLESAIHALKNNGVQVYGDVVMNHKAGADGTEFVTAVEVDPSNRNQETSGTYQIQAYTKFDFPGRGNTYSSFKWRWYHFDGTDWDESRKLNRIYKFSGKQWDWPVDTEFGNYDYLMFADLDMDHPEVVNELRRWGEWYTNTLNLDGFRIDAVKHIKFSFTRDWLTHVRNATGKGWFAVAEFWKNDLGALENYLSYTNWNHSVFDVPLHYNLYNASNSRGNYDMAKLLNGTVVQKHPMHAVTFVDNHDSQPGESLESFVQEWFKPLAYALILTREQGYPSVFYGDYYGIPTHSVPAMKAKIDPILAARQNFAYGTQHDYFDHHNIIGWTREGNTTHPNSGLATIMSDGPGGEKWMYVGQNKAGQVWHDITGNKPGTVTINADGWANFSVNGASVSIWVKR

SEQ ID NO: 20576 - protein, 481 aa, Bacillus sp.
HNGTNATMMQYFEWHLPNDGNHWNRLRDDASNLRNRGITAIWIPPAWKGTSQNDVGYGAYDLYDLGEFNQKGTVRTKYGTRSQLESAIHALKNNGVQVYGDVVMNHKAGADGTEFVTAVEVDPSNRNQETSGTYQIQAYTKFDFPGRGNTYSSFKWRWYHFDGTDWDESRKLNRIYKFSGKQWDWPVDTENGNYDYLMFADLDMDHPEVVNELRRWGEWYTNTLNLDGFRIDAVKHIKFQFTRDWLTHVRNATGKGMFAVAEYWKNDLGALENYLSYTNWNHSVFDVPLHYNLYNASNSRGNYDMAKLLNGTVVQKHPMHAVTFVDNHDSQPGESLESFVQEWFKPLAYALILTREQGYPSVFYGDYYGIPTHSVPAMKAKIDPILAARQNFAYGTQHDYFDHHNIIGWTREGNTTHPNSGLATIMSDGPGGEKWMYVGQNKAGQVWHDITGNKPGTVTINADGWANFSVNKGSVSIWVKR

SEQ ID NO: 20577 - protein, 481 aa, Bacillus sp.
HNGTNATMMQYFEWHLPNDGNHWNRLRDDASNLRNRGITAIWIPPAWKGTSQNDVGYGAYDLYDLGEFNQKGTVRTKYGTRSQLESAIHALKNNGVQVYGDVVMNHKAGADGTEFVTAVEVDPSNRNQETSGTYQIQAYTKFDFPGRGNTYSSFKWRWYHFDGTDWDESRKLNRIYKFSGKQWDWPVDTEFGNYDYLMFADYDMDHPEVVNELRRWGEWYTNTLNLDGFRIDAVKHIKFSFTRDWLTHVRNATGKGDFAVAEFWKNDLGALENYLSYTNWNHSVFDVPLHYNLYNASNTGGNYDMAKLLNGTVVQKHPMHAVTFVDNHDSQPGESLESFVQEWFKPLAYALILTREQGYPSVFYGDYYGIPTHSVPAMKAKIDPILAARQNFAYGTQHDYFDHHNIIGWTREGNTTHPNSGLATIMSDGPGGEKWMYVGQNKAGQVWHDITGNKPGTVTINADGWANFSVNKGSVSIWVKR

SEQ ID NO: 20578 - protein, 481 aa, Bacillus sp.
HNGTNATMMQYFEWHLPNDGNHWNRLRDDASNLRNRGITAIWIPPAWKGTSQNDVGYGAYDLYDLGEFNQKGTVRTKYGTRSQLESAIHALKNNGVQVYGDVVMNHKAGADGTEFVTAVEVDPSNRNQETSGTYQIQAYTKFDFPGRGNTYSSFKWRWYHFDGTDWDESRKLNRIYKFSGKAWDWPVDTEFGNYDYLMFADYDMDHPEVVNELRRWGEWYTNTLNLDGFRIDAVKHIKFSFTRDWLTHVRNATGKGDFAVAEFWKNDLGALENYLSYTNWNHSVFDVPLHYNLYNASNSRGNYDMAKLLNGTVVQKHPMHAVTFVDNHDSQPGESLESFVQEWFKPLAYALILTREQGYPSVFYGDYYGIPTHSVPAMKAKIDPILAARQNFAYGTQHDYFDHHNIIGWTREGNTTPPNSGLATIMSDGPGGEKWMYVGQNKAGQVWHDITGNKPGTVTINADGWANFSVNGASVSIWVKR

SEQ ID NO: 20579 - protein, 481 aa, Bacillus sp.
HNGTNATMMQYFEWHLPNDGNHWNRLRDDASNLRNRGITAIWIPPAWKGTSQNDVGYGAYDLYDLGEFNQKGTVRTKYGTRSQLESAIHALKNNGVQVYGDVVMNHKAGADGTEFVTAVEVDPSNRNQETSGTEQIQAYTKFDFPGRGNTYSSFKWRWYHFDGTDWDESRKLNRIYKFSGKAWDWPVDTEFGNYDYLMFADYDMDHPEVVNELRRWGEWYTNTLNLDGFRIDAVKHIKFSFTRDWLTHVRNATGKGMFAVAEFWKNDLGALENYLSYTNWNHSVFDVPLHYNLYNASNSRGNYDMAKLLNGTVVQKHPMHAVTFVDNHDSQPGESLESFVQEWFKPLAYALILTREQGYPSVFYGDYYGIPTHSVPAMKAKIDPILAARQNFAYGTQHDYFDHHNIIGWTMEGNTTHPNSGLATIMSDGPGGEKWMYVGQNKAGQVWHDITGNKPGTVTINADGWANFSVNGHSVSIWVKR

SEQ ID NO: 20580 - protein, 513 aa, Geobacillus stearothermophilus
RPIVFFTVCLFLLCDGSLAAAAPFNGTMMQYFEWYLPDDGTLWTKVANEANNLSSLGITALWLPPAYKGTSRSDVGYGVYDLYDLGEFNQKGTVRTKYGTKAQYLQAIQAAHAAGMQVYADVVFDHKGGADGTEWVDAVEVNPSDRNQEISGTYQIQAWTKFDFNGRGNTYSSFKWRWYHFDGVDWDESRKLSRIYKFRGIGKAWDWEVDTENGNYDYLMYADLDMDHPEVVTELKNWGKWYVNTTNIDGFRLDAVKHIKFSFFPDWLSYVRSQTGKPLFTVGEYWSYDINKLHNYITKTNGTMSLFDAPLHNKFYTASKSGGAFDMSTLMNNTLMKDQPTLAVTFVDNHDTEPGQALQSWVDPWFKPLAYAFILTRQEGYPCVFYGDYYGIPQYNIPSLKSKIDPLLIARRDYAYGTQHDYLDHSDIIGWTREGVTEKPGSGLAALITDGPGGSKWMYVGKQHAGKVFYDLTGNRSDTVTINSDGWGEFKVNGGSVSVWVPRKTTVSTIAWP

SEQ ID NO: 20581 - protein, 510 aa, Geobacillus stearothermophilus
LAFLLTALLFCPTGQPAKAAAPFNGTMMQYFEWYLPDDGTLWTKVANEANNLSSLGITALWLPPAYKGTSRSDVGYGVYDLYDLGEFNQKGAVRTKYGRKAQYLQAIQAAHAAGMQVYADVVFDHKGGADGTEWVDAVEVNPSDRNQEISGTYQIQAWTKFDFPGRGNTYSSFKWRWYHFDGVDWDESRKLSRIYKFRGIGKAWDWEVDTENGNYDYLMYADLDMDHPEVVTELKSWGKWYVNTTNIDGFRLDAVKHIKFSFFPDWLSDVRSQTGKPLFTVGEYWSYDINKLHNYIMKTNGTMSLFDAPLHNKFYTASKSGGTFDMRTLMTNTLMKDQPTLAVTFVDNHDTEPGQALQSWVDPWFKPLAYAFILTRQEGYPCVFYGDYYGIPQYNIPSLKSKIDPLLIARRDYAYGTQHDYLDHSDIIGWTREGVTEKPGSGLAALITDGPGGSKWMYVGKQHAGKVFYDLTGNRSDTVTINSDGWGEFKVNGGSVSVWVPRKTTVSTIA

SEQ ID NO: 20582 - protein, 493 aa, Geobacillus stearothermophilus
AAPFNGTMMQYFEWYLPDNGTLWTKVAKQANNLSSLGITALWLPPAYKGTSRSDVGYGVYDLYDLGEFNQKGTVRTKYGTKAQYLRAIRAAHAAGMRVYADVVFDHKGGADGTEWVDAVEVNPSDRNQEISGTYQIQAWTKFDFPGRGNTYSSFKWRWYHFDGVDWDESRKLSRIYKFRGIGKAWDWEVDTENGNYDYLMYADLDMDHPEVVTELKNWGKWYVKTTNIDGFRLDAVKHIKFSFFPDWLSYVRSQTGKPLFTVGEYWSYDIKKLHNYITKTKGTMSLFDAPLHNKFYTASKSGGAFNMRTLMTNTLMKNRPTLAVTFVDNHDTEPGQALQSWVDPWFKPLAYAFILTREEGYPCVFYGDYYGIPQYNIPSLKSKIDPLLIARRNYAYGTQHDYLDHSDIIGWTREGVTEKPGSGLAALITDGPGGSKWMYVGKEHAGKVFYDLTGNRSNTVTINSDGWGEFKVNGGSVSVWVPRKTTVSTIARP

SEQ ID NO: 20583 - protein, 516 aa, Bacillus sp.
AAPFNGTMMQYFEWYLPDDGTLWTKLANDANNLSSLGISALWIPPAWKGTSRSDVGYGVYDLYDLGEFNQKGTIRTKYGTKAQYLQAINAAHAAGIQVYADVVFDHKGGADATEWVDAVEVNPSDRNQEISGTYQIQAWTKFDFPGRGNTHSSFKWRWYHFDGVDWDESRKLSNRIYKFRGIGKAWDWEVDTENGNYDYLMYADIDMDHPEVVTELKNWGKWYVNTTNIDGFRIDAVKHIKFSFFPDWISHVRSQTGKPLFTVAEFWSYDINKIHNYITKTNGTMSLFDAPLHNKFYTASKSGGAFDMRTIMTNTLMKDQPTLAVTFVDNHDSEPGQALQSFVDPWFKPLAYAFILTRQEGYPCVFYGDYYGIPQHNIPALKSKIDPILIARRDYAYGTQHDYLDHSDIIGWTREGVTEKPGSGLAAIISDGPGGSKWMFVGKNHAGKVFYDITGNRADTVTINADGWGEFKVNGGSVSIWVPKKTTVSTIARPITTRPWTGEFVRWTEPRLVAWP

SEQ ID NO: 20584 - protein, 485 aa, Bacillus sp.
HHNGTNGTMMQYFEWHLPNDGNHWNRLRDDASNLRNRGITAIWIPPAWKGTSQNDVGYGAYDLYDLGEFNQKGTVRTKYGTRSQLESAIHALKNNGVQVYGDVVMNHKGGADATENVLAVEVNPNNRNQEISGDYTIEAWTKFDFPGRGNTYSDFKWRWYHFDGVDWDQSRQFQNRIYKFRGDGKAWDWEVDSENGNYDYLMYADVDMDHPEVVNELRRWGEWYTNTLNLDGFRIDAVKHIKYSFTRDWLTHVRNATGKEMPAVAEFWKNDLGALENYLNKTNWNHSVFDVPLHYNLYNASNGGGNYDMAKLLNGTVVQKHPMHAVTFVDNHDSQPGESLESFVQEWFKPLAYALILTREQGYPSVFYGDYYGIPTHSVPAMKAKIDPILEARQNFAYGAQHDYFDHHDIVGWTREGDSSVANSGLAALITDGPGGAKRMYVGRQNAGETWHDITGNRSEPVVINSEGWGEFHVNGGSVSIYVQR

SEQ ID NO: 20585 - protein, 482 aa, Bacillus sp.
HHGGTNATMMQYFEWHLPNDGNHWNRLRDDASNLRNVGITAIWIPPAWKGTSQNDVGYGAYDLYDLGEFNQKGTVRTKYGTRSQLESAIHALKNNGVQVYGDVVMNHKAGADGTEFVTAVEVDPSNRNQETSGTYQIQAMTKFDFPGRGNTYSSFKWRWYHFDGTDWDESRKLNRIYKFSGKAWDWPVDTEFGNYDYLMFADYDMDHPEVVNELRRWGEWYTNTLNLDGFRIDAVKHIKFSFTRDWLTHVRNATGKGMFAVAEFWKNDLGALENYLSYTNWNHSVFDVPLHYNLYNASNSRGNYDMAKLLNGTVVQKHPMHAVTFVDNHDSQPGESLESFVQEWFKPLAYALILTREQGYPSVFYGDYYGIPTHSVPAMKAKIDPILAARQNFAYGTQHDYFDHHNIIGWTREGNTTAPNSGLATIMSDGPGGEKWMYVGQNKAGQVWHDITGNKPGTVTINADGWANFSVNKGSVSIWVKR

SEQ ID NO: 20586 - protein, 484 aa, Synthetic construct
HHNQTNGTMMQYFEWYLPNDGNHWHRLRSDASNLKDKGITAVWIPPAWKGASQNDVGYGAYDLYDLGEFNQKGTVRTKYGTRNQLQAAVTALKSNGIQVYGDVVMNHKGGADATEWVRAVEVNPSNRNQEVSGDYTIEAWTKFDFPGRGNTHSNFKWRWYHFDGVDWDQSRQLQNRIYKFRGDGKEWDWEVDTENGNYDYLMYADYDMDHPEVVNELRNWGVWYTNTLGLDGFRIDAVKHIKYSFTRDWLTHVRNTTGKNMFAVAEFWKNDIGAIRNYLSKTNWNHSVFDVPLHYNLYNASRSGGNYDMRQIFNGTVVQRHPTHAVTFVDNHDSQPEEALESFVEEWFKPLAYALTLTRDQGYPSVFYGDYYGIPTHGVPAMKSKIDPILEARQKYAYGKQNDYMDHHNMIGWTREGNTAHPNSGLATIMSDGPGGNKWMYVGRNKAGQVWRDITGNRSGTVTINADGWGNFSVNGGSVSIWVN

SEQ ID NO: 20587 - protein, 484 aa, Synthetic construct
HHNGTNGTMMQYFEWYLPNDGNHWHRLRSDASNLKDKGITAVWIPPAWKGASQNDVGYGAYDLYDLGEFNQKGTVRTKYGTRNQLQAAVTALKSNGIQVYGDVVMNHKGGADATEWVRAVEVNPSNRNQEVSGDYTIEAWTKFDFPGRGNTHSNFKWRWWHFDGVDWDQSRQLQNKIYKFRGDGKEWDWEVDEENGNYDYLMYADYDMDHPEVVNELRNWGVWYTNTLGLDGFRIDAVKHIKYSFTRDWLTHVRNTTGKNMFAVAEFWKNDIGAIENYLSKTNWNHSVFDVPLHYNLYNASRSGGNYDMRQIFNGTVVQRHPTHAVTFVDNHDSQPEEALESFVEEWFKPLAYALTLTRDQGYPSVFYGDYYGIPTHGVPAMKSKIDPILEARQKYAYGKQNDYLDHHNMIGWTREGNTAHPNSGLATIMSDGPGGNKWMYVGRNKAGQVWRDITGNRSGTVTINADGWGNFSVNGGSVSIWVN

SEQ ID NO: 20588 - protein, 484 aa, Synthetic construct
HHNQTNGTMMQYFEWYLPNDGNHWHRLRSDASNLKDKGITAVWIPPAWKGASQNDVGYGAYDLYDLGEFNQKGTVRTKYGTRNQLQAAVTALKSNGIQVYGDVVMNHKGGADATEWVRAVEVNPSNRNQEVSGDYTIEAWTKFDFPGRGNTHSNFKWRWWHFDGVDWDQSRQLQNRIYKFRGDGKEWDWEVDTENGNYDYLMYADYDMDHPEVVNELRNWGVWYTNTLGLDGFRIDAVKHIKYSFTRDWLTHVRNTTGKNMFAVAEFWKNDIGAIENYLSKTNWNHSVFDVPLHYNLYNASRSGGNYDMRQIFNGTVVQRHPTHAVTFVDNHDSQPEEALESFVEEWFKPLAYALTLTRDQGYPSVFYGDYYGIPTHGVPAMKSKIDPILEARQKYAYGKQNDYMDHHNMIGWTREGNTAHPNSGLATIMSDGPGGNKWMYVGRNKAGQVWRDITGNRSGTVTINADGWGNFSVNGGSVSIWVN

SEQ ID NO: 20589 - protein, 484 aa, Synthetic construct
HHNQTNGTMMQYFEWYLPNDGNHWHRLRSDASNLKDKGITAVWIPPAWKGASQNDVGYGAYDLYDLGEFNQKGTVRTKYGTRNQLQAAVTALKSNGIQVYGDVVMNHKGGADATEWVRAVEVNPSNRNQEVSGDYTIEAWTKFDFPGRGNTHSNFKWRWWHFDGVDWDQSRQLQNKIYKFRGDGKEWDWEVDTENGNYDYLMYADYDMDHPEVVNELRNWGVWYTNTLGLDGFRIDAVKHIKYSFTRDWLEHVRNTTGKNMFAVAEFWKNDIGAIENYLSKTNWNHSVFDVPLHYNLYNASRSGGNYDMRQIFNGTVVQRHPTHAVTFVDNHDSQPEEALESFVEEWFKPLAYALTLTRDQGYPSVFYGDYYGIPTHGVPAMKSKIDPILEARQKYAYGKQNDYLDHHNMIGWTREGNTAHPNSGLATIMSDGPGGNKWMYVGRNKAGQVWRDITGNRSGTVTINADGWGNFSVNGGSVSIWVN

SEQ ID NO: 20590 - protein, 484 aa, Synthetic construct
HHNGTNGTMMQYFEWYLPNDGNHWNRLRSDASNLKDKGITAVWIPPAWKGASQNDVGYGAYDLYDLGEFNQKGTVRTKYGTRNQLQAAVTALKSNGIQVYGDVVMNHKGGADATEWVRAVEVNPSNRNQEVSGDYTIEAWTKFDFPGRGNTHSNFKWRWWHFDGVDWDQSRQLQNKIYKFRGDGKEWDWEVDEENGNYDYLMYADYDMDHPEVVNELRNWGVWYTNTLGLDGFRIDAVKHIKYSFTRDWLTHVRNTTGKNMFAVAEFWKNDIGAIENYLSKTNWNHSVFDVPLHYNLYNASRSGGNYDMRQIFNGTVVQRHPTHAVTFVDNHDSQPEEALESFVEEWFKPLAYALTLTRDQGYPSVFYGDYYGIPTHGVPAMKSKIDPILEARQKYAYGKQNDYMDHHNMIGWTREGNTAHPNSGLATIMSDGPGGNKWMYVGRNKAGQVWRDITGNRSGTVTINADGWGNFSVNGGSVSIWVN

SEQ ID NO: 20591 - protein, 484 aa, Synthetic construct
HHNQTNGTMMQYFEWYLPNDGNHWNRLRSDASNLKDKGITAVWIPPAWKGASQNDVGYGAYDLYDLGEFNQKGTVRTKYGTRNQLQAAVTALKSNGIQVYGDVVMNHKGGADATEWVRAVEVNPSNRNQEVSGDYTIEAWTKFDFPGRGNTHSNFKWRWYHFDGVDWDQSRQLQNKIYKFRGDGKEWDWEVDEENGNYDYLMYADYDMDHPEVVNELRNWGVWYTNTLGLDGFRIDAVKHIKYSFTRDWLEHVRNTTGKNMFAVAEFWKNDIGAIENYLSKTNWNHSVFDVPLHYNLYNASRSGGNYDMRQIFNGTVVQRHPTHAVTFVDNHDSQPEEALESFVEEWFKPLAYALTLTRDQGYPSVFYGDYYGIPTHGVPAMKSKIDPILEARQKYAYGKQNDYMDHHNMIGWTREGNTAHPNSGLATIMSDGPGGNKWMYVGRNKAGQVWRDITGNRSGTVTINADGWGNFSVNGGSVSIWVN

SEQ ID NO: 20592 - protein, 484 aa, Synthetic construct
HHNGTNGTMMQYFEWYLPNDGNHWNRLRSDASNLKDKGITAVWIPPAWKGASQNDVGYGAYDLYDLGEFNQKGTVRTKYGTRNQLQAAVTALKSNGIQVYGDVVMNHKGGADATEWVRAVEVNPSNRNQEVSGDYTIEAWTKFDFPGRGNTHSNFKWRWDHFDGVDWDQSRQLQNRIYKFRGDGKEWDWEVDTENGNYDYLMYADIDMDHPEVVNELRNWGVWYTDTLGLDGFRIDAVKHIKYSFTRDWLTHVRNTTGKNMFAVAEFWKNDIGAIENYLSKTNWNHSVFDVPLHYNLYNASRSGGNYDMRQIFKGTVVQRHPTHAVTFVDNHDSQPEEALESFVEEWFKPLAYALTLTRDQGYPSVFYGDYYGIPTHGVPAMKSKIDPILEARQKYAYGKQNDYLDHHNMIGWTREGNTAHPNSGLATIMSDGPGGNKWMYVGRNKAGQVWRDITGNRSDEVTINADGWGNFSVNGGSVSIWVN

SEQ ID NO: 20593 - protein, 484 aa, Synthetic construct
HHNGTNGTMMQYFEWYLPNDGNHWHRLRSDASNLKDKGITAVWIPPAWKGASQNDVGYGAYDLYDLGEFNQKGTVRTKYGTRNQLQAAVTALKSNGIQVYGDVVMNHKGGADATEWVRAVEVNPSNRNQEVSGDYTIEAWTKFDFPGRGNTHSNFKWRWYHFDGVDWDQSRQLQNKIYKFRGDGKEWDWEVDTENGNYDYLMYADYDMDHPEVVNELRNWGVWYTNTLGLDGFRIDAVKHIKYSFTRDWLTHVRNTTQKNMFAVAEFWKNDIGAIENYLSKTNWNHSVFDVPLHYNLYNASRSGGNYDMRQIFNGTVVQRHPTHAVTFVDNHDSQPEEALESFVEEWFKPLAYALTLTRDQGEPSVFYGDYYGIPTHGVPAMKSKIDPILEARQKYAYGKQNDYLDHHNMIGWTREGNTAHPNSGLATIMSDGPGGNKWMYVGRNKAGQVWRDITGNRSGTVTINADGWGNFSVNGGSVSIWVN

SEQ ID NO: 20594 - protein, 484 aa, Synthetic construct
HHNQTNGTMMQYFEWYLPNDGNHWNRLRSDASNLKDKGITAVWIPPAWKGASQNDVGYGAYDLYDLGEFNQKGTVRTKYGTRNQLQAAVTALKSNGIQVYGDVVMNHKGGADATEWVRAVEVNPSNRNQEVSGDYTIEAWTKFDFPGRGNTHSNFKWRWYHFDGVDWDQSRQLQNKIYKFRGDGKEWDWEVDTENGNYDYLMYADYDMDHPEVVNELRNWGVWYTNTLGLDGFRIDAVKHIKYSFTRDWLEHVRNTTGKNMFAVAEFWKNDIGAIRNYLSKTNWNHSVFDVPLHYNLYNASRSGGNYDMRQIFNGTVVQRHPTHAVTFVDNHDSQPEEALESFVEEWFKPLAYALTLTRDQGYPSVFYGDYYGIPTHGVPAMKSKIDPILEARQKYAYGKQNDYMDHHNMIGWTREGNTAHPNSGLATIMSDGPGGNKWMYVGRNKAGQVWRDITGNRSGTVTINADGWGNFSVNGGSVSIWVN

SEQ ID NO: 20595 - protein, 484 aa, Synthetic construct
HHNGTNGTMMQYFEWYLPNDGNHWHRLRSDASNLKDKGITAVWIPPAWKGASQNDVGYGAYDLYDLGEFNQKGTVRTKYGTRNQLQAAVTALKSNGIQVYGDVVMNHKGGADATEWVRAVEVNPSNRNQEVSGDYTIEAWTKFDFPGRGNTHSNFKWRWYHFDGVDWDQSRQLQNKIYKFQGDGKEWDWEVDEENGNYDYLMYADYDMDHPEVVNELRNWGVWYTNTLGLDGFRIDAVKHIKYSFTRDWLTHVRNTTGKNMFAVAEFWKNDIGAIENYLSKTNWNHSVFDVPLHYNLYNASRSGGNYDMRQIFNGTVVQRHPTHAVTFVDNHDSQPEEALESFVEEWFKPLAYALTLTRDQGYPSVFYGDYYGIPTHGVPAMKSKIDPILEARQKYAYGKQNDYLDHHNMIGWTREGNTAHPNSGLATIMSDGPGGNKWMYVGRNKAGQVWRDITGNRSGTVTINADGWGNFSVNGGSVSIWVN

SEQ ID NO: 20596 - protein, 484 aa, Synthetic construct
HHNGTNGTMMQYFEWYLPNDGNHWHRLRSDASNLKDKGITAVWIPPAWKGASQNDVGYGAYDLYDLGEFNQKGTVRTKYGTRNQLQAAVTALKSNGIQVYGDVVMNHKGGADATEWVRAVEVNPSNRNQEVSGDYTIEAWTKFDFPGRGNTHSNFKWRWWHFDGVDWDQSRQLQNKIYKFRGDGKEWDWEVDTENGNYDYLMYADYDMDHPEVVNELRNWGVWYTNTLGLDGFRIDAVKHIKYSFTRDWLEHVRNTTGKNMFAVAEFWKNDIGAIRNYLSKTNWNHSVFDVPLHYNLYNASRSGGNYDMRQIFNGTVVQRHPGHAVTFVDNHDSQPEEALESFVEEWFKPLAYALTLTRDQGYPSVFYGDYYGIPTHGVPAMKSKIDPILEARQKYAYGKQNDYLDHHNMIGWTREGNTAHPNSGLATIMSDGPGGNKWMYVGRNKAGQVWRDITGNRSGTVTINADGWGNFSVNGGSVSIWVN

SEQ ID NO: 20597 - protein, 484 aa, Synthetic construct
HHNQTNGTMMQYFEWYLPNDGNHWHRLRSDASNLKDKGITAVWIPPAWKGASQNDVGYGAYDLYDLGEFNQKGTVRTKYGTRNQLQAAVTALKSNGIQVYGDVVMNHKGGADATEWVRAVEVNPSNRNQEVSGDYTIEAWTKFDFPGRGNTHSNFKWRWYHFDGVDWDQSRQLQNKIYKFRGDGKGWDWEVDTENGNYDYLMYADYDMDHPEVVNELRNWGVWYTNTLGLDGFRIDAVKHIKYSFTRDWLEHVRNTTGKNMFAVAEFWKNDIGAIRNYLSKTNWNHSVFDVPLHYNLYNASRSGGNYDMRQIFNGTVVQRHPTHAVTFVDNHDSQPEEALESFVEEWFKPLAYALTLTRDQGYPSVFYGDYYGIPTHGVPAMKSKIDPILEARQKYAYGKQNDYMDHHNMIGWTREGNTAHPNSGLATIMSDGPGGNKWMYVGRNKAGQVWRDITGNRSGTVTINADGWGNFSVNGGSVSIWVN

SEQ ID NO: 20598 - protein, 484 aa, Synthetic construct
HHNGTNGTMMQYFEWYLPNDGNHWHRLRSDASNLKDKGITAVWIPPAWKGASQNDVGYGAYDLYDLGEFNQKGTVRTKYGTRNQLQAAVTALKSNGIQVWGDVVMNHKGGADATEWVRAVEVNPSNRNQEVSGDYTIEAWTKFDFPGRGNTHSNFKWRWYHFDGVDWDQSRQLQNKIYKFRGDGKEWDWEVDTENGNYDYLMYADYDMDHPEVVNELRNWGVWYTNTLGLDGFRIDAVKHIKYSFTRDWLTHVRNTTGKNMFAVAEFWKNDIGAIENYLSNTNWNHSVFDVPLHYNLYNASRSGGNYDMRQIFNGTVVQRHPTHAVTFVDNHDSQPEEALESFVEEWFKPLAYALTLTRDQGYPSVFYGDYYGIPTHGVPAMKSKIDPILEARQKYAYGKQNDYLDHHNMIGWTREGNTAHPNSGLATIMSDGPGGNKWMYVGRNKAGQVWRDITGNRSGTVTINADGWGNFSVNGGSVSIWVN

SEQ ID NO: 20599 - protein, 484 aa, Synthetic construct
HHNGTNGTMMQYFEWYLPNDGNHWHRLRSDASNLKDKGITAVWIPPAWKGASQNDVGYGAYDLYDLGEFNQKGTVRTKYGTRNQLQAAVTALKSNGIQVYGDVVMNHKGGADATEWVRAVEVNPSNRNQEVSGDYTIEAWTKFDFPGRGNTHSNFKWRWYHFDGVDWDQSRQLQNKIYKFQGDGKEWDWEVDTENGNYDYLMYADYDMDHPEVVNELRNWGVWYTNTLGLDGFRIDAVKHIKYSFTRDWLTHVRNTTGKNMFAVAEFWKNDIGAIENYLSKTNWNHSVFDVPLHYNLYNASRSGGNYDMRQIFNGTVVQRHPTHAVTFVDNHDSQPEEALESFVEEWFKPLAYALTLTRDQGEPSVFYGDYYGIPTHGVPAMKSKIDPILEARQKYAYGKQNDYLDHHNMIGWTREGNTAHPNSGLATIMSDGPGGNKWMYVGRNKAGQVWRDITGNRSGTVTINADGWGNFSVNGGSVSIWVN

SEQ ID NO: 20600 - protein, 484 aa, Synthetic construct
HHNQTNGTMMQYFEWYLPNDGNHWHRLRSDASNLKDKGITAVWIPPAWKGASQNDVGYGAYDLYDLGEFNQKGTVRTKYGTRNQLQAAVTALKSNGIQVYGDVVMNHKGGADATEWVRAVEVNPSNRNQEVSGDYTIEAWTKFDFPGRGNTHSNFKWRWYHFDGVDWDQSRQLQNKIYKFRGDGKEWDWEVDTENGNYDYLMYADYDMDHPEVVNELRNWGVWYTNTLGLDGFRIDAVKHIKYSFTRDWLEHVRNTTGKNMFAVAEFWKNDIGAIENYLSKTNWNHSVFDVPLHYNLYNASRSGGNYDMRQIFNGTVVQRHPTHAVTFVDNHDSQPEEALESFVEEWFKPLAYALTLTRDQGYPSVFYGDYYGIPTHGVPAMKSKIDPILEARQKYAYGKQNDYMDHHNMIGWTREGNTAHPNSGLATIMSDGPGGNKWMYVGRNKAGQVWRDITGNRSGTVTINADGWGNFSVNGGSVSIWVN

SEQ ID NO: 20601 - protein, 484 aa, Synthetic construct
HHNGTNGTMMQYFEWYLPNDGNHWHRLRSDASNLKDKGITAVWIPPAWKGASQNDVGYGAYDLYDLGEFNQKGTVRTKYGTRNQLQAAVTALKSNGIQVYGDVVMNHKGGADATEWVRAVEVNPSNRNQEVSGDTTIEAWTKFDFPGRGNTHSNFKWRWYHFDGVDWDQSRQLQNKIYKFRGDGKEWDWEVDTENGNYDYLMYADYDMDHPEVVNELRNWGVWYTNTLGLDGFRIDAVKHIKYSFTRDWLTHVRNTTGKNMFAVAEFWKNDIGAIENYLSKTNWNHSVFDVPLHYNLYNASRSGGNYDMRQIFNGTVVQRHPTHAVTFVDNHDSQPEEALESFVEEWFKPLAYALTLTRDQGEPSVFYGDYYGIPTHGVPAMKSKIDPILEARQKYAYGKQNDYLDHHNMIGWTREGNTAHPNSGLATIMSDGPGGNKWMYVGRNKAGQVWRDITGNRSGTVTINADGWGNFSVNGGSVSIWVN

SEQ ID NO: 20602 - protein, 484 aa, Synthetic construct
HHNGTNGTMMQYFEWYLPNDGNHWHRLRSDASNLKDKGITAVWIPPAWKGASQNDVGYGAYDLYDLGEFNQKGTVRTKYGTRNQLQAAVTALKSNGIQVYGDVVMNHKGGADATEWVRAVEVNPSNRNQEVSGDYTIEAWTKFDFPGRGNTHSNFKWRWWHFDGVDWDQSRQLQNRIYKFRGDGKEWDWEVDTENGNYDYLMYADYDMDHPEVVNELRNWGVWYTNTLGLDGFRIDAVKHIKYSFTRDWLEHVRNTTGKNMFAVAEFWKNDIGAIRNYLSKTNWNHSVFDVPLHYNLYNASRSGGNYDMRQIFNGTVVQRHPGHAVTFVDNHDSQPEEALESFVEEWFKPLAYALTLTRDQGYPSVFYGDYYGIPTHGVPAMKSKIDPILEARQKYAYGKQNDYMDHHNMIGWTREGNTAHPNSGLATIMSDGPGGNKWMYVGRNKAGQVWRDITGNRSGTVTINADGWGNFSVNGGSVSIWVN

SEQ ID NO: 20603 - protein, 484 aa, Synthetic construct
HHNGTNGTMMQYFEWYLPNDGNHWHRLRSDASNLKDKGITAVWIPPAWKGASQNDVGYGAYDLYDLGEFNQKGTVRTKYGTRNQLQAAVTALKSNGIQVYGDVVMNHKGGADATEWVRAVEVNPSNRNQEVSGDYTIEAWTKFDFPGRGNTHSNFKWRWYHFDGVDWDQSRQLQNRIYKFRGDGKEWDWEVDEENGNYDYLMYADYDMDHPEVVNELRNWGVWYTNTLGLDGFRIDAVKHIKYSFTRDWLEHVRNTTGKNMFAVAEFWKNDIGAIRNYLSKTNWNHSVFDVPLHYNLYNASRSGGNYDMRQIFNGTVVQRHPTHAVTFVDNHDSQPEEALESFVEEWFKPLAYALTLTRDQGYPSVFYGDYYGIPTHGVPAMKSKIDPILEARQKYAYGKQNDYMDHHNMIGWTREGNTAHPNSGLATIMSDGPGGNKWMYVGRNKAGQVWRDITGNRSGTVTINADGWGNFSVNGGSVSIWVN

SEQ ID NO: 20604 - protein, 484 aa, Synthetic construct
HHNGTNGTMMQYFEWYLPNDGNHWNRLRSDASNLKDKGITAVWIPPAWKGASQNDVGYGAYDLYDLGEFNQKGTVRTKYGTRNQLQRAVTALKSNGIQVYGDVVMNHKGGADATEWVRAVEVNPSNRNQEVSGDYTIEAWTKFDFPGRGNTHSNFKWRWYHFDGVDWDQSRQLQNRIYKFRGDGKEWDWEVDTENGNYDYLMYADIDMDHPEVVNELRNWGVWYTRTLGLDGFRIDAVKHIKYSFTRDWLTHVRNTTGKNMFAVAEFWKNDIGAIENYLSKTNWNHSVFDVPLHYNLYNASRSGGNYDMRQIFKGTVVQRHPTHAVTFVDNHDSQPEEALESFVEEWFKPLAYALTLTRDQGYPSVFYGDYYGIPTHGVPAMKSKIDPILEARQKYAYGKQNDYLDHHNMIGWTREGNTKHPNSGLATIMSDGPGGNKWMYVGRNKAGQVWRDITGNRSGRVTINADGWGNFSVNGGSVSIWVN

SEQ ID NO: 20605 - protein, 484 aa, Synthetic construct
HHNGTNGTMMQYFEWYLPNDGNHWHRLRSDASNLKDKGITAVWIPPAWKGASQNDVGYGAYDLYDLGEFNQKGTVRTKYGTRNQLQAAVTALKSNGIQVWGDVVMNHKGGADATEWVRAVEVNPSNRNQEVSGDYTIEAWTKFDFPGRGNTHSNFKWRWYHFDGVDWDQSRQLQNKIYKFRGDGKEWDWEVDTENGNYDYLMYADYDMDHPEVVNELRNWGVWYTNTLGLDGFRIDAVKHIKYSFTRDWLTHVRNTTQKNMFAVAEFWKNDIGAIENYLSKTNWNHSVFDVPLHYNLYNASRSGGNYDMRQIFNGTVVQRHPTHAVTFVDNHDSQPEEALESFVEEWFKPLAYALTLTRDQGYPSVFYGDYYGIPTHGVPAMKSKIDPILEARQKYAYGKQNDYLDHHNMIGWTREGNTAHPNSGLATIMSDGPGGNKWMYVGRNKAGQVWRDITGNRSGTVTINADGWGNFSVNGGSVSIWVN

SEQ ID NO: 20606 - protein, 484 aa, Synthetic construct
HHNGTNGTMMQYFEWYLPNDGNHWHRLRSDASNLKDKGITAVWIPPAWKGASQNDVGYGAYDLYDLGEFNQKGTVRTKYGTRNQLQAAVTALKSNGIQVWGDVVMNHKGGADATEWVRAVEVNPSNRNQEVSGDYTIEAWTKFDFPGRGNTHSNFKWRWYHFDGVDWDQSRQLQNKIYKFRGDGKEWDWEVDEENGNYDYLMYADYDMDHPEVVNELRNWGVWYTNTLGLDGFRIDAVKHIKYSFTRDWLTHVRNTTGKNMFAVAEFWKNDIGAIENYLSKTNWNHSVFDVPLHYNLYNASRSGGNYDMRQIFNGTVVQRHPTHAVTFVDNHDSQPEEALESFVEEWFKPLAYALTLTRDQGYPSVFYGDYYGIPTHGVPAMKSKIDPILEARQKYAYGKQNDYLDHHNMIGWTREGNTAHPNSGLATIMSDGPGGNKWMYVGRNKAGQVWRDITGNRSGTVTINADGWGNFSVNGGSVSIWVN

SEQ ID NO: 20607 - protein, 484 aa, Synthetic construct
HHNQTNGTMMQYFEWYLPNDGNHWNRLRSDASNLKDKGITAVWIPPAWKGASQNDVGYGAYDLYDLGEFNQKGTVRTKYGTRNQLQAAVTALKSNGIQVYGDVVMNHKGGADATEWVRAVEVNPSNRNQEVSGDYTIEAWTKFDFPGRGNTHSNFKWRWWHFDGVDWDQSRQLQNKIYKFRGDGKEWDWEVDTENGNYDYLMYADIDMDHPEVVNELRNWGVWYTNTLGLDGFRIDAVKHIKYSFTRDWLTHVRNTTGKNMFAVAEFWKNDIGAIRNYLSKTNWNHSVFDVPLHYNLYNASRSGGNYDMRQIFNGTVVQRHPTHAVTFVDNHDSQPEEALESFVEEWFKPLAYALTLTRDQGYPSVFYGDYYGIPTHGVPAMKSKIDPILEARQKYAYGKQNDYMDHHNMIGWTREGNTAHPNSGLATIMSDGPGGNKWMYVGRNKAGQVWRDITGNRSGTVTINADGWGNFSVNGGSVSIWVN

SEQ ID NO: 20608 - protein, 484 aa, Synthetic construct
HHNQTNGTMMQYFEWYLPNDGNHWNRLRSDASNLKDKGITAVWIPPAWKGASQNDVGYGAYDLYDLGEFNQKGTVRTKYGTRNQLQAAVTALKSNGIQVYGDVVMNHKGGADATEWVRAVEVNPSNRNQEVSGDYTIEAWTKFDFPGRGNTHSNFKWRWYHFDGVDWDQSRQLQNKIYKFRGDGKEWDWEVDTENGNYDYLMYADYDMDHPEVVNELRNWGVWYTNTLGLDGFRIDAVKHIKYSFTRDWLTHVRNTTGKNMFAVAEFWKNDIGAIRNYLSKTNWNHSVFDVPLHYNLYNASRSGGNYDMRQIFNGTVVQRHPTHAVTFVDNHDSQPEEALESFVEEWFKPLAYALTLTRDQGYPSVFYGDYYGIPTHGVPAMKSKIDPILEARQKYAYGKQNDYMDHHNMIGWTREGNTAHPNSGLATIMSDGPGGNKWMYVGRNKAGQVWRDITGNRSGTVTINADGWGNFSVNGGSVSIWVN

SEQ ID NO: 20609 - protein, 484 aa, Synthetic construct
HHNGTNGTMMQYFEWYLPNDGNHWHRLRSDASNLKDKGITAVWIPPAWKGASQNDVGYGAYDLYDLGEFNQKGTVRTKYGTRNQLQAAVTALKSNGIQVYGDVVMNHKGGADATEWVRAVEVNPSNRNQEVSGDYTIEAWTKFDFPGRGNTHSNFKWRWWHFDGVDWDQSRQLQNKIYKFRGDGKEWDWEVDTENGNYDYLMYADYDMDHPEVVNELRNWGVWYTNTLGLDGFRIDAVKHIKYSFTRDWLEHVRNTTGKNMFAVAEFWKNDIGAIENYLSKTNWNHSVFDVPLHYNLYNASRSGGNYDMRQIFNGTVVQRHPTHAVTFVDNHDSQPEEALESFVEEWFKPLAYALTLTRDQGYPSVFYGDYYGIPTHGVPAMKSKIDPILEARQKYAYGKQNDYMDHHNMIGWTREGNTAHPNSGLATIMSDGPGGNKWMYVGRNKAGQVWRDITGNRSGTVTINADGWGNFSVNGGSVSIWVN

SEQ ID NO: 20610 - protein, 484 aa, Synthetic construct
HHNGTNGTMMQYFEWYLPNDGNHWHRLRSDASNLKDKGITAVWIPPAWKGASQNDVGYGAYDLYDLGEFNQKGTVRTKYGTRNQLQAAVTALKSNGIQVYGDVVMNHKGGADATEWVRAVEVNPSNRNQEVSGDYTIEAWTKFDFPGRGNTHSNFKWRWYHFDGVDWDQSRQLQNKIYKFRGDGKEWDWEVDTENGNYDYLMYADYDMDHPEVVNELRNWGVWYTNTLGLDGFRIDAVKHIKYSFTRDWLEHVRNTTGKNMFAVAEFWKNDIGAIRNYLSKTNWNHSVFDVPLHYNLYNASRSGGNYDMRQIFNGTVVQRHPTHAVTFVDNHDSQPEEALESFVEEWFKPLAYALTLTRDQGYPSVFYGDYYGIPTHGVPAMKSKIDPILEARQKYAYGKQNDYMDHHNMIGWTREGNTAHPNSGLATIMSDGPGGNKWMYVGRNKAGQVWRDITGNRSGTVTINADGWGNFSVNGGSVSIWVN

SEQ ID NO: 20611 - protein, 484 aa, Synthetic construct
HHNQTNGTMMQYFEWYLPNDGNHWNRLRSDASNLKDKGITAVWIPPAWKGASQNDVGYGAYDLYDLGEFNQKGTVRTKYGTRNQLQAAVTALKSNGIQVYGDVVMNHKGGADATEWVRAVEVNPSNRNQEVSGDYTIEAWTKFDFPGRGNTHSNFKWRWYHFDGVDWDQSRQLQNKIYKFRDDGKEWDWEVDEENGNYDYLMYADYDMDHPEVVNELRNWGVWYTNTLGLDGFRIDAVKHIKYSFTRDWLEHVRNTTGKNMFAVAEFWKNDIGAIENYLSKTNWNHSVFDVPLHYNLYNASRSGGNYDMRQIFNGTVVQRHPTHAVTFVDNHDSQPEEALESFVEEWFKPLAYALTLTRDQGYPSVFYGDYYGIPTHGVPAMKSKIDPILEARQKYAYGKQNDYMDHHNMIGWTREGNTAHPNSGLATIMSDGPGGNKWMYVGRNKAGQVWRDITGNRSGTVTINADGWGNFSVNGGSVSIWVN

SEQ ID NO: 20612 - protein, 484 aa, Synthetic construct
HHNGTNGTMMQYFEWYLPNDGNHWNRLRSDASNLKDKGITAVWIPPAWKGASQNDVGYGAYDLYDLGEFNQKGTVRTKYGTRNQLQDAVTALKSNGIQVYGDVVMNHKGGADATEWVRAVEVNPSNRNQEVSGDYTIEAWTKFDFPGRGNTHSNFKWRWYHFDGVDWDQSRQLQNRIYKFRGDGKEWDWEVDTENGNYDYLMYADIDMDHPEVVNELRNWGVWYTDTLGLDGFRIDAVKHIKYSFTRDWLTHVRNTTGKNMFAVAEFWKNDIGAIENYLSKTNWNHSVFDVPLHYNLYNASRSGGNYDMRQIFEGTVVQRHPTHAVTFVDNHDSQPEEALESFVEEWFKPLAYALTLTRDQGYPSVFYGDYYGIPTHGVPAMKSKIDPILEARQKYAYGKQNDYLDHHNMIGWTREGNTEHPNSGLATIMSDGPGGNKWMYVGRNKAGQVWRDITGNRSGEVTINADGWGNFSVNGGSVSIWVN

SEQ ID NO: 20613 - protein, 484 aa, Synthetic construct
HHNQTNGTMMQYFEWYLPNDGNHWNRLRSDASNLKDKGITAVWIPPAWKGASQNDVGYGAYDLYDLGEFNQKGTVRTKYGTRNQLQAAVTALKSNGIQVYGDVVMNHKGGADATEWVRAVEVNPSNRNQEVSGDYTIEAWTKFDFPGRGNTHSNFKWRWWHFDGVDWDQSRQLQNKIYKFRGDGKEWDWEVDTENGNYDYLMYADIDMDHPEVVNELRNWGVWYTNTLGLDGFRIDAVKHIKYSFTRDWLEHVRNTTGKNMFAVAEFWKNDIGAIRNYLSKTNWNHSVFDVPLHYNLYNASRSGGNYDMRQIFNGTVVQRHPTHAVTFVDNHDSQPEEALESFVEEWFKPLAYALTLTRDQGYPSVFYGDYYGIPTHGVPAMKSKIDPILEARQKYAYGKQNDYMDHHNMIGWTREGNTAHPNSGLATIMSDGPGGNKWMYVGRNKAGQVWRDITGNRSGTVTINADGWGNFSVNGGSVSIWVN

SEQ ID NO: 20614 - protein, 484 aa, Synthetic construct
HHNGTNGTMMQYFEWYLPNDGNHWHRLRSDASNLKDKGITAVWIPPAWKGASQNDVGYGAYDLYDLGEFNQKGTVRTKYGTRNQLQAAVTALKSNGIQVYGDVVMNHKGGADATEWVRAVEVNPSNRNQEVSGDYTIEAWTKFDFPGRGNTHSNFKWRWWHFDGVDWDQSRQLQNKIYKFRGDGKEWDWEVDTENGNYDYLMYADYDMDHPEVVNELRNWGVWYTNTLGLDGFRIDAVKHIKYSFTRDWLTHVRNTTGKNMFAVAEFWKNDIGAIRNYLSKTNWNHSVFDVPLHYNLYNASRSGGNYDMRQIFNGTVVQRHPTHAVTFVDNHDSQPEEALESFVEEWFKPLAYALTLTRDQGYPSVFYGDYYGIPTHGVPAMKSKIDPILEARQKYAYGKQNDYLDHHNMIGWTREGNTAHPNSGLATIMSDGPGGNKWMYVGRNKAGQVWRDITGNRSGTVTINADGWGNFSVNGGSVSIWVN

SEQ ID NO: 20615 - protein, 484 aa, Synthetic construct
HHNGTNGTMMQYFEWYLPNDGNHWHRLRSDASNLKDKGITAVWIPPAWKGASQNDVGYGAYDLYDLGEFNQKGTVRTKYGTRNQLQAAVTALKSNGIQVYGDVVMNHKGGADATEWVRAVEVNPSNRNQEVSGDYTIEAWTKFDFPGRGNTHSNFKWRWYHFDGVDWDQSRQLQNRIYKFRGDGKEWDWEVDEENGNYDYLMYADYDMDHPEVVNELRNWGVWYTNTLGLDGFRIDAVKHIKYSFTRDWLTHVRNTTGKNMFAVAEFWKNDIGAIRNYLSKTNWNHSVFDVPLHYNLYNASRSGGNYDMRQIFNGTVVQRHPTHAVTFVDNHDSQPEEALESFVEEWFKPLAYALTLTRDQGYPSVFYGDYYGIPTHGVPAMKSKIDPILEARQKYAYGKQNDYMDHHNMIGWTREGNTAHPNSGLATIMSDGPGGNKWMYVGRNKAGQVWRDITGNRSGTVTINADGWGNFSVNGGSVSIWVN

SEQ ID NO: 20616 - protein, 484 aa, Synthetic construct
HHNQTNGTMMQYFEWYLPNDGNHWHRLRSDASNLKDKGITAVWIPPAWKGASQNDVGYGAYDLYDLGEFNQKGTVRTKYGTRNQLQAAVTALKSNGIQVYGDVVMNHKGGADATEWVRAVEVNPSNRNQEVSGDYTIEAWTKFDFPGRGNTHSNFKWRWWHFDGVDWDQSRQLQNKIYKFRGDGKEWDWEVDTENGNYDYLMYADIDMDHPEVVNELRNWGVWYTNTLGLDGFRIDAVKHIKYSFTRDWLTHVRNTTGKNMFAVAEFWKNDIGAIENYLSKTNWNHSVFDVPLHYNLYNASRSGGNYDMRQIFNGTVVQRHPTHAVTFVDNHDSQPEEALESFVEEWFKPLAYALTLTRDQGYPSVFYGDYYGIPTHGVPAMKSKIDPILEARQKYAYGKQNDYMDHHNMIGWTREGNTAHPNSGLATIMSDGPGGNKWMYVGRNKAGQVWRDITGNRSGTVTINADGWGNFSVNGGSVSIWVN

SEQ ID NO: 20617 - protein, 484 aa, Synthetic construct
HHNQTNGTMMQYFEWYLPNDGNHWNRLRSDASNLKDKGITAVWIPPAWKGASQNDVGYGAYDLYDLGEFNQKGTVRTKYGTRNQLQAAVTALKSNGIQVYGDVVMNHKGGADATEWVRAVEVNPSNRNQEVSGDYTIEAWTKFDFPGRGNTHSNFKWRWWHFDGVDWDQSRQLQNRIYKFRGDGKEWDWEVDTENGNYDYLMYADYDMDHPEVVNELRNWGVWYTNTLGLDGFRIDAVKHIKYSFTRDWLEHVRNTTGKNMFAVAEFWKNDIGAIRNYLSKTNWNHSVFDVPLHYNLYNASRSGGNYDMRQIFNGTVVQRHPTHAVTFVDNHDSQPEEALESFVEEWFKPLAYALTLTRDQGYPSVFYGDYYGIPTHGVPAMKSKIDPILEARQKYAYGKQNDYMDHHNMIGWTREGNTAHPNSGLATIMSDGPGGNKWMYVGRNKAGQVWRDITGNRSGTVTINADGWGNFSVNGGSVSIWVN

SEQ ID NO: 20618 - protein, 484 aa, Synthetic construct
HHNGTNGTMMQYFEWYLPNDGNHWHRLRSDASNLKDKGITAVWIPPAWKGASQNDVGYGAYDLYDLGEFNQKGTVRTKYGTRNQLQAAVTALKSNGIQVYGDVVMNHKGGADATEWVRAVEVNPSNRNQEVSGDTTIEAWTKFDFPGRGNTHSNFKWRWYHFDGVDWDQSRQLQNKIYKFRGDGKEWDWEVDTENGNYDYLMYADYDMDHPEVVNELRNWGVWYTNTLGLDGFRIDAVKHIKYSFTRDWLTHVRNTTGKNMFAVAEFWKNDIGAIENYLSNTNWNHSVFDVPLHYNLYNASRSGGNYDMRQIFNGTVVQRHPTHAVTFVDNHDSQPEEALESFVEEWFKPLAYALTLTRDQGYPSVFYGDYYGIPTHGVPAMKSKIDPILEARQKYAYGKQNDYLDHHNMIGWTREGNTAHPNSGLATIMSDGPGGNKWMYVGRNKAGQVWRDITGNRSGTVTINADGWGNFSVNGGSVSIWVN

SEQ ID NO: 20619 - protein, 484 aa, Synthetic construct
HHNQTNGTMMQYFEWYLPNDGNHWHRLRSDASNLKDKGITAVWIPPAWKGASQNDVGYGAYDLYDLGEFNQKGTVRTKYGTRNQLQAAVTALKSNGIQVYGDVVMNHKGGADATEWVRAVEVNPSNRNQEVSGDYTIEAWTKFDFPGRGNTHSNFKWRWYHFDGVDWDQSRQLQNKIYKFRGDGKEWDWEVDTENGNYDYLMYADYDMDHPEVVNELRNWGVWYTNTLGLDGFRIDAVKHIKYSFTRDWLTHVRNTTGKNMFAVAEFWKNDIGAIRNYLSKTNWNHSVFDVPLHYNLYNASRSGGNYDMRQIFNGTVVQRHPTHAVTFVDNHDSQPEEALESFVEEWFKPLAYALTLTRDQGYPSVFYGDYYGIPTHGVPAMKSKIDPILEARQKYAYGKQNDYLDHHNMIGWTREGNTAHPNSGLATIMSDGPGGNKWMYVGRNKAGQVWRDITGNRSGTVTINADGWGNFSVNGGSVSIWVN

SEQ ID NO: 20620 - protein, 484 aa, Synthetic construct
HHNGTNGTMMQYFEWYLPNDGNHWHRLRSDASNLKDKGITAVWIPPAWKGASQNDVGYGAYDLYDLGEFNQKGTVRTKYGTRNQLQAAVTALKSNGIQVYGDVVMNHKGGADATEWVRAVEVNPSNRNQEVSGDYTIEAWTKFDFPGRGNTHSNFKWRWYHFDGVDWDQSRQLQNKIYKFRGDGKEWDWEVDEENGNYDYLMYADYDMDHPEVVNELRNWGVWYTNTLGLDGFRIDAVKHIKYSFTRDWLTHVRNTTQKNMFAVAEFWKNDIGAIENYLSKTNWNHSVFDVPLHYNLYNASRSGGNYDMRQIFNGTVVQRHPTHAVTFVDNHDSQPEEALESFVEEWFKPLAYALTLTRDQGYPSVFYGDYYGIPTHGVPAMKSKIDPILEARQKYAYGKQNDYLDHHNMIGWTREGNTAHPNSGLATIMSDGPGGNKWMYVGRNKAGQVWRDITGNRSGTVTINADGWGNFSVNGGSVSIWVN

SEQ ID NO: 20621 - protein, 484 aa, Synthetic construct
HHNQTNGTMMQYFEWYLPNDGNHWHRLRSDASNLKDKGITAVWIPPAWKGASQNDVGYGAYDLYDLGEFNQKGTVRTKYGTRNQLQAAVTALKSNGIQVYGDVVMNHKGGADATEWVRAVEVNPSNRNQEVSGDYTIEAWTKFDFPGRGNTHSNFKWRWWHFDGVDWDQSRQLQNRIYKFRGDGKEWDWEVDTENGNYDYLMYADYDMDHPEVVNELRNWGVWYTNTLGLDGFRIDAVKHIKYSFTRDWLTHVRNTTGKNMFAVAEFWKNDIGAIENYLSKTNWNHSVFDVPLHYNLYNASRSGGNYDMRQIFNGTVVQRHPGHAVTFVDNHDSQPEEALESFVEEWFKPLAYALTLTRDQGYPSVFYGDYYGIPTHGVPAMKSKIDPILEARQKYAYGKQNDYMDHHNMIGWTREGNTAHPNSGLATIMSDGPGGNKWMYVGRNKAGQVWRDITGNRSGTVTINADGWGNFSVNGGSVSIWVN

SEQ ID NO: 20622 - protein, 484 aa, Synthetic construct
HHNGTNGTMMQYFEWYLPNDGNHWHRLRSDASNLKDKGITAVWIPPAWKGASQNDVGYGAYDLYDLGEFNQKGTVRTKYGTRNQLQAAVTALKSNGIQVYGDVVMNHKGGADATEWVRAVEVNPSNRNQEVSGDYTIEAWTKFDFPGRGNTHSNFKWRWWHFDGVDWDQSRQLQNKIYKFRGDGKGWDWEVDTENGNYDYLMYADYDMDHPEVVNELRNWGVWYTNTLGLDGFRIDAVKHIKYSFTRDWLTHVRNTTGKNMFAVAEFWKNDIGAIRNYLSKTNWNHSVFDVPLHYNLYNASRSGGNYDMRQIFNGTVVQRHPGHAVTFVDNHDSQPEEALESFVEEWFKPLAYALTLTRDQGYPSVFYGDYYGIPTHGVPAMKSKIDPILEARQKYAYGKQNDYMDHHNMIGWTREGNTAHPNSGLATIMSDGPGGNKWMYVGRNKAGQVWRDITGNRSGTVTINADGWGNFSVNGGSVSIWVN

SEQ ID NO: 20623 - protein, 484 aa, Synthetic construct
HHNGTNGTMMQYFEWYLPNDGNHWHRLRSDASNLKDKGITAVWIPPAWKGASQNDVGYGAYDLYDLGEFNQKGTVRTKYGTRNQLQAAVTALKSNGIQVYGDVVMNHKGGADATEWVRAVEVNPSNRNQEVSGDYTIEAWTKFDFPGRGNTHSNFKWRWYHFDGVDWDQSRQLQNKIYKFRGDGKEWDWEVDEENGNYDYLMYADYDMDHPEVVNELRNWGVWYTNTLGLDGFRIDAVKHIKYSFTRDWLTHVRNTTGKNMFAVAEFWKNDIGAIENYLSKTNWNHSVFDVPLHYNLYNASRSGGNYDMRQIFNGTVVQRHPTHAVTFVDNHDSQPEEALESFVEEWFKPLAYALTLTRDQGEPSVFYGDYYGIPTHGVPAMKSKIDPILEARQKYAYGKQNDYLDHHNMIGWTREGNTAHPNSGLATIMSDGPGGNKWMYVGRNKAGQVWRDITGNRSGTVTINADGWGNFSVNGGSVSIWVN

SEQ ID NO: 20624 - protein, 484 aa, Synthetic construct
HHNQTNGTMMQYFEWYLPNDGNHWNRLRSDASNLKDKGITAVWIPPAWKGASQNDVGYGAYDLYDLGEFNQKGTVRTKYGTRNQLQAAVTALKSNGIQVYGDVVMNHKGGADATEWVDAVEVNPSNRNQEVSGDYTIEAWTKFDFPGRGNTHSNFKWRWYHFDGVDWDQSRQLQNKIYKFRGDGKEWDWEVDEENGNYDYLMYADYDMDHPEVVNELRNWGVWYTNTLGLDGFRIDAVKHIKYSFTRDWLEHVRNTTGKNMFAVAEFWKNDIGAIENYLSKTNWNHSVFDVPLHYNLYNASRSGGNYDMRQIFNGTVVQRHPTHAVTFVDNHDSQPEEALESFVEEWFKPLAYALTLTRDQGYPSVFYGDYYGIPTHGVPAMKSKIDPILEARQKYAYGKQNDYMDHHNMIGWTREGNTAHPNSGLATIMSDGPGGNKWMYVGRNKAGQVWRDITGNRSGTVTINADGWGNFSVNGGSVSIWVN

SEQ ID NO: 20625 - protein, 484 aa, Synthetic construct
HHNQTNGTMMQYFEWYLPNDGNHWHRLRSDASNLKDKGITAVWIPPAWKGASQNDVGYGAYDLYDLGEFNQKGTVRTKYGTRNQLQAAVTALKSNGIQVYGDVVMNHKGGADATEWVRAVEVNPSNRNQEVSGDYTIEAWTKFDFPGRGNTHSNFKWRWWHFDGVDWDQSRQLQNKIYKFRGDGKEWDWEVDTENGNYDYLMYADIDMDHPEVVNELRNWGVWYTNTLGLDGFRIDAVKHIKYSFTRDWLEHVRNTTGKNMFAVAEFWKNDIGAIENYLSKTNWNHSVFDVPLHYNLYNASRSGGNYDMRQIFNGTVVQRHPTHAVTFVDNHDSQPEEALESFVEEWFKPLAYALTLTRDQGYPSVFYGDYYGIPTHGVPAMKSKIDPILEARQKYAYGKQNDYMDHHNMIGWTREGNTAHPNSGLATIMSDGPGGNKWMYVGRNKAGQVWRDITGNRSGTVTINADGWGNFSVNGGSVSIWVN

SEQ ID NO: 20626 - protein, 484 aa, Synthetic construct
HHNGTNGTMMQYFEWYLPNDGNHWHRLRSDASNLKDKGITAVWIPPAWKGASQNDVGYGAYDLYDLGEFNQKGTVRTKYGTRNQLQAAVTALKSNGIQVWGDVVMNHKGGADATEWVRAVEVNPSNRNQEVSGDTTIEAWTKFDFPGRGNTHSNFKWRWYHFDGVDWDQSRQLQNKIYKFRGDGKEWDWEVDTENGNYDYLMYADYDMDHPEVVNELRNWGVWYTNTLGLDGFRIDAVKHIKYSFTRDWLTHVRNTTGKNMFAVAEFWKNDIGAIENYLSKTNWNHSVFDVPLHYNLYNASRSGGNYDMRQIFNGTVVQRHPTHAVTFVDNHDSQPEEALESFVEEWFKPLAYALTLTRDQGYPSVFYGDYYGIPTHGVPAMKSKIDPILEARQKYAYGKQNDYLDHHNMIGWTREGNTAHPNSGLATIMSDGPGGNKWMYVGRNKAGQVWRDITGNRSGTVTINADGWGNFSVNGGSVSIWVN

SEQ ID NO: 20627 - protein, 484 aa, Synthetic construct
HHNGTNGTMMQYFEWYLPNDGNHWHRLRSDASNLKDKGITAVWIPPAWKGASQNDVGYGAYDLYDLGEFNQKGTVRTKYGTRNQLQAAVTALKSNGIQVWGDVVMNHKGGADATEWVRAVEVNPSNRNQEVSGDYTIEAWTKFDFPGRGNTHSNFKWRWYHFDGVDWDQSRQLQNKIYKFRGDGKEWDWEVDTENGNYDYLMYADYDMDHPEVVNELRNWGVWYTNTLGLDGFRIDAVKHIKYSFTRDWLTHVRNTTGKNMFAVAEFWKNDIGAIENYLSKTNWNHSVFDVPLHYNLYNASRSGGNYDMRQIFNGTVVQRHPTHAVTFVDNHDSQPEEALESFVEEWFKPLAYALTLTRDQGEPSVFYGDYYGIPTHGVPAMKSKIDPILEARQKYAYGKQNDYLDHHNMIGWTREGNTAHPNSGLATIMSDGPGGNKWMYVGRNKAGQVWRDITGNRSGTVTINADGWGNFSVNGGSVSIWVN

SEQ ID NO: 20628 - protein, 484 aa, Synthetic construct
HHNGTNGTMMQYFEWYLPNDGNHWHRLRSDASNLKDKGITAVWIPPAWKGASQNDVGYGAYDLYDLGEFNQKGTVRTKYGTRNQLQAAVTALKSNGIQVYGDVVMNHKGGADATEWVRAVEVNPSNRNQEVSGDTTIEAWTKFDFPGRGNTHSNFKWRWYHFDGVDWDQSRQLQNKIYKFRGDGKEWDWEVDTENGNYDYLMYADYDMDHPEVVNELRNWGVWYTNTLGLDGFRIDAVKHIKYSFTRDWLTHVRNTTQKNMFAVAEFWKNDIGAIENYLSKTNWNHSVFDVPLHYNLYNASRSGGNYDMRQIFNGTVVQRHPTHAVTFVDNHDSQPEEALESFVEEWFKPLAYALTLTRDQGYPSVFYGDYYGIPTHGVPAMKSKIDPILEARQKYAYGKQNDYLDHHNMIGWTREGNTAHPNSGLATIMSDGPGGNKWMYVGRNKAGQVWRDITGNRSGTVTINADGWGNFSVNGGSVSIWVN

SEQ ID NO: 20629 - protein, 484 aa, Synthetic construct
HHNQTNGTMMQYFEWYLPNDGNHWHRLRSDASNLKDKGITAVWIPPAWKGASQNDVGYGAYDLYDLGEFNQKGTVRTKYGTRNQLQAAVTALKSNGIQVYGDVVMNHKGGADATEWVRAVEVNPSNRNQEVSGDYTIEAWTKFDFPGRGNTHSNFKWRWWHFDGVDWDQSRQLQNKIYKFRGDGKGWDWEVDTENGNYDYLMYADYDMDHPEVVNELRNWGVWYTNTLGLDGFRIDAVKHIKYSFTRDWLTHVRNTTGKNMFAVAEFWKNDIGAIENYLSKTNWNHSVFDVPLHYNLYNASRSGGNYDMRQIFNGTVVQRHPTHAVTFVDNHDSQPEEALESFVEEWFKPLAYALTLTRDQGYPSVFYGDYYGIPTHGVPAMKSKIDPILEARQKYAYGKQNDYMDHHNMIGWTREGNTAHPNSGLATIMSDGPGGNKWMYVGRNKAGQVWRDITGNRSGTVTINADGWGNFSVNGGSVSIWVN

SEQ ID NO: 20630 - protein, 484 aa, Synthetic construct
HHNGTNGTMMQYFEWYLPNDGNHWHRLRSDASNLKDKGITAVWIPPAWKGASQNDVGYGAYDLYDLGEFNQKGTVRTKYGTRNQLQAAVTALKSNGIQVYGDVVMNHKGGADATEWVRAVEVNPSNRNQEVSGDYTIEAWTKFDFPGRGNTHSNFKWRWYHFDGVDWDQSRQLQNKIYKFRGDGKEWDWEVDTENGNYDYLMYADYDMDHPEVVNELRNWGVWYTNTLGLDGFRIDAVKHIKYSFTRDWLTHVRNTTQKNMFAVAEFWKNDIGAIENYLSNTNWNHSVFDVPLHYNLYNASRSGGNYDMRQIFNGTVVQRHPTHAVTFVDNHDSQPEEALESFVEEWFKPLAYALTLTRDQGYPSVFYGDYYGIPTHGVPAMKSKIDPILEARQKYAYGKQNDYLDHHNMIGWTREGNTAHPNSGLATIMSDGPGGNKWMYVGRNKAGQVWRDITGNRSGTVTINADGWGNFSVNGGSVSIWVN

SEQ ID NO: 20631 - protein, 484 aa, Synthetic construct
HHNGTNGTMMQYFEWYLPNDGNHWHRLRSDASNLKDKGITAVWIPPAWKGASQNDVGYGAYDLYDLGEFNQKGTVRTKYGTRNQLQAAVTALKSNGIQVWGDVVMNHKGGADATEWVRAVEVNPSNRNQEVSGDYTIEAWTKFDFPGRGNTHSNFKWRWYHFDGVDWDQSRQLQNKIYKFRGDGKEWDWEVDTENGNYDYLMYADYDMDHPEVVNELRNWGVWYTNTLGLDGFRIDAVKHIKYSFTRDWLTHVRNTTGKNMFAVAEFWKNDIGAIENYLSKTNWNHSVFDVPLHYNLYNASRSGGNYDMRQIFNGTVVQRHPTHAVTFVDNHDSQPEEALESFVEEWFKPLAYALTLTRDRGYPSVFYGDYYGIPTHGVPAMKSKIDPILEARQKYAYGKQNDYLDHHNMIGWTREGNTAHPNSGLATIMSDGPGGNKWMYVGRNKAGQVWRDITGNRSGTVTINADGWGNFSVNGGSVSIWVN

SEQ ID NO: 20632 - protein, 481 aa, Bacillus sp.
HNGTNATMMQYFEWHLPNDGNHWNRLRDDASNLRNRGITAIWIPPAWKGTSQNDVGYGAYDLYDLGEFNQKGTVRTKYGTRSQLESAIHALKNNGVQVYGDVVMNHKAGADGTEFVTAVEVDPSNRNQETSGTYQIQAYTKFDFPGRGNTYSSFKWRWYHFDGTDWDESRKLNRIYKFSGKQWDWPVDTEFGNYDYLMFADLDMDHPEVVNELRRWGEWYTNTLNLDGFRIDAVKHIKFSFTRDWLTHVRNATGKGWFAVAEYWKNDLGALENYLSYTNWNHSVFDVPLHYNLYNASNSRGNYDMAKLLNGTVVQKHPMHAVTFVDNHDSQPGESLESFVQEWFKPLAYALILTREQGYPSVFYGDYYGIPTHSVPAMKAKIDPILAARQNFAYGTQHDYFDHHNIIGWTREGNTTHPNSGLATIMSDGPGGEKWMYVGQNKAGQVWHDITGNKPGTVTINADGWANFSVNGASVSIWVKR

SEQ ID NO: 20633 - protein, 481 aa, Bacillus sp.
HDGTNATMMQYFEWHLPNDGNHWNRLRDDASNLRNNGITAIWIPPAWKGTSQNDVGYGAYDLYDLGEFNQKGTVRTKYGTRSQLESAIHALKNNGVQVYGDVVMNHKAGADGTEFVTAVEVDPSNRNQETSGTYQIQAYTKFDFPGRGNTYSSFKWRWYHFDGTDWDESRKLNRIYKFSGKAWDWPVDTEFGNYDYLMFADYDMDHPEVVNELRRWGEWYTNTLNLDGFRIDAVKHIKFSFTRDWLTHVRNATGKGMFAVAEFWKNDLGALENYLSYTNWNHSVFDVPLHYNLYNASNSRGNYDMAKLLNGTVVQKHPMHAVTFVDNHDSQPGESLESFVQEWFKPLAYALILTREQGYPSVFYGDYYGIPTHSVPAMKAKIDPILAARQNFAYGTQHDYFDHHNIIGWTREGNTTAPNSGLATIMSDGPGGEKWMYVGQNKAGQVWHDITGNKPGTVTINADGWANFSVNKGSVSIWVKR

SEQ ID NO: 20634 - protein, 481 aa, Bacillus sp.
HNGTNATMMQYFEWHLPNDGNHWNRLRDDASNLRNAGITAIWIPPAWKGTSQNDVGYGAYDLYDLGEFNQKGTVRTKYGTRSQLESAIHALKNNGVQVYGDVVMNHKAGADGTEFVTAVEVDPSNRNQETSGTYQIQAYTKFDFPGRGNTYSSFKWRWYHFDGTDWDESRKLNRIYKFSGKAWDWPVDTEFGNYDYLMFADYDMDHPEVVNELRRWGEWYTNTLNLDGFRIDAVKHIKFSFTRDWLTHVRNATGKGDFAVAEFWKNDLGALENYLSYTNWNHSVFDVPLHYNLYNASNSRGNYDMAKLLNGTVVQKHPMHAVTFVDNHDSQPGESLESFVQEWFKPLAYALILTREQGYPSVFYGDYYGIPTHSVPAMKAKIDPILEARQDFAYGTQHDYFDHHNIIGWTREGNTTAPNSGLATIMSDGPGGEKWMYVGQNKAGQVWHDITGNKPGTVTINADGWANFSVNKGSVSIWVKR

SEQ ID NO: 20635 - protein, 481 aa, Bacillus sp.
HNGTNATMMQYFEWHLPNDGNHWNRLRDDASNLRNRGITAIWIPPAWKGTSQNDVGYGAYDLYDLGEFNQKGTVRTKYGTRSQLESAIHALKNNGVQVYGDVVMNHKAGADGTEFVTAVEVDPSNRNQETLGTYQIQAYTKFDFPGRGNTYSSFKWRWYHFDGTDWDESRKLNRIYKFSGKAWDWPVDTEFGNYDYLMFADLDMDHPEVVNELRRWGEWYTNTLNLDGFRIDAVKHIKFSFTRDWLTHVRNATGKGDFAVAEYWKNDLGALENYLSYTNWNHSVFDVPLHYNLYNASNSRGNYDMAKLLNGTVVQKHPMHAVTFVDNHDSQPGESLESFVQEWFKPLAYALILTREQGYPSVFYGDYYGIPTHSVPAMKAKIDPILAARQNFAYGTQHDYFDHHNIIGWTREGNTTHPNSGLATIMSDGPGGEKWMYVGQNKAGQVWHDITGNKPGTVTINADGWANFSVNKGSVSIWVKR

SEQ ID NO: 20636 - protein, 481 aa, Bacillus sp.
HDGTNATMMQYFEWHLPNDGNHWNRLRDDASNLRNRGITAIWIPPAWKGTSQNDVGYGAYDLYDLGEFNQKGTVRTKYGTRSQLESAIHALKNNGVQVYGDVVMNHKAGADGTEFVTAVEVDPSNRNQETSGTYQIQAYTKFDFPGRGNTYSSFKWRWYHFDGTDWDESRKLNRIYKFSGKQWDWPVDTEFGNYDYLMFADLDMDHPEVVNELRRWGEWYTNTLNLDGFRIDAVKHIKFSFTRDWLTHVRNATGKGMFAVAEFWKNDLGALENYLSYTNWNHSVFDVPLHYNLYNASNTGGNYDMAKLLNGTVVQKHPMHAVTFVDNHDSQPGESLESFVQEWFKPLAYALILTREQGYPSVFYGDYYGIPTHSVPAMKAKIDPILAARQNFAYGTQHDYFDHHNIIGWTREGNTTAPNSGLATIMSDGPGGEKWMYVGQNKAGQVWHDITGNKPGTVTINADGWANFSVNKGSVSIWVKR

SEQ ID NO: 20637 - protein, 481 aa, Bacillus sp.
HDGTNATMMQYFEWHLPNDGNHWNRLRDDASNLRNRGITAIWIPPAWKGTSQNDVGYGAYDLYDLGEFNQKGTVRTKYGTRSQLESAIHALRNNGVQVYGDVVMNHKAGADGTEFVTAVEVDPSNRNQETSGTYQIQAYTKFDFPGRGNTYSSFKWRWYHFDGTDWDESRKLNRIYKFSGKAWDWPVDTEFGNYDYLMFADYDMDHPEVVNELRRWGEWYTNTLNLDGFRIDAVKHIKFSFTRDWLTHVRNATGKGMFAVAEFWKNDLGALENYLSYTNWNHSVFDVPLHYNLYNASNSRGNYDMAKLLNGTVVQKHPMHAVTFVDNHDSQPGESLESFVQEWFKPLAYALILTREQGYPSVFYGDYYGIPTHSVPAMKAKIDPILAARQNFAYGTQHDYFDHHNIIGWTREGNTTAPNSGLATIMSDGPGGEKWMYVGQNKAGQVWHDITGNKPGTVTINADGWANFSVLGGSVSIWVKR

SEQ ID NO: 20638 - protein, 481 aa, Bacillus sp.
HDGTNATMMQYFEWHLPNDGNHWNRLRDDASNLRNRGITAIWIPPAWKGTSQNDVGYGAYDLYDLGEFNQKGTVRTKYGTRSQLESAIHALKNNGVQVYGDVVMNHKAGADGTEFVTAVEVDPSNRNQETDGTYQIQAYTKFDFPGRGNTYSSFKWRWYHFDGTDWDESRKLNRIYKFSGKAWDWPVDTEFGNYDYLMFADYDMDHPEVVNELRRWGEWYTNTLNLDGFRIDAVKHIKFSFTRDWLTHVRNATGKGMFAVAEFWKNDLGALENYLSYTNWNHSVFDVPLHYNLYNASNSRGNYDMAKLLNGTVVQKHPMHAVTFVDNHDSQPGESLESFVQEWFKPLAYALILTREQGYPSVFYGDYYGIPTHSVPAMKAKIDPILAARQNFAYGTQHDYFDHHNIIGWTREGNTTAPNSGLATIMSDGPGGEKWMYVGQNKAGQVWHDITGNKPGTVTINADGWANFSVNKGSVSIWVKR

SEQ ID NO: 20639 - protein, 481 aa, Bacillus sp.
HDGTNATMMQYFEWHLPNDGNHWNRLRDDASNLRNAGITAIWIPPAWKGTSQNDVGYGAYDLYDLGEFNQKGTVRTKYGTRSQLESAIHALKNNGVQVYGDVVMNHKAGADGTEFVTAVEVDPSNRNQETSGTYQIQAYTKFDFPGRGNTYSSFKWRWYHFDGTDWDESRKLNRIYKFSGKAWDWPVDTEFGNYDYLMFADYDMDHPEVVNELRRWGEWYTNTLNLDGFRIDAVKHIKFSFTRDWLTHVRNATGKGMFAVAEFWKNDLGALENYLSYTNWNHSVFDVPLHYNLYNASNYGGNYDMAKLLNGTVVQKHPMHAVTFVDNHDSQPGESLESFVQEWFKPLAYALILTREQGYPSVFYGDYYGIPTHSVPAMKAKIDPILEARQDFAYGTQHDYFDHHNIIGWTREGNTTAPNSGLATIMSDGPGGEKWMYVGQNKAGQVWHDITGNKPGTVTINADGWANFSVNKGSVSIWVKR

SEQ ID NO: 20640 - protein, 481 aa, Bacillus sp.
HNGTNATMMQYFEWHLPNDGNHWNRLRDDASNLRNRGITAIWIPPAWKGTSQNDVGYGAYDLYDLGEFNQKGTVRTKYGTRSQLESAIHALKNNGVQVYGDVVMNHKAGADGTEFVTAVEVDPSNRNQETSGTYQIQAYTKFDFPGRGNTYSSFKWRWYHFDGTDWDESRKLNRIYKFSGKQWDWPVDTEFGNYDYLMFADLDMDHPEVVNELRRWGEWYTNTLNLDGFRIDAVKHIKFSFTRDWLTHVRNATGKGDFAVAEFWKNDLGALENYLSYTNWNHSVFDVPLHYNLYNASNYGGNYDMAKLLNGTVVQKHPMHAVTFVDNHDSQPGESLESFVQEWFKPLAYALILTREQGYPSVFYGDYYGIPTHSVPAMKAKIDPILAARQNFAYGTQHDYFDHHNIIGWTREGNTTHPNSGLATIMSDGPGGEKWMYVGQNKAGQVWHDITGNKPGTVTINADGWAMFSVNKGSVSIWVKR

SEQ ID NO: 20641 - protein, 481 aa, Bacillus sp.
HNGTNATMMQYFEWHLPNDGNHWNRLRDDASNLRNRGITAIWIPPAWKGTSQNDVGYGAYDLYDLGEFNQKGTVRTKYGTRSQLESAIHALKNNGVQVYGDVVMNHKAGADGTEFVDAVEVDPSNRNQETSGTYQIQAYTKFDFPGRGNTYSSFKWRWYHFDGTDWDESRKLNRIYKFTGKQWDWPVDTEFGNYDYLMFADYDMDHPEVVNELRRWGEWYTNTLNLDGFRIDAVKHIKFQFTRDWLTHVRNATGKGMFAVAEYWKNDLGALENYLSYTNWNHSVFDVPLHYNLYNASNSRGNYDMAKLLNGTVVQKHPMHAVTFVDNHDSQPGESLESFVQEWFKPLAYALILTREQGYPSVFYGDYYGIPTHSVPAMKAKIDPILAARQNFAYGTQHDYFDHHNIIGWTREGNTTHPNSGLATIMSDGPGGEKWMYVGQNKAGQVWHDITGNKPGTVTINADGWANFSVNKGSVSIWVKR

SEQ ID NO: 20642 - protein, 481 aa, Bacillus sp.
HDGTNATMMQYFEWHLPNDGNHWNRLRDDASNLRNRGITAIWIPPAWKGTSQNDVGYGAYDLYDLGEFNQKGTVRTKYGTRSQLESAIHALKNNGVQVYGDVVMNHKAGADGTEFVTAVEVDPSNRNQETSGTYQIQAYTKFDFPGRGNTYSSFKWRWYHFDGTDWDESRKLNRIYKFSGKAWDWPVDTEFGNYDYLMFADYDMDHPEVVNELRRWGEWYTNTLNLDGFRIDAVKHIKFSFTRDWLTHVRNATGKGMFAVAEFWKNDLGALENYLSYTNWNHSVFDVPLHYNLYNASNSRGNYDMAKLLNGTVVQKHPMHAVTFVDNHDSQPGESLESFVQEWFKPLAYALILTREQGVPSVFYGDYYGIPTHSVPAMKAKIDPILAARQNFAYGTQHDYFDHHNIIGWTREGNTTAPNSGLATIMSDGPGGEKWMYVGQNKAGQVWHDITGNKPGTVTINADGWANFSVLGGSVSIWVKR

SEQ ID NO: 20643 - protein, 481 aa, Bacillus sp.
HNGTNATMMQYFEWHLPNDGNHWNRLRDDASNLRNNGITAIWIPPAWKGTSQNDVGYGAYDLYDLGEFNQKGTVRTKYGTRSQLESAIHALKNNGVQVYGDVVMNHKAGADGTEFVTAVEVDPSNRNQETSGTYQIQAYTKFDFPGRGNTYSSFKWRWYHFDGTDWDESRKLNRIYKFSGKAWDWPVDTEFGNYDYLMFADYDMDHPEVVNELRRWGEWYTNTLNLDGFRIDAVKHIKFSFTRDWLTHVRNATGKGDFAVAEFWKNDLGALENYLSYTNWNHSVFDVPLHYNLYNASNSRGNYDMAKLLNGTVVQKHPMHAVTFVDNHDSQPGESLESFVQEWFKPLAYALILTREQGYPSVFYGDYYGIPTHSVPAMKAKIDPILEARQWFAYGTQHDYFDHHNIIGWTREGNTTAPNSGLATIMSDGPGGEKWMYVGQNKAGQVWHDITGNKPGTVTINADGWANFSVNKGSVSIWVKR

SEQ ID NO: 20644 - protein, 481 aa, Bacillus sp.
HNGTNATMMQYFEWHLPNDGNHWNRLRDDASNLRNRGITAIWIPPAWKGTSQNDVGYGAYDLYDLGEFNQKGTVRTKYGTRSQLESAIHALKNNGVQVYGDVVMNHKAGADGTEFVTAVEVDPSNRNQETSGTYQIQAYTKFDFPGRGNTYSSFKWRWYHFDGTDWDESRKLNRIYKFSGKAWDWPVDTEFGNYDYLMFADLDMDHPEVVNELRRWGEWYTNTLNLDGFRIDAVKHIKFSFTRDWLTHVRNATGKGDFAVAEYWKNDLGALENYLSYTNWNHSVFDVPLHYNLYNASNYGGNYDMAKLLNGTVVQKHPMHAVTFVDNHDSQPGESLESFVQEWFKPLAYALILTREQGYPSVFYGDYYGIPTHSVPAMKAKIDPILAARQNFAYGTQHDYFDHHNIIGWTREGNTTHPNSGLATIMSDGPGGEKWMYVGQNKAGQVWHDITGNKPGTVTINADGWAMFSVNKGSVSIWVKR

SEQ ID NO: 20645 - protein, 481 aa, Bacillus sp.
HDGTNATMMQYFEWHLPNDGNHWNRLRDDASNLRNAGITAIWIPPAWKGTSQNDVGYGAYDLYDLGEFNQKGTVRTKYGTRSQLESAIHALKNNGVQVYGDVVMNHKAGADGTEFVTAVEVDPSNRNQETSGTYQIQAYTKFDFPGRGNTYSSFKWRWYHFDGTDWDESRKLNRIYKFSGKAWDWPVDTEFGNYDYLMFADYDMDHPEVVNELRRWGEWYTNTLNLDGFRIDAVKHIKFSFTRDWLTHVRNATGKGMFAVAEFWKNDLGALENYLSYTNWNHSVFDVPLHYNLYNASNSRGNYDMAKLLNGTVVQKHPMHAVTFVDNHDSQPGESLESFVQEWFKPLAYALILTREQGYPSVFYGDYYGIPTHSVPAMKAKIDPILAARQNFAYGTQHDYFDHHNIIGWTREGNTTAPNSGLATIMSDGPGGEKWMYVGQNKAGQVWHDITGNKPGTVTINADGWANFSVNKGSVSIWVKR

SEQ ID NO: 20646 - protein, 481 aa, Bacillus sp.
HNGTNATMMQYFEWHLPNDGNHWNRLRDDASNLRNNGITAIWIPPAWKGTSQNDVGYGAYDLYDLGEFNQKGTVRTKYGTRSQLESAIHALKNNGVQVYGDVVMNHKAGADGTEFVTAVEVDPSNRNQETSGTYQIQAYTKFDFPGRGNTYSSFKWRWYHFDGTDWDESRKLNRIYKFSGKAWDWPVDTEFGNYDYLMFADYDMDHPEVVNELRRWGEWYTNTLNLDGFRIDAVKHIKFSFTRDWLTHVRNATGKGWFAVAEFWKNDLGALENYLSYTNWNHSVFDVPLHYNLYNASNSRGNYDMAKLLNGTVVQKHPMHAVTFVDNHDSQPGESLESFVQEWFKPLAYALILTREQGYPSVFYGDYYGIPTHSVPAMKAKIDPILAARQNFAYGTQHDYFDHHNIIGWTREGNTTAPNSGLATIMSDGPGGEKWMYVGQNKAGQVWHDITGNKPGTVTINADGWANFSVNKGSVSIWVKR

SEQ ID NO: 20647 - protein, 481 aa, Bacillus sp.
HGGTNATMMQYFEWHLPNDGNHWNRLRDDASNLRNNGITAIWIPPAWKGTSQNDVGYGAYDLYDLGEFNQKGTVRTKYGTRSQLESAIHALKNNGVQVYGDVVMNHKAGADGTEFVTAVEVDPSNRNQETSGTYQIQAYTKFDFPGRGNTYSSFKWRWYHFDGTDWDESRKLNRIYKFSGKAWDWPVDTEFGNYDYLMFADYDMDHPEVVNELRRWGEWYTNTLNLDGFRIDAVKHIKFSFTRDWLTHVRNATGKGMFAVAEFWKNDLGALENYLSYTNWNHSVFDVPLHYNLYNASNSRGNYDMAKLLNGTVVQKHPMHAVTFVDNHDSQPGESLESFVQEWFKPLAYALILTREQGYPSVFYGDYYGIPTHSVPAMKAKIDPILEARQWFAYGTQHDYFDHHNIIGWTREGNTTAPNSGLATIMSDGPGGEKWMYVGQNKAGQVWHDITGNKPGTVTINADGWANFSVNKGSVSIWVKR

SEQ ID NO: 20648 - protein, 481 aa, Bacillus sp.
HNGTNATMMQYFEWHLPNDGNHWNRLRDDASNLRNNGITAIWIPPAWKGTSQNDVGYGAYDLYDLGEFNQKGTVRTKYGTRSQLESAIHALKNNGVQVYGDVVMNHKAGADGTEFVTAVEVDPSNRNQETSGTYQIQAYTKFDFPGRGNTYSSFKWRWYHFDGTDWDESRKLNRIYKFSGKAWDWPVDTEFGNYDYLMFADYDMDHPEVVNELRRWGEWYTNTLNLDGFRIDAVKHIKFSFTRDWLTHVRNATGKGMFAVAEFWKNDLGALENYLSYTNWNHSVFDVPLHYNLYNASNSRGNYDMAKLLNGTVVQKHPMWAVTFVDNHDSQPGESLESFVQEWFKPLAYALILTREMGYPSVFYGDYYGIPTHSVPAMKAKIDPILAARQNFAYGTQHDYFDHHNIIGWTREGNTTHPNSGLATIMSDGPGGEKWMYVGQNKAGQVWHDITGNKPGTVTINADGWANFSVNKGSVSIWVKR

SEQ ID NO: 20649 - protein, 481 aa, Bacillus sp.
HDGTNATMMQYFEWHLPNDGNHWNRLRDDASNLRNRGITAIWIPPAWKGTSQNDVGYGAYDLYDLGEFNQKGTVRTKYGTRSQLESAIHALKNNGVQVYGDVVMNHKAGADGTEFVTAVEVDPSNRNQETSGTYQIQAYTKFDFPGRGNTYSSFKWRWYHFDGTDWDESRKLNRIYKFDGKAWDWPVDTEFGNYDYLMFADLDMDHPEVVNELRRWGEWYTNTLNLDGFRIDAVKHIKFSFTRDWLTHVRNATGKGMFAVAEYWKNDLGALENYLSYTNWNHSVFDVPLHYNLYNASNTGGNYDMAKLLNGTVVQKHPMHAVTFVDNHDSQPGESLESFVQEWFKPLAYALILTREQGYPSVFYGDYYGIPTHSVPAMKAKIDPILAARQNFAYGTQHDYFDHHNIIGWTREGNTTAPNSGLATIMSDGPGGEKWMYVGQNKAGQVWHDITGNKPGTVTINADGWANFSVNKGSVSIWVKR

SEQ ID NO: 20650 - protein, 481 aa, Bacillus sp.
HDGTNATMMQYFEWHLPNDGNHWNRLRDDASNLRNRGITAIWIPPAWKGTSQNDVGYGAYDLYDLGEFNQKGTVRTKYGTRSQLESAIHALKNNGVQVYGDVVMNHKAGADGTEFVDAVEVDPSNRNQETSGTYQIQAYTKFDFPGRGNTYSSFKWRWYHFDGTDWDESRKLNRIYKFTGKAWDWPVDTEFGNYDYLMFADLDMDHPEVVNELRRWGEWYTNTLNLDGFRIDAVKHIKFSFTRDWLTHVRNATGKGMFAVAEYWKNDLGALENYLSYTNWNHSVFDVPLHYNLYNASNTGGNYDMAKLLNGTVVQKHPMHAVTFVDNHDSQPGESLESFVQEWFKPLAYALILTREQGYPSVFYGDYYGIPTHSVPAMKAKIDPILAARQNFAYGTQHDYFDHHNIIGWTREGNTTAPNSGLATIMSDGPGGEKWMYVGQNKAGQVWHDITGNKPGTVTINADGWANFSVNKGSVSIWVKR

SEQ ID NO: 20651 - protein, 481 aa, Bacillus sp.
HNGTNATMMQYFEWHLPNDGNHWNRLRDDASNLRNRGITAIWIPPAWKGTSQNDVGYGAYDLYDLGEFNQKGTVRTKYGTRSQLESAIHALKNNGVQVYGDVVMNHKAGADGTEFVDAVEVDPSNRNQETSGTYQIQAYTKFDFPGRGNTYSSFKWRWYHFDGTDWDESRKLNRIYKFTGKQWDWPVDTEFGNYDYLMFADLDMDHPEVVNELRRWGEWYTNTLNLDGFRIDAVKHIKFQFTRDWLTHVRNATGKGMFAVAEYWKNDLGALENYLSYTNWNHSVFDVPLHYNLYNASNSRGNYDMAKLLNGTVVQKHPMHAVTFVDNHDSQPGESLESFVQEWFKPLAYALILTREQGYPSVFYGDYYGIPTHSVPAMKAKIDPILAARQNFAYGTQHDYFDHHNIIGWTREGNTTHPNSGLATIMSDGPGGEKWMYVGQNKAGQVWHDITGNKPGTVTINADGWANFSVNKGSVSIWVKR

SEQ ID NO: 20652 - protein, 481 aa, Bacillus sp.
HNGTNATMMQYFEWHLPNDGNHWNRLRDDASNLRNAGITAIWIPPAWKGTSQNDVGYGAYDLYDLGEFNQKGTVRTKYGTRSQLESAIHALKNNGVQVYGDVVMNHKAGADGTEFVTAVEVDPSNRNQETSGTYQIQAYTKFDFPGRGNTYSSFKWRWYHFDGTDWDESRKLNRIYKFSGKAWDWPVDTEFGNYDYLMFADYDMDHPEVVNELRRWGEWYTNTLNLDGFRIDAVKHIKFSFTRDWLTHVRNATGKGMFAVAEFWKNDLGALENYLSYTNWNHSVFDVPLHYNLYNASNSRGNYDMAKLLNGTVVQKHYMHAVTFVDNHDSQPGESLESFVQEWFKPLAYAVILTREQGYPSVFYGDYYGIPTHSVPAMKAKIDPILEARQDFAYGTQHDYFDHHNIIGWTREGNTTHPNSGLATIMSDGPGGEKWMYVGQNKAGQVWHDITGNKPGTVTINADGWANFSVNKGSVSIWVKR

SEQ ID NO: 20653 - protein, 481 aa, Bacillus sp.
HNGTNATMMQYFEWHLPNDGNHWNRLRDDASNLRNAGITAIWIPPAWKGTSQNDVGYGAYDLYDLGEFNQKGTVRTKYGTRSQLESAIHALKNNGVQVYGDVVMNHKAGADGTEFVTAVEVDPSNRNQETSGTYQIQAYTKFDFPGRGNTYSSFKWRWYHFDGTDWDESRKLNRIYKFSGKAWDWPVDTEFGNYDYLMFADYDMDHPEVVNELRRWGEWYTNTLNLDGFRIDAVKHIKFSFTRDWLTHVRNATGKGWFAVAEFWKNDLGALENYLSYTNWNHSVFDVPLHYNLYNASNSRGNYDMAKLLNGTVVQKHPMHAVTFVDNHDSQPGESLESFVQEWFKPLAYALILTREQGYPSVFYGDYYGIPTHSVPAMKAKIDPILAARQNFAYGTQHDYFDHHNIIGWTREGNTTHPNSGLATIMSDGPGGEKWMYVGQNKAGQVWHDITGNKPGTVTINADGWAMFSVNKGSVSIWVKR

SEQ ID NO: 20654 - protein, 481 aa, Bacillus sp.
HNGTNATMMQYFEWHLPNDGNHWNRLRDDASNLRNAGITAIWIPPAWKGTSQNDVGYGAYDLYDLGEFNQKGTVRTKYGTRSQLESAIHALKNNGVQVYGDVVMNHKAGADGTEFVTAVEVDPSNRNQETSGTYQIQAYTKFDFPGRGNTYSSFKWRWYHFDGTDWDESRKLNRIYKFSGKAWDWPVDTEFGNYDYLMFADYDMDHPEVVNELRRWGEWYTNTLNLDGFRIDAVKHIKFSFTRDWLTHVRNATGKGDFAVAEFWKNDLGALENYLSYTNWNHSVFDVPLHYNLYNASNSRGNYDMAKLLNGTVVQKHPMHAVTFVDNHDSQPGESLESFVQEWFKPLAYALILTREQGYPSVFYGDYYGIPTHSVPAMKAKIDPILAARQNFAYGTQHDYFDHHNIIGWTREGNTTHPNSGLATIMSDGPGGEKWMYVGQNKAGQVWHDITGNKPGTVTINADGWAMFSVNKGSVSIWVKR

SEQ ID NO: 20655 - protein, 481 aa, Bacillus sp.
HNGTNATMMQYFEWHLPNDGNHWNRLRDDASNLRNRGITAIWIPPAWKGTSQNDVGYGAYDLYDLGEFNQKGTVRTKYGTRSQLESAIHALKNNGVQVYGDVVMNHKAGADGTEFVTAVEVDPSNRNQETSGTEQIQAYTKFDFPGRGNTYSSFKWRWYHFDGTDWDESRKLNRIYKFSGKAWDWPVDTEFGNYDYLMFADYDMDHPEVVNELRRWGEWYTNTLNLDGFRIDAVKHIKFSFTRDWLTHVRNATGKGDFAVAEFWKNDLGALENYLSYTNWNHSVFDVPLHYNLYNASNSRGNYDMAKLLNGTVVQKHPMHAVTFVDNHDSQPGESLESFVQENFKPLAYALILTREQGYPSVFYGDYYGIPTHSVPAMKAKIDPILAARQNFAYGTQHDYFDHHNIIGWTREGNTTHPNSGLATIMSDGPGGEKWMYVGQNKAGQVWHDITGNKPGTVTINADGWANFSVNKGSVSIWVKR

SEQ ID NO: 20656 - protein, 481 aa, Bacillus sp.
HNGTNATMMQYFEWHLPNDGNHWNRLRDDASNLRNNGITAIWIPPAWKGTSQNDVGYGAYDLYDLGEFNQKGTVRTKYGTRSQLESAIHALKNNGVQVYGDVVMNHKAGADGTEFVTAVEVDPSNRNQETSGTYQIQAYTKFDFPGRGNTYSSFKWRWYHFDGTDWDESRKLKRIYKFSGKAWDWPVDTEFGNYDYLMFADYDMDHPEVVNELRRWGEWYTNTLNLDGFRIDAVKHIKFSFTRDWLTHVRNATGKGDFAVAEFWKNDLGALENYLSYTNWNHSVFDVPLHYNLYNASNSRGNYDMAKLLNGTVVQKHPMHAVTFVDNHDSQPGESLESFVQEWFKPLAYALILTREQGYPSVFYGDYYGIPTHSVPAMKAKIDPILEARQWFAYGTQHDYFDHHNIIGWTREGNTTHPNSGLATIMSDGPGGEKWMYVGQNKAGQVWHDITGNKPGTVTINADGWANFSVNKGSVSIWVKR

SEQ ID NO: 20657 - protein, 481 aa, Bacillus sp.
HDGTNATMMQYFEWHLPNDGNHWNRLRDDASNLRNNGITAIWIPPAWKGTSQNDVGYGAYDLYDLGEFNQKGTVRTKYGTRSQLESAIHALKNNGVQVYGDVVMNHKAGADGTEFVTAVEVDPSNRNQETSGTYQIQAYTKFDFPGRGNTYSSFKWRWYHFDGTDWDESRKLNRIYKFSGKAWDWPVDTEFGNYDYLMFADYDMDHPEVVNELRRWGEWYTNTLNLDGFRIDAVKHIKFSFTRDWLTHVRNATGKGMFAVAEFWKNDLGALENYLSYTNWNHSVFDVPLHYNLYNASNSRGNYDMAKLLNGTVVQKHPMHAVTFVDNHDSQPGESLESFVQEWFKPLAYALILTREQMYPSVFYGDYYGIPTHSVPAMKAKIDPILEARQNFAYGTQHDYFDHHNIIGWTREGNTTAPNSGLATIMSDGPGGEKWMYVGQNKAGQVWHDITGNKPGTVTINADGWANFSVNKGSVSIWVKR

SEQ ID NO: 20658 - protein, 481 aa, Bacillus sp.
HNGTNATMMQYFEWHLPNDGNHWNRLRDDASNLRNRGITAIWIPPAWKGTSQNDVGYGAYDLYDLGEFNQKGTVRTKYGTRSQLESAIHALKNNGVQVYGDVVMNHKAGADGTEFVTAVEVDPSNRNQETSGTEQIQAYTKFDFPGRGNTYSSFKWRWYHFDGTDWDESRKLNRIYKFSGKAWDWPVDTEFGNYDYLMFADYDMDHPEVVNELRRWGEWYTNTLNLDGFRIDAVKHIKFSFTRDWLTHVRNATGKGMPAVAEFWKNDLGALENYLSYTNWNHSVFDVPLHYNLYNASNSRGNYDMAKLLNGTVVQKHPMHAVTFVDNHDSQPGESLESFVQEWFKPLAYALILTREQGVPSVFYGDYYGIPTHSVPAMKAKIDPILAARQNFAYGTQHDYFDHHNIIGWTREGNTTHPNSGLATIMSDGPGGEKWMYVGQNKAGQVWHDITGNKPGTVTINADGWANFSVNKGSVSIWVKR

SEQ ID NO: 20659 - protein, 481 aa, Bacillus sp.
HNGTNATMMQYFEWHLPNDGNHWNRLRDDASNLRNNGITAIWIPPAWKGTSQNDVGYGAYDLYDLGEFNQKGTVRTKYGTRSQLESAIHALKNNGVQVYGDVVMNHKAGADGTEFVTAVEVDPSNRNQETDGTYQIQAYTKFDFPGRGNTYSSFKWRWYHFDGTDWDESRKLNRIYKFSGKAWDWPVDTEFGNYDYLMFADYDMDHPEVVNELRRWGEWYTNTLNLDGFRIDAVKHIKFSFTRDWLTHVRNATGKGMFAVAEFWKNDLGALENYLSYTNWNHSVFDVPLHYNLYNASNSRGNYDMAKLLNGTVVQKHPMHAVTFVDNHDSQPGESLESFVQEWFKPLAYALILTREQGYPSVFYGDYYGIPTHSVPAMKAKIDPILAARQNFAYGTQHDYFDHHNIIGWTREGNTTHPNSGLATIMSDGPGGEKWMYVGQNKAGQVWHDITGNKPGTVTINADGWAMFSVNKGSVSIWVKR

SEQ ID NO: 20660 - protein, 484 aa, Synthetic construct
AAPFNGTMMQYFEWYLPDDGTLWTKVANEANNLSSLGITALWLPPAYKGTSRSDVGYGVYDLYDLGEFNQKGAVRTKYGTKAQYLQAIQAAHAAGMQVYADVVFNHRMGADATETISAVEVNPSNRNQVTSGAYNISAWTDFEFPGRGNTYSSFKWHSYYFDGVDWDQSRQLSGKIYQIQGTGKAWDWEVDSENGNYDYLMGADIDMDHPEVVTELKNWGKWYVNTTNIDGFRLDAVKHIKFSFFPDWLSYVRSQTGKPLFTVGEYWSYDINKLHNYIMKTNGTMSLFDAPLHNKFYTASKSGGTFDMRTLMTNTLMKDQPTLAVTFVDNHDTEPGQALQSWVDPWFKPLAYAFILTRQEGYPCVFYGDYYGIPQYNIPSLKSKIDPLLIARRDYAYGTQHDYLDHSDIIGWTREGVTEKPGSGLAALITDGPGGSKWMYVGKQHAGKVFYDLTGNRSDTVTINSDGWGEFKVNGGSVSVWVPR

SEQ ID NO: 20661 - protein, 484 aa, Synthetic construct
HHNGTNGTMMQYFEWYLPNDGNHWHRLRSDASNLKDKGITAVWIPPAWKGASQNDVGYGAYDLYDLGEFNQKGTVRTKYGTRNQLQAAVTALKSNGIQVYGDVVMNHKGGADATEWVRAVEVNPSNRNQEVSGDTTIEAWTKFDFPGRGNTHSNFKWRWYHFDGVDWDQSRQLQNKIYKFRGDGKEWDWEVDTENGNYDYLMYADYDMDHPEVVNELRNWGVWYTNTLGLDGFRIDAVKHIKYSFTRDWLTHVRNTTQKNMFAVAEFWKNDIGAIENYLSKTNWNHSVFDVPLHYNLYNASRSGGNYDMRQIFNGTVVQRHPTHAVTFVDNHDSQPEEALESFVEEWFKPLAYALTLTRDQGEPSVFYGDYYGIPTHGVPAMKSKIDPILEARQKYAYGKQNDYLDHHNMIGWTREGNTAHPNSGLATIMSDGPGGNKWMYVGRNKAGQVWRDITGNRSGTVTINADGWGNFSVNGGSVSIWVN

SEQ ID NO: 20662 - protein, 484 aa, Synthetic construct
HHNQTNGTMMQYFEWYLPNDGNHWNRLRSDASNLKDKGITAVWIPPAWKGASQNDVGYGAYDLYDLGEFNQKGTVRTKYGTRNQLQAAVTALKSNGIQVYGDVVMNHKGGADATEWVRAVEVNPSNRNQEVSGDYTIEAWTKFDFPGRGNTHSNFKWRWDHFDGVDWDQSRQLQNKIYKFRGDGKEWDWEVDEENGNYDYLMYADYDMDHPEVVNELRNWGVWYTNTLGLDGFRIDAVKHIKYSFTRDWLEHVRNTTGKNMFAVAEFWKNDIGAIENYLSKTNWNHSVFDVPLHYNLYNASRSGGNYDMRQIFNGTVVQRHPTHAVTFVDNHDSQPEEALESFVEEWFKPLAYALTLTRDQGYPSVFYGDYYGIPTHGVPAMKSKIDPILEARQKYAYGKQNDYMDHHNMIGWTREGNTAHPNSGLATIMSDGPGGNKWMYVGRNKAGQVWRDITGNRSGTVTINADGWGNFSVNGGSVSIWVN

SEQ ID NO: 20663 - protein, 484 aa, Synthetic construct
HHNQTNGTMMQYFEWYLPNDGNHWNRLRSDASNLKDKGITAVWIPPAWKGASQNDVGYGAYDLYDLGEFNQKGTVRTKYGTRNQLQAAVTALKSNGIQVYGDVVMNHKGGADATEWVRAVEVNPSNRNQEVSGDWTIEAWTKFDFPGRGNTHSNFKWRWYHFDGVDWDQSRQLQNKIYKFRGDGKEWDWEVDEENGNYDYLMYADYDMDHPEVVNELRNWGVWYTNTLGLDGFRIDAVKHIKYSFTRDWLEHVRNTTGKNMFAVAEFWKNDIGAIENYLSKTNWNHSVFDVPLHYNLYNASRSGGNYDMRQIFNGTVVQRHPTHAVTFVDNHDSQPEEALESFVEEWFKPLAYALTLTRDQGYPSVFYGDYYGIPTHGVPAMKSKIDPILEARQKYAYGKQNDYMDHHNMIGWTREGNTAHPNSGLATIMSDGPGGNKWMYVGRNKAGQVWRDITGNRSGTVTINADGWGNFSVNGGSVSIWVN

SEQ ID NO: 20664 - protein, 484 aa, Synthetic construct
HHNGTNGTMMQYFEWYLPNDGNHWHRLRSDASNLKDKGITAVWIPPAWKGASQNDVGYGAYDLYDLGEFNQKGTVRTKYGTRNQLQAAVTALKSNGIQVWGDVVMNHKGGADATEWVRAVEVNPSNRNQEVSGDTTIEAWTKFDFPGRGNTHSNFKWRWYHFDGVDWDQSRQLQNKIYKFRGDGKEWDWEVDEENGNYDYLMYADYDMDHPEVVNELRNWGVWYTNTLGLDGFRIDAVKHIKYSFTRDWLTHVRNTTGKNMFAVAEFWKNDIGAIENYLSKTNWNHSVFDVPLHYNLYNASRSGGNYDMRQIFNGTVVQRHPTHAVTFVDNHDSQPEEALESFVEEWFKPLAYALTLTRDQGYPSVFYGDYYGIPTHGVPAMKSKIDPILEARQKYAYGKQNDYLDHHNMIGWTREGNTAHPNSGLATIMSDGPGGNKWMYVGRNKAGQVWRDITGNRSGTVTINADGWGNFSVNGGSVSIWVN

SEQ ID NO: 20665 - protein, 484 aa, Synthetic construct
HHNGTNGTMMQYFEWYLPNDGNHWHRLRSDASNLKDKGITAVWIPPAWKGASQNDVGYGAYDLYDLGEFNQKGTVRTKYGTRNQLQAAVTALKSNGIQVYGDVVMNHKGGADATEWVRAVEVNPSNRNQEVSGDTTIEAWTKFDFPGRGNTHSNFKWRWYHFDGVDWDQSRQLQNKIYKFQGDGKEWDWEVDTENGNYDYLMYADYDMDHPEVVNELRNWGVWYTNTLGLDGFRIDAVKHIKYSFTRDWLTHVRNTTQKNMFAVAEFWKNDIGAIENYLSKTNWNHSVFDVPLHYNLYNASRSGGNYDMRQIFNGTVVQRHPTHAVTFVDNHDSQPEEALESFVEEWFKPLAYALTLTRDQGYPSVFYGDYYGIPTHGVPAMKSKIDPILEARQKYAYGKQNDYLDHHNMIGWTREGNTAHPNSGLATIMSDGPGGNKWMYVGRNKAGQVWRDITGNRSGTVTINADGWGNFSVNGGSVSIWVN

SEQ ID NO: 20666 - protein, 484 aa, Synthetic construct
HHNGTNGTMMQYFEWYLPNDGNHWHRLRSDASNLKDKGITAVWIPPAWKGASQNDVGYGAYDLYDLGEFNQKGTVRTKYGTRNQLQAAVTALKSNGIQVYGDVVMNHKGGADATEWVRAVEVNPSNRNQEVSGDYTIEAWTKFDFPGRGNTHSNFKWRWWHFDGVDWDQSRQLQNKIYKFRGDGKEWDWEVDEENGNYDYLMYADYDMDHPEVVNELRNWGVWYTNTLGLDGFRIDAVKHIKYSFTRDWLTHVRNTTGKNMFAVAEFWKNDIGAIENYLSKTNWNHSVFDVPLHYNLYNASRSGGNYDMRQIFNGTVVQRHPTHAVTFVDNHDSQPEEALESFVEEWFKPLAYALTLTRDQGYPSVFYGDYYGIPTHGVPAMKSKIDPILEARQKYAYGKQNDYMDHHNMIGWTREGNTAHPNSGLATIMSDGPGGNKWMYVGRNKAGQVWRDITGNRSGTVTINADGWGNFSVNGGSVSIWVN

SEQ ID NO: 20667 - protein, 484 aa, Synthetic construct
HHNQTNGTMMQYFEWYLPNDGNHWNRLRSDASNLKDKGITAVWIPPAWKGASQNDVGYGAYDLYDLGEFNQKGTVRTKYGTRNQLQAAVTALKSNGIQVWGDVVMNHKGGADATEWVRAVEVNPSNRNQEVSGDYTIEAWTKFDFPGRGNTHSNFKWRWYHFDGVDWDQSRQLQNKIYKFRGDGKEWDWEVDEENGNYDYLMYADYDMDHPEVVNELRNWGVWYTNTLGLDGFRIDAVKHIKYSFTRDWLEHVRNTTGKNMFAVAEFWKNDIGAIENYLSKTNWNHSVFDVPLHYNLYNASRSGGNYDMRQIFNGTVVQRHPTHAVTFVDNHDSQPEEALESFVEEWFKPLAYALTLTRDQGYPSVFYGDYYGIPTHGVPAMKSKIDPILEARQKYAYGKQNDYMDHHNMIGWTREGNTAHPNSGLATIMSDGPGGNKWMYVGRNKAGQVWRDITGNRSGTVTINADGWGNFSVNGGSVSIWVN

SEQ ID NO: 20668 - protein, 484 aa, Synthetic construct
HHNGTNGTMMQYFEWYLPNDGNHWHRLRSDASNLKDKGITAVWIPPAWKGASQNDVGYGAYDLYDLGEFNQKGTVRTKYGTRNQLQAAVTALKSNGIQVWGDVVMNHKGGADATEWVRAVEVNPSNRNQEVSGDYTIEAWTKFDFPGRGNTHSNFKWRWYHFDGVDWDQSRQLQNKIYKFRGDGKEWDWEVDEENGNYDYLMYADYDMDHPEVVNELRNWGVWYTNTLGLDGFRIDAVKHIKYSFTRDWLTHVRNTTGKNMFAVAEFWKNDIGAIENYLSKTNWNHSVFDVPLHYNLYNASRSGGNYDMRQIFNGTVVQRHPTHAVTFVDNHDSQPEEALESFVEEWFKPLAYALTLTRDQGEPSVFYGDYYGIPTHGVPAMKSKIDPILEARQKYAYGKQNDYLDHHNMIGWTREGNTAHPNSGLATIMSDGPGGNKWMYVGRNKAGQVWRDITGNRSGTVTINADGWGNFSVNGGSVSIWVN

SEQ ID NO: 20669 - protein, 484 aa, Synthetic construct
HHNQTNGTMMQYFEWYLPNDGNHWHRLRSDASNLKDKGITAVWIPPAWKGASQNDVGYGAYDLYDLGEFNQKGTVRTKYGTRNQLQAAVTALKSNGIQVYGDVVMNHKGGADATEWVRAVEVNPSNRNQEVSGDYTIEAWTKFDFPGRGNTHSNFKWRWWHFDGVDWDQSRQLQNKIYKFRGDGKEWDWEVDTENGNYDYLMYADYDMDHPEVVNELRNWGVWYTNTLGLDGFRIDAVKHIKYSFTRDWLEHVRNTTGKNMFAVAEFWKNDIGAIENYLSKTNWNHSVFDVPLHYNLYNASRSGGNYDMRQIFNGTVVQRHPTHAVTFVDNHDSQPEEALESFVEEWFKPLAYALTLTRDQGYPSVFYGDYYGIPTHGVPAMKSKIDPILEARQKYAYGKQNDYMDHHNMIGWTREGNTAHPNSGLATIMSDGPGGNKWMYVGRNKAGQVWRDITGNRSGTVTINADGWGNFSVNGGSVSIWVN

SEQ ID NO: 20670 - protein, 484 aa, Synthetic construct
HHNGTNGTMMQYFEWYLPNDGNHWHRLRSDASNLKDKGITAVWIPPAWKGASQNDVGYGAYDLYDLGEFNQKGTVRTKYGTRNQLQAAVTALKSNGIQVYGDVVMNHKGGADATEWVRAVEVNPSNRNQEVSGDYTIEAWTKFDFPGRGNTHSNFKWRWYHFDGVDWDQSRQLQNKIYKFRGDGKEWDWEVDEENGNYDYLMYADYDMDHPEVVNELRNWGVWYTNTLGLDGFRIDAVKHIKYSFTRDWLTHVRNTTGKNMFAVAEFWKNDIGAIENYLSNTNWNHSVFDVPLHYNLYNASRSGGNYDMRQIFNGTVVQRHPTHAVTFVDNHDSQPEEALESFVEEWFKPLAYALTLTRDQGEPSVFYGDYYGIPTHGVPAMKSKIDPILEARQKYAYGKQNDYLDHHNMIGWTREGNTAHPNSGLATIMSDGPGGNKWMYVGRNKAGQVWRDITGNRSGTVTINADGWGNFSVNGGSVSIWVN

SEQ ID NO: 20671 - protein, 484 aa, Synthetic construct
HHNGTNGTMMQYFEWYLPNDGNHWHRLRSDASNLKDKGITAVWIPPAWKGASQNDVGYGAYDLYDLGEFNQKGTVRTKYGTRNQLQAAVTALKSNGIQVWGDVVMNHKGGADATEWVRAVEVNPSNRNQEVSGDTTIEAWTKFDFPGRGNTHSNFKWRWYHFDGVDWDQSRQLQNKIYKFRGDGKEWDWEVDTENGNYDYLMYADYDMDHPEVVNELRNWGVWYTNTLGLDGFRIDAVKHIKYSFTRDWLTHVRNTTGKNMFAVAEFWKNDIGAIENYLSNTNWNHSVFDVPLHYNLYNASRSGGNYDMRQIFNGTVVQRHPTHAVTFVDNHDSQPEEALESFVEEWFKPLAYALTLTRDQGYPSVFYGDYYGIPTHGVPAMKSKIDPILEARQKYAYGKQNDYLDHHNMIGWTREGNTAHPNSGLATIMSDGPGGNKWMYVGRNKAGQVWRDITGNRSGTVTINADGWGNFSVNGGSVSIWVN

SEQ ID NO: 20672 - protein, 484 aa, Synthetic construct
HHNQTNGTMMQYFEWYLPNDGNHWNRLRSDASNLKDKGITAVWIPPAWKGASQNDVGYGAYDLYDLGEFNQKGTVRTKYGTRNQLQAAVTALKSNGIQVYGDVVMNHKGGADATEWVRAVEVNPSNRNQEVSGDYTIEAWTKFDFPGRGNTHSNFKWRWYHFDGVDWDQSRQLQNKIYKFQGDGKEWDWEVDEENGNYDYLMYADYDMDHPEVVNELRNWGVWYTNTLGLDGFRIDAVKHIKYSFTRDWLEHVRNTTGKNMFAVAEFWKNDIGAIENYLSKTNWNHSVFDVPLHYNLYNASRSGGNYDMRQIFNGTVVQRHPTHAVTFVDNHDSQPEEALESFVEEWFKPLAYALTLTRDQGYPSVFYGDYYGIPTHGVPAMKSKIDPILEARQKYAYGKQNDYMDHHNMIGWTREGNTAHPNSGLATIMSDGPGGNKWMYVGRNKAGQVWRDITGNRSGTVTINADGWGNFSVNGGSVSIWVN

SEQ ID NO: 20673 - protein, 484 aa, Synthetic construct
HHNQTNGTMMQYFEWYLPNDGNHWNRLRSDASNLKDKGITAVWIPPAWKGASQNDVGYGAYDLYDLGEFNQKGTVRTKYGTRNQLQAAVTALKSNGIQVYGDVVMNHKGGADATEWVRAVEVNPSNRNQEVSGDYTIEAWTKFDFPGRGNTHSNFKWRWYHFDGVDWDQSRQLQNKIYKFFGDGKEWDWEVDEENGNYDYLMYADYDMDHPEVVNELRNWGVWYTNTLGLDGFRIDAVKHIKYSFTRDWLEHVRNTTGKNMFAVAEFWKNDIGAIENYLSKTNWNHSVFDVPLHYNLYNASRSGGNYDMRQIFNGTVVQRHPTHAVTFVDNHDSQPEEALESFVEEWFKPLAYALTLTRDQGYPSVFYGDYYGIPTHGVPAMKSKIDPILEARQKYAYGKQNDYMDHHNMIGWTREGNTAHPNSGLATIMSDGPGGNKWMYVGRNKAGQVWRDITGNRSGTVTINADGWGNFSVNGGSVSIWVN

SEQ ID NO: 20674 - protein, 484 aa, Synthetic construct
HHNGTNGTMMQYFEWYLPNDGNHWHRLRSDASNLKDKGITAVWIPPAWKGASQNDVGYGAYDLYDLGEFNQKGTVRTKYGTRNQLQAAVTALKSNGIQVYGDVVMNHKGGADATEWVRAVEVDPSNRNQEVSGDYTIEAWTKFDFPGRGNTHSNFKWRWYHFDGVDWDQSRQLQNKIYKFRGDGKEWDWEVDTENGNYDYLMYADYDMDHPEVVNELRNWGVWYTNTLGLDGFRIDAVKHIKYSFTRDWLTHVRNTTQKNMFAVAEFWKNDIGAIENYLSKTNWNHSVFDVPLHYNLYNASRSGGNYDMRQIFNGTVVQRHPTHAVTFVDNHDSQPEEALESFVEEWFKPLAYALTLTRDQGEPSVFYGDYYGIPTHGVPAMKSKIDPILEARQKYAYGKQNDYLDHHNMIGWTREGNTAHPNSGLATIMSDGPGGNKWMYVGRNKAGQVWRDITGNRSGTVTINADGWGNFSVNGGSVSIWVN

SEQ ID NO: 20675 - protein, 484 aa, Synthetic construct
HHNQTNGTMMQYFEWYLPNDGNHWNRLRSDASNLKDKGITAVWIPPAWKGASQNDVGYGAYDLYDLGEFNQKGTVRTKYGTRNQLQAAVTALKSNGIQVYGDVVMNHKGGADATEWVRAVEVNPSNRNQEVSGDYTIEAWTKFDFPGRGNTHSNFKWRWYHFDGVDWDQSRQLQNKIYKFRGDGKEWDWEVDEENGNYDYLMYADYDMDHPEVVNELRNWGVWYTNTLGLDGFRIDAVKHIKYSFTRDWLEHVRNTTGKNMFAVAEFWKNDIGAIENYLSNTNWNHSVFDVPLHYNLYNASRSGGNYDMRQIFNGTVVQRHPTHAVTFVDNHDSQPEEALESFVEEWFKPLAYALTLTRDQGYPSVFYGDYYGIPTHGVPAMKSKIDPILEARQKYAYGKQNDYMDHHNMIGWTREGNTAHPNSGLATIMSDGPGGNKWMYVGRNKAGQVWRDITGNRSGTVTINADGWGNFSVNGGSVSIWVN

SEQ ID NO: 20676 - protein, 484 aa, Synthetic construct
HHNQTNGTMMQYFEWYLPNDGNHWNRLRSDASNLKDKGITAVWIPPAWKGASQNDVGYGAYDLYDLGEFNQKGTVRTKYGTRNQLQAAVTALKSNGIQVYGDVVMNHKGGADATEWVRAVEVNPSNRNQEVSGDETIEAWTKFDFPGRGNTHSNFKWRWYHFDGVDWDQSRQLQNKIYKFRGDGKEWDWEVDEENGNYDYLMYADYDMDHPEVVNELRNWGVWYTNTLGLDGFRIDAVKHIKYSFTRDWLEHVRNTTGKNMFAVAEFWKNDIGAIENYLSKTNWNHSVFDVPLHYNLYNASRSGGNYDMRQIFNGTVVQRHPTHAVTFVDNHDSQPEEALESFVEEWFKPLAYALTLTRDQGYPSVFYGDYYGIPTHGVPAMKSKIDPILEARQKYAYGKQNDYMDHHNMIGWTREGNTAHPNSGLATIMSDGPGGNKWMYVGRNKAGQVWRDITGNRSGTVTINADGWGNFSVNGGSVSIWVN

SEQ ID NO: 20677 - protein, 484 aa, Synthetic construct
HHNGTNGTMMQYFEWYLPNDGNHWHRLRSDASNLKDKGITAVWIPPAWKGASQNDVGYGAYDLYDLGEFNQKGTVRTKYGTRNQLQAAVTALKSNGIQVWGDVVMNHKGGADATEWVRAVEVNPSNRNQEVSGDTTIEAWTKFDFPGRGNTHSNFKWRWYHFDGVDWDQSRQLQNKIYKFQGDGKEWDWEVDTENGNYDYLMYADYDMDHPEVVNELRNWGVWYTNTLGLDGFRIDAVKHIKYSFTRDWLTHVRNTTGKNMFAVAEFWKNDIGAIENYLSKTNWNHSVFDVPLHYNLYNASRSGGNYDMRQIFNGTVVQRHPTHAVTFVDNHDSQPEEALESFVEEWFKPLAYALTLTRDQGYPSVFYGDYYGIPTHGVPAMKSKIDPILEARQKYAYGKQNDYLDHHNMIGWTREGNTAHPNSGLATIMSDGPGGNKWMYVGRNKAGQVWRDITGNRSGTVTINADGWGNFSVNGGSVSIWVN

SEQ ID NO: 20678 - protein, 484 aa, Synthetic construct
HHNGTNGTMMQYFEWYLPNDGNHWHRLRSDASNLKDKGITAVWIPPAWKGASQNDVGYGAYDLYDLGEFNQKGTVRTKYGTRNQLQAAVTALKSNGIQVYGDVVMNHKGGADATEWVRAVEVNPSNRNQEVSGDYTIEAWTKFDFPGRGNTHSNFKWRWWHFDGVDWDQSRQLQNKIYKFRGDGKEWDWEVDTENGNYDYLMYADYDMDHPEVVNELRNWGVWYTNTLGLDGFRIDAVKHIKYSFTRDWLTHVRNTTGKNMFAVAEFWKNDIGAIRNYLSKTNWNHSVFDVPLHYNLYNASRSGGNYDMRQIFNGTVVQRHPTHAVTFVDNHDSQPEEALESFVEEWFKPLAYALTLTRDQGYPSVFYGDYYGIPTHGVPAMKSKIDPILEARQKYAYGKQNDYMDHHNMIGWTREGNTAHPNSGLATIMSDGPGGNKWMYVGRNKAGQVWRDITGNRSGTVTINADGWGNFSVNGGSVSIWVN

SEQ ID NO: 20679 - protein, 484 aa, Synthetic construct
HHNQTNGTMMQYFEWYLPNDGNHWHRLRSDASNLKDKGITAVWIPPAWKGASQNDVGYGAYDLYDLGEFNQKGTVRTKYGTRNQLQAAVTALKSNGIQVYGDVVMNHKGGADATEWVRAVEVNPSNRNQEVSGDYTIEAWTKFDFPGRGNTHSNFKWRWYHFDGVDWDQSRQLQNKIYKFRGDGKEWDWEVDTENGNYDYLMYADYDMDHPEVVNELRNWGVWYTNTLGLDGFRIDAVKHIKYSFTRDWLTHVRNTTGKNMFAVAEFWKNDIGAIRNYLSKTNWNHSVFDVPLHYNLYNASRSGGNYDMRQIFNGTVVQRHPTHAVTFVDNHDSQPEEALESFVEEWFKPLAYALTLTRDQGYPSVFYGDYYGIPTHGVPAMKSKIDPILEARQKYAYGKQNDYMDHHNMIGWTREGNTAHPNSGLATIMSDGPGGNKWMYVGRNKAGQVWRDITGNRSGTVTINADGWGNFSVNGGSVSIWVN

SEQ ID NO: 20680 - protein, 484 aa, Synthetic construct
HHNQTNGTMMQYFEWYLPNDGNHWNRLRSDASNLKDKGITAVWIPPAWKGASQNDVGYGAYDLYDLGEFNQKGTVRTKYGTRNQLQAAVTALKSNGIQVYGDVVMNHKGGADATEWVRAVEVNPSNRNQEVSGDDTIEAWTKFDFPGRGNTHSNFKWRWYHFDGVDWDQSRQLQNKIYKFRGDGKEWDWEVDEENGNYDYLMYADYDMDHPEVVNELRNWGVWYTNTLGLDGFRIDAVKHIKYSFTRDWLEHVRNTTGKNMFAVAEFWKNDIGAIENYLSKTNWNHSVFDVPLHYNLYNASRSGGNYDMRQIFNGTVVQRHPTHAVTFVDNHDSQPEEALESFVEEWFKPLAYALTLTRDQGYPSVFYGDYYGIPTHGVPAMKSKIDPILEARQKYAYGKQNDYMDHHNMIGWTREGNTAHPNSGLATIMSDGPGGNKWMYVGRNKAGQVWRDITGNRSGTVTINADGWGNFSVNGGSVSIWVN

SEQ ID NO: 20681 - protein, 484 aa, Synthetic construct
HHNGTNGTMMQYFEWYLPNDGNHWHRLRSDASNLKDKGITAVWIPPAWKGASQNDVGYGAYDLYDLGEFNQKGTVRTKYGTRNQLQAAVTALKSNGIQVYGDVVMNHKGGADATEWVRAVEVNPSNRNQEVSGDTTIEAWTKFDFPGRGNTHSNFKWRWYHFDGVDWDQSRQLQNKIYKFRGDGKEWDWEVDEENGNYDYLMYADYDMDHPEVVNELRNWGVWYTNTLGLDGFRIDAVKHIKYSFTRDWLTHVRNTTQKNMFAVAEFWKNDIGAIENYLSKTNWNHSVFDVPLHYNLYNASRSGGNYDMRQIFNGTVVQRHPTHAVTFVDNHDSQPEEALESFVEEWFKPLAYALTLTRDQGYPSVFYGDYYGIPTHGVPAMKSKIDPILEARQKYAYGKQNDYLDHHNMIGWTREGNTAHPNSGLATIMSDGPGGNKWMYVGRNKAGQVWRDITGNRSGTVTINADGWGNFSVNGGSVSIWVN

SEQ ID NO: 20682 - protein, 484 aa, Synthetic construct
HHNGTNGTMMQYFEWYLPNDGNHWHRLRSDASNLKDKGITAVWIPPAWKGASQNDVGYGAYDLYDLGEFNQKGTVRTKYGTRNQLQAAVTALKSNGIQVYGDVVMNHKGGADATEWVRAVEVNPSNRNQEVSGDTTIEAWTKFDFPGRGNTHSNFKWRWYHFDGVDWDQSRQLQNKIYKFRGDGKEWDWEVDTENGNYDYLMYADYDMDHPEVVNELRNWGVWYTNTLGLDGFRIDAVKHIKYSFTRDWLTHVRNTTQKNMFAVAEFWKNDIGAIENYLSNTNWNHSVFDVPLHYNLYNASRSGGNYDMRQIFNGTVVQRHPTHAVTFVDNHDSQPEEALESFVEEWFKPLAYALTLTRDQGYPSVFYGDYYGIPTHGVPAMKSKIDPILEARQKYAYGKQNDYLDHHNMIGWTREGNTAHPNSGLATIMSDGPGGNKWMYVGRNKAGQVWRDITGNRSGTVTINADGWGNFSVNGGSVSIWVN

SEQ ID NO: 20683 - protein, 484 aa, Synthetic construct
HHNQTNGTMMQYFEWYLPNDGNHWHRLRSDASNLKDKGITAVWIPPAWKGASQNDVGYGAYDLYDLGEFNQKGTVRTKYGTRNQLQAAVTALKSNGIQVYGDVVMNHKGGADATEWVRAVEVNPSNRNQEVSGDYTIEAWTKFDFPGRGNTHSNFKWRWYHFDGVDWDQSRQLQNKIYKFRGDGKEWDWEVDTENGNYDYLMYADYDMDHPEVVNELRNWGVWYTNTLGLDGFRIDAVKHIKYSFTRDWLEHVRNTTGKNMFAVAEFWKNDIGAIRNYLSKTNWNHSVFDVPLHYNLYNASRSGGNYDMRQIFNGTVVQRHPTHAVTFVDNHDSQPEEALESFVEEWFKPLAYALTLTRDQGYPSVFYGDYYGIPTHGVPAMKSKIDPILEARQKYAYGKQNDYMDHHNMIGWTREGNTAHPNSGLATIMSDGPGGNKWMYVGRNKAGQVWRDITGNRSGTVTINADGWGNFSVNGGSVSIWVN

SEQ ID NO: 20684 - protein, 484 aa, Synthetic construct
HHNQTNGTMMQYFEWYLPNDGNHWNRLRSDASNLKDKGITAVWIPPAWKGASQNDVGYGAYDLYDLGEFNQKGTVRTKYGTRNQLQAAVTALKSNGIQVYGDVVMNHKGGADATEWVRAVEVNPSNRNQEVSGDYTIEAWTKFDFPGRGNTHSNFKWRWYHFDGVDWDQSRQLQNKIYKFRGDGKEWDWEVDEENGNYDYLMYADYDMDHPEVVNELRNWGVWYTNTLGLDGFRIDAVKHIKYSFTRDWLEHVRNTTGKNMFAVAEFWKNDIGAIENYLSKTNWNHSVFDVPLHYNLYNASRSGGNYDMRQIFNGTVVQRHPTHAVTFVDNHDSQPEEALESFVEEWFKPLAYALTLTRDQGHPSVFYGDYYGIPTHGVPAMKSKIDPILEARQKYAYGKQNDYMDHHNMIGWTREGNTAHPNSGLATIMSDGPGGNKWMYVGRNKAGQVWRDITGNRSGTVTINADGWGNFSVNGGSVSIWVN

SEQ ID NO: 20685 - protein, 484 aa, Synthetic construct
HHNQTNGTMMQYFEWYLPNDGNHWNRLRSDASNLKDKGITAVWIPPAWKGASQNDVGYGAYDLYDLGEFNQKGTVRTKYGTRNQLQAAVTALKSNGIQVYGDVVMNHKGGADATEWVRAVEVNPSNRNQEVSGDTTIEAWTKFDFPGRGNTHSNFKWRWYHFDGVDWDQSRQLQNKIYKFRGDGKEWDWEVDEENGNYDYLMYADYDMDHPEVVNELRNWGVWYTNTLGLDGFRIDAVKHIKYSFTRDWLEHVRNTTGKNMFAVAEFWKNDIGAIENYLSKTNWNHSVFDVPLHYNLYNASRSGGNYDMRQIFNGTVVQRHPTHAVTFVDNHDSQPEEALESFVEEWFKPLAYALTLTRDQGYPSVFYGDYYGIPTHGVPAMKSKIDPILEARQKYAYGKQNDYMDHHNMIGWTREGNTAHPNSGLATIMSDGPGGNKWMYVGRNKAGQVWRDITGNRSGTVTINADGWGNFSVNGGSVSIWVN

SEQ ID NO: 20686 - protein, 484 aa, Synthetic construct
HHNQTNGTMMQYFEWYLPNDGNHWHRLRSDASNLKDKGITAVWIPPAWKGASQNDVGYGAYDLYDLGEFNQKGTVRTKYGTRNQLQAAVTALKSNGIQVYGDVVMNHKGGADATEWVRAVEVNPSNRNQEVSGDYTIEAWTKFDFPGRGNTHSNFKWRWWHFDGVDWDQSRQLQNKIYKFRGDGKEWDWEVDTENGNYDYLMYADIDMDHPEVVNELRNWGVWYTNTLGLDGFRIDAVKHIKYSFTRDWLTHVRNTTGKNMFAVAEFWKNDIGAIRNYLSKTNWNHSVFDVPLHYNLYNASRSGGNYDMRQIFNGTVVQRHPTHAVTFVDNHDSQPEEALESFVEEWFKPLAYALTLTRDQGYPSVFYGDYYGIPTHGVPAMKSKIDPILEARQKYAYGKQNDYMDHHNMIGWTREGNTAHPNSGLATIMSDGPGGNKWMYVGRNKAGQVWRDITGNRSGTVTINADGWGNFSVNGGSVSIWVN

SEQ ID NO: 20687 - protein, 484 aa, Synthetic construct
HHNGTNGTMMQYFEWYLPNDGNHWHRLRSDASNLKDKGITAVWIPPAWKGASQNDVGYGAYDLYDLGEFNQKGTVRTKYGTRNQLQAAVTALKSNGIQVYGDVVMNHKGGADATEWVRAVEVNPSNRNQEVSGDYTIEAWTKFDFPGRGNTHSNFKWRWWHFDGVDWDQSRQLQNKIYKFRGDGKEWDWEVDEENGNYDYLMYADYDMDHPEVVNELRNWGVWYTNTLGLDGFRIDAVKHIKYSFTRDWLEHVRNTTGKNMFAVAEFWKNDIGAIENYLSKTNWNHSVFDVPLHYNLYNASRSGGNYDMRQIFNGTVVQRHPTHAVTFVDNHDSQPEEALESFVEEWFKPLAYALTLTRDQGYPSVFYGDYYGIPTHGVPAMKSKIDPILEARQKYAYGKQNDYMDHHNMIGWTREGNTAHPNSGLATIMSDGPGGNKWMYVGRNKAGQVWRDITGNRSGTVTINADGWGNFSVNGGSVSIWVN

SEQ ID NO: 20688 - protein, 484 aa, Synthetic construct
HHNGTNGTMMQYFEWYLPNDGNHWHRLRSDASNLKDKGITAVWIPPAWKGASQNDVGYGAYDLYDLGEFNQKGTVRTKYGTRNQLQAAVTALKSNGIQVYGDVVMNHKGGADATEWVRAVEVNPSNRNQEVSGDYTIEAWTKFDFPGRGNTHSNFKWRWYHFDGVDWDQSRQLQNKIYKFRGDGKEWDWEVDTENGNYDYLMYADYDMDHPEVVNELRNWGVWYTNTLGLDGFRIDAVKHIKYSFTRDWLTHVRNTTQKNMFAVAEFWKNDIGAIENYLSNTNWNHSVFDVPLHYNLYNASRSGGNYDMRQIFNGTVVQRHPTHAVTFVDNHDSQPEEALESFVEEWFKPLAYALTLTRDQGEPSVFYGDYYGIPTHGVPAMKSKIDPILEARQKYAYGKQNDYLDHHNMIGWTREGNTAHPNSGLATIMSDGPGGNKWMYVGRNKAGQVWRDITGNRSGTVTINADGWGNFSVNGGSVSIWVN

SEQ ID NO: 20689 - protein, 484 aa, Synthetic construct
HHNQTNGTMMQYFEWYLPNDGNHWNRLRSDASNLKDKGITAVWIPPAWKGASQNDVGYGAYDLYDLGEFNQKGTVRTKYGTRNQLQAAVTALKSNGIQVYGDVVMNHKGGADATEWVRAVEVNPSNRNQEVSGDYTIEAWTKFDFPGRGNTHSNFKWRWYHFDGVDWDQSRQLQNKIYKFRGDGKEWDWEVDEENGNYDYLMYADYDMDHPEVVNELRNWGVWYTNTLGLDGFRIDAVKHIKYSFTRDWLEHVRNTTGKNMFAVAEFWKNDIGAIENYLSKTNWNHSVFDVPLHYNLYNASRSGGNYDMRQIFNGTVVQRHPTHAVTFVDNHDSQPEEALESFVEEWFKPLAYALTLTRDQGEPSVFYGDYYGIPTHGVPAMKSKIDPILEARQKYAYGKQNDYMDHHNMIGWTREGNTAHPNSGLATIMSDGPGGNKWMYVGRNKAGQVWRDITGNRSGTVTINADGWGNFSVNGGSVSIWVN

SEQ ID NO: 20690 - protein, 484 aa, Synthetic construct
HHNQTNGTMMQYFEWYLPNDGNHWHRLRSDASNLKDKGITAVWIPPAWKGASQNDVGYGAYDLYDLGEFNQKGTVRTKYGTRNQLQAAVTALKSNGIQVYGDVVMNHKGGADATEWVRAVEVNPSNRNQEVSGDYTIEAWTKFDFPGRGNTHSNFKWRWWHFDGVDWDQSRQLQNRIYKFRGDGKEWDWEVDTENGNYDYLMYADYDMDHPEVVNELRNWGVWYTNTLGLDGFRIDAVKHIKYSFTRDWLEHVRNTTGKNMFAVAEFWKNDIGAIRNYLSKTNWNHSVFDVPLHYNLYNASRSGGNYDMRQIFNGTVVQRHPTHAVTFVDNHDSQPEEALESFVEEWFKPLAYALTLTRDQGYPSVFYGDYYGIPTHGVPAMKSKIDPILEARQKYAYGKQNDYMDHHNMIGWTREGNTAHPNSGLATIMSDGPGGNKWMYVGRNKAGQVWRDITGNRSGTVTINADGWGNFSVNGGSVSIWVN

SEQ ID NO: 20691 - protein, 484 aa, Synthetic construct
HHNGTNGTMMQYFEWYLPNDGNHWHRLRSDASNLKDKGITAVWIPPAWKGASQNDVGYGAYDLYDLGEFNQKGTVRTKYGTRNQLQAAVTALKSNGIQVWGDVVMNHKGGADATEWVRAVEVNPSNRNQEVSGDYTIEAWTKFDFPGRGNTHSNFKWRWYHFDGVDWDQSRQLQNKIYKFRGDGKEWDWEVDEENGNYDYLMYADYDMDHPEVVNELRNWGVWYTNTLGLDGFRIDAVKHIKYSFTRDWLTHVRNTTQKNMFAVAEFWKNDIGAIENYLSKTNWNHSVFDVPLHYNLYNASRSGGNYDMRQIFNGTVVQRHPTHAVTFVDNHDSQPEEALESFVEEWFKPLAYALTLTRDQGYPSVFYGDYYGIPTHGVPAMKSKIDPILEARQKYAYGKQNDYLDHHNMIGWTREGNTAHPNSGLATIMSDGPGGNKWMYVGRNKAGQVWRDITGNRSGTVTINADGWGNFSVNGGSVSIWVN

SEQ ID NO: 20692 - protein, 484 aa, Synthetic construct
HHNQTNGTMMQYFEWYLPNDGNHWNRLRSDASNLKDKGITAVWIPPAWKGASQNDVGYGAYDLYDLGEFNQKGTVRTKYGTRNQLQAAVTALKSNGIQVYGDVVMNHKGGADATEWVRAVEVNPSNRNQEVSGDYTIEAWTKFDFPGRGNTHSNFKWRWYHFDGVDWDQSRQLQNKIYKFRGDGKEWDWEVDEENGNYDYLMYADYDMDHPEVVNELRNWGVWYTNTLGLDGFRIDAVKHIKYSFTRDWLEHVRNTTQKNMFAVAEFWKNDIGAIENYLSKTNWNHSVFDVPLHYNLYNASRSGGNYDMRQIFNGTVVQRHPTHAVTFVDNHDSQPEEALESFVEEWFKPLAYALTLTRDQGYPSVFYGDYYGIPTHGVPAMKSKIDPILEARQKYAYGKQNDYMDHHNMIGWTREGNTAHPNSGLATIMSDGPGGNKWMYVGRNKAGQVWRDITGNRSGTVTINADGWGNFSVNGGSVSIWVN

SEQ ID NO: 20693 - protein, 484 aa, Synthetic construct
HHNQTNGTMMQYFEWYLPNDGNHWNRLRSDASNLKDKGITAVWIPPAWKGASQNDVGYGAYDLYDLGEFNQKGTVRTKYGTRNQLQAAVTALKSNGIQVYGDVVMNHKGGADATEWVRAVEVNPSNRNQEVSGDYTIEAWTKFDFPGRGNTHSNFKWRWYHFDGVDWDQSRQLQNKIYKFRGDGKEWDWEVDEENGNYDYLMYADYDMDHPEVVNELRNWGVWYTNTLGLDGFRIDAVKHIKYSFTRDWLEHVRNTTGKNMFAVAEFWKNDIGAIENYLSKTNWNHSVFDVPLHYNLYNASRSGGNYDMRQIFNGTVVQRHPTHAVTFVDNHDSQPEEALESFVEEWFKPLAYALTLTRDQGNPSVFYGDYYGIPTHGVPAMKSKIDPILEARQKYAYGKQNDYMDHHNMIGWTREGNTAHPNSGLATIMSDGPGGNKWMYVGRNKAGQVWRDITGNRSGTVTINADGWGNFSVNGGSVSIWVN

SEQ ID NO: 20694 - protein, 484 aa, Synthetic construct
HHNQTNGTMMQYFEWYLPNDGNHWNRLRSDASNLKDMGITAVWIPPAWKGASQNDVGYGAYDLYDLGEFNQKGTVRTKYGTRNQLQAAVTALKSNGIQVYGDVVMNHKGGADATEWVRAVEVNPSNRNQEVSGDYTIEAWTKFDFPGRGNTHSNFKWRWYHFDGVDWDQSRQLQNKIYKFRGDGKEWDWEVDEENGNYDYLMYADYDMDHPEVVNELRNWGVWYTNTLGLDGFRIDAVKHIKYSFTRDWLEHVRNTTGKNMFAVAEFWKNDIGAIENYLSKTNWNHSVFDVPLHYNLYNASRSGGNYDMRQIFNGTVVQRHPTHAVTFVDNHDSQPEEALESFVEEWFKPLAYALTLTRDQGYPSVFYGDYYGIPTHGVPAMKSKIDPILEARQKYAYGKQNDYMDHHNMIGWTREGNTAHPNSGLATIMSDGPGGNKWMYVGRNKAGQVWRDITGNRSGTVTINADGWGNFSVNGGSVSIWVN

SEQ ID NO: 20695 - protein, 484 aa, Synthetic construct
HHNQTNGTMMQYFEWYLPNDGNHWNRLRSDASNLKDKGITAVWIPPAWKGASQNDVGYGAYDLYDLGEFNQKGTVRTKYGTRNQLQAAVTALKSNGIQVYGDVVMNHKGGADATEWVRAVEVNPSNRNQEVSGDYTIEAWTKFDFPGRGNTHSNFKWRWEHFDGVDWDQSRQLQNKIYKFRGDGKEWDWEVDEENGNYDYLMYADYDMDHPEVVNELRNWGVWYTNTLGLDGFRIDAVKHIKYSFTRDWLEHVRNTTGKNMFAVAEFWKNDIGAIENYLSKTNWNHSVFDVPLHYNLYNASRSGGNYDMRQIFNGTVVQRHPTHAVTFVDNHDSQPEEALESFVEEWFKPLAYALTLTRDQGYPSVFYGDYYGIPTHGVPAMKSKIDPILEARQKYAYGKQNDYMDHHNMIGWTREGNTAHPNSGLATIMSDGPGGNKWMYVGRNKAGQVWRDITGNRSGTVTINADGWGNFSVNGGSVSIWVN

SEQ ID NO: 20696 - protein, 484 aa, Synthetic construct
HHNGTNGTMMQYFEWYLPNDGNHWHRLRSDASNLKDKGITAVWIPPAWKGASQNDVGYGAYDLYDLGEFNQKGTVRTKYGTRNQLQAAVTALKSNGIQVWGDVVMNHKGGADATEWVRAVEVNPSNRNQEVSGDYTIEAWTKFDFPGRGNTHSNFKWRWYHFDGVDWDQSRQLQNKIYKFRGDGKEWDWEVDTENGNYDYLMYADYDMDHPEVVNELRNWGVWYTNTLGLDGFRIDAVKHIKYSFTRDWLTHVRNTTQKNMFAVAEFWKNDIGAIENYLSKTNWNHSVFDVPLHYNLYNASRSGGNYDMRQIFNGTVVQRHPTHAVTFVDNHDSQPEEALESFVEEWFKPLAYALTLTRDQGEPSVFYGDYYGIPTHGVPAMKSKIDPILEARQKYAYGKQNDYLDHHNMIGWTREGNTAHPNSGLATIMSDGPGGNKWMYVGRNKAGQVWRDITGNRSGTVTINADGWGNFSVNGGSVSIWVN

SEQ ID NO: 20697 - protein, 484 aa, Synthetic construct
HHNGTNGTMMQYFEWYLPNDGNHWHRLRSDASNLKDKGITAVWIPPAWKGASQNDVGYGAYDLYDLGEFNQKGTVRTKYGTRNQLQAAVTALKSNGIQVWGDVVMNHKGGADATEWVRAVEVNPSNRNQEVSGDYTIEAWTKFDFPGRGNTHSNFKWRWYHFDGVDWDQSRQLQNKIYKFRGDGKEWDWEVDTENGNYDYLMYADYDMDHPEVVNELRNWGVWYTNTLGLDGFRIDAVKHIKYSFTRDWLTHVRNTTQKNMFAVAEFWKNDIGAIENYLSNTNWNHSVFDVPLHYNLYNASRSGGNYDMRQIFNGTVVQRHPTHAVTFVDNHDSQPEEALESFVEEWFKPLAYALTLTRDQGYPSVFYGDYYGIPTHGVPAMKSKIDPILEARQKYAYGKQNDYLDHHNMIGWTREGNTAHPNSGLATIMSDGPGGNKWMYVGRNKAGQVWRDITGNRSGTVTINADGWGNFSVNGGSVSIWVN

SEQ ID NO: 20698 - protein, 484 aa, Synthetic construct
HHNQTNGTMMQYFEWYLPNDGNHWYRLRSDASNLKDKGITAVWIPPAWKGASQNDVGYGAYDLYDLGEFNQKGTVRTKYGTRNQLQAAVTALKSNGIQVYGDVVMNHKGGADATEWVRAVEVNPSNRNQEVSGDYTIEAWTKFDFPGRGNTHSNFKWRWYHFDGVDWDQSRQLQNKIYKFRGDGKEWDWEVDEENGNYDYLMYADYDMDHPEVVNELRNWGVWYTNTLGLDGFRIDAVKHIKYSFTRDWLEHVRNTTGKNMFAVAEFWKNDIGAIENYLSKTNWNHSVFDVPLHYNLYNASRSGGNYDMRQIFNGTVVQRHPTHAVTFVDNHDSQPEEALESFVEEWFKPLAYALTLTRDQGYPSVFYGDYYGIPTHGVPAMKSKIDPILEARQKYAYGKQNDYMDHHNMIGWTREGNTAHPNSGLATIMSDGPGGNKWMYVGRNKAGQVWRDITGNRSGTVTINADGWGNFSVNGGSVSIWVN

SEQ ID NO: 20699 - protein, 484 aa, Synthetic construct
HHNQTNGTMMQYFEWYLPNDGNHWNRLRSDASNLKDKGITAVWIPPAWKGASQNDVGYGAYDLYDLGEFNQKGTVRTKYGTRNQLQAAVTALKSNGIQVYGDVVMNHKGGADATEWVRAVEVNPSNRNQEVSGDYEIEAWTKFDFPGRGNTHSNFKWRWYHFDGVDWDQSRQLQNKIYKFRGDGKEWDWEVDEENGNYDYLMYADYDMDHPEVVNELRNWGVWYTNTLGLDGFRIDAVKHIKYSFTRDWLEHVRNTTGKNMFAVAEFWKNDIGAIENYLSKTNWNHSVFDVPLHYNLYNASRSGGNYDMRQIFNGTVVQRHPTHAVTFVDNHDSQPEEALESFVEEWFKPLAYALTLTRDQGYPSVFYGDYYGIPTHGVPAMKSKIDPILEARQKYAYGKQNDYMDHHNMIGWTREGNTAHPNSGLATIMSDGPGGNKWMYVGRNKAGQVWRDITGNRSGTVTINADGWGNFSVNGGSVSIWVN

SEQ ID NO: 20700 - protein, 484 aa, Synthetic construct
HHNGTNGTMMQYFEWYLPNDGNHWHRLRSDASNLKDKGITAVWIPPAWKGASQNDVGYGAYDLYDLGEFNQKGTVRTKYGTRNQLQAAVTALKSNGIQVYGDVVMNHKGGADATEWVRAVEVNPSNRNQEVSGDTTIEAWTKFDFPGRGNTHSNFKWRWYHFDGVDWDQSRQLQNKIYKFRGDGKEWDWEVDTENGNYDYLMYADYDMDHPEVVNELRNWGVWYTNTLGLDGFRIDAVKHIKYSFTRDWLTHVRNTTGKNMFAVAEFWKNDIGAIENYLSNTNWNHSVFDVPLHYNLYNASRSGGNYDMRQIFNGTVVQRHPTHAVTFVDNHDSQPEEALESFVEEWFKPLAYALTLTRDQGEPSVFYGDYYGIPTHGVPAMKSKIDPILEARQKYAYGKQNDYLDHHNMIGWTREGNTAHPNSGLATIMSDGPGGNKWMYVGRNKAGQVWRDITGNRSGTVTINADGWGNFSVNGGSVSIWVN

SEQ ID NO: 20701 - protein, 484 aa, Synthetic construct
HHNGTNGTMMQYFEWYLPNDGNHWHRLRSDASNLKDKGITAVWIPPAWKGASQNDVGYGAYDLYDLGEFNQKGTVRTKYGTRNQLQAAVTALKSNGIQVWGDVVMNHKGGADATEWVRAVEVNPSNRNQEVSGDYTIEAWTKFDFPGRGNTHSNFKWRWYHFDGVDWDQSRQLQNKIYKFQGDGKEWDWEVDEENGNYDYLMYADYDMDHPEVVNELRNWGVWYTNTLGLDGFRIDAVKHIKYSFTRDWLTHVRNTTGKNMFAVAEFWKNDIGAIENYLSKTNWNHSVFDVPLHYNLYNASRSGGNYDMRQIFNGTVVQRHPTHAVTFVDNHDSQPEEALESFVEEWFKPLAYALTLTRDQGYPSVFYGDYYGIPTHGVPAMKSKIDPILEARQKYAYGKQNDYLDHHNMIGWTREGNTAHPNSGLATIMSDGPGGNKWMYVGRNKAGQVWRDITGNRSGTVTINADGWGNFSVNGGSVSIWVN

SEQ ID NO: 20702 - protein, 484 aa, Synthetic construct
HHNGTNGTMMQYFEWYLPNDGNHWHRLRSDASNLKDKGITAVWIPPAWKGASQNDVGYGAYDLYDLGEFNQKGTVRTKYGTRNQLQAAVTALKSNGIQVYGDVVMNHKGGADATEWVRAVEVNPSNRNQEVSGDYTIEAWTKFDFPGRGNTHSNFKWRWYHFDGVDWDQSRQLQNKIYKFRGDGKEWDWEVDEENGNYDYLMYADYDMDHPEVVNELRNWGVWYTNTLGLDGFRIDAVKHIKYSFTRDWLEHVRNTTGKNMFAVAEFWKNDIGAIRNYLSKTNWNHSVFDVPLHYNLYNASRSGGNYDMRQIFNGTVVQRHPTHAVTFVDNHDSQPEEALESFVEEWFKPLAYALTLTRDQGYPSVFYGDYYGIPTHGVPAMKSKIDPILEARQKYAYGKQNDYMDHHNMIGWTREGNTAHPNSGLATIMSDGPGGNKWMYVGRNKAGQVWRDITGNRSGTVTINADGWGNFSVNGGSVSIWVN

SEQ ID NO: 20703 - protein, 484 aa, Synthetic construct
HHNGTNGTMMQYFEWYLPNDGNHWHRLRSDASNLKDKGITAVWIPPAWKGASQNDVGYGAYDLYDLGEFNQKGTVRTKYGTRNQLQAAVTALKSNGIQVWGDVVMNHKGGADATEWVRAVEVNPSNRNQEVSGDTTIEAWTKFDFPGRGNTHSNFKWRWYHFDGVDWDQSRQLQNKIYKFRGDGKEWDWEVDTENGNYDYLMYADYDMDHPEVVNELRNWGVWYTNTLGLDGFRIDAVKHIKYSFTRDWLTHVRNTTQKNMFAVAEFWKNDIGAIENYLSKTNWNHSVFDVPLHYNLYNASRSGGNYDMRQIFNGTVVQRHPTHAVTFVDNHDSQPEEALESFVEEWFKPLAYALTLTRDQGYPSVFYGDYYGIPTHGVPAMKSKIDPILEARQKYAYGKQNDYLDHHNMIGWTREGNTAHPNSGLATIMSDGPGGNKWMYVGRNKAGQVWRDITGNRSGTVTINADGWGNFSVNGGSVSIWVN

SEQ ID NO: 20704 - protein, 484 aa, Synthetic construct
HHNGTNGTMMQYFEWYLPNDGNHWHRLRSDASNLKDKGITAVWIPPAWKGASQNDVGYGAYDLYDLGEFNQKGTVRTKYGTRNQLQAAVTALKSNGIQVWGDVVMNHKGGADATEWVRAVEVNPSNRNQEVSGDYTIEAWTKFDFPGRGNTHSNFKWRWYHFDGVDWDQSRQLQNKIYKFQGDGKEWDWEVDTENGNYDYLMYADYDMDHPEVVNELRNWGVWYTNTLGLDGFRIDAVKHIKYSFTRDWLTHVRNTTGKNMFAVAEFWKNDIGAIENYLSKTNWNHSVFDVPLHYNLYNASRSGGNYDMRQIFNGTVVQRHPTHAVTFVDNHDSQPEEALESFVEEWFKPLAYALTLTRDQGEPSVFYGDYYGIPTHGVPAMKSKIDPILEARQKYAYGKQNDYLDHHNMIGWTREGNTAHPNSGLATIMSDGPGGNKWMYVGRNKAGQVWRDITGNRSGTVTINADGWGNFSVNGGSVSIWVN

SEQ ID NO: 20705 - protein, 484 aa, Synthetic construct
HHNQTNGTMMQYFEWYLPNDGNHWHRLRSDASNLKDKGITAVWIPPAWKGASQNDVGYGAYDLYDLGEFNQKGTVRTKYGTRNQLQAAVTALKSNGIQVYGDVVMNHKGGADATEWVRAVEVNPSNRNQEVSGDYTIEAWTKFDFPGRGNTHSNFKWRWWHFDGVDWDRSRQLQNRIYKFRGDGKEWDWEVDTENGNYDYLMYADYDMDHPEVVNELRNWGVWYTNTLGLDGFRIDAVKHIKYSFTRDWLTHVRNTTGKNMFAVAEFWKNDIGAIRNYLSKTNWNHSVFDVPLHYNLYNASRSGGNYDMRQIFNGTVVQRHPTHAVTFVDNHDSQPEEALESFVEEWFKPLAYALTLTRDQGYPSVFYGDYYGIPTHGVPAMKSKIDPILEARQKYAYGKQNDYLDHHNMIGWTREGNTAHPNSGLATIMSDGPGGNKWMYVGRNKAGQVWRDITGNRSGTVTINADGWGNFSVNGGSVSIWVN

SEQ ID NO: 20706 - protein, 484 aa, Synthetic construct
HHNGTNGTMMQYFEWYLPNDGNHWHRLRSDASNLKDKGITAVWIPPAWKGASQNDVGYGAYDLYDLGEFNQKGTVRTKYGTRNQLQAAVTALKSNGIQVWGDVVMNHKGGADATEWVRAVEVNPSNRNQEVSGDYTIEAWTKFDFPGRGNTHSNFKWRWYHFDGVDWDQSRQLQNKIYKFRGDGKEWDWEVDTENGNYDYLMYADYDMDHPEVVNELRNWGVWYTNTLGLDGFRIDAVKHIKYSFTRDWLTHVRNTTGKNMFAVAEFWKNDIGAIENYLSNTNWNHSVFDVPLHYNLYNASRSGGNYDMRQIFNGTVVQRHPTHAVTFVDNHDSQPEEALESFVEEWFKPLAYALTLTRDQGEPSVFYGDYYGIPTHGVPAMKSKIDPILEARQKYAYGKQNDYLDHHNMIGWTREGNTAHPNSGLATIMSDGPGGNKWMYVGRNKAGQVWRDITGNRSGTVTINADGWGNFSVNGGSVSIWVN

SEQ ID NO: 20707 - protein, 484 aa, Synthetic construct
HHNGTNGTMMQYFEWYLPNDGNHWHRLRSDASNLKDKGITAVWIPPAWKGASQNDVGYGAYDLYDLGEFNQKGTVRTKYGTRNQLQAAVTALKSNGIQVWGDVVMNHKGGADATEWVRAVEVNPSNRNQEVSGDTTIEAWTKFDFPGRGNTHSNFKWRWYHFDGVDWDQSRQLQNKIYKFRGDGKEWDWEVDTENGNYDYLMYADYDMDHPEVVNELRNWGVWYTNTLGLDGFRIDAVKHIKYSFTRDWLTHVRNTTGKNMFAVAEFWKNDIGAIENYLSKTNWNHSVFDVPLHYNLYNASRSGGNYDMRQIFNGTVVQRHPTHAVTFVDNHDSQPEEALESFVEEWFKPLAYALTLTRDQGEPSVFYGDYYGIPTHGVPAMKSKIDPILEARQKYAYGKQNDYLDHHNMIGWTREGNTAHPNSGLATIMSDGPGGNKWMYVGRNKAGQVWRDITGNRSGTVTINADGWGNFSVNGGSVSIWVN

SEQ ID NO: 20708 - protein, 484 aa, Synthetic construct
HHNQTNGTMMQYFEWYLPNDGNHWHRLRSDASNLKDKGITAVWIPPAWKGASQNDVGYGAYDLYDLGEFNQKGTVRTKYGTRNQLQAAVTALKSNGIQVYGDVVMNHKGGADATEWVRAVEVNPSNRNQEVSGDYTIEAWTKFDFPGRGNTHSNFKWRWWHFDGVDWDQSRQLQNKIYKFRGDGKEWDWEVDTENGNYDYLMYADIDMDHPEVVNELRNWGVWYTNTLGLDGFRIDAVKHIKYSFTRDWLEHVRNTTGKNMFAVAEFWKNDIGAIRNYLSKTNWNHSVFDVPLHYNLYNASRSGGNYDMRQIFNGTVVQRHPTHAVTFVDNHDSQPEEALESFVEEWFKPLAYALTLTRDQGYPSVFYGDYYGIPTHGVPAMKSKIDPILEARQKYAYGKQNDYMDHHNMIGWTREGNTAHPNSGLATIMSDGPGGNKWMYVGRNKAGQVWRDITGNRSGTVTINADGWGNFSVNGGSVSIWVN

SEQ ID NO: 20709 - protein, 484 aa, Synthetic construct
HHNQTNGTMMQYFEWYLPNDGNHWNRLRSDASNLKDKGITAVWIPPAWKGASQNDVGYGAYDLYDLGEFNQKGTVRTKYGTRNQLQAAVTALKSNGIQVYGDVVMNHKGGADATEWVRAVEVNPSNRNQEVSGDYTIEAWTKFDFPGRGNTHSNFKWRWYHFDGVDWDQSRQLQNKIYKFRGDGKEWDWEVDEENGNYDYLMYADYDMDHPEVVNELRNWGVWYTNTLGLDGFRIDAVKHIKYSFTRDWLTHVRNTTGKNMFAVAEFWKNDIGAIRNYLSKTNWNHSVFDVPLHYNLYNASRSGGNYDMRQIFNGTVVQRHPTHAVTFVDNHDSQPEEALESFVEEWFKPLAYALTLTRDQGYPSVFYGDYYGIPTHGVPAMKSKIDPILEARQKYAYGKQNDYMDHHNMIGWTREGNTAHPNSGLATIMSDGPGGNKWMYVGRNKAGQVWRDITGNRSGTVTINADGWGNFSVNGGSVSIWVN

SEQ ID NO: 20710 - protein, 484 aa, Synthetic construct
HHNQTNGTMMQYFEWYLPNDGNHWNRLRSDASNLKDKGITAVWIPPAWKGASQNDVGYGAYDLYDLGEFNQKGTVRTKYGTRNQLQAAVTALKSNGIQVYGDVVMNHKGGADATEWVRAVEVNPSNRNQEVSGDYTIEAWTKFDFPGRGNTHSNFKWRWYHFDGVDWDQSRQLQNKIYKFNGDGKEWDWEVDEENGNYDYLMYADYDMDHPEVVNELRNWGVWYTNTLGLDGFRIDAVKHIKYSFTRDWLEHVRNTTGKNMFAVAEFWKNDIGAIENYLSKTNWNHSVFDVPLHYNLYNASRSGGNYDMRQIFNGTVVQRHPTHAVTFVDNHDSQPEEALESFVEEWFKPLAYALTLTRDQGYPSVFYGDYYGIPTHGVPAMKSKIDPILEARQKYAYGKQNDYMDHHNMIGWTREGNTAHPNSGLATIMSDGPGGNKWMYVGRNKAGQVWRDITGNRSGTVTINADGWGNFSVNGGSVSIWVN

SEQ ID NO: 20711 - protein, 484 aa, Synthetic construct
HHNQTNGTMMQYFEWYLPNDGNHWNRLRSDASNLKDKGITAVWIPPAWKGASQNDVGYGAYDLYDLGEFNQKGTVRTKYGTRNQLQAAVTALKSNGIQVYGDVVMNHKGGADATEWVRAVEVNPSNRNQEVSGDYTIEAWTKFDFPGRGNTHSNFKWRWYHFDGVDWDQSRQLQNKIYKFDGDGKEWDWEVDEENGNYDYLMYADYDMDHPEVVNELRNWGVWYTNTLGLDGFRIDAVKHIKYSFTRDWLEHVRNTTGKNMFAVAEFWKNDIGAIENYLSKTNWNHSVFDVPLHYNLYNASRSGGNYDMRQIFNGTVVQRHPTHAVTFVDNHDSQPEEALESFVEEWFKPLAYALTLTRDQGYPSVFYGDYYGIPTHGVPAMKSKIDPILEARQKYAYGKQNDYMDHHNMIGWTREGNTAHPNSGLATIMSDGPGGNKWMYVGRNKAGQVWRDITGNRSGTVTINADGWGNFSVNGGSVSIWVN

SEQ ID NO: 20712 - protein, 484 aa, Synthetic construct
HHNQTNGTMMQYFEWYLPNDGNHWHRLRSDASNLKDKGITAVWIPPAWKGASQNDVGYGAYDLYDLGEFNQKGTVRTKYGTRNQLQAAVTALKSNGIQVYGDVVMNHKGGADATEWVRAVEVNPSNRNQEVSGDYTIEAWTKFDFPGRGNTHSNFKWRWWHFDGVDWDQSRQLQNRIYKFRGDGKEWDWEVDEENGNYDYLMYADYDMDHPEVVNELRNWGVWYTNTLGLDGFRIDAVKHIKYSFTRDWLTHVRNTTGKNMFAVAEFWKNDIGAIRNYLSKTNWNHSVFDVPLHYNLYNASRSGGNYDMRQIFNGTVVQRHPTHAVTFVDNHDSQPEEALESFVEEWFKPLAYALTLTRDQGYPSVFYGDYYGIPTHGVPAMKSKIDPILEARQKYAYGKQNDYLDHHNMIGWTREGNTAHPNSGLATIMSDGPGGNKWMYVGRNKAGQVWRDITGNRSGTVTINADGWGNFSVNGGSVSIWVN

SEQ ID NO: 20713 - protein, 484 aa, Synthetic construct
HHNQTNWTMMQYFEWYLPNDGNHWNRLRSDASNLKDKGITAVWIPPAWKGASQNDVGYGAYDLYDLGEFNQKGTVRTKYGTRNQLQAAVTALKSNGIQVYGDVVMNHKGGADATEWVRAVEVNPSNRNQEVSGDYTIEAWTKFDFPGRGNTHSNFKWRWYHFDGVDWDQSRQLQNKIYKFRGDGKEWDWEVDEENGNYDYLMYADYDMDHPEVVNELRNWGVWYTNTLGLDGFRIDAVKHIKYSFTRDWLEHVRNTTGKNMFAVAEFWKNDIGAIENYLSKTNWNHSVFDVPLHYNLYNASRSGGNYDMRQIFNGTVVQRHPTHAVTFVDNHDSQPEEALESFVEEWFKPLAYALTLTRDQGYPSVFYGDYYGIPTHGVPAMKSKIDPILEARQKYAYGKQNDYMDHHNMIGWTREGNTAHPNSGLATIMSDGPGGNKWMYVGRNKAGQVWRDITGNRSGTVTINADGWGNFSVNGGSVSIWVN

SEQ ID NO: 20714 - protein, 484 aa, Synthetic construct
HHNQTNGTMMQYFEWYLPNDGNHWHRLRSDASNLKDKGITAVWIPPAWKGASQNDVGYGAYDLYDLGEFNQKGTVRTKYGTRNQLQAAVTALKSNGIQVYGDVVMNHKGGADATEWVRAVEVNPSNRNQEVSGDYTIEAWTKFDFPGRGNTHSNFKWRWWHFDGVDWDQSRQLQNKIYKFRGDGKEWDWEVDTENGNYDYLMYADYDMDHPEVVNELRNWGVWYTNTLGLDGFRIDAVKHIKYSFTRDWLTHVRNTTGKNMFAVAEFWKNDIGAIRNYLSKTNWNHSVFDVPLHYNLYNASRSGGNYDMRQIFNGTVVQRHPTHAVTFVDNHDSQPEEALESFVEEWFKPLAYALTLTRDQGYPSVFYGDYYGIPTHGVPAMKSKIDPILEARQKYAYGKQNDYLDHHNMIGWTREGNTAHPNSGLATIMSDGPGGNKWMYVGRNKAGQVWRDITGNRSGTVTINADGWGNFSVNGGSVSIWVN

SEQ ID NO: 20715 - protein, 484 aa, Synthetic construct
HHNQTNGTMMQYFEWYLPNDGNHWDRLRSDASNLKDKGITAVWIPPAWKGASQNDVGYGAYDLYDLGEFNQKGTVRTKYGTRNQLQAAVTALKSNGIQVYGDVVMNHKGGADATEWVRAVEVNPSNRNQEVSGDYTIEAWTKFDFPGRGNTHSNFKWRWYHFDGVDWDQSRQLQNKIYKFRGDGKEWDWEVDEENGNYDYLMYADYDMDHPEVVNELRNWGVWYTNTLGLDGFRIDAVKHIKYSFTRDWLEHVRNTTGKNMFAVAEFWKNDIGAIENYLSKTNWNHSVFDVPLHYNLYNASRSGGNYDMRQIFNGTVVQRHPTHAVTFVDNHDSQPEEALESFVEEWFKPLAYALTLTRDQGYPSVFYGDYYGIPTHGVPAMKSKIDPILEARQKYAYGKQNDYMDHHNMIGWTREGNTAHPNSGLATIMSDGPGGNKWMYVGRNKAGQVWRDITGNRSGTVTINADGWGNFSVNGGSVSIWVN

SEQ ID NO: 20716 - protein, 481 aa, Bacillus sp.
HNGTNATMMQYFEWHLPNDGNHWNRLRDDSSNLRNNGITAIWIPPAWKGTSQNDVGYGAYDLYDLGEFNQKGTVRTKYGTRSQLESAIHALKNNGVQVYGDVVMNHKAGADGTEFVTAVEVDPSNRNQETSGTYQIQAYTKFDFPGRGNTYSSFKWRWYHFDGTDWDESRKLNRIYKFSGKQWDWPVDTEFGNYDYLMFADLDMDHPEVVNELRRWGEWYTNTLNLDGFRIDAVKHIKFSFTRDWLTHVRNATGKGMFAVAEYWKNDLGALENYLSYTNWNHSVFDVPLHYNLYNASNYGGNYDMAKLLNGTVVQKHPMHAVTFVDNHDSQPGESLESFVQEWFKPLAYALILTREQGYPSVFYGDYYGIPTHSVPAMKAKIDPILAARQNFAYGTQHDYFDHHNIIGWTREGNTTHPNSGLATIMSDGPGGEKWMYVGQNKAGQVWHDITGNKPGTVTINADGWANFSVNKGSVSIWVKR

SEQ ID NO: 20717 - protein, 481 aa, Bacillus sp.
HDGTNATMMQYFEWHLPNDGNHWNRLRDDASNLRNRGITAIWIPPAWKGTSQNDVGYGAYDLYDLGEFNQKGTVRTKYGTRSQLESAIHALKNNGVQVYGDVVMNHKAGADGTEFVTAVEVDPSNRNQETSGTYQIQAYTKFDFPGRGNTYSSFKWRWYHFDGTDWDESRKLNRIYKFSGKQWDWPVDTEFGNYDYLMFADLDMDHPEVVNELRRWGEWYTNTLNLDGFRIDAVKHIKFSFTRDWLTHVRNATGKGMFAVAEYWKNDLGALENYLSYTNWNHSVFDVPLHYNLYNASNTGGNYDMAKLLNGTVVQKHPMHAVTFVDNHDSQPGESLESFVQEWFKPLAYALILTREQGYPSVFYGDYYGIPTHSVPAMKAKIDPILAARQNFAYGTQHDYFDHHNIIGWTREGNTTAPNSGLATIMSDGPGGEKWMYVGQNKAGQVWHDITGNKPGTVTINADGWANFSVNKGSVSIWVKR

SEQ ID NO: 20718 - protein, 481 aa, Bacillus sp.
HNGTNATMMQYFEWHLPNDGNHWNRLRDDASNLRNRGITAIWIPPAWKGTSQNDVGYGAYDLYDLGEFNQKGTVRTKYGTRSQLESAIHALKNNGVQVYGDVVMNHKAGADGTEFVTAVEVDPSNRNQETLGTYQIQAYTKFDFPGRGNTYSSFKWRWYHFDGTDWDESRKLNRIYKFSGKQWDWPVDTEFGNYDYLMFADYDMDHPEVVNELRRWGEWYTNTLNLDGFRIDAVKHIKFSFTRDWLTHVRNATGKGDFAVAEYWKNDLGALENYLSYTNWNHSVFDVPLHYNLYNASNSRGNYDMAKLLNGTVVQKHPMHAVTFVDNHDSQPGESLESFVQEWFKPLAYALILTREQGYPSVFYGDYYGIPTHSVPAMKAKIDPILAARQNFAYGTQHDYFDHHNIIGWTREGNTTHPNSGLATIMSDGPGGEKWMYVGQNKAGQVWHDITGNKPGTVTINADGWANFSVNKGSVSIWVKR

SEQ ID NO: 20719 - protein, 489 aa, Bacillus sp.
AAPFNGTMMQYFEWYLPDDGTLWTKLANDANNLSSLGISALWIPPAWKGTSRSDVGYGVYDLYDLGEFNQKGTIRTKYGTKAQYLQAINAAHAAGIQVYADVVFDHKGGADATEWVDAVEVNPSDRNQEISGTYQIQAWTKFDFPGRGNTHSSFKWRWYHFDGVDWDESRKLSNRIYKFRGIGKAWDWEVDTENGNYDYLMYADIDMDHPEVVTELKNWGKWYVNTTNIDGFRIDAVKHIKFSFFPDWISHVRSQTGKPLFTVAEFWSYDINKIHNYITKTNGTMSLFDAPLHNKFYTASKSGGAFDMRTIMTNTLMKDQPTLAVTFVDNHDSEPGQALQSFVDPWFKPLAYAFILTRQEGYPCVFYGDYYGIPQHNIPALKSKIDPILIARRDYAYGTQHDYLDHSDIIGWTREGVTEKPGSGLAAIISDGPGGSKWMFVGKNHAGKVFYDITGNRADTVTINADGWGEFKVNGGSVSIWVPKKTTVS

SEQ ID NO: 20720 - protein, 483 aa, Alicyclobacillus
HHNGTNGTMMQYFEWHLPNDGNHWNRLRDDASNLRNRGITAIWIPPAWKGTSQNDVGYGAYDLYDLGEFNQKGTVRTKYGTRSQLESAIHALKNNGVQVYGDVVMNHKGGADATENVLAVEVNPNNRNQEISGDYTIEAYTKFDFPGRGNTYSDFKWRWYHFDGVDWDQSRQFQNRIYKFRGKAWDWEVDSEFGNYDYLMYADYDMDHPEVVNELRRWGEWYTNTLNLDGFRIDAVKHIKFSFTRDWLTHVRNATGKGMFAVAEFWKNDLGALENYLNKTNWNHSVFDVPLHYNLYNASNSRGNYDMAKLLNGTVVQKHPMHAVTFVDNHDSQPGESLESFVQEWFKPLAYALILTREQGYPSVFYGDYYGIPTHSVPAMKAKIDPILEARQNFAYGTQHDYLDNQDVIGWTREGDSAHAGSGLATVMSDGPGGSKTMYVGTAHAGQVFKDITGNRTDTVTINSAGNGTFPCNGGSVSIWVKQ

SEQ ID NO: 20721 - protein, 483 aa, Alicyclobacillus
HHNGTNGTMMQYFEWHLPNDGNHWNRLRDDASNLRNRGITAIWIPPAWKGTSQNDVGYGAYDLYDLGEFNQKGTVRTKYGTRSQLESAIHALKNNGVQVYGDVVMNHKGGADATENVLAVEVNPNNRNQEISGDYTIEAWTKFDFPGRGNTYSDFKWRWYHFDGVDWDQSRQFQNRIYKFRGKAWDWEVDSEFGNYDYLMYADYDMDHPEVVNELRRWGEWYTNTLNLDGFRIDAVKHIKFSFTRDWLTHVRNATGKGMPAVAEFWKNDLGALENYLNKTNWNHSVFDVPLHYNLYNASNGGGNYDMAKLLNGTVVQKHPMHAVTFVDNHDSQPGESLESFVQEWFKPLAYALILTREQGYPSVFYGDYYGIPTHSVPAMKAKIDPILEARQNFAYGTQHDYLDNQDVIGWTREGDSAHAGSGLATVMSDGPGGSKTMYVGTAHAGQVFKDITGNRTDTVTINSAGNGTFPCNGGSVSIWVKQ

SEQ ID NO: 20722 - protein, 485 aa, Bacillus sp.
HHNGTNGTMMQYFEWHLPNDGNHWNRLRDDASNLRNRGITAIWIPPAWKGTSQNDVGYGAYDLYDLGEFNQKGTVRTKYGTRSQLESAIHALKNNGVQVYGDVVMNHKGGADATENVLAVEVNPNNRNQEISGDYTIEAWTKFDFPGRGNTYSDFKWRWYHFDGVDWDQSRQFQNRIYKFRGDGKAWDWEVDSEFGNYDYLMYADYDMDHPEVVNELRRWGEWYTNTLNLDGFRIDAVKHIKFSFTRDWLTHVRNATGKGMPAVAEFWKNDLGALENYLNKTNWNHSVFDVPLHYNLYNASNGGGNYDMAKLLNGTVVQKHPMHAVTFVDNHDSQPGESLESFVQEWFKPLAYALILTREQGYPSVFYGDYYGIPTHSVPAMKAKIDPILEARQNFAYGTQHDYLDNQDVIGWTREGDSAHAGSGLATVMSDGPGGSKTMYVGTAHAGQVFKDITGNRTDTVTINSAGNGTFPCNGGSVSIWVKQ

SEQ ID NO: 20723 - protein, 484 aa, Synthetic construct
HHNGTNGTMMQYFEWYLPNDGNHWHRLRSDASNLKDKGITAVWIPPAWKGASQNDVGYGAYDLYDLGEFNQKGTVRTKYGTRNQLQAAVTALKSNGIQVYGDVVMNHKGGADATEWVRAVEVNPSNRNQEVSGDTTIEAWTKFDFPGRGNTHSNFKWRWYHFDGVDWDQSRQLQNKIYKFRGDGKEWDWEVDTENGNYDYLMYADYDMDHPEVVNELRNWGVWYTNTLGLDGFRIDAVKHIKYSFTRDWLTHVRNTTGKNMFAVAEFWKNDIGAIENYLSNTNWNHSVFDVPLHYNLYNASRSGGNYDMRQIFNGTVVQRHPTHAVTFVDNHDSQPEEALESFVEEWFKPLAYALTLTRDQGEPSVFYGDYYGIPTHGVPAMKSKIDPILEARQKYAYGKQNDYLDHHNMIGWTSEGNTAHPNSGLATIMSDGPGGNKWMYVGRNKAGQVWRDITGNRSGTVTINADGWGNFSVNGGSVSIWVN

SEQ ID NO: 20724 - protein, 484 aa, Synthetic construct
HHNGTNGTMMQYFEWYLPNDGNHWHRLRSDASNLKDKGITAVWIPPAWKGASQNDVGYGAYDLYDLGEFNQKGTVRTKYGTRNQLQAAVTALKSNGIQVYGDVVMNHKGGADATEWVRAVEVNPSNRNQEVSGDTTIEAWTKFDFPGRGNTHSNFKWRWYHFDGVDWDQSRQLQNKIYKFQGDGKEWDWEVDTENGNYDYLMYADYDMDHPEVVNELRNWGVWYTNTLGLDGFRIDAVKHIKYSFTRDWLTHVRNTTQKNMFAVAEFWKNDIGAIENYLSKTNWNHSVFDVPLHYNLYNASRSGGNYDMRQIFNGTVVQRHPTHAVTFVDNHDSQPEEALESFVEEWFKPLAYALTLTRDQGEPSVFYGDYYGIPTHGVPAMKSKIDPILEARQKYAYGKQNDYLDHHNMIGWTREGNTAHPNSGLATIMSDGPGGNKWMYVGRNKAGQVWRDITGNRSGTVTINADGWGNFSVNGGSVSIWVN

SEQ ID NO: 20725 - protein, 484 aa, Synthetic construct
HHNGTNGTMMQYFEWYLPNDGNHWHRLRSDASNLKDKGITAVWIPPAWKGASQNDVGYGAYDLYDLGEFNQKGTVRTKYGTRNQLQAAVTALKSNGIQVWGDVVMNHKGGADATEWVRAVEVNPSNRNQEVSGDTTIEAWTKFDFPGRGNTHSNFKWRWYHFDGVDWDQSRQLQNKIYKFRGDGKEWDWEVDTENGNYDYLMYADYDMDHPEVVNELRNWGVWYTNTLGLDGFRIDAVKHIKYSFTRDWLTHVRNTTQKNMFAVAEFWKNDIGAIENYLSNTNWNHSVFDVPLHYNLYNASRSGGNYDMRQIFNGTVVQRHPTHAVTFVDNHDSQPEEALESFVEEWFKPLAYALTLTRDQGYPSVFYGDYYGIPTHGVPAMKSKIDPILEARQKYAYGKQNDYLDHHNMIGWTREGNTAHPNSGLATIMSDGPGGNKWMYVGRNKAGQVWRDITGNRSGTVTINADGWGNFSVNGGSVSIWVN

SEQ ID NO: 20726 - protein, 484 aa, Synthetic construct
HHNGTNGTMMQYFEWYLPNDGNHWHRLRSDASNLKDKGITAVWIPPAWKGASQNDVGYGAYDLYDLGEFNQKGTVRTKYGTRNQLQAAVTALKSNGIQVWGDVVMNHKGGADATEWVRAVEVNPSNRNQEVSGDYTIEAWTKFDFPGRGNTHSNFKWRWYHFDGVDWDQSRQLQNKIYKFRGDGKEWDWEVDEENGNYDYLMYADYDMDHPEVVNELRNWGVWYTNTLGLDGFRIDAVKHIKYSFTRDWLTHVRNTTQKNMFAVAEFWKNDIGAIENYLSKTNWNHSVFDVPLHYNLYNASRSGGNYDMRQIFNGTVVQRHPTHAVTFVDNHDSQPEEALESFVEEWFKPLAYALTLTRDQGYPSVFYGDYYGIPTHGVPAMKSKIDPILEARQKYAYGKQNDYLDHHNMIGWTREGNTAHPNSGLATIMSDGPGGNKWMYVGRNKAGQVWRDITGNRSGTVTINADGWGNFRVNGGSVSIWVN

SEQ ID NO: 20727 - protein, 484 aa, Synthetic construct
HHNQTNGTMMQYFEWYLPNDGNHWNRLRSDASNLKDKGITAVWIPPAWKGASQNDVGYGAYDLYDLGEFNQKGTVRTKYGTRNQLQAAVTALKSNGIQVYGDVVMNHKGGADATEWVRAVEVNPSNRNQEVSGDTTIEAWTKFDFPGRGNTHSNFKWRWYHFDGVDWDQSRQLQNKIYKFRGDGKEWDWEVDEENGNYDYLMYADYDMDHPEVVNELRNWGVWYTNTLGLDGFRIDAVKHIKYSFTRDWLEHVRNTTGKNMFAVAEFWKNDIGAIENYLSKTNWNHSVFDVPLHYNLYNASRSGGNYDMRQIFNGTVVQRHPTHAVTFVDNHDSQPEEALESFVEEWFKPLAYALTLTRDQGEPSVFYGDYYGIPTHGVPAMKSKIDPILEARQKYAYGKQNDYMDHHNMIGWTREGNTAHPNSGLATIMSDGPGGNKWMYVGRNKAGQVWRDITGNRSGTVTINADGWGNFSVNGGSVSIWVN

SEQ ID NO: 20728 - protein, 484 aa, Synthetic construct
HHNQTNGTMMQYFEWYLPNDGNHWNRLRSDASNLKDKGITAVWIPPAWKGASQNDVGYGAYDLYDLGEFNQKGTVRTKYGTRNQLQAAVTALKSNGIQVYGDVVMNHKGGADATEWVRAVEVNPSNRNQEVSGDTTIEAWTKFDFPGRGNTHSNFKWRWYHFDGVDWDQSRQLQNKIYKFRGDGKEWDWEVDEENGNYDYLMYADYDMDHPEVVNELRNWGVWYTNTLGLDGFRIDAVKHIKYSFTRDWLEHVRNTTGKNMFAVAEFWKNDIGAIENYLSNTNWNHSVFDVPLHYNLYNASRSGGNYDMRQIFNGTVVQRHPTHAVTFVDNHDSQPEEALESFVEEWFKPLAYALTLTRDQGYPSVFYGDYYGIPTHGVPAMKSKIDPILEARQKYAYGKQNDYMDHHNMIGWTREGNTAHPNSGLATIMSDGPGGNKWMYVGRNKAGQVWRDITGNRSGTVTINADGWGNFSVNGGSVSIWVN

SEQ ID NO: 20729 - protein, 484 aa, Synthetic construct
HHNQTNGTMMQYFEWYLPNDGNHWNRLRSDASNLKDKGITAVWIPPAWKGASQNDVGYGAYDLYDLGEFNQKGTVRTKYGTRNQLQAAVTALKSNGIQVYGDVVMNHKGGADATEWVRAVEVNPSNRNQEVSGDTTIEAWTKFDFPGRGNTHSNFKWRWYHFDGVDWDQSRQLQNKIYKFRGDGKEWDWEVDEENGNYDYLMYADYDMDHPEVVNELRNWGVWYTNTLGLDGFRIDAVKHIKYSFTRDWLEHVRNTTQKNMFAVAEFWKNDIGAIENYLSKTNWNHSVFDVPLHYNLYNASRSGGNYDMRQIFNGTVVQRHPTHAVTFVDNHDSQPEEALESFVEEWFKPLAYALTLTRDQGYPSVFYGDYYGIPTHGVPAMKSKIDPILEARQKYAYGKQNDYMDHHNMIGWTREGNTAHPNSGLATIMSDGPGGNKWMYVGRNKAGQVWRDITGNRSGTVTINADGWGNFSVNGGSVSIWVN

SEQ ID NO: 20730 - protein, 484 aa, Synthetic construct
HHNGTNGTMMQYFEWYLPNDGNHWHRLRSDASNLKDKGITAVWIPPAWKGASQNDVGYGAYDLYDLGEFNQKGTVRTKYGTRNQLQAAVTALKSNGIQVWGDVVMNHKGGADATEWVRAVEVNPSNRNQEVSGDTTIEAWTKFDFPGRGNTHSNFKWRWYHFDGVDWDQSRQLQNKIYKFQGDGKEWDWEVDEENGNYDYLMYADYDMDHPEVVNELRNWGVWYTNTLGLDGFRIDAVKHIKYSFTRDWLTHVRNTTGKNMFAVAEFWKNDIGAIENYLSKTNWNHSVFDVPLHYNLYNASRSGGNYDMRQIFNGTVVQRHPTHAVTFVDNHDSQPEEALESFVEEWFKPLAYALTLTRDQGYPSVFYGDYYGIPTHGVPAMKSKIDPILEARQKYAYGKQNDYLDHHNMIGWTREGNTAHPNSGLATIMSDGPGGNKWMYVGRNKAGQVWRDITGNRSGTVTINADGWGNFSVNGGSVSIWVN

SEQ ID NO: 20731 - protein, 484 aa, Synthetic construct
HHNQTNGTMMQYFEWYLPNDGNHWNRLRSDASNLKDKGITAVWIPPAWKGASQNDVGYGAYDLYDLGEFNQKGTVRTKYGTRNQLQAAVTALKSNGIQVYGDVVMNHKGGADATEWVRAVEVNPSNRNQEVSGDYTIEAWTKFDFPGRGNTHSNFKWRWYHFDGVDWDQSRQLQNKIYKFRGDGKEWDWEVDEENGNYDYLMYADYDMDHPEVVNELRNWGVWYTNTLGLDGFRIDAVKHIKYSFTRDWLEHVRNTTGKNMFAVAEFWKNDIGAIENYLSNTNWNHSVFDVPLHYNLYNASRSGGNYDMRQIFNGTVVQRHPTHAVTFVDNHDSQPEEALESFVEEWFKPLAYALTLTRDQGHPSVFYGDYYGIPTHGVPAMKSKIDPILEARQKYAYGKQNDYMDHHNMIGWTREGNTAHPNSGLATIMSDGPGGNKWMYVGRNKAGQVWRDITGNRSGTVTINADGWGNFSVNGGSVSIWVN

SEQ ID NO: 20732 - protein, 484 aa, Synthetic construct
HHNGTNGTMMQYFEWYLPNDGNHWHRLRSDASNLKDKGITAVWIPPAWKGASQNDVGYGAYDLYDLGEFNQKGTVRTKYGTRNQLQAAVTALKSNGIQVWGDVVMNHKGGADATEWVRAVEVNPSNRNQEVSGDTTIEAWTKFDFPGRGNTHSNFKWRWYHFDGVDWDQSRQLQNKIYKFRGDGKEWDWEVDEENGNYDYLMYADYDMDHPEVVNELRNWGVWYTNTLGLDGFRIDAVKHIKYSFTRDWLTHVRNTTGKNMFAVAEFWKNDIGAIENYLSKTNWNHSVFDVPLHYNLYNASRSGGNYDMRQIFNGTVVQRHPTHAVTFVDNHDSQPEEALESFVEEWFKPLAYALTLTRDQGEPSVFYGDYYGIPTHGVPAMKSKIDPILEARQKYAYGKQNDYLDHHNMIGWTREGNTAHPNSGLATIMSDGPGGNKWMYVGRNKAGQVWRDITGNRSGTVTINADGWGNFSVNGGSVSIWVN

SEQ ID NO: 20733 - protein, 484 aa, Synthetic construct
HHNQTNGTMMQYFEWYLPNDGNHWNRLRSDASNLKDKGITAVWIPPAWKGASQNDVGYGAYDLYDLGEFNQKGTVRTKYGTRNQLQAAVTALKSNGIQVYGDVVMNHKGGADATEWVRAVEVNPSNRNQEVSGDYTIEAWTKFDFPGRGNTHSNFKWRWYHFDGVDWDQSRQLQNKIYKFQGDGKEWDWEVDEENGNYDYLMYADYDMDHPEVVNELRNWGVWYTNTLGLDGFRIDAVKHIKYSFTRDWLEHVRNTTGKNMFAVAEFWKNDIGAIENYLSKTNWNHSVFDVPLHYNLYNASRSGGNYDMRQIFNGTVVQRHPTHAVTFVDNHDSQPEEALESFVEEWFKPLAYALTLTRDQGHPSVFYGDYYGIPTHGVPAMKSKIDPILEARQKYAYGKQNDYMDHHNMIGWTREGNTAHPNSGLATIMSDGPGGNKWMYVGRNKAGQVWRDITGNRSGTVTINADGWGNFSVNGGSVSIWVN

SEQ ID NO: 20734 - protein, 484 aa, Synthetic construct
HHNQTNGTMMQYFEWYLPNDGNHWNRLRSDASNLKDKGITAVWIPPAWKGASQNDVGYGAYDLYDLGEFNQKGTVRTKYGTRNQLQAAVTALKSNGIQVWGDVVMNHKGGADATEWVRAVEVNPSNRNQEVSGDYTIEAWTKFDFPGRGNTHSNFKWRWYHFDGVDWDQSRQLQNKIYKFRGDGKEWDWEVDEENGNYDYLMYADYDMDHPEVVNELRNWGVWYTNTLGLDGFRIDAVKHIKYSFTRDWLEHVRNTTGKNMFAVAEFWKNDIGAIENYLSNTNWNHSVFDVPLHYNLYNASRSGGNYDMRQIFNGTVVQRHPTHAVTFVDNHDSQPEEALESFVEEWFKPLAYALTLTRDQGYPSVFYGDYYGIPTHGVPAMKSKIDPILEARQKYAYGKQNDYMDHHNMIGWTREGNTAHPNSGLATIMSDGPGGNKWMYVGRNKAGQVWRDITGNRSGTVTINADGWGNFSVNGGSVSIWVN

SEQ ID NO: 20735 - protein, 484 aa, Synthetic construct
HHNGTNGTMMQYFEWYLPNDGNHWHRLRSDASNLKDKGITAVWIPPAWKGASQNDVGYGAYDLYDLGEFNQKGTVRTKYGTRNQLQAAVTALKSNGIQVWGDVVMNHKGGADATEWVRAVEVNPSNRNQEVSGDYTIEAWTKFDFPGRGNTHSNFKWRWYHFDGVDWDQSRQLQNKIYKFRGDGKEWDWEVDEENGNYDYLMYADYDMDHPEVVNELRNWGVWYTNTLGLDGFRIDAVKHIKYSFTRDWLTHVRNTTQKNMFAVAEFWKNDIGAIENYLSNTNWNHSVFDVPLHYNLYNASRSGGNYDMRQIFNGTVVQRHPTHAVTFVDNHDSQPEEALESFVEEWFKPLAYALTLTRDQGYPSVFYGDYYGIPTHGVPAMKSKIDPILEARQKYAYGKQNDYLDHHNMIGWTREGNTAHPNSGLATIMSDGPGGNKWMYVGRNKAGQVWRDITGNRSGTVTINADGWGNFSVNGGSVSIWVN

SEQ ID NO: 20736 - protein, 484 aa, Synthetic construct
HHNQTNGTMMQYFEWYLPNDGNHWNRLRSDASNLKDKGITAVWIPPAWKGASQNDVGYGAYDLYDLGEFNQKGTVRTKYGTRNQLQAAVTALKSNGIQVWGDVVMNHKGGADATEWVRAVEVNPSNRNQEVSGDYTIEAWTKFDFPGRGNTHSNFKWRWYHFDGVDWDQSRQLQNKIYKFRGDGKEWDWEVDEENGNYDYLMYADYDMDHPEVVNELRNWGVWYTNTLGLDGFRIDAVKHIKYSFTRDWLEHVRNTTQKNMFAVAEFWKNDIGAIENYLSKTNWNHSVFDVPLHYNLYNASRSGGNYDMRQIFNGTVVQRHPTHAVTFVDNHDSQPEEALESFVEEWFKPLAYALTLTRDQGYPSVFYGDYYGIPTHGVPAMKSKIDPILEARQKYAYGKQNDYMDHHNMIGWTREGNTAHPNSGLATIMSDGPGGNKWMYVGRNKAGQVWRDITGNRSGTVTINADGWGNFSVNGGSVSIWVN

SEQ ID NO: 20737 - protein, 484 aa, Synthetic construct
HHNGTNGTMMQYFEWYLPNDGNHWHRLRSDASNLKDKGITAVWIPPAWKGASQNDVGYGAYDLYDLGEFNQKGTVRTKYGTRNQLQAAVTALKSNGIQVWGDVVMNHKGGADATEWVRAVEVNPSNRNQEVSGDYTIEAWTKFDFPGRGNTHSNFKWRWYHFDGVDWDQSRQLQNKIYKFQGDGKEWDWEVDEENGNYDYLMYADYDMDHPEVVNELRNWGVWYTNTLGLDGFRIDAVKHIKYSFTRDWLTHVRNTTGKNMFAVAEFWKNDIGAIENYLSKTNWNHSVFDVPLHYNLYNASRSGGNYDMRQIFNGTVVQRHPTHAVTFVDNHDSQPEEALESFVEEWFKPLAYALTLTRDQGEPSVFYGDYYGIPTHGVPAMKSKIDPILEARQKYAYGKQNDYLDHHNMIGWTREGNTAHPNSGLATIMSDGPGGNKWMYVGRNKAGQVWRDITGNRSGTVTINADGWGNFSVNGGSVSIWVN

SEQ ID NO: 20738 - protein, 484 aa, Synthetic construct
HHNGTNGTMMQYFEWYLPNDGNHWHRLRSDASNLKDKGITAVWIPPAWKGASQNDVGYGAYDLYDLGEFNQKGTVRTKYGTRNQLQAAVTALKSNGIQVWGDVVMNHKGGADATEWVRAVEVNPSNRNQEVSGDCTIEAWTKFDFPGRGNTHSNFKWRWYHFDGVDWDQSRQLQNKIYKFRGDGKEWDWEVDTENGNYDYLMYADYDMDHPEVVNELRNWGVWYTNTLGLDGFRIDAVKHIKYSFTRDWLTHVRNTTQKNMFAVAEFWKNDIGAIENYLSKTNWNHSVFDVPLHYNLYNASRSGGNYDMRQIFNGTVVQRHPTHAVTFVDNHDSQPEEALESFVEEWFKPLAYALTLTRDQGEPSVFYGDYYGIPTHGVPAMKSKIDPILEARQKYAYGKQNDYLDHHNMIGWTREGNTAHPNSGLATIMSDGPGGNKWMYVGRNKAGQVWRDITGNRSGTVTINADGWGNFSVNGGSVSIWVN

SEQ ID NO: 20739 - protein, 484 aa, Synthetic construct
HHNQTNGTMMQYFEWYLPNDGNHWNRLRSDASNLKDKGITAVWIPPAWKGASQNDVGYGAYDLYDLGEFNQKGTVRTKYGTRNQLQAAVTALKSNGIQVYGDVVMNHKGGADATEWVRAVEVNPSNRNQEVSGDYTIEAWTKFDFPGRGNTHSNFKWRWYHFDGVDWDQSRQLQNKIYKFQGDGKEWDWEVDEENGNYDYLMYADYDMDHPEVVNELRNWGVWYTNTLGLDGFRIDAVKHIKYSFTRDWLEHVRNTTQKNMFAVAEFWKNDIGAIENYLSKTNWNHSVFDVPLHYNLYNASRSGGNYDMRQIFNGTVVQRHPTHAVTFVDNHDSQPEEALESFVEEWFKPLAYALTLTRDQGYPSVFYGDYYGIPTHGVPAMKSKIDPILEARQKYAYGKQNDYMDHHNMIGWTREGNTAHPNSGLATIMSDGPGGNKWMYVGRNKAGQVWRDITGNRSGTVTINADGWGNFSVNGGSVSIWVN

SEQ ID NO: 20740 - protein, 484 aa, Synthetic construct
HHNQTNGTMMQYFEWYLPNDGNHWNRLRSDASNLKDKGITAVWIPPAWKGASQNDVGYGAYDLYDLGEFNQKGTVRTKYGTRNQLQAAVTALKSNGIQVYGDVVMNHKGGADATEWVRAVEVNPSNRNQEVSGDTTIEAWTKFDFPGRGNTHSNFKWRWYHFDGVDWDQSRQLQNKIYKFRGDGKEWDWEVDEENGNYDYLMYADYDMDHPEVVNELRNWGVWYTNTLGLDGFRIDAVKHIKYSFTRDWLEHVRNTTGKNMFAVAEFWKNDIGAIENYLSKTNWNHSVFDVPLHYNLYNASRSGGNYDMRQIFNGTVVQRHPTHAVTFVDNHDSQPEEALESFVEEWFKPLAYALTLTRDQGHPSVFYGDYYGIPTHGVPAMKSKIDPILEARQKYAYGKQNDYMDHHNMIGWTREGNTAHPNSGLATIMSDGPGGNKWMYVGRNKAGQVWRDITGNRSGTVTINADGWGNFSVNGGSVSIWVN

SEQ ID NO: 20741 - protein, 484 aa, Synthetic construct
HHNQTNGTMMQYFEWYLPNDGNHWNRLRSDASNLKDKGITAVWIPPAWKGASQNDVGYGAYDLYDLGEFNQKGTVRTKYGTRNQLQAAVTALKSNGIQVWGDVVMNHKGGADATEWVRAVEVNPSNRNQEVSGDYTIEAWTKFDFPGRGNTHSNFKWRWYHFDGVDWDQSRQLQNKIYKFQGDGKEWDWEVDEENGNYDYLMYADYDMDHPEVVNELRNWGVWYTNTLGLDGFRIDAVKHIKYSFTRDWLEHVRNTTGKNMFAVAEFWKNDIGAIENYLSKTNWNHSVFDVPLHYNLYNASRSGGNYDMRQIFNGTVVQRHPTHAVTFVDNHDSQPEEALESFVEEWFKPLAYALTLTRDQGYPSVFYGDYYGIPTHGVPAMKSKIDPILEARQKYAYGKQNDYMDHHNMIGWTREGNTAHPNSGLATIMSDGPGGNKWMYVGRNKAGQVWRDITGNRSGTVTINADGWGNFSVNGGSVSIWVN

SEQ ID NO: 20742 - protein, 484 aa, Synthetic construct
HHNQTNGTMMQYFEWYLPNDGNHWNRLRSDASNLKDKGITAVWIPPAWKGASQNDVGYGAYDLYDLGEFNQKGTVRTKYGTRNQLQAAVTALKSNGIQVYGDVVMNHKGGADATEWVRAVEVNPSNRNQEVSGDYTIEAWTKFDFPGRGNTHSNFKWRWYHFDGVDWDQSRQLQNKIYKFQGDGKEWDWEVDEENGNYDYLMYADYDMDHPEVVNELRNWGVWYTNTLGLDGFRIDAVKHIKYSFTRDWLEHVRNTTGKNMFAVAEFWKNDIGAIENYLSNTNWNHSVFDVPLHYNLYNASRSGGNYDMRQIFNGTVVQRHPTHAVTFVDNHDSQPEEALESFVEEWFKPLAYALTLTRDQGYPSVFYGDYYGIPTHGVPAMKSKIDPILEARQKYAYGKQNDYMDHHNMIGWTREGNTAHPNSGLATIMSDGPGGNKWMYVGRNKAGQVWRDITGNRSGTVTINADGWGNFSVNGGSVSIWVN

SEQ ID NO: 20743 - protein, 484 aa, Synthetic construct
HHNQTNGTMMQYFEWYLPNDGNHWNRLRSDASNLKDKGITAVWIPPAWKGASQNDVGYGAYDLYDLGEFNQKGTVRTKYGTRNQLQAAVTALKSNGIQVYGDVVMNHKGGADATEWVRAVEVNPSNRNQEVSGDYTIEAWTKFDFPGRGNTHSNFKWRWYHFDGVDWDQSRQLQNKIYKFRGDGKEWDWEVDEENGNYDYLMYADYDMDHPEVVNELRNWGVWYTNTLGLDGFRIDAVKHIKYSFTRDWLEHVRNTTQKNMFAVAEFWKNDIGAIENYLSNTNWNHSVFDVPLHYNLYNASRSGGNYDMRQIFNGTVVQRHPTHAVTFVDNHDSQPEEALESFVEEWFKPLAYALTLTRDQGYPSVFYGDYYGIPTHGVPAMKSKIDPILEARQKYAYGKQNDYMDHHNMIGWTREGNTAHPNSGLATIMSDGPGGNKWMYVGRNKAGQVWRDITGNRSGTVTINADGWGNFSVNGGSVSIWVN

SEQ ID NO: 20744 - protein, 484 aa, Synthetic construct
HHNGTNGTMMQYFEWYLPNDGNHWHRLRSDASNLKDKGITAVWIPPAWKGASQNDVGYGAYDLYDLGEFNQKGTVRTKYGTRNQLQAAVTALKSNGIQVWGDVVMNHKGGADATEWVRAVEVNPSNRNQEVSGDTTIEAWTKFDFPGRGNTHSNFKWRWYHFDGVDWDQSRQLQNKIYKFRGDGKEWDWEVDTENGNYDYLMYADYDMDHPEVVNELRNWGVWYTNTLGLDGFRIDAVKHIKYSFTRDWLTHVRNTTGKNMFAVAEFWKNDIGAIENYLSNTNWNHSVFDVPLHYNLYNASRSGGNYDMRQIFNGTVVQRHPTHAVTFVDNHDSQPEEALESFVEEWFKPLAYALTLTRDQGEPSVFYGDYYGIPTHGVPAMKSKIDPILEARQKYAYGKQNDYLDHHNMIGWTREGNTAHPNSGLATIMSDGPGGNKWMYVGRNKAGQVWRDITGNRSGTVTINADGWGNFSVNGGSVSIWVN

SEQ ID NO: 20745 - protein, 484 aa, Synthetic construct
HHNQTNGTMMQYFEWYLPNDGNHWNRLRSDASNLKDKGITAVWIPPAWKGASQNDVGYGAYDLYDLGEFNQKGTVRTKYGTRNQLQAAVTALKSNGIQVWGDVVMNHKGGADATEWVRAVEVNPSNRNQEVSGDYTIEAWTKFDFPGRGNTHSNFKWRWYHFDGVDWDQSRQLQNKIYKFRGDGKEWDWEVDEENGNYDYLMYADYDMDHPEVVNELRNWGVWYTNTLGLDGFRIDAVKHIKYSFTRDWLEHVRNTTGKNMFAVAEFWKNDIGAIENYLSKTNWNHSVFDVPLHYNLYNASRSGGNYDMRQIFNGTVVQRHPTHAVTFVDNHDSQPEEALESFVEEWFKPLAYALTLTRDQGEPSVFYGDYYGIPTHGVPAMKSKIDPILEARQKYAYGKQNDYMDHHNMIGWTREGNTAHPNSGLATIMSDGPGGNKWMYVGRNKAGQVWRDITGNRSGTVTINADGWGNFSVNGGSVSIWVN

SEQ ID NO: 20746 - protein, 484 aa, Synthetic construct
HHNQTNGTMMQYFEWYLPNDGNHWNRLRSDASNLKDKGITAVWIPPAWKGASQNDVGYGAYDLYDLGEFNQKGTVRTKYGTRNQLQAAVTALKSNGIQVYGDVVMNHKGGADATEWVRAVEVNPSNRNQEVSGDYTIEAWTKFDFPGRGNTHSNFKWRWYHFDGVDWDQSRQLQNKIYKFRGDGKEWDWEVDEENGNYDYLMYADYDMDHPEVVNELRNWGVWYTNTLGLDGFRIDAVKHIKYSFTRDWLEHVRNTTQKNMFAVAEFWKNDIGAIENYLSKTNWNHSVFDVPLHYNLYNASRSGGNYDMRQIFNGTVVQRHPTHAVTFVDNHDSQPEEALESFVEEWFKPLAYALTLTRDQGEPSVFYGDYYGIPTHGVPAMKSKIDPILEARQKYAYGKQNDYMDHHNMIGWTREGNTAHPNSGLATIMSDGPGGNKWMYVGRNKAGQVWRDITGNRSGTVTINADGWGNFSVNGGSVSIWVN

SEQ ID NO: 20747 - protein, 484 aa, Synthetic construct
HHNGTNGTMMQYFEWYLPNDGNHWHRLRSDASNLKDKGITAVWIPPAWKGASQNDVGYGAYDLYDLGEFNQKGTVRTKYGTRNQLQAAVTALKSNGIQVYGDVVMNHKGGADATEWVRAVEVNPSNRNQEVSGDTTIEAWTKFDFPGRGNTHSNFKWRWYHFDGVDWDQSRQLQNKIYKFRGDGKEWDWEVDTENGNYDYLMYADYDMDHPEVVNELRNWGVWYTNTLGLDGFRIDAVKHIKYSFTRDWLTHVRNTTQKNMFAVAEFWKNDIGAIENYLSNTNWNHSVFDVPLHYNLYNASRSGGNYDMRQIFNGTVVQRHPTHAVTFVDNHDSQPEEALESFVEEWFKPLAYALTLTRDQGEPSVFYGDYYGIPTHGVPAMKSKIDPILEARQKYAYGKQNDYLDHHNMIGWTREGNTAHPNSGLATIMSDGPGGNKWMYVGRNKAGQVWRDITGNRSGTVTINADGWGNFSVNGGSVSIWVN

SEQ ID NO: 20748 - protein, 484 aa, Synthetic construct
HHNGTNGTMMQYFEWYLPNDGNHWHRLRSDASNLKDKGITAVWIPPAWKGASQNDVGYGAYDLYDLGEFNQKGTVRTKYGTRNQLQAAVTALKSNGIQVWGDVVMNHKGGADATEWVRAVEVNPSNRNQEVSGDYTIEAWTKFDFPGRGNTHSNFKWRWYHFDGVDWDQSRQLQNKIYKFRGDGKEWDWEVDEENGNYDYLMYADYDMDHPEVVNELRNWGVWYTNTLGLDGFRIDAVKHIKYSFTRDWLTHVRNTTQKNMFAVAEFWKNDIGAIENYLSKTNWNHSVFDVPLHYNLYNASRSGGNYDMRQIFNGTVVQRHPTHAVTFVDNHDSQPEEALESFVEEWFKPLAYALTLTRDQGEPSVFYGDYYGIPTHGVPAMKSKIDPILEARQKYAYGKQNDYLDHHNMIGWTREGNTAHPNSGLATIMSDGPGGNKWMYVGRNKAGQVWRDITGNRSGTVTINADGWGNFSVNGGSVSIWVN

SEQ ID NO: 20749 - protein, 484 aa, Synthetic construct
HHNGTNGTMMQYFEWYLPNDGNHWHRLRSDASNLKDKGITAVWIPPAWKGASQNDVGYGAYDLYDLGEFNQKGTVRTKYGTRNQLQAAVTALKSNGIQVWGDVVMNHKGGADATEWVRAVEVNPSNRNQEVSGDYTIEAWTKFDFPGRGNTHSNFKWRWYHFDGVDWDQSRQLQNKIYKFQGDGKEWDWEVDTENGNYDYLMYADYDMDHPEVVNELRNWGVWYTNTLGLDGFRIDAVKHIKYSFTRDWLTHVRNTTGKNMFAVAEFWKNDIGAIENYLSNTNWNHSVFDVPLHYNLYNASRSGGNYDMRQIFNGTVVQRHPTHAVTFVDNHDSQPEEALESFVEEWFKPLAYALTLTRDQGEPSVFYGDYYGIPTHGVPAMKSKIDPILEARQKYAYGKQNDYLDHHNMIGWTREGNTAHPNSGLATIMSDGPGGNKWMYVGRNKAGQVWRDITGNRSGTVTINADGWGNFSVNGGSVSIWVN

SEQ ID NO: 20750 - protein, 484 aa, Synthetic construct
HHNGTNGTMMQYFEWYLPNDGNHWHRLRSDASNLKDKGITAVWIPPAWKGASQNDVGYGAYDLYDLGEFNQKGTVRTKYGTRNQLQAAVTALKSNGIQVWGDVVMNHKGGADATEWVRAVEVNPSNRNQEVSGDYTIEAWTKFDFPGRGNTHSNFKWRWYHFDGVDWDQSRQLQNKIYKFRGDGKEWDWEVDTENGNYDYLMYADYDMDHPEVVNELRNWGVWYTNTLGLDGFRIDAVKHIKYSFTRDWLTHVRNTTQKNMFAVAEFWKNDIGAIENYLSNTNWNHSVFDVPLHYNLYNASRSGGNYDMRQIFNGTVVQRHPTHAVTFVDNHDSQPEEALESFVEEWFKPLAYALTLTRDQGEPSVFYGDYYGIPTHGVPAMKSKIDPILEARQKYAYGKQNDYLDHHNMIGWTREGNTAHPNSGLATIMSDGPGGNKWMYVGRNKAGQVWRDITGNRSGTVTINADGWGNFSVNGGSVSIWVN

SEQ ID NO: 20751 - protein, 484 aa, Synthetic construct
HHNGTNGTMMQYFEWYLPNDGNHWHRLRSDASNLKDKGITAVWIPPAWKGASQNDVGYGAYDLYDLGEFNQKGTVRTKYGTRNQLQAAVTALKSNGIQVWGDVVMNHKGGADATEWVRAVEVNPSNRNQEVSGDTTIEAWTKFDFPGRGNTHSNFKWRWYHFDGVDWDQSRQLQNKIYKFRGDGKEWDWEVDTENGNYDYLMYADYDMDHPEVVNELRNWGVWYTNTLGLDGFRIDAVKHIKYSFTRDWLTHVRNTTQKNMFAVAEFWKNDIGAIENYLSKTNWNHSVFDVPLHYNLYNASRSGGNYDMRQIFNGTVVQRHPTHAVTFVDNHDSQPEEALESFVEEWFKPLAYALTLTRDQGEPSVFYGDYYGIPTHGVPAMKSKIDPILEARQKYAYGKQNDYLDHHNMIGWTREGNTAHPNSGLATIMSDGPGGNKWMYVGRNKAGQVWRDITGNRSGTVTINADGWGNFSVNGGSVSIWVN

SEQ ID NO: 20752 - protein, 484 aa, Synthetic construct
HHNQTNGTMMQYFEWYLPNDGNHWNRLRSDASNLKDKGITAVWIPPAWKGASQNDVGYGAYDLYDLGEFNQKGTVRTKYGTRNQLQAAVTALKSNGIQVWGDVVMNHKGGADATEWVRAVEVNPSNRNQEVSGDYTIEAWTKFDFPGRGNTHSNFKWRWYHFDGVDWDQSRQLQNKIYKFRGDGKEWDWEVDEENGNYDYLMYADYDMDHPEVVNELRNWGVWYTNTLGLDGFRIDAVKHIKYSFTRDWLEHVRNTTGKNMFAVAEFWKNDIGAIENYLSKTNWNHSVFDVPLHYNLYNASRSGGNYDMRQIFNGTVVQRHPTHAVTFVDNHDSQPEEALESFVEEWFKPLAYALTLTRDQGHPSVFYGDYYGIPTHGVPAMKSKIDPILEARQKYAYGKQNDYMDHHNMIGWTREGNTAHPNSGLATIMSDGPGGNKWMYVGRNKAGQVWRDITGNRSGTVTINADGWGNFSVNGGSVSIWVN

SEQ ID NO: 20753 - protein, 484 aa, Synthetic construct
HHNQTNGTMMQYFEWYLPNDGNHWNRLRSDASNLKDKGITAVWIPPAWKGASQNDVGYGAYDLYDLGEFNQKGTVRTKYGTRNQLQAAVTALKSNGIQVYGDVVMNHKGGADATEWVRAVEVNPSNRNQEVSGDYTIEAWTKFDFPGRGNTHSNFKWRWYHFDGVDWDQSRQLQNKIYKFQGDGKEWDWEVDEENGNYDYLMYADYDMDHPEVVNELRNWGVWYTNTLGLDGFRIDAVKHIKYSFTRDWLEHVRNTTGKNMFAVAEFWKNDIGAIENYLSKTNWNHSVFDVPLHYNLYNASRSGGNYDMRQIFNGTVVQRHPTHAVTFVDNHDSQPEEALESFVEEWFKPLAYALTLTRDQGEPSVFYGDYYGIPTHGVPAMKSKIDPILEARQKYAYGKQNDYMDHHNMIGWTREGNTAHPNSGLATIMSDGPGGNKWMYVGRNKAGQVWRDITGNRSGTVTINADGWGNFSVNGGSVSIWVN

SEQ ID NO: 20754 - protein, 484 aa, Synthetic construct
HHNQTNGTMMQYFEWYLPNDGNHWNRLRSDASNLKDKGITAVWIPPAWKGASQNDVGYGAYDLYDLGEFNQKGTVRTKYGTRNQLQAAVTALKSNGIQVYGDVVMNHKGGADATEWVRAVEVNPSNRNQEVSGDYTIEAWTKFDFPGRGNTHSNFKWRWYHFDGVDWDQSRQLQNKIYKFRGDGKEWDWEVDEENGNYDYLMYADYDMDHPEVVNELRNWGVWYTNTLGLDGFRIDAVKHIKYSFTRDWLEHVRNTTGKNMFAVAEFWKNDIGAIENYLSNTNWNHSVFDVPLHYNLYNASRSGGNYDMRQIFNGTVVQRHPTHAVTFVDNHDSQPEEALESFVEEWFKPLAYALTLTRDQGEPSVFYGDYYGIPTHGVPAMKSKIDPILEARQKYAYGKQNDYMDHHNMIGWTREGNTAHPNSGLATIMSDGPGGNKWMYVGRNKAGQVWRDITGNRSGTVTINADGWGNFSVNGGSVSIWVN

SEQ ID NO: 20755 - protein, 484 aa, Synthetic construct
HHNQTNGTMMQYFEWYLPNDGNHWNRLRSDASNLKDKGITAVWIPPAWKGASQNDVGYGAYDLYDLGEFNQKGTVRTKYGTRNQLQAAVTALKSNGIQVWGDVVMNHKGGADATEWVRAVEVNPSNRNQEVSGDTTIEAWTKFDFPGRGNTHSNFKWRWYHFDGVDWDQSRQLQNKIYKFRGDGKEWDWEVDEENGNYDYLMYADYDMDHPEVVNELRNWGVWYTNTLGLDGFRIDAVKHIKYSFTRDWLEHVRNTTGKNMFAVAEFWKNDIGAIENYLSKTNWNHSVFDVPLHYNLYNASRSGGNYDMRQIFNGTVVQRHPTHAVTFVDNHDSQPEEALESFVEEWFKPLAYALTLTRDQGYPSVFYGDYYGIPTHGVPAMKSKIDPILEARQKYAYGKQNDYMDHHNMIGWTREGNTAHPNSGLATIMSDGPGGNKWMYVGRNKAGQVWRDITGNRSGTVTINADGWGNFSVNGGSVSIWVN

SEQ ID NO: 20756 - protein, 483 aa, Bacillus sp.
HHNGTNGTMMQYFEWHLPNDGNHWNRLRDDASNLRNRGITAIWIPPAWKGTSQNDVGYGAYDLYDLGEFNQKGTVRTKYGTRSQLESAIHALKNNGVQVYGDVVMNHKGGADATENVLAVEVNPNNRNQEISGDYTIEAWTKFDFPGRGNTYSDFKWRWYHFDGVDWDQSRQFQNRIYKFRGKAWDWEVDSENGNYDYLMYADVDMDHPEVVNELRRWGEWYTNTLNLDGFRIDAVKHIKYSFTRDWLTHVRNATGKEMFAVAEFWKNDLGALENYLNKTNWNHSVFDVPLHYNLYNASNSGGNYDMAKLLNGTVVQKHPMHAVTFVDNHDSQPGESLESFVQEWFKPLAYALILTREQGYPSVFYGDYYGIPTHSVPAMKAKIDPILEARQNFAYGTQRDYIDNPDVIGWTREGDSTKAKSGLATVITDGPGGSKRMYVGTSNAGEIWYDLTGNRTDKITIGSDGYATFPVNGGSVSVWVQQ

SEQ ID NO: 20757 - protein, 484 aa, Synthetic construct
HHNQTNGTMMQYFEWYLPNDGNHWNRLRSDASNLKDKGITAVWIPPAWKGASQNDVGYGAYDLYDLGEFNQKGTVRTKYGTRNQLQAAVTALKSNGIQVYGDVVMNHKGGADATEWVRAVEVNPSNRNQEVSGDYTIEAWTKFDFPGRGNTHSNFKWRWYHFDGVDWDQSRQLQNKIYKFQGDGKEWDWEVDEENGNYDYLMYADYDMDHPEVVNELRNWGVWYTNTLGLDGFRIDAVKHIKYSFTRDWLEHVRNTTGKNMFAVAEFWKNDIGAIENYLSNTNWNHSVFDVPLHYNLYNASRSGGNYDMRQIFNGTVVQRHPTHAVTFVDNHDSQPEEALESFVEEWFKPLAYALTLTRDQGEPSVFYGDYYGIPTHGVPAMKSKIDPILEARQKYAYGKQNDYMDHHNMIGWTREGNTAHPNSGLATIMSDGPGGNKWMYVGRNKAGQVWRDITGNRSGTVTINADGWGNFSVNGGSVSIWVN

SEQ ID NO: 20758 - protein, 484 aa, Synthetic construct
HHNGTNGTMMQYFEWYLPNDGNHWHRLRSDASNLKDKGITAVWIPPAWKGASQNDVGYGAYDLYDLGEFNQKGTVRTKYGTRNQLQAAVTALKSNGIQVWGDVVMNHKGGADATEWVRAVEVNPSNRNQEVSGDYTIEAWTKFDFPGRGNTHSNFKWRWYHFDGVDWDQSRQLQNKIYKFQGDGKEWDWEVDEENGNYDYLMYADYDMDHPEVVNELRNWGVWYTNTLGLDGFRIDAVKHIKYSFTRDWLTHVRNTTQKNMFAVAEFWKNDIGAIENYLSKTNWNHSVFDVPLHYNLYNASRSGGNYDMRQIFNGTVVQRHPTHAVTFVDNHDSQPEEALESFVEEWFKPLAYALTLTRDQGEPSVFYGDYYGIPTHGVPAMKSKIDPILEARQKYAYGKQNDYLDHHNMIGWTREGNTAHPNSGLATIMSDGPGGNKWMYVGRNKAGQVWRDITGNRSGTVTINADGWGNFSVNGGSVSIWVN

SEQ ID NO: 20759 - protein, 484 aa, Synthetic construct
HHNQTNGTMMQYFEWYLPNDGNHWNRLRSDASNLKDKGITAVWIPPAWKGASQNDVGYGAYDLYDLGEFNQKGTVRTKYGTRNQLQAAVTALKSNGIQVYGDVVMNHKGGADATEWVRAVEVNPSNRNQEVSGDYTIEAWTKFDFPGRGNTHSNFKWRWYHFDGVDWDQSRQLQNKIYKFQGDGKEWDWEVDEENGNYDYLMYADYDMDHPEVVNELRNWGVWYTNTLGLDGFRIDAVKHIKYSFTRDWLEHVRNTTQKNMFAVAEFWKNDIGAIENYLSNTNWNHSVFDVPLHYNLYNASRSGGNYDMRQIFNGTVVQRHPTHAVTFVDNHDSQPEEALESFVEEWFKPLAYALTLTRDQGYPSVFYGDYYGIPTHGVPAMKSKIDPILEARQKYAYGKQNDYMDHHNMIGWTREGNTAHPNSGLATIMSDGPGGNKWMYVGRNKAGQVWRDITGNRSGTVTINADGWGNFSVNGGSVSIWVN

SEQ ID NO: 20760 - protein, 484 aa, Synthetic construct
HHNGTNGTMMQYFEWYLPNDGNHWHRLRSDASNLKDKGITAVWIPPAWKGASQNDVGYGAYDLYDLGEFNQKGTVRTKYGTRNQLQAAVTALKSNGIQVWGDVVMNHKGGADATEWVRAVEVNPSNRNQEVSGDTTIEAWTKFDFPGRGNTHSNFKWRWYHFDGVDWDQSRQLQNKIYKFQGDGKEWDWEVDTENGNYDYLMYADYDMDHPEVVNELRNWGVWYTNTLGLDGFRIDAVKHIKYSFTRDWLTHVRNTTGKNMFAVAEFWKNDIGAIENYLSNTNWNHSVFDVPLHYNLYNASRSGGNYDMRQIFNGTVVQRHPTHAVTFVDNHDSQPEEALESFVEEWFKPLAYALTLTRDQGEPSVFYGDYYGIPTHGVPAMKSKIDPILEARQKYAYGKQNDYLDHHNMIGWTREGNTAHPNSGLATIMSDGPGGNKWMYVGRNKAGQVWRDITGNRSGTVTINADGWGNFSVNGGSVSIWVN

SEQ ID NO: 20761 - protein, 484 aa, Synthetic construct
HHNQTNGTMMQYFEWYLPNDGNHWNRLRSDASNLKDKGITAVWIPPAWKGASQNDVGYGAYDLYDLGEFNQKGTVRTKYGTRNQLQAAVTALKSNGIQVWGDVVMNHKGGADATEWVRAVEVNPSNRNQEVSGDYTIEAWTKFDFPGRGNTHSNFKWRWYHFDGVDWDQSRQLQNKIYKFRGDGKEWDWEVDEENGNYDYLMYADYDMDHPEVVNELRNWGVWYTNTLGLDGFRIDAVKHIKYSFTRDWLEHVRNTTGKNMFAVAEFWKNDIGAIENYLSNTNWNHSVFDVPLHYNLYNASRSGGNYDMRQIFNGTVVQRHPTHAVTFVDNHDSQPEEALESFVEEWFKPLAYALTLTRDQGEPSVFYGDYYGIPTHGVPAMKSKIDPILEARQKYAYGKQNDYMDHHNMIGWTREGNTAHPNSGLATIMSDGPGGNKWMYVGRNKAGQVWRDITGNRSGTVTINADGWGNFSVNGGSVSIWVN

SEQ ID NO: 20762 - protein, 484 aa, Synthetic construct
HHNQTNGTMMQYFEWYLPNDGNHWNRLRSDASNLKDKGITAVWIPPAWKGASQNDVGYGAYDLYDLGEFNQKGTVRTKYGTRNQLQAAVTALKSNGIQVWGDVVMNHKGGADATEWVRAVEVNPSNRNQEVSGDTTIEAWTKFDFPGRGNTHSNFKWRWYHFDGVDWDQSRQLQNKIYKFRGDGKEWDWEVDEENGNYDYLMYADYDMDHPEVVNELRNWGVWYTNTLGLDGFRIDAVKHIKYSFTRDWLEHVRNTTGKNMFAVAEFWKNDIGAIENYLSKTNWNHSVFDVPLHYNLYNASRSGGNYDMRQIFNGTVVQRHPTHAVTFVDNHDSQPEEALESFVEEWFKPLAYALTLTRDQGHPSVFYGDYYGIPTHGVPAMKSKIDPILEARQKYAYGKQNDYMDHHNMIGWTREGNTAHPNSGLATIMSDGPGGNKWMYVGRNKAGQVWRDITGNRSGTVTINADGWGNFSVNGGSVSIWVN

SEQ ID NO: 20763 - protein, 484 aa, Synthetic construct
HHNGTNGTMMQYFEWYLPNDGNHWHRLRSDASNLKDKGITAVWIPPAWKGASQNDVGYGAYDLYDLGEFNQKGTVRTKYGTRNQLQAAVTALKSNGIQVWGDVVMNHKGGADATEWVRAVEVNPSNRNQEVSGDYTIEAWTKFDFPGRGNTHSNFKWRWYHFDGVDWDQSRQLQDKIYKFQGDGKEWDWEVDTENGNYDYLMYADYDMDHPEVVNELRNWGVWYTNTLGLDGFRIDAVKHIKYSFTRDWLTHVRNTTGKNMFAVAEFWKNDIGAIENYLSNTNWNHSVFDVPLHYNLYNASRSGGNYDMRQIFNGTVVQRHPTHAVTFVDNHDSQPEEALESFVEEWFKPLAYALTLTRDQGEPSVFYGDYYGIPTHGVPAMKSKIDPILEARQKYAYGKQNDYLDHHNMIGWTREGNTAHPNSGLATIMSDGPGGNKWMYVGRNKAGQVWRDITGNRSGTVTINADGWGNFSVNGGSVSIWVN

SEQ ID NO: 20764 - protein, 484 aa, Synthetic construct
HHNGTNGTMMQYFEWYLPNDGNHWHRLRSDASNLKDKGITAVWIPPAWKGASQNDVGYGAYDLYDLGEFNQKGTVRTKYGTRNQLQAAVTALKSNGIQVWGDVVMNHKGGADATEWVRAVEVNPSNRNQEVSGDYTIEAWTKFDFPGRGNTHSNFKWRWYHFDGVDWDQSRQLQNKIYKFQGDGKEWDWEVDEENGNYDYLMYADYDMDHPEVVNELRNWGVWYTNTLGLDGFRIDAVKHIKYSFTRDWLTHVRNTTQKNMFAVAEFWKNDIGAIENYLSNTNWNHSVFDVPLHYNLYNASRSGGNYDMRQIFNGTVVQRHPTHAVTFVDNHDSQPEEALESFVEEWFKPLAYALTLTRDQGYPSVFYGDYYGIPTHGVPAMKSKIDPILEARQKYAYGKQNDYLDHHNMIGWTREGNTAHPNSGLATIMSDGPGGNKWMYVGRNKAGQVWRDITGNRSGTVTINADGWGNFSVNGGSVSIWVN

SEQ ID NO: 20765 - protein, 484 aa, Synthetic construct
HHNQTNGTMMQYFEWYLPNDGNHWNRLRSDASNLKDKGITAVWIPPAWKGASQNDVGYGAYDLYDLGEFNQKGTVRTKYGTRNQLQAAVTALKSNGIQVWGDVVMNHKGGADATEWVRAVEVNPSNRNQEVSGDYTIEAWTKFDFPGRGNTHSNFKWRWYHFDGVDWDQSRQLQNKIYKFQGDGKEWDWEVDEENGNYDYLMYADYDMDHPEVVNELRNWGVWYTNTLGLDGFRIDAVKHIKYSFTRDWLEHVRNTTQKNMFAVAEFWKNDIGAIENYLSKTNWNHSVFDVPLHYNLYNASRSGGNYDMRQIFNGTVVQRHPTHAVTFVDNHDSQPEEALESFVEEWFKPLAYALTLTRDQGYPSVFYGDYYGIPTHGVPAMKSKIDPILEARQKYAYGKQNDYMDHHNMIGWTREGNTAHPNSGLATIMSDGPGGNKWMYVGRNKAGQVWRDITGNRSGTVTINADGWGNFSVNGGSVSIWVN

SEQ ID NO: 20766 - protein, 484 aa, Synthetic construct
HHNGTNGTMMQYFEWYLPNDGNHWHRLRSDASNLKDKGITAVWIPPAWKGASQNDVGYGAYDLYDLGEFNQKGTVRTKYGTRNQLQAAVTALKSNGIQVWGDVVMNHKGGADATEWVRAVEVNPSNRNQEVSGDTTIEAWTKFDFPGRGNTHSNFKWRWYHFDGVDWDQSRQLQNKIYKFQGDGKEWDWEVDEENGNYDYLMYADYDMDHPEVVNELRNWGVWYTNTLGLDGFRIDAVKHIKYSFTRDWLTHVRNTTGKNMFAVAEFWKNDIGAIENYLSKTNWNHSVFDVPLHYNLYNASRSGGNYDMRQIFNGTVVQRHPTHAVTFVDNHDSQPEEALESFVEEWFKPLAYALTLTRDQGEPSVFYGDYYGIPTHGVPAMKSKIDPILEARQKYAYGKQNDYLDHHNMIGWTREGNTAHPNSGLATIMSDGPGGNKWMYVGRNKAGQVWRDITGNRSGTVTINADGWGNFSVNGGSVSIWVN

SEQ ID NO: 20767 - protein, 484 aa, Synthetic construct
HHNQTNGTMMQYFEWYLPNDGNHWNRLRSDASNLKDKGITAVWIPPAWKGASQNDVGYGAYDLYDLGEFNQKGTVRTKYGTRNQLQAAVTALKSNGIQVWGDVVMNHKGGADATEWVRAVEVNPSNRNQEVSGDTTIEAWTKFDFPGRGNTHSNFKWRWYHFDGVDWDQSRQLQNKIYKFQGDGKEWDWEVDEENGNYDYLMYADYDMDHPEVVNELRNWGVWYTNTLGLDGFRIDAVKHIKYSFTRDWLEHVRNTTGKNMFAVAEFWKNDIGAIENYLSKTNWNHSVFDVPLHYNLYNASRSGGNYDMRQIFNGTVVQRHPTHAVTFVDNHDSQPEEALESFVEEWFKPLAYALTLTRDQGYPSVFYGDYYGIPTHGVPAMKSKIDPILEARQKYAYGKQNDYMDHHNMIGWTREGNTAHPNSGLATIMSDGPGGNKWMYVGRNKAGQVWRDITGNRSGTVTINADGWGNFSVNGGSVSIWVN

SEQ ID NO: 20768 - protein, 484 aa, Synthetic construct
HHNQTNGTMMQYFEWYLPNDGNHWNRLRSDASNLKDKGITAVWIPPAWKGASQNDVGYGAYDLYDLGEFNQKGTVRTKYGTRNQLQAAVTALKSNGIQVWGDVVMNHKGGADATEWVRAVEVNPSNRNQEVSGDTTIEAWTKFDFPGRGNTHSNFKWRWYHFDGVDWDQSRQLQNKIYKFRGDGKEWDWEVDEENGNYDYLMYADYDMDHPEVVNELRNWGVWYTNTLGLDGFRIDAVKHIKYSFTRDWLEHVRNTTGKNMFAVAEFWKNDIGAIENYLSKTNWNHSVFDVPLHYNLYNASRSGGNYDMRQIFNGTVVQRHPTHAVTFVDNHDSQPEEALESFVEEWFKPLAYALTLTRDQGEPSVFYGDYYGIPTHGVPAMKSKIDPILEARQKYAYGKQNDYMDHHNMIGWTREGNTAHPNSGLATIMSDGPGGNKWMYVGRNKAGQVWRDITGNRSGTVTINADGWGNFSVNGGSVSIWVN

SEQ ID NO: 20769 - protein, 484 aa, Synthetic construct
HHNQTNGTMMQYFEWYLPNDGNHWNRLRSDASNLKDKGITAVWIPPAWKGASQNDVGYGAYDLYDLGEFNQKGTVRTKYGTRNQLQAAVTALKSNGIQVWGDVVMNHKGGADATEWVRAVEVNPSNRNQEVSGDYTIEAWTKFDFPGRGNTHSNFKWRWYHFDGVDWDQSRQLQNKIYKFRGDGKEWDWEVDEENGNYDYLMYADYDMDHPEVVNELRNWGVWYTNTLGLDGFRIDAVKHIKYSFTRDWLEHVRNTTGKNMFAVAEFWKNDIGAIENYLSNTNWNHSVFDVPLHYNLYNASRSGGNYDMRQIFNGTVVQRHPTHAVTFVDNHDSQPEEALESFVEEWFKPLAYALTLTRDQGHPSVFYGDYYGIPTHGVPAMKSKIDPILEARQKYAYGKQNDYMDHHNMIGWTREGNTAHPNSGLATIMSDGPGGNKWMYVGRNKAGQVWRDITGNRSGTVTINADGWGNFSVNGGSVSIWVN

SEQ ID NO: 20770 - protein, 484 aa, Synthetic construct
HHNQTNGTMMQYFEWYLPNDGNHWNRLRSDASNLKDKGITAVWIPPAWKGASQNDVGYGAYDLYDLGEFNQKGTVRTKYGTRNQLQAAVTALKSNGIQVWGDVVMNHKGGADATEWVRAVEVNPSNRNQEVSGDTTIEAWTKFDFPGRGNTHSNFKWRWYHFDGVDWDQSRQLQNKIYKFRGDGKEWDWEVDEENGNYDYLMYADYDMDHPEVVNELRNWGVWYTNTLGLDGFRIDAVKHIKYSFTRDWLEHVRNTTQKNMFAVAEFWKNDIGAIENYLSKTNWNHSVFDVPLHYNLYNASRSGGNYDMRQIFNGTVVQRHPTHAVTFVDNHDSQPEEALESFVEEWFKPLAYALTLTRDQGYPSVFYGDYYGIPTHGVPAMKSKIDPILEARQKYAYGKQNDYMDHHNMIGWTREGNTAHPNSGLATIMSDGPGGNKWMYVGRNKAGQVWRDITGNRSGTVTINADGWGNFSVNGGSVSIWVN

SEQ ID NO: 20771 - protein, 484 aa, Synthetic construct
HHNQTNGTMMQYFEWYLPNDGNHWNRLRSDASNLKDKGITAVWIPPAWKGASQNDVGYGAYDLYDLGEFNQKGTVRTKYGTRNQLQAAVTALKSNGIQVWGDVVMNHKGGADATEWVRAVEVNPSNRNQEVSGDYTIEAWTKFDFPGRGNTHSNFKWRWYHFDGVDWDQSRQLQNKIYKFRGDGKEWDWEVDEENGNYDYLMYADYDMDHPEVVNELRNWGVWYTNTLGLDGFRIDAVKHIKYSFTRDWLEHVRNTTQKNMFAVAEFWKNDIGAIENYLSNTNWNHSVFDVPLHYNLYNASRSGGNYDMRQIFNGTVVQRHPTHAVTFVDNHDSQPEEALESFVEEWFKPLAYALTLTRDQGYPSVFYGDYYGIPTHGVPAMKSKIDPILEARQKYAYGKQNDYMDHHNMIGWTREGNTAHPNSGLATIMSDGPGGNKWMYVGRNKAGQVWRDITGNRSGTVTINADGWGNFSVNGGSVSIWVN

SEQ ID NO: 20772 - protein, 484 aa, Synthetic construct
HHNQTNGTMMQYFEWYLPNDGNHWNRLRSDASNLKDKGITAVWIPPAWKGASQNDVGYGAYDLYDLGEFNQKGTVRTKYGTRNQLQAAVTALKSNGIQVYGDVVMNHKGGADATEWVRAVEVNPSNRNQEVSGDYTIEAWTKFDFPGRGNTHSNFKWRWYHFDGVDWDQSRQLQNKIYKFRGDGKEWDWEVDEENGNYDYLMYADYDMDHPEVVNELRNWGVWYTNTLGLDGFRIDAVKHIKYSFTRDWLEHVRNTTQKNMFAVAEFWKNDIGAIENYLSNTNWNHSVFDVPLHYNLYNASRSGGNYDMRQIFNGTVVQRHPTHAVTFVDNHDSQPEEALESFVEEWFKPLAYALTLTRDQGHPSVFYGDYYGIPTHGVPAMKSKIDPILEARQKYAYGKQNDYMDHHNMIGWTREGNTAHPNSGLATIMSDGPGGNKWMYVGRNKAGQVWRDITGNRSGTVTINADGWGNFSVNGGSVSIWVN

SEQ ID NO: 20773 - protein, 484 aa, Synthetic construct
HHNGTNGTMMQYFEWYLPNDGNHWHRLRSDASNLKDKGITAVWIPPAWKGASQNDVGYGAYDLYDLGEFNQKGTVRTKYGTRNQLQAAVTALKSNGIQVWGDVVMNHKGGADATEWVRAVEVNPSNRNQEVSGDTTIEAWTKFDFPGRGNTHSNFKWRWYHFDGVDWDQSRQLQNKIYKFRGDGKEWDWEVDTENGNYDYLMYADYDMDHPEVVNELRNWGVWYTNTLGLDGFRIDAVKHIKYSFTRDWLTHVRNTTQKNMFAVAEFWKNDIGAIENYLSNTNWNHSVFDVPLHYNLYNASRSGGNYDMRQIFNGTVVQRHPTHAVTFVDNHDSQPEEALESFVEEWFKPLAYALTLTRDQGEPSVFYGDYYGIPTHGVPAMKSKIDPILEARQKYAYGKQNDYLDHHNMIGWTREGNTAHPNSGLATIMSDGPGGNKWMYVGRNKAGQVWRDITGNRSGTVTINADGWGNFSVNGGSVSIWVN

SEQ ID NO: 20774 - protein, 484 aa, Synthetic construct
HHNGTNGTMMQYFEWYLPNDGNHWHRLRSDASNLKDKGITAVWIPPAWKGASQNDVGYGAYDLYDLGEFNQKGTVRTKYGTRNQLQAAVTALKSNGIQVWGDVVMNHKGGADATEWVRAVEVNPSNRNQEVSGDYTIEAWTKFDFPGRGNTHSNFKWRWYHFDGVDWDQSRQLQNKIYKFRGDGKEWDWEVDEENGNYDYLMYADYDMDHPEVVNELRNWGVWYTNTLGLDGFRIDAVKHIKYSFTRDWLTHVRNTTQKNMFAVAEFWKNDIGAIENYLSNTNWNHSVFDVPLHYNLYNASRSGGNYDMRQIFNGTVVQRHPTHAVTFVDNHDSQPEEALESFVEEWFKPLAYALTLTRDQGEPSVFYGDYYGIPTHGVPAMKSKIDPILEARQKYAYGKQNDYLDHHNMIGWTREGNTAHPNSGLATIMSDGPGGNKWMYVGRNKAGQVWRDITGNRSGTVTINADGWGNFSVNGGSVSIWVN

SEQ ID NO: 20775 - protein, 484 aa, Synthetic construct
HHNGTNGTMMQYFEWYLPNDGNHWHRLRSDASNLKDKGITAVWIPPAWKGASQNDVGYGAYDLYDLGEFNQKGTVRTKYGTRNQLQAAVTALKSNGIQVWGDVVMNHKGGADATEWVRAVEVNPSNRNQEVSGDTTIEAWTKFDFPGRGNTHSNFKWRWYHFDGVDWDQSRQLQNKIYKFRGDGKEWDWEVDEENGNYDYLMYADYDMDHPEVVNELRNWGVWYTNTLGLDGFRIDAVKHIKYSFTRDWLTHVRNTTQKNMFAVAEFWKNDIGAIENYLSKTNWNHSVFDVPLHYNLYNASRSGGNYDMRQIFNGTVVQRHPTHAVTFVDNHDSQPEEALESFVEEWFKPLAYALTLTRDQGEPSVFYGDYYGIPTHGVPAMKSKIDPILEARQKYAYGKQNDYLDHHNMIGWTREGNTAHPNSGLATIMSDGPGGNKWMYVGRNKAGQVWRDITGNRSGTVTINADGWGNFSVNGGSVSIWVN

SEQ ID NO: 20776 - protein, 484 aa, Synthetic construct
HHNQTNGTMMQYFEWYLPNDGNHWNRLRSDASNLKDKGITAVWIPPAWKGASQNDVGYGAYDLYDLGEFNQKGTVRTKYGTRNQLQAAVTALKSNGIQVWGDVVMNHKGGADATEWVRAVEVNPSNRNQEVSGDYTIEAWTKFDFPGRGNTHSNFKWRWYHFDGVDWDQSRQLQNKIYKFRGDGKEWDWEVDEENGNYDYLMYADYDMDHPEVVNELRNWGVWYTNTLGLDGFRIDAVKHIKYSFTRDWLEHVRNTTQKNMFAVAEFWKNDIGAIENYLSKTNWNHSVFDVPLHYNLYNASRSGGNYDMRQIFNGTVVQRHPTHAVTFVDNHDSQPEEALESFVEEWFKPLAYALTLTRDQGEPSVFYGDYYGIPTHGVPAMKSKIDPILEARQKYAYGKQNDYMDHHNMIGWTREGNTAHPNSGLATIMSDGPGGNKWMYVGRNKAGQVWRDITGNRSGTVTINADGWGNFSVNGGSVSIWVN

SEQ ID NO: 20777 - protein, 484 aa, Synthetic construct
HHNQTNGTMMQYFEWYLPNDGNHWNRLRSDASNLKDKGITAVWIPPAWKGASQNDVGYGAYDLYDLGEFNQKGTVRTKYGTRNQLQAAVTALKSNGIQVWGDVVMNHKGGADATEWVRAVEVNPSNRNQEVSGDYTIEAWTKFDFPGRGNTHSNFKWRWYHFDGVDWDQSRQLQNKIYKFQGDGKEWDWEVDEENGNYDYLMYADYDMDHPEVVNELRNWGVWYTNTLGLDGFRIDAVKHIKYSFTRDWLEHVRNTTGKNMFAVAEFWKNDIGAIENYLSKTNWNHSVFDVPLHYNLYNASRSGGNYDMRQIFNGTVVQRHPTHAVTFVDNHDSQPEEALESFVEEWFKPLAYALTLTRDQGHPSVFYGDYYGIPTHGVPAMKSKIDPILEARQKYAYGKQNDYMDHHNMIGWTREGNTAHPNSGLATIMSDGPGGNKWMYVGRNKAGQVWRDITGNRSGTVTINADGWGNFSVNGGSVSIWVN

SEQ ID NO: 20778 - protein, 484 aa, Synthetic construct
HHNQTNGAMMQYFEWYLPNDGNHWNRLRSDASNLKDKGITAVWIPPAWKGASQNDVGYGAYDLYDLGEFNQKGTVRTKYGTRNQLQAAVTALKSNGIQVYGDVVMNHKGGADATEWVRAVEVNPSNRNQEVSGDTTIEAWTKFDFPGRGNTHSNFKWRWYHFDGVDWDQSRQLQNKIYKFRGDGKEWDWEVDEENGNYDYLMYADYDMDHPEVVNELRNWGVWYTNTLGLDGFRIDAVKHIKYSFTRDWLEHVRNTTQKNMFAVAEFWKNDIGAIENYLSKTNWNHSVFDVPLHYNLYNASRSGGNYDMRQIFNGTVVQRHPTHAVTFVDNHDSQPEEALESFVEEWFKPLAYALTLTRDQGYPSVFYGDYYGIPTHGVPAMKSKIDPILEARQKYAYGKQNDYMDHHNMIGWTREGNTAHPNSGLATIMSDGPGGNKWMYVGRNKAGQVWRDITGNRSGTVTINADGWGNFSVNGGSVSIWVN

SEQ ID NO: 20779 - protein, 484 aa, Synthetic construct
HHNQTNGTMMQYFEWYLPNDGNHWNRLRSDASNLKDKGITAVWIPPAWKGASQNDVGYGAYDLYDLGEFNQKGTVRTKYGTRNQLQAAVTALKSNGIQVWGDVVMNHKGGADATEWVRAVEVNPSNRNQEVSGDYTIEAWTKFDFPGRGNTHSNFKWRWYHFDGVDWDQSRQLQNKIYKFQGDGKEWDWEVDEENGNYDYLMYADYDMDHPEVVNELRNWGVWYTNTLGLDGFRIDAVKHIKYSFTRDWLEHVRNTTGKNMFAVAEFWKNDIGAIENYLSNTNWNHSVFDVPLHYNLYNASRSGGNYDMRQIFNGTVVQRHPTHAVTFVDNHDSQPEEALESFVEEWFKPLAYALTLTRDQGYPSVFYGDYYGIPTHGVPAMKSKIDPILEARQKYAYGKQNDYMDHHNMIGWTREGNTAHPNSGLATIMSDGPGGNKWMYVGRNKAGQVWRDITGNRSGTVTINADGWGNFSVNGGSVSIWVN

SEQ ID NO: 20780 - protein, 484 aa, Synthetic construct
HHNQTNGTMMQYFEWYLPNDGNHWNRLRSDASNLKDKGITAVWIPPAWKGASQNDVGYGAYDLYDLGEFNQKGTVRTKYGTRNQLQAAVTALKSNGIQVYGDVVMNHKGGADATEWVRAVEVNPSNRNQEVSGDTTIEAWTKFDFPGRGNTHSNFKWRWYHFDGVDWDQSRQLQNKIYKFRGDGKEWDWEVDEENGNYDYLMYADYDMDHPEVVNELRNWGVWYTNTLGLDGFRIDAVKHIKYSFTRDWLEHVRNTTQKNMFAVAEFWKNDIGAIENYLSKTNWNHSVFDVPLHYNLYNASRSGGNYDMRQIFNGTVVQRHPTHAVTFVDNHDSQPEEALESFVEEWFKPLAYALTLTRDQGHPSVFYGDYYGIPTHGVPAMKSKIDPILEARQKYAYGKQNDYMDHHNMIGWTREGNTAHPNSGLATIMSDGPGGNKWMYVGRNKAGQVWRDITGNRSGTVTINADGWGNFSVNGGSVSIWVN

SEQ ID NO: 20781 - protein, 484 aa, Synthetic construct
HHNQTNGTMMQYFEWYLPNDGNHWNRLRSDASNLKDKGITAVWIPPAWKGASQNDVGYGAYDLYDLGEFNQKGTVRTKYGTRNQLQAAVTALKSNGIQVYGDVVMNHKGGADATEWVRAVEVNPSNRNQEVSGDTTIEAWTKFDFPGRGNTHSNFKWRWYHFDGVDWDQSRQLQNKIYKFQGDGKEWDWEVDEENGNYDYLMYADYDMDHPEVVNELRNWGVWYTNTLGLDGFRIDAVKHIKYSFTRDWLEHVRNTTQKNMFAVAEFWKNDIGAIENYLSKTNWNHSVFDVPLHYNLYNASRSGGNYDMRQIFNGTVVQRHPTHAVTFVDNHDSQPEEALESFVEEWFKPLAYALTLTRDQGYPSVFYGDYYGIPTHGVPAMKSKIDPILEARQKYAYGKQNDYMDHHNMIGWTREGNTAHPNSGLATIMSDGPGGNKWMYVGRNKAGQVWRDITGNRSGTVTINADGWGNFSVNGGSVSIWVN

SEQ ID NO: 20782 - protein, 484 aa, Synthetic construct
HHNQTNGTMMQYFEWYLPNDGNHWNRLRSDASNLKDKGITAVWIPPAWKGASQNDVGYGAYDLYDLGEFNQKGTVRTKYGTRNQLQAAVTALKSNGIQVWGDVVMNHKGGADATEWVRAVEVNPSNRNQEVSGDYTIEAWTKFDFPGRGNTHSNFKWRWYHFDGVDWDQSRQLQNKIYKFRGDGKEWDWEVDEENGNYDYLMYADYDMDHPEVVNELRNWGVWYTNTLGLDGFRIDAVKHIKYSFTRDWLEHVRNTTQKNMFAVAEFWKNDIGAIENYLSKTNWNHSVFDVPLHYNLYNASRSGGNYDMRQIFNGTVVQRHPTHAVTFVDNHDSQPEEALESFVEEWFKPLAYALTLTRDQGHPSVFYGDYYGIPTHGVPAMKSKIDPILEARQKYAYGKQNDYMDHHNMIGWTREGNTAHPNSGLATIMSDGPGGNKWMYVGRNKAGQVWRDITGNRSGTVTINADGWGNFSVNGGSVSIWVN

SEQ ID NO: 20783 - protein, 484 aa, Synthetic construct
HHNGTNGTMMQYFEWYLPNDGNHWHRLRSDASNLKDKGITAVWIPPAWKGASQNDVGYGAYDLYDLGEFNQKGTVRTKYGTRNQLQAAVTALKSNGIQVWGDVVMNHKGGADATEWVRAVEVNPSNRNQEVSGDYTIEAWTKFDFPGRGNTHSNFKWRWYHFDGVDWDQSRQLQNKIYKFQGDGKEWDWEVDEENGNYDYLMYADYDMDHPEVVNELRNWGVWYTNTLGLDGFRIDAVKHIKYSFTRDWLTHVRNTTGKNMFAVAEFWKNDIGAIENYLSNTNWNHSVFDVPLHYNLYNASRSGGNYDMRQIFNGTVVQRHPTHAVTFVDNHDSQPEEALESFVEEWFKPLAYALTLTRDQGEPSVFYGDYYGIPTHGVPAMKSKIDPILEARQKYAYGKQNDYLDHHNMIGWTREGNTAHPNSGLATIMSDGPGGNKWMYVGRNKAGQVWRDITGNRSGTVTINADGWGNFSVNGGSVSIWVN

SEQ ID NO: 20784 - protein, 485 aa, Synthetic construct
AAAPFNGTMMQYFEWYLPDDGTLWTKVANEANNLSSLGITALWLPPAYKGTSRSDVGYGVYDLYDLGEFNQKGAVRTKYGTKAQYLQAIQAAHAAGMQVYADVVFNHKGGADATEMVRAVEVNPNNRNQEVSGEYTIEAWTKFDFPGRGNTHSNFKWRWYHFDGVDWDQSRKLNNRIYKFRGDGKGWDWEVDTENGNYDYLMYADIDMDHPEVVTELKNWGKWYVNTTNIDGFRLDAVKHIKFSFFPDWLSYVRSQTGKPLFTVGEYWSYDINKLHNYIMKTNGTMSLFDAPLHNKFYTASKSGGTFDMRTLMTNTLMKDQPTLAVTFVDNHDTEPGQALQSWVDPWFKPLAYAFILTRQEGYPCVFYGDYYGIPQYNIPSLKSKIDPLLIARRDYAYGTQHDYLDHSDIIGWTREGVTEKPGSGLAALITDGPGGSKWMYVGKQHAGKVFYDLTGNRSDTVTINSDGWGEFKVNGGSVSVWVPR

SEQ ID NO: 20785 - protein, 485 aa, Synthetic construct
AAAPFNGTMMQYFEWYLPDDGTLWTKVANEANNLSSLGITALWLPPAYKGTSRSDVGYGVYDLYDLGEFNQKGAVRTKYGTKAQYLQAIQAAHAAGMQVYADVVFNHKGGADATENVLAVEVNPNNRNQEISGDYTIEAWTKFDFPGRGNTYSDFKWRWYHFDGVDWDQSRQFQNRIYKFRGDGKAWDWEVDSENGNYDYLMYADVDMDHPEVVTELKNWGKWYVNTTNIDGFRLDAVKHIKFSFFPDWLSYVRSQTGKPLFTVGEYWSYDINKLHNYIMKTNGTMSLFDAPLHNKFYTASKSGGTFDMRTLMTNTLMKDQPTLAVTFVDNHDTEPGQALQSWVDPWFKPLAYAFILTRQEGYPCVFYGDYYGIPQYNIPSLKSKIDPLLIARRDYAYGTQHDYLDHSDIIGWTREGVTEKPGSGLAALITDGPGGSKWMYVGKQHAGKVFYDLTGNRSDTVTINSDGWGEFKVNGGSVSVWVPR

SEQ ID NO: 20786 - protein, 510 aa, unidentified
LAFLLTALLFCPTGQPAKAAAPFNGTMMQYFEWYLPDDGTLWTKVANEANNLSSLGITALWLPPAYKGTSRSDVGYGVYDLYDLGEFNQKGAVRTKYGTKAQYLQAIQAAHAAGMQVYADVVFDHKGGADGTEWVDAVEVNPSDRNQEISGIYQIQAWTKFDFPGRGNTYSSFKWRWYHFDGVDWDESRKLSRIYKFRGIGKAWDWEVDTENGNYDYLMYADLDMDHPEVVTELKAGAKWYVNTRTLDGFRLDAVKHIKFSFFPDWLSYVRSQTGKPLFTVGEYWSYDINKLHNYIMKTNGTMSLFDAPLHNKFYTASKSGGTFDMRTLMTNTLMKDQPTLAVTFVDNHDTEPGQALQSWVDPWFKPLAYAFILTRQEGYPCVFYGDYYGIPQYNIPSLKSKIDPLLIARRDYAYGTQHDYLDHSDIIGWTREGVTEKPGSGLAALITDGPGGSKWMYVGKQHAGKVFYDLTGNRSDTVTINSDGWGEFKVNGGSVSVWVPRKTTVSTIA

SEQ ID NO: 20787 - protein, 478 aa, Aspergillus bombycis
ATPADWRSQSIYFLLTDRFARTDGSTTATCNTEDRKYCGGTWQGIIDKLDYIQGMGFTAIWITPVTGQLPQDTAYGEAYHGYWQQDIYALNENHGTADDLKALSSALHERGMYLMVDVVANHMGYDGAGASVDYSVFNPFSSQDYFHSFCLIENYDDQTQSENCWLGDNSVSLPDLDTTKDEVKNEWYEWVGNLVSNYSIDGLRVDTVKHVQKDFWPGYNEAAGVYCIGEVLNGDPAYTCPYQDVMDGVLNYPIYYPLLNAFKSTSGSMNDLYNMINTVKSDCPDSTLLGTFVENHDNPRFASYTNDIALAKNVAAFIILNDGIPIIYAGQEQHYAGGNDPANREATWLSGYSTDSEIYKLIASANAIRNHAVSTDTGFVTYKNWPIYKDDTTIAMRKGTDGSQIVTILSNKGASGDAYTLSLGNTGYTAGQQLTEVIGCTTLTVGSDGNVPVPMAGGLPRVLYPTEKLGDSKICSSS

SEQ ID NO: 20788 - protein, 484 aa, Synthetic construct
HHNQTNGTMMQYFEWYLPNDGNHWNRLRSDASNLKDKGITAVWIPPAWKGASQNDVGYGAYDLYDLGEFNQKGTVRTKYGTRNQLQAAVTALKSNGIQVYGDVVMNHKGGADATEWVRAVEVNPSNRNQEVSGDYTIEAWTKFDFPGRGNTHSNFKWRWYHFDGVDWDQSRQLQNKIYKFQGDGKEWDWEVDEENGNYDYLMYADYDMDHPEVVNELRNWGVWYTNTLGLDGFRIDAVKHIKYSFTRDWLEHVRNTTQKNMFAVAEFWKNDIGAIENYLSNTNWNHSVFDVPLHYNLYNASRSGGNYDMRQIFNGTVVQRHPTHAVTFVDNHDSQPEEALESFVEEWFKPLAYALTLTRDQGHPSVFYGDYYGIPTHGVPAMKSKIDPILEARQKYAYGKQNDYMDHHNMIGWTREGNTAHPNSGLATIMSDGPGGNKWMYVGRNKAGQVWRDITGNRSGTVTINADGWGNFSVNGGSVSIWVN

SEQ ID NO: 20789 - protein, 484 aa, Synthetic construct
HHNQTNGTMMQYFEWYLPNDGNHWNRLRSDASNLKDKGITAVWIPPAWKGASQNDVGYGAYDLYDLGEFNQKGTVRTKYGTRNQLQAAVTALKSNGIQVWGDVVMNHKGGADATEWVRAVEVNPSNRNQEVSGDYTIEAWTKFDFPGRGNTHSNFKWRWYHFDGVDWDQSRQLQNKIYKFQGDGKEWDWEVDEENGNYDYLMYADYDMDHPEVVNELRNWGVWYTNTLGLDGFRIDAVKHIKYSFTRDWLEHVRNTTQKNMFAVAEFWKNDIGAIENYLSNTNWNHSVFDVPLHYNLYNASRSGGNYDMRQIFNGTVVQRHPTHAVTFVDNHDSQPEEALESFVEEWFKPLAYALTLTRDQGYPSVFYGDYYGIPTHGVPAMKSKIDPILEARQKYAYGKQNDYMDHHNMIGWTREGNTAHPNSGLATIMSDGPGGNKWMYVGRNKAGQVWRDITGNRSGTVTINADGWGNFSVNGGSVSIWVN

SEQ ID NO: 20790 - protein, 484 aa, Synthetic construct
HHNQTNGTMMQYFEWYLPNDGNHWNRLRSDASNLKDKGITAVWIPPAWKGASQNDVGYGAYDLYDLGEFNQKGTVRTKYGTRNQLQAAVTALKSNGIQVWGDVVMNHKGGADATEWVRAVEVNPSNRNQEVSGDYTIEAWTKFDFPGRGNTHSNFKWRWYHFDGVDWDQSRQLQNKIYKFRGDGKEWDWEVDEENGNYDYLMYADYDMDHPEVVNELRNWGVWYTNTLGLDGFRIDAVKHIKYSFTRDWLEHVRNTTQKNMFAVAEFWKNDIGAIENYLSNTNWNHSVFDVPLHYNLYNASRSGGNYDMRQIFNGTVVQRHPTHAVTFVDNHDSQPEEALESFVEEWFKPLAYALTLTRDQGEPSVFYGDYYGIPTHGVPAMKSKIDPILEARQKYAYGKQNDYMDHHNMIGWTREGNTAHPNSGLATIMSDGPGGNKWMYVGRNKAGQVWRDITGNRSGTVTINADGWGNFSVNGGSVSIWVN

SEQ ID NO: 20791 - protein, 484 aa, Synthetic construct
HHNQTNGTMMQYFEWYLPNDGNHWNRLRSDASNLKDKGITAVWIPPAWKGASQNDVGYGAYDLYDLGEFNQKGTVRTKYGTRNQLQAAVTALKSNGIQVWGDVVMNHKGGADATEWVRAVEVNPSNRNQEVSGDTTIEAWTKFDFPGRGNTHSNFKWRWYHFDGVDWDQSRQLQNKIYKFQGDGKEWDWEVDEENGNYDYLMYADYDMDHPEVVNELRNWGVWYTNTLGLDGFRIDAVKHIKYSFTRDWLEHVRNTTQKNMFAVAEFWKNDIGAIENYLSKTNWNHSVFDVPLHYNLYNASRSGGNYDMRQIFNGTVVQRHPTHAVTFVDNHDSQPEEALESFVEEWFKPLAYALTLTRDQGYPSVFYGDYYGIPTHGVPAMKSKIDPILEARQKYAYGKQNDYMDHHNMIGWTREGNTAHPNSGLATIMSDGPGGNKWMYVGRNKAGQVWRDITGNRSGTVTINADGWGNFSVNGGSVSIWVN

SEQ ID NO: 20792 - protein, 484 aa, Synthetic construct
HHNQTNGTMMQYFEWYLPNDGNHWNRLRSDASNLKDKGITAVWIPPAWKGASQNDVGYGAYDLYDLGEFNQKGTVRTKYGTRNQLQAAVTALKSNGIQVWGDVVMNHKGGADATEWVRAVEVNPSNRNQEVSGDTTIEAWTKFDFPGRGNTHSNFKWRWYHFDGVDWDQSRQLQNKIYKFRGDGKEWDWEVDEENGNYDYLMYADYDMDHPEVVNELRNWGVWYTNTLGLDGFRIDAVKHIKYSFTRDWLEHVRNTTQKNMFAVAEFWKNDIGAIENYLSKTNWNHSVFDVPLHYNLYNASRSGGNYDMRQIFNGTVVQRHPTHAVTFVDNHDSQPEEALESFVEEWFKPLAYALTLTRDQGHPSVFYGDYYGIPTHGVPAMKSKIDPILEARQKYAYGKQNDYMDHHNMIGWTREGNTAHPNSGLATIMSDGPGGNKWMYVGRNKAGQVWRDITGNRSGTVTINADGWGNFSVNGGSVSIWVN

SEQ ID NO: 20793 - protein, 484 aa, Synthetic construct
HHNQTNGTMMQYFEWYLPNDGNHWNRLRSDASNLKDKGITAVWIPPAWKGASQNDVGYGAYDLYDLGEFNQKGTVRTKYGTRNQLQAAVTALKSNGIQVWGDVVMNHKGGADATEWVRAVEVNPSNRNQEVSGDTTIEAWTKFDFPGRGNTHSNFKWRWYHFDGVDWDQSRQLQNKIYKFQGDGKEWDWEVDEENGNYDYLMYADYDMDHPEVVNELRNWGVWYTNTLGLDGFRIDAVKHIKYSFTRDWLEHVRNTTGKNMFAVAEFWKNDIGAIENYLSKTNWNHSVFDVPLHYNLYNASRSGGNYDMRQIFNGTVVQRHPTHAVTFVDNHDSQPEEALESFVEEWFKPLAYALTLTRDQGHPSVFYGDYYGIPTHGVPAMKSKIDPILEARQKYAYGKQNDYMDHHNMIGWTREGNTAHPNSGLATIMSDGPGGNKWMYVGRNKAGQVWRDITGNRSGTVTINADGWGNFSVNGGSVSIWVN

SEQ ID NO: 20794 - protein, 484 aa, Synthetic construct
HHNQTNGTMMQYFEWYLPNDGNHWNRLRSDASNLKDKGITAVWIPPAWKGASQNDVGYGAYDLYDLGEFNQKGTVRTKYGTRNQLQAAVTALKSNGIQVWGDVVMNHKGGADATEWVRAVEVNPSNRNQEVSGDTTIEAWTKFDFPGRGNTHSNFKWRWYHFDGVDWDQSRQLQNKIYKFQGDGKEWDWEVDEENGNYDYLMYADYDMDHPEVVNELRNWGVWYTNTLGLDGFRIDAVKHIKYSFTRDWLEHVRNTTGKNMFAVAEFWKNDIGAIENYLSKTNWNHSVFDVPLHYNLYNASRSGGNYDMRQIFNGTVVQRHPTHAVTFVDNHDSQPEEALESFVEEWFKPLAYALTLTRDQGEPSVFYGDYYGIPTHGVPAMKSKIDPILEARQKYAYGKQNDYMDHHNMIGWTREGNTAHPNSGLATIMSDGPGGNKWMYVGRNKAGQVWRDITGNRSGTVTINADGWGNFSVNGGSVSIWVN

SEQ ID NO: 20795 - protein, 484 aa, Synthetic construct
HHNQTNGTMMQYFEWYLPNDGNHWNRLRSDASNLKDKGITAVWIPPAWKGASQNDVGYGAYDLYDLGEFNQKGTVRTKYGTRNQLQAAVTALKSNGIQVWGDVVMNHKGGADATEWVRAVEVNPSNRNQEVSGDYTIEAWTKFDFPGRGNTHSNFKWRWYHFDGVDWDQSRQLQNKIYKFQGDGKEWDWEVDEENGNYDYLMYADYDMDHPEVVNELRNWGVWYTNTLGLDGFRIDAVKHIKYSFTRDWLEHVRNTTQKNMFAVAEFWKNDIGAIENYLSKTNWNHSVFDVPLHYNLYNASRSGGNYDMRQIFNGTVVQRHPTHAVTFVDNHDSQPEEALESFVEEWFKPLAYALTLTRDQGHPSVFYGDYYGIPTHGVPAMKSKIDPILEARQKYAYGKQNDYMDHHNMIGWTREGNTAHPNSGLATIMSDGPGGNKWMYVGRNKAGQVWRDITGNRSGTVTINADGWGNFSVNGGSVSIWVN

SEQ ID NO: 20796 - protein, 484 aa, Synthetic construct
HHNQTNGTMMQYFEWYLPNDGNHWNRLRSDASNLKDKGITAVWIPPAWKGASQNDVGYGAYDLYDLGEFNQKGTVRTKYGTRNQLQAAVTALKSNGIQVWGDVVMNHKGGADATEWVRAVEVNPSNRNQEVSGDYTIEAWTKFDFPGRGNTHSNFKWRWYHFDGVDWDQSRQLQNKIYKFQGDGKEWDWEVDEENGNYDYLMYADYDMDHPEVVNELRNWGVWYTNTLGLDGFRIDAVKHIKYSFTRDWLEHVRNTTGKNMFAVAEFWKNDIGAIENYLSNTNWNHSVFDVPLHYNLYNASRSGGNYDMRQIFNGTVVQRHPTHAVTFVDNHDSQPEEALESFVEEWFKPLAYALTLTRDQGHPSVFYGDYYGIPTHGVPAMKSKIDPILEARQKYAYGKQNDYMDHHNMIGWTREGNTAHPNSGLATIMSDGPGGNKWMYVGRNKAGQVWRDITGNRSGTVTINADGWGNFSVNGGSVSIWVN

SEQ ID NO: 20797 - protein, 484 aa, Synthetic construct
HHNQTNGTMMQYFEWYLPNDGNHWNRLRSDASNLKDKGITAVWIPPAWKGASQNDVGYGAYDLYDLGEFNQKGTVRTKYGTRNQLQAAVTALKSNGIQVWGDVVMNHKGGADATEWVRAVEVNPSNRNQEVSGDTTIEAWTKFDFPGRGNTHSNFKWRWYHFDGVDWDQSRQLQNKIYKFRGDGKEWDWEVDEENGNYDYLMYADYDMDHPEVVNELRNWGVWYTNTLGLDGFRIDAVKHIKYSFTRDWLEHVRNTTQKNMFAVAEFWKNDIGAIENYLSNTNWNHSVFDVPLHYNLYNASRSGGNYDMRQIFNGTVVQRHPTHAVTFVDNHDSQPEEALESFVEEWFKPLAYALTLTRDQGYPSVFYGDYYGIPTHGVPAMKSKIDPILEARQKYAYGKQNDYMDHHNMIGWTREGNTAHPNSGLATIMSDGPGGNKWMYVGRNKAGQVWRDITGNRSGTVTINADGWGNFSVNGGSVSIWVN

SEQ ID NO: 20798 - protein, 484 aa, Synthetic construct
HHNQTNGTMMQYFEWYLPNDGNHWNRLRSDASNLKDKGITAVWIPPAWKGASQNDVGYGAYDLYDLGEFNQKGTVRTKYGTRNQLQAAVTALKSNGIQVYGDVVMNHKGGADATEWVRAVEVNPSNRNQEVSGDTTIEAWTKFDFPGRGNTHSNFKWRWYHFDGVDWDQSRQLQNKIYKFQGDGKEWDWEVDEENGNYDYLMYADYDMDHPEVVNELRNWGVWYTNTLGLDGFRIDAVKHIKYSFTRDWLEHVRNTTQKNMFAVAEFWKNDIGAIENYLSKTNWNHSVFDVPLHYNLYNASRSGGNYDMRQIFNGTVVQRHPTHAVTFVDNHDSQPEEALESFVEEWFKPLAYALTLTRDQGHPSVFYGDYYGIPTHGVPAMKSKIDPILEARQKYAYGKQNDYMDHHNMIGWTREGNTAHPNSGLATIMSDGPGGNKWMYVGRNKAGQVWRDITGNRSGTVTINADGWGNFSVNGGSVSIWVN

SEQ ID NO: 20799 - protein, 484 aa, Synthetic construct
HHNQTNGTMMQYFEWYLPNDGNHWNRLRSDASNLKDKGITAVWIPPAWKGASQNDVGYGAYDLYDLGEFNQKGTVRTKYGTRNQLQAAVTALKSNGIQVWGDVVMNHKGGADATEWVRAVEVNPSNRNQEVSGDYTIEAWTKFDFPGRGNTHSNFKWRWYHFDGVDWDQSRQLQNKIYKFRGDGKEWDWEVDEENGNYDYLMYADYDMDHPEVVNELRNWGVWYTNTLGLDGFRIDAVKHIKYSFTRDWLEHVRNTTQKNMFAVAEFWKNDIGAIENYLSNTNWNHSVFDVPLHYNLYNASRSGGNYDMRQIFNGTVVQRHPTHAVTFVDNHDSQPEEALESFVEEWFKPLAYALTLTRDQGHPSVFYGDYYGIPTHGVPAMKSKIDPILEARQKYAYGKQNDYMDHHNMIGWTREGNTAHPNSGLATIMSDGPGGNKWMYVGRNKAGQVWRDITGNRSGTVTINADGWGNFSVNGGSVSIWVN

SEQ ID NO: 20800 - protein, 484 aa, Synthetic construct
HHNQTNGTMMQYFEWYLPNDGNHWNRLRSDASNLKDKGITAVWIPPAWKGASQNDVGYGAYDLYDLGEFNQKGTVRTKYGTRNQLQAAVTALKSNGIQVYGDVVMNHKGGADATEWVRAVEVNPSNRNQEVSGDTTIEAWTKFDFPGRGNTHSNFKWRWYHFDGVDWDQSRQLQNKIYKFRGDGKEWDWEVDEENGNYDYLMYADYDMDHPEVVNELRNWGVWYTNTLGLDGFRIDAVKHIKYSFTRDWLEHVRNTTQKNMFAVAEFWKNDIGAIENYLSNTNWNHSVFDVPLHYNLYNASRSGGNYDMRQIFNGTVVQRHPTHAVTFVDNHDSQPEEALESFVEEWFKPLAYALTLTRDQGEPSVFYGDYYGIPTHGVPAMKSKIDPILEARQKYAYGKQNDYMDHHNMIGWTREGNTAHPNSGLATIMSDGPGGNKWMYVGRNKAGQVWRDITGNRSGTVTINADGWGNFSVNGGSVSIWVN

SEQ ID NO: 20801 - protein, 484 aa, Synthetic construct
HHNGTNGTMMQYFEWYLPNDGNHWHRLRSDASNLKDKGITAVWIPPAWKGASQNDVGYGAYDLYDLGEFNQKGTVRTKYGTRNQLQAAVTALKSNGIQVWGDVVMNHKGGADATEWVRAVEVNPSNRNQEVSGDTTIEAWTKFDFPGRGNTHSNFKWRWYHFDGVDWDQSRQLQNKIYKFQGDGKEWDWEVDTENGNYDYLMYADYDMDHPEVVNELRNWGVWYTNTLGLDGFRIDAVKHIKYSFTRDWLTHVRNTTQKNMFAVAEFWKNDIGAIENYLSNTNWNHSVFDVPLHYNLYNASRSGGNYDMRQIFNGTVVQRHPTHAVTFVDNHDSQPEEALESFVEEWFKPLAYALTLTRDQGEPSVFYGDYYGIPTHGVPAMKSKIDPILEARQKYAYGKQNDYLDHHNMIGWTREGNTAHPNSGLATIMSDGPGGNKWMYVGRNKAGQVWRDITGNRSGTVTINADGWGNFSVNGGSVSIWVN

SEQ ID NO: 20802 - protein, 484 aa, Synthetic construct
HHNQTNGTMMQYFEWYLPNDGNHWNRLRSDASNLKDKGITAVWIPPAWKGASQNDVGYGAYDLYDLGEFNQKGTVRTKYGTRNQLQAAVTALKSNGIQVWGDVVMNHKGGADATEWVRAVEVNPSNRNQEVSGDTTIEAWTKFDFPGRGNTHSNFKWRWYHFDGVDWDQSRQLQNKIYKFQGDGKEWDWEVDEENGNYDYLMYADYDMDHPEVVNELRNWGVWYTNTLGLDGFRIDAVKHIKYSFTRDWLEHVRNTTGKNMFAVAEFWKNDIGAIENYLSNTNWNHSVFDVPLHYNLYNASRSGGNYDMRQIFNGTVVQRHPTHAVTFVDNHDSQPEEALESFVEEWFKPLAYALTLTRDQGYPSVFYGDYYGIPTHGVPAMKSKIDPILEARQKYAYGKQNDYMDHHNMIGWTREGNTAHPNSGLATIMSDGPGGNKWMYVGRNKAGQVWRDITGNRSGTVTINADGWGNFSVNGGSVSIWVN

SEQ ID NO: 20803 - protein, 484 aa, Synthetic construct
HHNQTNGTMMQYFEWYLPNDGNHWNRLRSDASNLKDKGITAVWIPPAWKGASQNDVGYGAYDLYDLGEFNQKGTVRTKYGTRNQLQAAVTALKSNGIQVWGDVVMNHKGGADATEWVRAVEVNPSNRNQEVSGDYTIEAWTKFDFPGRGNTHSNFKWRWYHFDGVDWDQSRQLQNKIYKFQGDGKEWDWEVDEENGNYDYLMYADYDMDHPEVVNELRNWGVWYTNTLGLDGFRIDAVKHIKYSFTRDWLEHVRNTTQKNMFAVAEFWKNDIGAIENYLSKTNWNHSVFDVPLHYNLYNASRSGGNYDMRQIFNGTVVQRHPTHAVTFVDNHDSQPEEALESFVEEWFKPLAYALTLTRDQGEPSVFYGDYYGIPTHGVPAMKSKIDPILEARQKYAYGKQNDYMDHHNMIGWTREGNTAHPNSGLATIMSDGPGGNKWMYVGRNKAGQVWRDITGNRSGTVTINADGWGNFSVNGGSVSIWVN

SEQ ID NO: 20804 - protein, 484 aa, Synthetic construct
HHNQTNGTMMQYFEWYLPNDGNHWNRLRSDASNLKDKGITAVWIPPAWKGASQNDVGYGAYDLYDLGEFNQKGTVRTKYGTRNQLQAAVTALKSNGIQVWGDVVMNHKGGADATEWVRAVEVNPSNRNQEVSGDYTIEAWTKFDFPGRGNTHSNFKWRWYHFDGVDWDQSRQLQNKIYKFQGDGKEWDWEVDEENGNYDYLMYADYDMDHPEVVNELRNWGVWYTNTLGLDGFRIDAVKHIKYSFTRDWLEHVQNTTGKNMFAVAEFWKNDIGAIENYLSKTNWNHSVFDVPLHYNLYNASRSGGNYDMRQIFNGTVVQRHPTHAVTFVDNHDSQPEEALESFVEEWFKPLAYALTLTRDQGHPSVFYGDYYGIPTHGVPAMKSKIDPILEARQKYAYGKQNDYMDHHNMIGWTREGNTAHPNSGLATIMSDGPGGNKWMYVGRNKAGQVWRDITGNRSGTVTINADGWGNFSVNGGSVSIWVN

SEQ ID NO: 20805 - protein, 484 aa, Synthetic construct
HHNGTNGTMMQYFEWYLPNDGNHWHRLRSDASNLKDKGITAVWIPPAWKGASQNDVGYGAYDLYDLGEFNQKGTVRTKYGTRNQLQAAVTALKSNGIQVWGDVVMNHKGGADATEWVRAVEVNPSNRNQEVSGDTTIEAWTKFDFPGRGNTHSNFKWRWYHFDGVDWDQSRQLQNKIYKFQGDGKEWDWEVDEENGNYDYLMYADYDMDHPEVVNELRNWGVWYTNTLGLDGFRIDAVKHIKYSFTRDWLTHVRNTTQKNMFAVAEFWKNDIGAIENYLSKTNWNHSVFDVPLHYNLYNASRSGGNYDMRQIFNGTVVQRHPTHAVTFVDNHDSQPEEALESFVEEWFKPLAYALTLTRDQGEPSVFYGDYYGIPTHGVPAMKSKIDPILEARQKYAYGKQNDYLDHHNMIGWTREGNTAHPNSGLATIMSDGPGGNKWMYVGRNKAGQVWRDITGNRSGTVTINADGWGNFSVNGGSVSIWVN

SEQ ID NO: 20806 - protein, 484 aa, Synthetic construct
HHNQTNGTMMQYFEWYLPNDGNHWNRLRSDASNLKDKGITAVWIPPAWKGASQNDVGYGAYDLYDLGEFNQKGTVRTKYGTRNQLQAAVTALKSNGIQVWGDVVMNHKGGADATEWVRAVEVNPSNRNQEVSGDTTIEAWTKFDFPGRGNTHSNFKWRWYHFDGVDWDQSRQLQNKIYKFRGDGKEWDWEVDEENGNYDYLMYADYDMDHPEVVNELRNWGVWYTNTLGLDGFRIDAVKHIKYSFTRDWLEHVRNTTQKNMFAVAEFWKNDIGAIENYLSKTNWNHSVFDVPLHYNLYNASRSGGNYDMRQIFNGTVVQRHPTHAVTFVDNHDSQPEEALESFVEEWFKPLAYALTLTRDQGEPSVFYGDYYGIPTHGVPAMKSKIDPILEARQKYAYGKQNDYMDHHNMIGWTREGNTAHPNSGLATIMSDGPGGNKWMYVGRNKAGQVWRDITGNRSGTVTINADGWGNFSVNGGSVSIWVN

SEQ ID NO: 20807 - protein, 484 aa, Synthetic construct
HHNQTNGTMMQYFEWYLPNDGNHWNRLRSDASNLKDKGITAVWIPPAWKGASQNDVGYGAYDLYDLGEFNQKGTVRTKYGTRNQLQAAVTALKSNGIQVYGDVVMNHKGGADATEWVRAVEVNPSNRNQEVSGDTTIEAWTKFDFPGRGNTHSNFKWRWYHFDGVDWDQSRQLQNKIYKFQGDGKEWDWEVDEENGNYDYLMYADYDMDHPEVVNELRNWGVWYTNTLGLDGFRIDAVKHIKYSFTRDWLEHVRNTTQKNMFAVAEFWKNDIGAIENYLSNTNWNHSVFDVPLHYNLYNASRSGGNYDMRQIFNGTVVQRHPTHAVTFVDNHDSQPEEALESFVEEWFKPLAYALTLTRDQGYPSVFYGDYYGIPTHGVPAMKSKIDPILEARQKYAYGKQNDYMDHHNMIGWTREGNTAHPNSGLATIMSDGPGGNKWMYVGRNKAGQVWRDITGNRSGTVTINADGWGNFSVNGGSVSIWVN

SEQ ID NO: 20808 - protein, 482 aa, Synthetic construct
AAAPFNGTMMQYFEWYLPDDGTLWTKVANEANNLSSLGITALWLPPAYKGTSRSDVGYGVYDLYDLGEFNQKGAVRTKYGTKAQYLQAIQAAHAAGMQVYADVVFNHKGGADATEDVTAVEVDPADRNRVISGEHLIKAWTHFHFPGRGSTYSDFKWHWYHFDGTDWDESRKLNRIYKFQGKAWDWEVSNEFGNYDYLMYADIDMDHPEVVTELKNWGKWYVNTTNIDGFRLDAVKHIKFSFFPDWLSYVRSQTGKPLFTVGEYWSYDINKLHNYIMKTNGTMSLFDAPLHNKFYTASKSGGTFDMRTLMTNTLMKDQPTLAVTFVDNHDTEPGQALQSWVDPWFKPLAYAFILTRQEGYPCVFYGDYYGIPQYNIPSLKSKIDPLLIARRDYAYGTQHDYLDHSDIIGWTREGVTEKPGSGLAALITDGPGGSKWMYVGKQHAGKVFYDLTGNRSDTVTINSDGWGEFKVNGGSVSVWVPR

SEQ ID NO: 20809 - protein, 485 aa, Synthetic construct
AAAPFNGTMMQYFEWYLPDDGTLWTKVANEANNLSSLGITALWLPPAYKGTSRSDVGYGVYDLYDLGEFNQKGAVRTKYGTKAQYLQAIQAAHAAGMQVYADVVFNHKGGADATEMVRAVEVNPNNRNQEVTGEYTIEAWTRFDFPGRGNTHSSFKWRWYHFDGVDWDQSRRLNNRIYKFRGHGKAWDWEVDTENGNYDYLMYADIDMDHPEVVTELKNWGKWYVNTTNIDGFRLDAVKHIKFSFFPDWLSYVRSQTGKPLFTVGEYWSYDINKLHNYIMKTNGTMSLFDAPLHNKFYTASKSGGTFDMRTLMTNTLMKDQPTLAVTFVDNHDTEPGQALQSWVDPWFKPLAYAFILTRQEGYPCVFYGDYYGIPQYNIPSLKSKIDPLLIARRDYAYGTQHDYLDHSDIIGWTREGVTEKPGSGLAALITDGPGGSKWMYVGKQHAGKVFYDLTGNRSDTVTINSDGWGEFKVNGGSVSVWVPR

SEQ ID NO: 20810 - protein, 485 aa, Synthetic construct
AAAPFNGTMMQYFEWYLPDDGTLWTKVANEANNLSSLGITALWLPPAYKGTSRSDVGYGVYDLYDLGEFNQKGAVRTKYGTKAQYLQAIQAAHAAGMQVYADVVFNHKGGADFTERVQAVEVNPQNRNQEVSGTYQIEAWTGFNFPGRGNQHSSFKWRWYHFDGTDWDQSRQLANRIYKFRGDGKAWDWEVDTENGNYDYLMYADVDMDHPEVVTELKNWGKWYVNTTNIDGFRLDAVKHIKFSFFPDWLSYVRSQTGKPLFTVGEYWSYDINKLHNYIMKTNGTMSLFDAPLHNKFYTASKSGGTFDMRTLMTNTLMKDQPTLAVTFVDNHDTEPGQALQSWVDPWFKPLAYAFILTRQEGYPCVFYGDYYGIPQYNIPSLKSKIDPLLIARRDYAYGTQHDYLDHSDIIGWTREGVTEKPGSGLAALITDGPGGSKWMYVGKQHAGKVFYDLTGNRSDTVTINSDGWGEFKVNGGSVSVWVPR

SEQ ID NO: 20811 - protein, 496 aa, Geobacillus stearothermophilus
AAPFNGTLMQYFEWYLPDDGTLWTKLANDANNLSSIGITALWIPPAYKGTSRSDVGYGVYDLYDLGEFNQKGTVRTKYGTKAQYLQAIQAAHAAGMQVYADVVFDHKAGADATEWVDAVEVNPADRNQEISGTYQIQAWTKFDFPGRGNTYSSFKWRWYHFDGVDWDESRKISRIFKFRGIGKAWDWEVDSENGNYDYLMYADLDMDHPDVVTELKNWGKWYVNTTNIDGFRIDAVKHIKFSFFPDWLSYVRSQTGKPLFTVAEYWSYDINKLHNYITKTNGTMSLFDAPLHNKFYTASKSGGAFDMRTLLTNTLMKDQPTLAVTFVDNHDTEPGQALQSWVDPWFKPLAYAFILTRQEGYPCVFYGDYYGIPQYNPKEIPSLKSKIDPILIARKDYAYGTQHDYIDHSDIIGWTREGVSEKPGSGLAALITDGPGGSKWMYVGKQHAGKVFYDITGNRSDTVTINSDGWGEFKVNGGSVSIWVPKKTTVSTIARP

SEQ ID NO: 20812 - protein, 486 aa, Unidentified
AAPFNGTMMQYFEWYLPDDGTLWTKVANEANNLSSLGITALWLPPAYKGTSRSDVGYGVYDLYDLGEFNQKGTVRTKYGTKAQYLQAIQAAHAAGMQVYADVVFDHKAGADETEVFKVIEVDPNDRTKEISEPFEIEGWTKFTFPGRGDTYSSFKWNSEHFNGVDWDEKGKRTGVFRIAGKAWNWEVDTEFGNYDYLMFANIDYNHPDVVTELKNWGKWYVNTTNIDGFRLDAVKHIKFSFFPDWLSYVRSQTGKPLFTVGEYWSYDINKLHNYITKTDGTMSLFDAPLHNKFYTASKSGGAFDMRTLMTNTLMKDQPTLAVTFVDNHDTEPGQALQSWVDPWFKPLAYAFILTRQEGYPCVFYGDYYGIPQYNIPSLKSKIDPLLIARRDYAYGTQHDYLDHSDIIGWTREGGTEKPGSGLAALITDGPGGSKWMYVGKQHAGKVFYDLTGNRSDTVTINSDGWGEFKVNGGSVSVWVPRKTTVS

SEQ ID NO: 20813 - protein, 509 aa, Geobacillus stearothermophilus
LAFLLTASLFCPTGRHAKAAAPFNGTMMQYFEWYLPDDGTLWTKVANEANNLSSLGITALSLPPAYKGTSRSDVGYGVYDLYDLGEFNQKGTVRTKYGTKAQYLQAIQAAHAAGMQVYADVVFDHKGGADGTEWVDAVEVNPSDRNQEISGTYQIQAWTKFDFPGRGNTYSSFKWRWYHFDGVDWDESRKLSRIYKFIGKAWDWEVDTENGNYDYLMYADLDMDHPEVVTELKNWGKWYVNTTNIDGFRLDGLKHIKFSFFPDWLSYVRSQTGKPLFTVGEYWSYDINKLHNYITKTNGTMSLFDAPLHNKFYTASKSGGAFDMRTLMTNTLMKDQPTLAVTFVDNHDTNPAKRCSHGRPWFKPLAYAFILTRQEGYPCVFYGDYYGIPQYNIPSLKSKIDPLLIARRDYAYGTQHDYLDHSDIIGWTREGVTEKPGSGLAALITDGAGRSKWMYVGKQHAGKVFYDLTGNRSDTVTINSDGWGEFKVNGGSVSVWVPRKTTVSTIARP

SEQ ID NO: 20814 - protein, 511 aa, Bacillus licheniformis
LAFLLTASLFCPTGRHAKAAAPFNGTMMQYFEWYLPDDGTLWTKVANEANNLSSLGITALSLPPAYKGTSRSDVGYGVYDLYDLGEFNQKGTVRTKYGTKAQYLQAIQAAHAAGMQVYADVVFDHKGGADGTEWVDAVEVNPSDRNQEISGTYQIQAWTKFDFPGRGNTYSSFKWRWYHFDGVDWDESRKLSRIYKFRGIGKAWDWEVDTENGNYDYLMYADLDMDHPEVVTELKNWGKWYVNTTNIDGFRLDGLKHIKFSFFPDWLSYVRSQTGKPLFTVGEYWSYDINKLHNYITKTNGTMSLFDAPLHNKFYTASKSGGAFDMRTLMTNTLMKDQPTLAVTFVDNHDTNPAKRCSHGRPWFKPLAYAFILTRQEGYPCVFYGDYYGIPQYNIPSLKSKIDPLLIARRDYAYGTQHDYLDHSDIIGWTREGVTEKPGSGLAALITDGAGRSKWMYVGKQHAGKVFYDLTGNRSDTVTINSDGWGEFKVNGGSVSVWVPRKTTVSTIARP

SEQ ID NO: 20815 - protein, 483 aa, unidentified
HHNGTNGTMMQYFEWHLPNDGNHWNRLRDDASNLRNRGITAIWIPPAWKGTSQNDVGYGAYDLYDLGEFNQKGTVRTKYGTRSQLESAIHALKNNGVQVYGDVVMNHKGGADATENVLAVEVNPNNRNQEISGDYTIEAYTKFDFPGRGNTYSDFKWRWYHFDGVDWDQSRQFQNRIYKFRGKAWDWEVDSEFGNYDYLMYADYDMDHPEVVNELRRWGEWYTNTLNLDGFRIDAVKHIKFSFTRDWLTHVRNATGKGMFAVAEFWKNDLGALENYLNKTNWNHSVFDVPLHYNLYNASNSRGNYDMAKLLNGTVVQKHPMHAVTFVDNHDSQPGESLESFVQEWFKPLAYALILTREQGYPSVFYGDYYGIPTHSVPAMKAKIDPILEARQNFAYGPQHDYLDHPDVIGWTREGDSSHPKSGLATLITDGPGGSKRMYAGLKNAGETWYDITGNRSDTVKIGSDGWGEFHVNDGSVSIYVQK

SEQ ID NO: 20816 - protein, 483 aa, Bacillus sp.
HHNGTNGTMMQYFEWHLPNDGNHWNRLRDDASNLRNRGITAIWIPPAWKGTSQNDVGYGAYDLYDLGEFNQKGTVRTKYGTRSQLESAIHALKNNGVQVYGDVVMNHKGGADATENVLAVEVNPNNRNQEISGDYTIEAWTKFDFPGRGNTYSDFKWRWYHFDGVDWDQSRQFQNRIYKFRGKAWDWEVDSEFGNYDYLMYADYDMDHPEVVNELRRWGEWYTNTLNLDGFRIDAVKHIKFSFTRDWLTHVRNATGKGMPAVAEFWKNDLGALENYLNKTNWNHSVFDVPLHYNLYNASNGGGNYDMAKLLNGTVVQKHPMHAVTFVDNHDSQPNESLESFVQEWFKPLAYALILTREQGYPSVFYGDYYGIPTHSVPAMKAKIDPILEARQNFAYGPQHDYLDHPDVIGWTREGDSSHPKSGLATLITDGPGGSKRMYAGLKNAGETWYDITGNRSDTVKIGSDGWGEFHVNDGSVSIYVQK

SEQ ID NO: 20817 - protein, 485 aa, Bacillus sp.
HHNGTNGTMMQYFEWHLPNDGNHWNRLRDDASNLRNRGITAIWIPPAWKGTSQNDVGYGAYDLYDLGEFNQKGTVRTKYGTRSQLESAIHALKNNGVQVYGDVVMNHKGGADATENVLAVEVNPNNRNQEISGDYTIEAWTKFDFPGRGNTYSDFKWRWYHFDGVDWDQSRQFQNRIYKFRGDGKAWDWEVDSEFGNYDYLMYADYDMDHPEVVNELRRWGEWYTNTLNLDGFRIDAVKHIKFSFTRDWLTHVRNATGKGMPAVAEFWKNDLGALENYLNKTNWNHSVFDVPLHYNLYNASNGGGNYDMAKLLNGTVVQKHPMHAVTFVDNHDSQPNESLESFVQEWFKPLAYALILTREQGYPSVFYGDYYGIPTHSVPAMKAKIDPILEARQNFAYGPQHDYLDHPDVIGWTREGDSSHPKSGLATLITDGPGGSKRMYAGLKNAGETWYDITGNRSDTVKIGSDGWGEFHVNDGSVSIYVQK

SEQ ID NO: 20818 - protein, 484 aa, Synthetic construct
AAAPFNGTMMQYFEWYLPDDGTLWTKVANEANNLSSLGITALWLPPAYKGTSRSDVGYGVYDLYDLGEFNQKGAVRTKYGTKAQYLQAIQAAHAAGMQVYADVVFNHKAGADATEDVTAVEVNPANRNQETSEEYQIKAWTDFRFPGRGNTYSDFKWHWYHFDGADWDESRKISRIFKFRGEGKAWDWEVSSENGNYDYLMYADVDMDHPEVVTELKNWGKWYVNTTNIDGFRLDAVKHIKFSFFPDWLSYVRSQTGKPLFTVGEYWSYDINKLHNYIMKTNGTMSLFDAPLHNKFYTASKSGGTFDMRTLMTNTLMKDQPTLAVTFVDNHDTEPGQALQSWVDPWFKPLAYAFILTRQEGYPCVFYGDYYGIPQYNIPSLKSKIDPLLIARRDYAYGTQHDYLDHSDIIGWTREGVTEKPGSGLAALITDGPGGSKWMYVGKQHAGKVFYDLTGNRSDTVTINSDGWGEFKVNGGSVSVWVPR

SEQ ID NO: 20819 - protein, 493 aa, Bacillus sp.
AAPFNGTMMQYFEWHLPDDGTLWTKLANDANNLSSLGITAIWIPPAYKGTSRADVGYGVYDLYDLGEFNQKGTVRTKYGTKAQYLQAIQAAHAAGINVYADVVFDHKGGADGTEWVDAVEVNPSDRNQDISGTYQIQAWTKFDFPGRGNTYSSFKWRWFHFDGVDWDESRKLSRIFKFRGIGKAWDWEVDTENGNYDYLLYADIDMDHPEVVTELKNWGKWFVNTTNIDGFRLDAIKHIKFSFFPDWLSHVRSQTGKPLFTVGEYWSYDINKLHNYITKTNGTMSLFDAPLHNKFYTASKSGGAFDMRTILTNSLMKDQPTLAVTFVDNHDTEPGQALQSWVDPWFKPLAYAFILTRQEGYPCVFYGDYYGIPNYNIPALKSKIDPLLIARRDYAYGTQHDYLDHSDIIGWTREGVSEKPGSGLAAIISDGPGGSKWMYVGKQHAGKVFYDLTGNRSDSVTINSDGWGEFKVNGGSVSVWVPRKTTVSTIARP

SEQ ID NO: 20820 - protein, 486 aa, Geobacillus stearothermophilus
AAPFNGTMMQYFEWYLPDDGTLWTKVANEANNLSSLGITALWLPPAYKGTSRSDVGYGVYDLYDLGEFNQKGTVRTKYGTKAQYLQAIQAAHAAGMQVYADVVFNHKAGADETEWFKVIEVDPNDRTKEISEPYQIEGWTKFTFPGRGDQYSSFKWNSEHFNGTDFDASRELTRVYRIAGKKWNWEVDTEFGNYDYLMFANIDYNHPDVVTELKNWGKWYVNTTNIDGFRLDAVKHIKFSFFPDWLSYVRSQTGKPLFTVGEYWSYDINKLHNYITKTDGTMSLFDAPLHNKFYTASKSGGAFDMRTLMTNTLMKDQPTLAVTFVDNHDTEPGQALQSWVDPWFKPLAYAFILTRQEGYPCVFYGDYYGIPQYNIPSLKSKIDPLLIARRDYAYGTQHDYLDHSNIIGWTREGGTEKPGSGLAALITNGDGGSKWMYVGKQHAGKVFYDLTGNRSDTVTINSDGWGEFKVNGGSVSVWVPRKTTVS

SEQ ID NO: 20821 - protein, 512 aa, unidentified
LAFLLTALLFCPTGQPAKAAAPFNGTMMQYFEWYLPDDGTLWTKVANEANNLSSLGITALWLPPAYKGTSRSDVGYGVYDLYDLGEFNQKGAVRTKYGTKAQYLQAIQAAHAAGMQVYADVVFDHKGGADGTEWVDAVEVNPSDRNQEISGTYQIQAWTKFDFPGRGNTYSSFKWRWYHFDGVDWDESRKLSRIYKFRGIGKAWDWEVDTENGNYDYLMYADLDMDHPQVVTELKSWGKWYVNTTNIDGFPLDAVKHIKFSFFPDWVSDVRSQTAKPLFTVGEYGSYDINKFHNYFMKTNGTMSLFDAPLHNKFYNAPKSGGTFDMRTLMTNTLMKDQPTLAVTFVDNHDTEPAQAPQSWVVPWFKPLAYAFILTRQEGYPCVFYGDYYGIPQYNIPSLKSKIDPLLIARRDYAYGTQHDYLDHSDIIGWTREGVTEKPGSGLAALITDGPGGSKWMYVGKQHAGKVFYDLTGNRSDTVTINSDGWGEFKVNGGSVSVWVPRKTTVSTITRP

SEQ ID NO: 20822 - protein, 483 aa, Cytophaga sp.
HHNGTNGTMMQYFEWHLPNDGNHWNRLRDDASNLRNRGITAIWIPPAWKGTSQNDVGYGAYDLYDLGEFNQKGTVRTKYGTRSQLESAIHALKNNGVQVYGDVVMNHKGGADATENVLAVEVNPNNRNQEISGDYTIEAYTKFDFPGRGNTYSDFKWRWYHFDGVDWDQSRQFQNRIYKFRGKAWDWEVDSEFGNYDYLMYADYDMDHPEVVNELRRWGEWYTNTLNLDGFRIDAVKHIKFSFTRDWLTHVRNATGKGMFAVAEFWKNDLGALENYLNKTNWNHSVFDVPLHYNLYNASNSRGNYDMAKLLNGTVVQKHPMHAVTFVDNHDSQPGESLESFVQEWFKPLAYALILTREQGYPSVFYGDYYGIPTHSVPAMKAKIDPILEARQNFAYGTQRDYIDNPDVIGWTREGDSTKAKSGLATVITDGPGGSKRMYVGTSNAGEIWYDLTGNRTDKITIGSDGYATFPVNGGSVSVWVQQ

SEQ ID NO: 20823 - protein, 483 aa, Bacillus licheniformis
VNGTLMQYFEWYTPNDGQHWKRLQNDAEHLSDIGITAVWIPPAYKGLSQSDNGYGPYDLYDLGEFQQKGTVRTKYGTKSELQDAIGSLHSRNVQVYGDVVLNHKAGADATEDVTAVEVNPANRNQETSEEYQIKAWTDFRFPGRGNTYSDFKWHWYHFDGADWDESRKISRIFKFRGEGKAWDWEVSSENGNYDYLMYADVDYDHPDVVAETKKWGIWYANELSLDGFRIDAAKHIKFSFLRDWVQAVRQATGKEMFTVAEYWQNDLGALENYLNKTNFNHSVFDVPLHYQFHAASTQGGGYDMRKLLNSTVVSKHPLKAVTFVDNHDTQPGQSLESTVQTWFKPLAYAFILTRESGYPQVFYGDMYGTKGDSQREIPALKHKIEPILKARKQYAYGAQHDYFDHHDIVGWTREGDSSVANSGLAALITDGPGGAKRMYVGRQNAGETWHDITGNRSEPVVINSEGWGEFHVNGGSVSIYVQR

SEQ ID NO: 20824 - protein, 484 aa, Synthetic construct
AAAPFNGTMMQYFEWYLPDDGTLWTKVANEANNLSSLGITALWLPPAYKGTSRSDVGYGVYDLYDLGEFNQKGAVRTKYGTKAQYLQAIQAAHAAGMQVYADVVFNHKAGADYTENVTAVEVNPSNRNQETSGEYNIQAWTGFNFPGRGTTYSNFKWQWFHFDGTDWDQSRSLSRIFKFRGTGKAWDWEVSSENGNYDYLMYADIDMDHPEVVTELKNWGKWYVNTTNIDGFRLDAVKHIKFSFFPDWLSYVRSQTGKPLFTVGEYWSYDINKLHNYIMKTNGTMSLFDAPLHNKFYTASKSGGTFDMRTLMTNTLMKDQPTLAVTFVDNHDTEPGQALQSWVDPWFKPLAYAFILTRQEGYPCVFYGDYYGIPQYNIPSLKSKIDPLLIARRDYAYGTQHDYLDHSDIIGWTREGVTEKPGSGLAALITDGPGGSKWMYVGKQHAGKVFYDLTGNRSDTVTINSDGWGEFKVNGGSVSVWVPR

SEQ ID NO: 20825 - protein, 493 aa, Bacillus sp.
AAPFNGTMMQYFEWHLPDDGTLWTKLANDANNLSSLGITAIWIPPAYKGTSRADVGYGVYDLYDLGEFNQKGTVRTKYGTKAQYLQAIQAAHAAGINVYADVVFDHKGGADGTEWVDAVEVNPSDRNQDISGTYQIQAWTKFDFPGRGNTYSSFKWRWFHFDGVDWDESRKLSRIFKFRGIGKAWDWEVDTENGNYDYLLYADIDMDHPEVVTELKNWGKWFVNTTNIDGFRLDAIKHIKFSFFPDWLSHVRSQTGKPLFTVGEYWSYDINKLHNYITKTNGTMSLFDAPLHNKFYTASKSGGAFDMRTILTNSLMKDQPTLAVTFVDNHDTEPGQALQSWVDPWFKPLAYAFILTRQEGYPCVFYGDYYGIPNYNIPALKSKIDPLLIARRDYAYGTQHDYLDHSDIIGWTREGVSEKPGSGLAAIISDGPGGSKWMYVGKQHAGKVFYDLTGNRADSVTINSDGWGEFKVNGGSVSVWVPRKTTVSTIARP

SEQ ID NO: 20826 - protein, 519 aa, Bacillus sp.
AAPFNGTMMQYFEWYLPNDGQHWTRLANDANNLSSLGITALWIPPAYKGTSQSDVGYGAYDLYDLGEFNQKGTVRTKYGTKAQLLQAIQALHAAGIQVYGDVVMNHKGGADGTEWVDAVEVNPSDRNQEISGTYQIQAWTKFDFPGRGNTYSSFKWRWYHFDGVDWDESRKLNNRIYKFRGIGKAWDWEVDTENGNYDYLMYADIDMDHPEVVTELKNWGKWYVNTLNLDGFRLDAVKHIKFSFFRDWLSHVRSQTGKPLFTVGEYWSNDIGALENYLTKTNWNMSLFDVPLHYNFYTASKSGGAYDMRTLLTGTLVKDHPTLAVTFVDNHDTQPGQALESWVDPWFKPLAYAFILTREEGYPCVFYGDYYGIPQYNQREIPSLKSKIDPLLIARRDYAYGTQHDYLDHSDIIGWTREGVTSKPNSGLAALITDGPGGSKWMYVGKQHAGKVWYDLTGNRSDTVTINSDGWGEFKVNGGSVSVWVPRKTTVSTIARPITTRPWTGEFVRWTEPRLVAWP

SEQ ID NO: 20827 - protein, 486 aa, Geobacillus stearothermophilus
AAPFNGTMMQYFEWYLPDDGTLWTKVANEANNLSSLGITALWLPPAYKGTSRSDVGYGVYDLYDLGEFNQKGTVRTKYGTKAQYLQAIQAAHAAGMQVYADVVFNHKAGADETEVFKVIEVDPNDRTKEISEPYQIEGWTKFTFPGRGDQYSSFKWNSEHFNGTDFDASRELTRVYRIAGKKWNWEVDTEFGNYDYLMFANIDYNHPDVVTELKNWGKWYVNTTNIDGFRLDAVKHIKFSFFPDWLSYVRSQTGKPLFTVGEYWSYDINKLHNYITKTDGTMSLFDAPLHNKFYTASKSGGAFDMRTLMTNTLMKDQPTLAVTFVDNHDTEPGQALQSWVDPWFKPLAYAFILTRQEGYPCVFYGDYYGIPQYNIPSLKSKIDPLLIARRDYAYGTQHDYLDHSNIIGWTREGGTEKPGSGLAALITNGDGGSKWMYVGKQHAGKVFYDLTGNRSDTVTINSDGWGEFKVNGGSVSVWVPRKTTVS

SEQ ID NO: 20828 - protein, 485 aa, Synthetic construct
AAAPFNGTMMQYFEWYLPDDGTLWTKVANEANNLSSLGITALWLPPAYKGTSRSDVGYGVYDLYDLGEFNQKGAVRTKYGTKAQYLQAIQAAHAAGMQVYADVVFNHRMGADATETISAVEVNPSNRNQVTSGAYNISAWTDFEFPGRGNTYSSFKWHSYYFDGVDWDQSRQLSGKIYQIQGTGKAWDWEVDSENGNYDYLMGADIDMDHPEVVTELKNWGKWYVNTTNIDGFRLDAVKHIKFSFFPDWLSYVRSQTGKPLFTVGEYWSYDINKLHNYIMKTNGTMSLFDAPLHNKFYTASKSGGTFDMRTLMTNTLMKDQPTLAVTFVDNHDTEPGQALQSWVDPWFKPLAYAFILTRQEGYPCVFYGDYYGIPQYNIPSLKSKIDPLLIARRDYAYGTQHDYLDHSDIIGWTREGVTEKPGSGLAALITDGPGGSKWMYVGKQHAGKVFYDLTGNRSDTVTINSDGWGEFKVNGGSVSVWVPR

SEQ ID NO: 20829 - protein, 494 aa, Bacillus sp.
AAPFNGTMMQYFEWHLPDDGTLWTKLANDANNLSSLGITALWIPPAWKGTSRSDVGYGVYDLYDLGEFNQKGTVRTKYGTKAQYLQAIQAAHAAGIQVYADVVFDHKGGADGTEWVDAVEVNPSDRNQEISGTYQIQAWTKFDFPGRGNTHSSFKWRWYHFDGVDWDESRQKLSKIYKFRGIGKAWDWEVDTENGNYDYLMYADIDMDHPEVITELKNWGKWYVNTTNIDGFRIDAVKHIKFSFFPDWLSHVRSQTGKPLFTVAEFWSYDINKIHNYITKTNGTMSLFDAPLHNKFYTASKSGGAFDMRTILTNSLMKDQPTLAVTFVDNHDSEPGQALQSFVDPWFKPLAYAFILTRQEGYPCVFYGDYYGIPQHNIPSLKSKIDPLLIARRDYAYGTQHDYLDHSDIIGWTREGVSEKPGSGLAAIISDGPGGSKWMYVGKQHAGKVFYDITGNRSDTVTINADGWGEFKVNGGAVSVWVPRKTTVSTIARP

SEQ ID NO: 20830 - protein, 496 aa, Geobacillus stearothermophilus
AAPFNGTLMQYFEWYLPDDGTLWTKLANDANNLASLGITALWIPPAYKGTSRADVGYGVYDLYDLGEFNQKGTVRTKYGTKAQYLQAIQAAHAAGINVYADVVFDHKGGADATEWVDAVEVNPADRNQEISGTHQIQAWTKFDFPGRGNTYSSFKWRWYHFDGVDWDESRKLSRIYKFRGIGKAWDWEVDTENGNYDYLMYADIDMDHPDVVTEIKNWGKWYVNTTNIDGFRLDAVKHIKFSFFPDWLSHVRSQTGKPLFTVAEYWSYDINKLHNYITKTNGTMSLFDAPLHNKFHTASKSGGAFDMRTLLTNTLMKDQPTLAVTFVDNHDTEPGQALQSWVDPWFKPLAYAFILTRQEGYPCVFYGDYYGIPGDSQYNIPALKSKIDPILIARKDYAYGTQHDYLDHSDIIGWTREGVSEKPGSGLAALITDGPGGAKWMYVGKQHAGKVFHDITGNRSDTVTINSDGWGEFKVNGGSVSIWVPRKTTVSTIARP

SEQ ID NO: 20831 - protein, 486 aa, Unidentified
AAPFNGTMMQYFEWYLPDDGTLWTKVANEANNLSSLGITALWLPPAYKGTSRSDVGYGVYDLYDLGEFNQKGTVRTKYGTKAQYLQAIQAAHAAGMQVYADVVFDHKAGADETEVFKVIEVDPNDRTKEISEPFEIEGWTKFTFPGRGDTYSSFKWNSEHFNGTDWDEKGKRTGVFRIAGKAWNWEVDTEFGNYDYLMFANIDYNHPDVVTELKNWGKWYVNTTNIDGFRLDAVKHIKFSFFPDWLSYVRSQTGKPLFTVGEYWSYDINKLHNYITKTDGTMSLFDAPLHNKFYTASKSGGAFDMRTLMTNTLMKDQPTLAVTFVDNHDTEPGQALQSWVDPWFKPLAYAFILTRQEGYPCVFYGDYYGIPQYNIPSLKSKIDPLLIARRDYAYGTQHDYLDHSNIIGWTREGGTEKPGSGLAALITNGDGGSKWMYVGKQHAGKVFYDLTGNRSDTVTINSDGWGEFKVNGGSVSVWVPRKTTVS

SEQ ID NO: 20832 - protein, 486 aa, Unidentified
AAPFNGTMMQYFEWYLPDDGTLWTKVANEANNLSSLGITALWLPPAYKGTSRSDVGYGVYDLYDLGEFNQKGTVRTKYGTKAQYLQAIQAAHAAGMQVYADVVFDHKAGADETEVFKVIEVDPNDRTKEISEPFEIEGWTKFTFPGRGDQYSSFKWNSEHFNGTDFDAKGERTGVFRIAGKAWNWEVDTEFGNYDYLMFANIDYNHPDVVTELKNWGKWYVNTTNIDGFRLDAVKHIKFSFFPDWLSYVRSQTGKPLFTVGEYWSYDINKLHNYITKTDGTMSLFDAPLHNKFYTASKSGGAFDMRTLMTNTLMKDQPTLAVTFVDNHDTEPGQALQSWVDPWFKPLAYAFILTRQEGYPCVFYGDYYGIPQYNIPSLKSKIDPLLIARRDYAYGTQHDYLDHSDIIGWTREGGTEKPGSGLAALITDGPGGSKWMYVGKQHAGKVFYDLTGNRSDTVTINSDGWGEFKVNGGSVSVWVPRKTTVS

SEQ ID NO: 20833 - protein, 486 aa, Geobacillus stearothermophilus
AAPFNGTMMQYFEWYLPDDGTLWTKVANEANNLSSLGITALWLPPAYKGTSRSDVGYGVYDLYDLGEFNQKGTVRTKYGTKAQYLQAIQAAHAAGMQVYADVVFDHKAGADETEVFKVIEVDPNDRTKEISEPFEIEGWTKFTFPGRGDTYSSFKWNSEHFNGTDWDEKGKRTGVFRIAGKKWNWEVDTEFGNYDYLMFANIDYNHPDVVTELKNWGKWYVNTTNIDGFRLDAVKHIKFSFFPDWLSYVRSQTGKPLFTVGEYWSYDINKLHNYITKTDGTMSLFDAPLHNKFYTASKSGGAFDMRTLMTNTLMKDQPTLAVTFVDNHDTEPGQALQSWVDPWFKPLAYAFILTRQEGYPCVFYGDYYGIPQYNIPSLKSKIDPLLIARRDYAYGTQHDYLDHSNIIGWTREGGTEKPGSGLAALITNGDGGSKWMYVGKQHAGKVFYDLTGNRSDTVTINSDGWGEFKVNGGSVSVWVPRKTTVS

SEQ ID NO: 20834 - protein, 492 aa, Bacillus sp.
AAPFNGTMMQYFEWYLPNDGQHWTRLANDANNLSSLGITALWIPPAYKGTSQSDVGYGAYDLYDLGEFNQKGTVRTKYGTKAQLLQAIQALHAAGIQVYGDVVMNHKGGADGTEWVDAVEVNPSDRNQEISGTYQIQAWTKFDFPGRGNTYSSFKWRWYHFDGVDWDESRKLNNRIYKFRGIGKAWDWEVDTENGNYDYLMYADIDMDHPEVVTELKNWGKWYVNTLNLDGFRLDAVKHIKFSFFRDWLSHVRSQTGKPLFTVGEYWSNDIGALENYLTKTNWNMSLFDVPLHYNFYTASKSGGAYDMRTLLTGTLVKDHPTLAVTFVDNHDTQPGQALESWVDPWFKPLAYAFILTREEGYPCVFYGDYYGIPQYNQREIPSLKSKIDPLLIARRDYAYGTQHDYLDHSDIIGWTREGVTSKPNSGLAALITDGPGGSKWMYVGKQHAGKVWYDLTGNRSDTVTINSDGWGEFKVNGGSVSVWVPRKTTVS

SEQ ID NO: 20835 - protein, 494 aa, Geobacillus stearothermophilus
AAPFNGTMMQYFEWHLPDDGTLWTKLANDANNLSSLGITAIWIPPAWKGTSRSDVGYGVYDLYDLGEFNQKGTVRTKYGTKAQYLQAIQAAHAAGMQVYADVVFDHKGGADATEWVDAVEVNPSDRNQEISGTYQIQAWTKFDFPGRGNTYSSFKWRWYHFDGVDWDESRQKLSRIYKFRGIGKAWDWEVDSENGNYDYLMYADLDMDHPEVVTELKNWGKWYVNTTNIDGFRIDAVKHIKFSFFPDWLSHVRSQTGKPLFTVAEFWSYDINKLHNYITKTNGTMSLFDAPLHNKFYTASKSGGAFDMRTLLTNTLMKDQPTLAVTFVDNHDSEPGQALQSFVDPWFKPLAYAFILTRQEGYPCVFYGDYYGIPQHNIPALKAKIDPILIARRDFAYGTQHDYLDHSDIIGWTREGVTEKPGSGLAAIISDGPGGSKWMYVGKNHAGKVFHDITGNKSDTVTINADGWAEFKVNGGSVSIWVPRKTTVSTIARP

SEQ ID NO: 20836 - protein, 486 aa, Unidentified
AAPFNGTMMQYFEWYLPDDGTLWTKVANEANNLSSLGITALWLPPAYKGTSRSDVGYGVYDLYDLGEFNQKGTVRTKYGTKAQYLQAIQAAHAAGMQVYADVVFDHKAGADETEVFKVIEVDPNDRTKEISEPFEIEGWTKFTFPGRGDQYSSFKWNSEHFNGTDWDEKGKRTGVFRIAGKKWNWEVDTEFGNYDYLMFANIDYNHPDVVTELKNWGKWYVNTTNIDGFRLDAVKHIKFSFFPDWLSYVRSQTGKPLFTVGEYWSYDINKLHNYITKTDGTMSLFDAPLHNKFYTASKSGGAFDMRTLMTNTLMKDQPTLAVTFVDNHDTEPGQALQSWVDPWFKPLAYAFILTRQEGYPCVFYGDYYGIPQYNIPSLKSKIDPLLIARRDYAYGTQHDYLDHSNIIGWTREGGTEKPGSGLAALITNGDGGSKWMYVGKQHAGKVFYDLTGNRSDTVTINSDGWGEFKVNGGSVSVWVPRKTTVS

SEQ ID NO: 20837 - protein, 486 aa, Geobacillus stearothermophilus
AAPFNGTMMQYFEWYLPDDGTLWTKVANEANNLSSLGITALWLPPAYKGTSRSDVGYGVYDLYDLGEFNQKGTVRTKYGTKAQYLQAIQAAHAAGMQVYADVVFDHKAGADETEVFKVIEVDPNDRTKEISEPFEIEGWTKFTFPGRGDTYSSFKWNSEHFNGTDFDAKGERTGVFRIAGKAWNWEVDTEFGNYDYLMFANIDMNHPDVVTELKNWGKWYVNTTNIDGFRLDAVKHIKFSFFPDWLSYVRSQTGKPLFTVGEYWSYDINKLHNYITKTDGTMSLFDAPLHNKFYTASKSGGAFDMRTLMTNTLMKDQPTLAVTFVDNHDTEPGQALQSWVDPWFKPLAYAFILTRQEGYPCVFYGDYYGIPQYNIPSLKSKIDPLLIARRDYAYGTQHDYLDHSNIIGWTREGGTEKPGSGLAALITNGDGGSKWMYVGKQHAGKVFYDLTGNRSDTVTINSDGWGEFKVNGGSVSVWVPRKTTVS

SEQ ID NO: 20838 - protein, 486 aa, Geobacillus stearothermophilus
AAPFNGTMMQYFEWYLPDDGTLWTKVANEANNLSSLGITALWLPPAYKGTSRSDVGYGVYDLYDLGEFNQKGTVRTKYGTKAQYLQAIQAAHAAGMQVYADVVFDHKAGADETEVFKVIEVDPNDRTKEISEPFEIEGWTKFTFPGRGDQYSSFKWNSEHFNGVDWDEKGKRTGVFRIAGKKWNWEVDTEFGNYDYLMFANIDYNHPDVVTELKNWGKWYVNTTNIDGFRLDAVKHIKFSFFPDWLSYVRSQTGKPLFTVGEYWSYDINKLHNYITKTDGTMSLFDAPLHNKFYTASKSGGAFDLRTLMTNTLMKDQPTLAVTFVDNHDTEPGQALQSWVDPWFKPLAYAFILTRQEGYPCVFYGDYYGIPQYNIPSLKSKIDPLLIARRDYAYGTQHDYLDHSNIIGWTREGGTEKPGSGLAALITNGDGGSKWMYVGKQHAGKVFYDLTGNRSDTVTINSDGWGEFKVNGGSVSVWVPRKTTVS

SEQ ID NO: 20839 - protein, 494 aa, Bacillus sp.
AAPFNGTMMQYFEWYLPDDGTLWTKLANDANNLSSLGITALWIPPAWKGTSRSDVGYGVYDLYDLGEFNQKGTVRTKYGTKAQYLQAIQAAHAAGIQVYADVVFDHKGGADATEWVDAVEVNPSDRNQEISGTYQIQAWTKFDFPGRGNTHSSFKWRWYHFDGVDWDESRKLSNRIYKFRGIGKAWDWEVDTENGNYDYLMYADIDMDHPEVVTELKNWGKWYVNTTNIDGFRIDAVKHIKFSFFPDWISHVRSQTGKPLFTVAEFWSYDINKIHNYITKTNGTMSLFDAPLHNKFYTASKSGGAFDMRTIMTNTLMKDQPSLAVTFVDNHDSEPGQALQSFVDPWFKPLAYAFILTRQEGYPCVFYGDYYGIPQHNIPALKSKIDPILIARRDYAYGTQHDYLDHSDIIGWTREGVTEKPGSGLAAIISDGPGGSKWMFVGKNHAGKVFYDITGNRSDTVTINADGWGEFKVNGGSVSIWVPKKTTVSTIARP

SEQ ID NO: 20840 - protein, 486 aa, Geobacillus stearothermophilus
AAPFNGTMMQYFEWYLPDDGTLWTKVANEANNLSSLGITALWLPPAYKGTSRSDVGYGVYDLYDLGEFNQKGTVRTKYGTKAQYLQAIQAAHAAGMQVYADVVFDHKAGADETEVFKVIEVDPNDRTKEISEPFEIEGWTKFTFPGRGDQYSSFKWNSEHFNGTDFDAKGERTGVFRIAGKAWNWEVDTEFGNYDYLMFANIDYNHPDVVTELKNWGKWYVNTTNIDGFRLDAVKHIKFSFFPDWLSYVRSQTGKPLFTVGEYWSYDINKLHNYITKTDGTMSLFDAPLHNKFYTASKSGGAFDMRTLMTNTLMKDQPTLAVTFVDNHDTEPGQALQSWVDPWFKPLAYAFILTRQEGYPCVFYGDYYGIPQYNIPSLKSKIDPLLIARRDYAYGTQHDYLDHSNIIGWTREGGTEKPGSGLAALITNGPGGSKWMYVGKQHAGKVFYDLTGNRSDTVTINSDGWGEFKVNGGSVSVWVPRKTTVS

SEQ ID NO: 20841 - protein, 486 aa, Geobacillus stearothermophilus
AAPFNGTMMQYFEWYLPDDGTLWTKVANEANNLSSLGITALWLPPAYKGTSRSDVGYGVYDLYDLGEFNQKGTVRTKYGTKAQYLQAIQAAHAAGMQVYADVVFDHKAGADETEVFKVIEVDPNDRTKEISEPFEIEGWTKFTFPGRGDTYSSFKWNSEHFNGTDFDAKGERTGVFRIAGKAWNWEVDTEFGNYDYLMFANIDYNHPDVVTELKNWGKWYVNTTNIDGFRLDAVKHIKFSFFPDWLSYVRSQTGKPLFTVGEYWSYDINKLHNYITKTDGTMSLFDAPLHNKFYTASKSGGAFDMRTLMTNTLMKDQPTLAVTFVDNHDTEPGQALQSWVDPWFKPLAYAFILTRQEGYPCVFYGDYYGIPQYNIPSLKSKIDPLLIARRDYAYGTQHDYLDHSNIIGWTREGGTEKPGSGLAALITNGDGGSKWMYVGKQHAGKVFYDLTGNRSDTVTINSDGWGEFKVNGGSVSVWVPRKTTVS

SEQ ID NO: 20842 - protein, 486 aa, Unidentified
AAPFNGTMMQYFEWYLPDDGTLWTKVANEANNLSSLGITALWLPPAYKGTSRSDVGYGVYDLYDLGEFNQKGTVRTKYGTKAQYLQAIQAAHAAGMQVYADVVFDHKAGADETEVFKVIEVDPNDRTKEISEPFEIEGWTKFTFPGRGDTYSSFKWNSEHFNGVDFDAKGERTGVFRIAGKAWNWEVDTEFGNYDYLMFANIDYNHPDVVTELKNWGKWYVNTTNIDGFRLDAVKHIKFQFFPDWLSYVRSQTGKPLFTVGEYWSYDINKLHNYITKTDGTTSLFDAPLHNKFYTASKSGGAFDMRTLMTNTLMKDQPTLAVTFVDNHDTEPGQALQSWVDPWFKPLAYAFILTRQEGYPCVFYGDYYGIPQYNIPSLKSKIDPLLIARRDYAYGTQHDYLDHSDIIGWTREGGTEKPGSGLAALITNGDGGSKWMYVGKQHAGKVFYDLTGNRSDTVTINSDGWGEFKVNGGSVSVWVPRKTTVS

SEQ ID NO: 20843 - protein, 486 aa, Unidentified
AAPFNGTMMQYFEWYLPDDGTLWTKVANEANNLSSLGITALWLPPAYKGTSRSDVGYGVYDLYDLGEFNQKGTVRTKYGTKAQYLQAIQAAHAAGMQVYADVVFDHKAGADETEVFKVIEVDPNDRTKEISEPFNIEGWTKFTFPGRGDQYSSFKWNSEHFNGTDFDAKGERTGVFRINGKAWNWEVDTEFGNYDYLMFANIDYNHPDVVTELKNWGKWYVNTTNIDGFRLDAVKHIKFSFFPDWLSYVRSQTGKPLFTVGEYWSYDINKLHNYITKTDGTMSLFDAPLHNKFYTASKSGGAFDMRTLMTNTLMKDQPTLAVTFVDNHDTEPGQALQSWVDPWFKPLAYAFILTRQEGYPCVFYGDYYGIPQYNIPSLKSKIDPLLIARRDYAYGTQHDYLDHSNIIGWTREGGTEKPGSGLAALITNGDGGSKWMYVGKQHAGKVFYDLTGNRSDTVTINSDGWGEFKVNGGSVSVWVPRKTTVS

SEQ ID NO: 20844 - protein, 486 aa, Geobacillus stearothermophilus
AAPFNGTMMQYFEWYLPDDGTLWTKVANEANNLSSLGITALWLPPAYKGTSRSDVGYGVYDLYDLGEFNQKGTVRTKYGTKAQYLQAIQAAHAAGMQVYADVVFDHKAGADETEVFKVIEVDPNDRTKEISEPFEIEGWTKFTFPGRGDQYSSFKWNSEHFNGTDFDAKGERTGVFRIAGKAWNWEVDTEFGNYDYLMFANIDYNHPDVVTELKNWGKWYVNTTNIDGFRLDAVKHIKFSFFPDWLSYVRSQTGKPLFTVGEYWSYDINKLHNYITKTDGTMSLFDAPLHNKFYTASKSGGAFDMRTLMTNTLMKDQPTLAVTFVDNHDTEPGQALQSWVDPWFKPLAYAFILTRQEGYPCVFYGDYYGIPQYNIPSLKSKIDPLLIARRDYAYGTQHDYLDHSNIIGWTREGGTEKPGSGLAALITNGDGGSKWMYVGKQHAGKVFYDLTGNRSDTVTINSDGWGEFKVNGGSVSVWVPRKTTVS

SEQ ID NO: 20845 - protein, 486 aa, Geobacillus stearothermophilus
AAPFNGTMMQYFEWYLPDDGTLWTKVANEANNLSSLGITALWLPPAYKGTSRSDVGYGVYDLYDLGEFNQKGTVRTKYGTKAQYLQAIQAAHAAGMQVYADVVFDHKAGADETEVFKVIEVDPNDRTKEISEPFEIEGWTKFTFPGRGDQYSSFKWNSEHFNGVDFDAKGERTGVFRIAGKAWNWEVDTEFGNYDYLMFANIDYNHPDVVTELKNWGKWYVNTTNIDGFRLDAVKHIKFSFFPDWLSYVRSQTGKPLFTVGEYWSYDINKLHNYITKTDGTMSLFDAPLHNKFYTASKSGGAFDLRTLMTNTLMKDQPTLAVTFVDNHDTEPGQALQSWVDPWFKPLAYAFILTRQEGYPCVFYGDYYGIPQYNIPSLKSKIDPLLIARRDYAYGTQHDYLDHSNIIGWTREGGTEKPGSGLAALITNGDGGSKWMYVGKQHAGKVFYDLTGNRSDTVTINSDGWGEFKVNGGSVSVWVPRKTTVS

SEQ ID NO: 20846 - protein, 486 aa, Geobacillus stearothermophilus
AAPFNGTMMQYFEWYLPDDGTLWTKVANEANNLSSLGITALWLPPAYKGTSRSDVGYGVYDLYDLGEFNQKGTVRTKYGTKAQYLQAIQAAHAAGMQVYADVVFDHKAGADETEVFKVIEVDPNDRTKEISEPFEIEGWTKFTFPGRGDQYSSFKWNSEHFNGTDFDAKGERTGVFRIAGKKWNWEVDTEFGNYDYLMFANIDMNHPDVVTELKNWGKWYVNTTNIDGFRLDAVKHIKFSFFPDWLSYVRSQTGKPLFTVGEYWSYDINKLHNYITKTDGTMSLFDAPLHNKFYTASKSGGAFDMRTLMTNTLMKDQPTLAVTFVDNHDTEPGQALQSWVDPWFKPLAYAFILTRQEGYPCVFYGDYYGIPQYNIPSLKSKIDPLLIARRDYAYGTQHDYLDHSNIIGWTREGGTEKPGSGLAALITNGDGGSKWMYVGKQHAGKVFYDLTGNRSDTVTINSDGWGEFKVNGGSVSVWVPRKTTVS

SEQ ID NO: 20847 - protein, 486 aa, Unidentified
AAPFNGTMMQYFEWYLPDDGTLWTKVANEANNLSSLGITALWLPPAYKGTSRSDVGYGVYDLYDLGEFNQKGTVRTKYGTKAQYLQAIQAAHAAGMQVYADVVFNHKAGADETEVFKVIEVDPNDRTKEISEPFEIEGWTKFTFPGRGDQYSSFKWNSEHFNGTDFDAKGERTGVFRIAGKAWNWEVDTEFGNYDYLMFANLDYNHPDVVTELKNWGKWYVNTTNIDGFRLDAVKHIKFSFFPDWLSYVRSQTGKPLFTVGEYWSYDINKLHNYITKTDGTMSLFDAPLHNKFYTASKSGGAFDMRTLMTNTLMKDQPTLAVTFVDNHDTEPGQALQSWVDPWFKPLAYAFILTRQEGYPCVFYGDYYGIPQYNIPSLKSKIDPLLIARRDYAYGTQHDYLDHSNIIGWTREGGTEKPGSGLAALITNGDGGSKWMYVGKQHAGKVFYDLTGNRSDTVTINSDGWGEFKVNGGSVSVWVPRKTTVS

SEQ ID NO: 20848 - protein, 486 aa, Geobacillus stearothermophilus
AAPFNGTMMQYFEWYLPDDGTLWTKVANEANNLSSLGITALWLPPAYKGTSRSDVGYGVYDLYDLGEFNQKGTVRTKYGTKAQYLQAIQAAHAAGMQVYADVVFDHKAGADETEVFKVIEVDPNDRTKEISEPFEIEGWTKFTFPGRGDQYSSFKWNSEHFNGTDFDAKGERTGVFRIDGKAWNWEVDTEFGNYDYLMFANIDYNHPDVVTELKNWGKWYVNTTNIDGFRLDAVKHIKFSFFPDWLSYVRSQTGKPLFTVGEYWSYDINKLHNYITKTDGTMSLFDAPLHNKFYTASKSGGAFDMRTLMTNTLMKDQPTLAVTFVDNHDTEPGQALQSWVDPWFKPLAYAFILTRQEGYPCVFYGDYYGIPQYNIPSLKSKIDPLLIARRDYAYGTQHDYLDHSNIIGWTREGGTEKPGSGLAALITNGDGGSKWMYVGKQHAGKVFYDLTGNRSDTVTINSDGWGEFKVNGGSVSVWVPRKTTVS

SEQ ID NO: 20849 - protein, 486 aa, Geobacillus stearothermophilus
AAPFNGTMMQYFEWYLPDDGTLWTKVANEANNLSSLGITALWLPPAYKGTSRSDVGYGVYDLYDLGEFNQKGTVRTKYGTKAQYLQAIQAAHAAGMQVYADVVFDHKAGADETEVFKVIEVDPNDRTKEISEPFEIEGWTKFTFPGRGDTYSSFKWNSEHFNGVDFDAKGERTGVFRIAGKAWNWEVDTEFGNYDYLMFANIDYNHPDVVTELKNWGKWYVNTTNIDGFRLDAVKHIKFQFFPDWLSYVRSQTGKPLFTVGEYWSYDINKLHNYITKTDGTTSLFDAPLHNKFYTASKSGGAFDMRTLMTNTLMKDQPTLAVTFVDNHDTEPGQALQSWVDPWFKPLAYAFILTRQEGYPCVFYGDYYGIPQYNIPSLKSKIDPLLIARRDYAYGTQHDYLDHDDIIGWTREGGTEKPGSGLAALITNGDGGSKWMYVGKQHAGKVFYDLTGNRSDTVTINSDGWGEFKVNGGSVSVWVPRKTTVS

SEQ ID NO: 20850 - protein, 486 aa, Geobacillus stearothermophilus
AAPFNGTMMQYFEWYLPDDGTLWTKVANEANNLSSLGITALWLPPAYKGTSRSDVGYGVYDLYDLGEFNQKGTVRTKYGTKAQYLQAIQAAHAAGMQVYADVVFDHKAGADETEVFKVIEVDPNDRTKEISEPEEIEGWTKFTFPGRGDQYSSFKWNSEHFNGTDFDAKGERTGVFRINGKAWNWEVDTEFGNYDYLMFANIDYNHPDVVTELKNWGKWYVNTTNIDGFRLDAVKHIKFSFFPDWLSYVRSQTGKPLFTVGEYWSYDINKLHNYITKTDGTMSLFDAPLHNKFYTASKSGGAFDMRTLMTNTLMKDQPTLAVTFVDNHDTEPGQALQSWVDPWFKPLAYAFILTRQEGYPCVFYGDYYGIPQYNIPSLKSKIDPLLIARRDYAYGTQHDYLDHSNIIGWTREGGTEKPGSGLAALITNGDGGSKWMYVGKQHAGKVFYDLTGNRSDTVTINSDGWGEFKVNGGSVSVWVPRKTTVS

SEQ ID NO: 20851 - protein, 486 aa, Geobacillus stearothermophilus
AAPFNGTMMQYFEWYLPDDGTLWTKVANEANNLSSLGITALWLPPAYKGTSRSDVGYGVYDLYDLGEFNQKGTVRTKYGTKAQYLQAIQAAHAAGMQVYADVVFDHKAGADETEVFKVIEVDPNDRTKEISEPFEIEGWTKFTFPGRGDTYSSFKWNSEHFNGTDFDAKGERTGVFRIAGKKWNWEVDTEFGNYDYLMFANIDYNHPDVVTELKNWGKWYVNTTNIDGFRLDAVKHIKFSFFPDWLSYVRSQTGKPLFTVGEYWSYDINKLHNYITKTDGTMSLFDAPLHNKFYTASKSGGAFDMRTLMTNTLMKDQPTLAVTFVDNHDTEPGQALQSWVDPWFKPLAYAFILTRQEGYPCVFYGDYYGIPQYNIPSLKSKIDPLLIARRDYAYGTQHDYLDHSNIIGWTREGGTEKPGSGLAALITNGDGGSKWMYVGKQHAGKVFYDLTGNRSDTVTINSDGWGEFKVNGGSVSVWVPRKTTVS

SEQ ID NO: 20852 - protein, 486 aa, Geobacillus stearothermophilus
AAPFNGTMMQYFEWYLPDDGTLWTKVANEANNLSSLGITALWLPPAYKGTSRSDVGYGVYDLYDLGEFNQKGTVRTKYGTKAQYLQAIQAAHAAGMQVYADVVFDHKAGADETEVFKVIEVDPNDRTKEISEPEEIEGWTKFTFPGRGDQYSSFKWNSEHFNGTDFDAKGERTGVFRIAGKAWNWEVDTEFGNYDYLMFANIDYNHPDVVTELKNWGKWYVNTTNIDGFRLDAVKHIKFSFFPDWLSYVRSQTGKPLFTVGEYWSYDINKLHNYITKTDGTMSLFDAPLHNKFYTASKSGGAFDMRTLMTNTLMKDQPTLAVTFVDNHDTEPGQALQSWVDPWFKPLAYAFILTRQEGYPCVFYGDYYGIPQYNIPSLKSKIDPLLIARRDYAYGTQHDYLDHSNIIGWTREGGTEKPGSGLAALITNGDGGSKWMYVGKQHAGKVFYDLTGNRSDTVTINSDGWGEFKVNGGSVSVWVPRKTTVS

SEQ ID NO: 20853 - protein, 486 aa, Geobacillus stearothermophilus
AAPFNGTMMQYFEWYLPDDGTLWTKVANEANNLSSLGITALWLPPAYKGTSRSDVGYGVYDLYDLGEFNQKGTVRTKYGTKAQYLQAIQAAHAAGMQVYADVVFDHKAGADETEVFKVIEVDPNDRTKEISEPFEIEGWTKFTFPGRGDQYSSFKWNSEHFNGTDFDAKGERTGVFRIQGKAWNWEVDTEFGNYDYLMFANIDYNHPDVVTELKNWGKWYVNTTNIDGFRLDAVKHIKFSFFPDWLSYVRSQTGKPLFTVGEYWSYDINKLHNYITKTDGTMSLFDAPLHNKFYTASKSGGAFDMRTLMTNTLMKDQPTLAVTFVDNHDTEPGQALQSWVDPWFKPLAYAFILTRQEGYPCVFYGDYYGIPQYNIPSLKSKIDPLLIARRDYAYGTQHDYLDHSNIIGWTREGGTEKPGSGLAALITNGDGGSKWMYVGKQHAGKVFYDLTGNRSDTVTINSDGWGEFKVNGGSVSVWVPRKTTVS

SEQ ID NO: 20854 - protein, 486 aa, Unidentified
AAPFNGTMMQYFEWYLPDDGTLWTKVANEANNLSSLGITALWLPPAYKGTSRSDVGYGVYDLYDLGEFNQKGTVRTKYGTKAQYLQAIQAAHAAGMQVYADVVFDHKAGADETEVFKVIEVDPNDRTKEISDPFEIEGWTKFTFPGRGDQYSSFKWNSEHFNGTDFDAKGERTGVFRIAGKAWNWEVDTEFGNYDYLMFANIDYNHPDVVTELKNWGKWYVNTTNIDGFRLDAVKHIKFSFFPDWLSYVRSQTGKPLFTVGEYWSYDINKLHNYITKTDGTMSLFDAPLHNKFYTASKSGGAFDMRTLMTNTLMKDQPTLAVTFVDNHDTEPGQALQSWVDPWFKPLAYAFILTRQEGYPCVFYGDYYGIPQYNIPSLKSKIDPLLIARRDYAYGTQHDYLDHSNIIGWTREGGTEKPGSGLAALITNGDGGSKWMYVGKQHAGKVFYDLTGNRSDTVTINSDGWGEFKVNGGSVSVWVPRKTTVS

SEQ ID NO: 20855 - protein, 486 aa, Geobacillus stearothermophilus
AAPFNGTMMQYFEWYLPDDGTLWTKVANEANNLSSLGITALWLPPAYKGTSRSDVGYGVYDLYDLGEFNQKGTVRTKYGTKAQYLQAIQAAHAAGMQVYADVVFDHKAGADETEVFKVIEVDPNDRTKEISEPFEIEGWTKFTFPGRGDQYSSFKWNSEHFNGTDFDAKGERTGVFRINGKAWNWEVDTEFGNYDYLMFANIDYNHPDVVTELKNWGKWYVNTTNIDGFRLDAVKHIKFSFFPDWLSYVRSQTGKPLFTVGEYWSYDINKLHNYITKTDGTMSLFDAPLHNKFYTASKSGGAFDMRTLMTNTLMKDQPTLAVTFVDNHDTEPGQALQSWVDPWFKPLAYAFILTRQEGYPCVFYGDYYGIPQYNIPSLKSKIDPLLIARRDYAYGTQHDYLDHSNIIGWTREGGTEKPGSGLAALITNGDGGSKWMYVGKQHAGKVFYDLTGNRSDTVTINSDGWGEFKVNGGSVSVWVPRKTTVS

SEQ ID NO: 20856 - protein, 486 aa, Unidentified
AAPFNGTMMQYFEWYLPDDGTLWTKVANEANNLSSLGITALWLPPAYKGTSRSDVGYGVYDLYDLGEFNQKGTVRTKYGTKAQYLQAIQAAHAAGMQVYADVVFDHKAGADETEVFKVIEVDPNDRTKEISEPFEIEGWTKFTFPGRGDQYSSFKWNSEHFNGTDFDAKGERTGVFRIAGKAWNWEVDTEFGNYDYLMFANIDYNHPVVVTELKNWGKWYVNTTNIDGFRLDAVKHIKFSFFPDWLSYVRSQTGKPLFTVGEYWSYDINKLHNYITKTDGTMSLFDAPLHNKFYTASKSGGAFDMRTLMTNTLMKDQPTLAVTFVDNHDTEPGQALQSWVDPWFKPLAYAFILTRQEGYPCVFYGDYYGIPQYNIPSLKSKIDPLLIARRDYAYGTQHDYLDHSNIIGWTREGGTEKPGSGLAALITNGDGGSKWMYVGKQHAGKVFYDLTGNRSDTVTINSDGWGEFKVNGGSVSVWVPRKTTVS

SEQ ID NO: 20857 - protein, 482 aa, Bacillus sp. NCIB 12513
HHNGTNGTMMQYFEWHLPNDGNHWNRLRDDASNLRNRGITAIWIPPAWKGTSQNDVGYGAYDLYDLGEFNQKGTVRTKYGTRSQLESAIHALKNNGVQVYGDVVMNHKAGADETEVFKVIEVDPNDRTKEISEPFEIEGWTKFTFPGRGDQYSSFKWNSEHFNGTDFDAKGERTGVFRIAGKKWNWEVDTEFGNYDYLMFANIDYNHPDVVNELRRWGEWYTNTLNLDGFRIDAVKHIKYSFTRDWLTHVRNATGKEMFAVAEFWKNDLGALENYLNKTNWNHSVFDVPLHYNLYNASNSGGNYDMAKLLNGTVVQKHPMHAVTFVDNHDSQPGESLESFVQEWFKPLAYALILTREQGYPSVFYGDYYGIPTHSVPAMKAKIDPILEARQNFAYGTQHDYFDHHNIIGWTREGNTTHPNSGLATIMSDGPGGEKWMYVGQNKAGQVWHDITGNKPGTVTINADGWANFSVNGGSVSIWVKR

SEQ ID NO: 20858 - protein, 486 aa, Geobacillus stearothermophilus
AAPFNGTMMQYFEWYLPDDGTLWTKVANEANNLSSLGITALWLPPAYKGTSRSDVGYGVYDLYDLGEFNQKGTVRTKYGTKAQYLQAIQAAHAAGMQVYADVVFDHKAGADETEVFKVIEVDPNDRTKEISEPFEIEGWTKFTFPGRGDQYSSFKWNSEHFNGTDFDAKGERTGVFRIAGKAWNWEVDTEFGNYDYLMFANIDYNHPDVVTELKNWGKWYVNTTNIDGFRLDAVKHIKFSFFPDWLSYVRSQTGKPLFTVGEYWSYDINKLHNYITKTDGTMSLFDAPLHNKFYTASKSGGAFDMRTLMTNTLMKDQPTLAVTFVDNHDTEPGQALQSWVDPWFKPLAYAFILTRQEGYPCVFYGDYYGIPQYNIPSLKSKIDPLVIARRDYAYGTQHDYLDHSNIIGWTREGGTEKPGSGLAALITNGDGGSKWMYVGKQHAGKVFYDLTGNRSDTVTINSDGWGEFKVNGGSVSVWVPRKTTVS

SEQ ID NO: 20859 - protein, 486 aa, Geobacillus stearothermophilus
AAPFNGTMMQYFEWYLPDDGTLWTKVANEANNLSSLGITALWLPPAYKGTSRSDVGYGVYDLYDLGEFNQKGTVRTKYGTKAQYLQAIQAAHAAGMQVYADVVFDHKAGADETEVFKVIEVDPNDRTKEISEPFEIEGWTKFTFPGRGDQYSSFKWNSEHFNGTDFDAKGERTGVFRIAGKAWNWEVDTEFGNYDYLMFANIDYNHPDVVTELKNWGKWYVNTTNIDGFRLDAVKHIKFSFFKDWLSYVRSQTGKPLFTVGEYWSYDINKLHNYITKTDGTMSLFDAPLHNKFYTASKSGGAFDMRTLMTNTLMKDQPTLAVTFVDNHDTEPGQALQSWVDPWFKPLAYAFILTRQEGYPCVFYGDYYGIPQYNIPSLKSKIDPLLIARRDYAYGTQHDYLDHSNIIGWTREGGTEKPGSGLAALITNGDGGSKWMYVGKQHAGKVFYDLTGNRSDTVTINSDGWGEFKVNGGSVSVWVPRKTTVS

SEQ ID NO: 20860 - protein, 486 aa, Geobacillus stearothermophilus
AAPFNGTMMQYFEWYLPDDGTLWTKVANEANNLSSLGITALWLPPAYKGTSRSDVGYGAYDLYDLGEFNQKGTVRTKYGTKAQYLQAIQAAHAAGMQVYADVVFDHKAGADETEVFKVIEVDPNDRTKEISEPFEIEGWTKFTFPGRGDTYSSFKWNSEHFNGVDFDAKGERTGVFRIAGKAWNWEVDTEFGNYDYLMFANIDYNHPDVVTELKNWGKWYVNTTNIDGFRLDAVKHIKFQFFPDWLSYVRSQTGKPLFTVGEYWSYDINKLHNYITKTDGTMSLFDAPLHNKFYTASKSGGAFDLRTLMTNTLMKDQPTLAVTFVDNHDTEPGQALQSWVDPWFKPLAYAFILTRQEGYPCVFYGDYYGIPQYNIPSLKSKIDPLLIARRDYAYGTQHDYLDHSNIIGWTREGGTEKPGSGLAALITNGDGGSKWMYVGKQHAGKVFYDLTGNRSDTVTINSDGWGEFKVNGGSVSVWVPRKTTVS

SEQ ID NO: 20861 - protein, 486 aa, Geobacillus stearothermophilus
AAPFNGTMMQYFEWYLPDDGTLWTKVANEANNLSSLGITALWLPPAYKGTSRSDVGYGVYDLYDLGEFNQKGTVRTKYGTKAQYLQAIQAAHAAGMQVYADVVFDHKAGADETEVFKVIEVDPNDRTKEISEPFEIEGWTKFTFPGRGDTYSSFKWNSEHFNGVDFDAKGERTGVFRIAGKAWNWEVDTEFGNYDYLMFANIDYNHPDVVTELKNWGKWYVNTTNIDGFRLDAVKHIKFQFFPDWLSYVRSQTGKPLFTVGEYWSYDINKLHNYITKTDGTTSLFDAPLHNKFYTASKSGGAFDLRTLMTNTLMKDQPTLAVTFVDNHDTEPGQALQSWVDPWFKPLAYAFILTRQEGYPCVFYGDYYGIPQYNIPSLKSKIDPLLIARRDYAYGTQHDYLDHSNIIGWTREGGTEKPGSGLAALITNGDGGSKWMYVGKQHAGKVFYDLTGNRSDTVTINSDGWGEFKVNGGSVSVWVPRKTTVS

SEQ ID NO: 20862 - protein, 486 aa, Geobacillus stearothermophilus
AAPFNGTMMQYFEWYLPDDGTLWTKVANEANNLSSLGITALWLPPAYKGTSRSDVGYGVYDLYDLGEFNQKGTVRTKYGTKAQYLQAIQAAHAAGMQVYADVVFDHKAGADETEVFKVIEVDPNDRTKEISEPFEIEGWTKFTFPGRGDQYSSFKWYSYYFNGTDFDAKGERTGVFRIAGKAWNWEVDTEFGNYDYLMFANIDYNYPYVVTELKNWGKWYVNTTNIDGFRLDAVKHIKFSFFPDWLSYVRSQTGKPLFTVGEYWSYDINKLHNYITKTDGTMSLFDAPLHNKFYTASKSGGAFDMRTLMTNTLMKDQPTLAVTFVDNHDTEPGQALQSWVDPWFKPLAYAFILTRQEGYPCVFYGDYYGIPQYNIPSLKSKIDPLLIARRDYAYGTQHDYLDHSNIIGWTREGGTEKPGSGLAALITNGDGGSKWMYVGKQHAGKVFYDLTGNRSDTVTINSDGWGEFKVNGGSVSVWVPRKTTVS

SEQ ID NO: 20863 - protein, 486 aa, Geobacillus stearothermophilus
AAPFNGTMMQYFEWYLPDDGTLWTKVANEANNLSSLGITALWLPPAYKGTSRSDVGYGVYDLYDLGEFNQKGTVRTKYGTKAQYLQAIQAAHAAGMQVYADVVFDHKAGADETEVFKVIEVDPNDRTKEISEPFEIEGWTKFTFPGRGDQYSSFKWNSEHFNGTDFDAKGERTGVFRIAGKAWNWEVDTEFGNYDYLMFANIDYNHPDVVTELKNWGKWYVNTTNIDGFRLDAVKHIKFSFFPDWLSYVRSQTGKPLFTVGEYWSYDINKLHNYITKTDGTMSLFDAPLHNKFYTASKSGGAFDMRTLMTNTLMKDQPTLAVTFVDNHDTEPGQALQSWVDPWFKPLAYAFILTRQEGYPCVFYGDYYGIPQYNIPSLKSKIDPLIIARRDYAYGTQHDYLDHSNIIGWTREGGTEKPGSGLAALITNGDGGSKWMYVGKQHAGKVFYDLTGNRSDTVTINSDGWGEFKVNGGSVSVWVPRKTTVS

SEQ ID NO: 20864 - protein, 486 aa, Unidentified
AAPFNGTMMQYFEWYLPDDGTLWTKVANEANNLSSLGITALWLPPAYKGTSRSDVGYGVYDLYDLGEFNQKGTVRTKYGTKAQYLQAIQAAHAAGMQVYADVVFDHKAGADETEVFKVIEVDPNDRTKEISEPFEIEGWTKFTFPGRGDQYSSFKWNSEHFNGVDFDAKGERTGVFRIAGKAWNWEVDTEFGNYDYLMFANIDYNHPDVVTELKNWGKWYVNTTNIDGFRLDAVKHIKFSFFPDWLSYVRSQTGKPLFTVGEYWSYDINKLHNYITKTDGTQSLFDAPLHNKFYTASKSGGAFDLRTLMTNTLMKDQPTLAVTFVDNHDTEPGQALQSWVDPWFKPLAYAFILTRQEGYPCVFYGDYYGIPQYNIPSLKSKIDPLLIARRDYAYGTQHDYLDHSNIIGWTREGGTEKPGSGLAALITNGDGGSKWMYVGKQHAGKVFYDLTGNRSDTVTINSDGWGEFKVNGGSVSVWVPRKTTVS

SEQ ID NO: 20865 - protein, 486 aa, Unidentified
AAPFNGTMMQYFEWYLPDDGTLWTKVANEANNLSSLGITALWLPPAYKGTSRSDVGYGVYDLYDLGEFNQKGTVRTKYGTKAQYLQAIQAAHAAGMQVYADVVFNHKAGADETEVFKVIEVDPNDRTKEISEPFEIEGWTKFTFPGRGDTYSSFKWNSEHFNGTDFDAKGERTGVFRIAGKKWNWEVDTEFGNYDYLMFANIDYNHPDVVTELKNWGKWYVNTTNIDGFRLDAVKHIKFSFFPDWLSYVRSQTGKPLFTVGEYWSYDINKLHNYITKTDGTMSLFDAPLHNKFYTASKSGGAFDMRTLMTNTLMKDQPTLAVTFVDNHDTEPGQALQSWVDPWFKPLAYAFILTRQEGYPCVFYGDYYGIPQYNIPSLKSKIDPLLIARRDYAYGTQHDYLDHSNIIGWTREGGTEKPGSGLAALITNGDGGSKWMYVGKQHAGKVFYDLTGNRSDTVTINSDGWGEFKVNGGSVSVWVPRKTTVS

SEQ ID NO: 20866 - protein, 486 aa, Geobacillus stearothermophilus
AAPFNGTLMQYFEWYLPDDGTLWTKVANEANNLSSLGITALWLPPAYKGTSRSDVGYGVYDLYDLGEFNQKGTVRTKYGTKAQYLQAIQAAHAAGMQVYADVVFDHKAGADETEVFKVIEVDPNDRTKEISEPFEIEGWTKFTFPGRGDQYSSFKWNSEHFNGTDFDAKGERTGVFRIAGKAWNWEVDTEFGNYDYLMFANIDYNHPDVVTELKNWGKWYVNTTNIDGFRLDAVKHIKFSFFPDWLSYVRSQTGKPLFTVGEYWSYDINKLHNYITKTDGTMSLFDAPLHNKFYTASKSGGAFDMRTLMTNTLMKDQPTLAVTFVDNHDTEPGQALQSWVDPWFKPLAYAFILTRQEGYPCVFYGDYYGIPQYNIPSLKSKIDPLLIARRDYAYGTQHDYLDHSNIIGWTREGGTEKPGSGLAALITNGDGGSKWMYVGKQHAGKVFYDLTGNRSDTVTINSDGWGEFKVNGGSVSVWVPRKTTVS

SEQ ID NO: 20867 - protein, 486 aa, Unidentified
AAPFNGTMMQYFEWYLPDDGTLWTKVANEANNLSSLGITALWLPPAYKGTSRSDVGYGVYDLYDLGEFNQKGTVRTKYGDKAQYLQAIQAAHAAGMQVYADVVFDHKAGADETEVFKVIEVDPNDRTKEISEPFEIEGWTKFTFPGRGDQYSSFKWNSEHFNGVDFDAKGERTGVFRIAGKAWNWEVDTEFGNYDYLMFANIDYNHPDVVTELKNWGKWYVNTTNIDGFRLDAVKHIKFSFFPDWLSYVRSQTGKPLFTVGEYWSYDINKLHNYITKTDGTMSLFDAPLHNKFYTASKSGGAFDLRTLMTNTLMKDQPTLAVTFVDNHDTEPGQALQSWVDPWFKPLAYAFILTRQEGYPCVFYGDYYGIPQYNIPSLKSKIDPLLIARRDYAYGTQHDYLDHSNIIGWTREGGTEKPGSGLAALITNGDGGSKWMYVGKQHAGKVFYDLTGNRSDTVTINSDGWGEFKVNGGSVSVWVPRKTTVS

SEQ ID NO: 20868 - protein, 486 aa, Unidentified
AAPFNGTMMQYFEWYLPDDGTLWTKVANEANNLSSLGITALWLPPAYKGTSRSDVGYGVYDLYDLGEFNQKGTVRTKYGTKAQYLQAIQALHAAGMQVYADVVFDHKAGADETEVFKVIEVDPNDRTKEISEPFEIEGWTKFTFPGRGDQYSSFKWNSEHFNGTDFDAKGERTGVFRIAGKAWNWEVDTEFGNYDYLMFANIDYNHPDVVTELKNWGKWYVNTTNIDGFRLDAVKHIKFSFFPDWLSYVRSQTGKPLFTVGEYWSYDINKLHNYITKTDGTMSLFDAPLHNKFYTASKSGGAFDMRTLMTNTLMKDQPTLAVTFVDNHDTEPGQALQSWVDPWFKPLAYAFILTRQEGYPCVFYGDYYGIPQYNIPSLKSKIDPLLIARRDYAYGTQHDYLDHSNIIGWTREGGTEKPGSGLAALITNGDGGSKWMYVGKQHAGKVFYDLTGNRSDTVTINSDGWGEFKVNGGSVSVWVPRKTTVS

SEQ ID NO: 20869 - protein, 486 aa, Unidentified
AAPFNGTMMQYFEWYLPDDGTLWTKVANEANNLSSLGITALWLPPAYKGTSRSDVGYGVYDLYDLGEFNQKGTVRTKYGTKAQYLQAIQAAHAAGMQVYADVVFNHKAGADETEVFKVIEVDPNDRTKEISEPFEIEGWTKFTFPGRGDQYSSFKWNSEHFNGTDFDAKGERTGVFRIAGKKWNWEVDTEFGNYDYLMFANIDMNHPDVVTELKNWGKWYVNTTNIDGFRLDAVKHIKFSFFPDWLSYVRSQTGKPLFTVGEYWSYDINKLHNYITKTDGTMSLFDAPLHNKFYTASKSGGAFDMRTLMTNTLMKDQPTLAVTFVDNHDTEPGQALQSWVDPWFKPLAYAFILTRQEGYPCVFYGDYYGIPQYNIPSLKSKIDPLLIARRDYAYGTQHDYLDHSNIIGWTREGGTEKPGSGLAALITNGDGGSKWMYVGKQHAGKVFYDLTGNRSDTVTINSDGWGEFKVNGGSVSVWVPRKTTVS

SEQ ID NO: 20870 - protein, 486 aa, Unidentified
AAPFNGTMMQYFEWYLPDDGTLWTKVANEANNLSSLGITALWLPPAYKGTSRSDVGYGVYDLYDLGEFNQKGTVRTKYGTKAQYLQAIQAAHAAGMQVYADVVFDHKAGADETEVFDVIEVDPNDRTKEISEPFEIEGWTKFTFPGRGDTYSSFKWNSEHFNGTDFDAKGERTGVFRIAGKAWNWEVDTEFGNYDYLMFANIDYNHPDVVTELKNWGKWYVNTTNIDGFRLDAVKHIKFSFFPDWLSYVRSQTGKPLFTVGEYWSYDINKLHNYITKTDGTMSLFDAPLHNKFYTASKKGRDFDMRTLMTNTLMKDQPTLAVTFVDNHDTEPGQALQSWVDPWFKPLAYAFILTRQEGYPCVFYGDYYGIPQYNIPSLKSKIDPLLIARRDYAYGTQHDYLDHSNIIGWTREGGTEKPGSGLAALITNGDGGSKWMYVGKQHAGKVFYDLTGNRSDTVTINSDGWGEFKVNGGSVSVWVPRKTTVS

SEQ ID NO: 20871 - protein, 486 aa, Geobacillus stearothermophilus
AAPFNGTMMQYFEWYLPDDGTLWTKVANEANNLSSLGITALWLPPAYKGTSRSDVGYGVYDLYDLGEFNQKGTVRTKYGTKAQYLQAIQAAHAAGMQVYADVVFNHKAGADETEVFKVIEVDPNDRTKEISEPFEIEGWTKFTFPGRGDQYSSFKWNSEHFNGTDFDAKGERTGVFRIAGKAWNWEVDTEFGNYDYLMFANIDYNHPDVVTELKNWGKWYVNTTNIDGFRLDAVKHIKFSFFPDWLSYVRSQTGKPLFTVGEYWSYDINKLHNYITKTDGTMSLFDAPLHNKFYTASKSGGAFDMRTLMTNTLMKDQPTLAVTFVDNHDTEPGQALQSWVDPWFKPLAYAFILTRQEGYPCVFYGDYYGIPQYNIPSLKSKIDPLLIARRDYAYGTQHDYLDHSNIIGWTREGGTEKPGSGLAALITNGDGGSKWMYVGKQHAGKVFYDLTGNRSDTVTINSDGWGEFKVNGGSVSVWVPRKTTVS

SEQ ID NO: 20872 - protein, 486 aa, Unidentified
AAPFNGTMMQYFEWYLPDDGTLWTKVANEANNLSSLGITALWLPPAYKGTSRSDVGYGVYDLYDLGEFNQKGTVRTKYGTKAQYLQAIQAAHAAGMQVYADVVFDHKAGADETEVFKVIEVDPNDRTKEISEPFEIEGWTKFTFPGRGDQYSSFKWNSEHFNGTDWDEKGKRTGVFRIAGKKWNWEVDTEFGNYDYLMFANIDYNHPDVVTELKNWGKWYVNTTNIDGFRLDAVKHIKFSFFPDWLSYVRSQTGKPLFTVGEYWSYDINKLHNYITKTDGTMSLFDAPLHNKFYTASKKGRDFDMRTLMTNTLMKDQPTLAVTFVDNHDTEPGQALQSWVDPWFKPLAYAFILTRQEGYPCVFYGDYYGIPQYNIPSLKSKIDPLLIARRDYAYGTQHDYLDHSNIIGWTREGGTEKPGSGLAALITNGDGGSKWMYVGKQHAGKVFYDLTGNRSDTVTINSDGWGEFKVNGGSVSVWVPRKTTVS

SEQ ID NO: 20873 - protein, 486 aa, Unidentified
AAPFNGTMMQYFEWYLPDDGTLWTKVANEANNLSSLGITALWLPPAYKGTSRSDVGYGVYDLYDLGEFNQKGTVRTKYGTKAQYLQAIQAAHAAGMQVYADVVFNHKAGADETEVFKVIEVDPNDRTKEISEPFEIEGWTKFTFPGRGDQYSSFKWNSEHFNGVDFDAKGERTGVFRIAGKKWNWEVDTEFGNYDYLMFANIDYNHPDVVTELKNWGKWYVNTTNIDGFRLDAVKHIKFSFFPDWLSYVRSQTGKPLFTVGEYWSYDINKLHNYITKTDGTMSLFDAPLHNKFYTASKSGGAFDMRTLMTNTLMKDQPTLAVTFVDNHDTEPGQALQSWVDPWFKPLAYAFILTRQEGYPCVFYGDYYGIPQYNIPSLKSKIDPLLIARRDYAYGTQHDYLDHSNIIGWTREGGTEKPGSGLAALITNGDGGSKWMYVGKQHAGKVFYDLTGNRSDTVTINSDGWGEFKVNGGSVSVWVPRKTTVS

SEQ ID NO: 20874 - protein, 486 aa, Geobacillus stearothermophilus
AAPFNGTMMQYFEWYLPDDGTLWTKVANEANNLSSLGITALWLPPAYKGTSRSDVGYGVYDLYDLGEFNQKGTVRTKYGTKAQYLQAIQAAHAAGMQVYADVVFDHKAGADETEVFKVIEVDPNDRTKEISEPFEIEGWTKFTFPGRGDQYSSFKWNSEHFNGVDFDAKGERTGVFRIAGKAWNWEVDTEFGNYDYLMFANIDYNHPDVVTELKNWGKWYVNTTNIDGFRLDAVKHIKFSFFPDWLSYVRSQTGKPLFTVGEYWSYDINKLHNYITKTDGTVSLFDAPLHNKFYTASKSGGAFDLRTLMTNTLMKDQPTLAVTFVDNHDTEPGQALQSWVDPWFKPLAYAFILTRQEGYPCVFYGDYYGIPQYNIPSLKSKIDPLLIARRDYAYGTQHDYLDHSNIIGWTREGGTEKPGSGLAALITNGDGGSKWMYVGKQHAGKVFYDLTGNRSDTVTINSDGWGEFKVNGGSVSVWVPRKTTVS

SEQ ID NO: 20875 - protein, 486 aa, Unidentified
AAPFNGTMMQYFEWYLPDDGTLWTKVANEANNLSSLGITALWLPPAYKGTSRSDVGYGVYDLYDLGEFNQKGTVRTKYGTKAQYLQAIQAAHAAGMQVYADVVFDHKAGADETEVFKVIEVDPNDRTKEISEPFEIEGWTKFTFPGRGDQYSSFKWNSEHFNGTDFDAKGERTGVFRIAGKAWNWEVDTEFGNYDYLMFANIDYNHPDVVTELKNWGKWYVNTTNIDGFRLDTVKHIKFSFFPDWLSYVRSQTGKPLFTVGEYWSYDINKLHNYITKTDGTMSLFDAPLHNKFYTASKSGGAFDMRTLMTNTLMKDQPTLAVTFVDNHDTEPGQALQSWVDPWFKPLAYAFILTRQEGYPCVFYGDYYGIPQYNIPSLKSKIDPLLIARRDYAYGTQHDYLDHSNIIGWTREGGTEKPGSGLAALITNGDGGSKWMYVGKQHAGKVFYDLTGNRSDTVTINSDGWGEFKVNGGSVSVWVPRKTTVS

SEQ ID NO: 20876 - protein, 486 aa, Unidentified
AAPFNGTMMQYFEWYLPDDGTLWTKVANEANNLSSLGITALWLPPAYKGTSRSDVGYGVYDLYDLGEFNQKGTVRTKYGTKAQYLQAIQAAHAAGMQVYADVVFDHKAGADETEVFKVIEVDPNDRTKEISEPFEIEGWTKFTFPGRGDQYSSFKWNSEHFNGTDFDAKGERTGVFRIAGKAWNWEVDTEFGNYDYLMFANIDYNHPDVVTELKNWGKWYVNTTNIDGFRLDAVKHIKFEFFPDWLSYVRSQTGKPLFTVGEYWSYDINKLHNYITKTDGTMSLFDAPLHNKFYTASKSGGAFDMRTLMTNTLMKDQPTLAVTFVDNHDTEPGQALQSWVDPWFKPLAYAFILTRQEGYPCVFYGDYYGIPQYNIPSLKSKIDPLLIARRDYAYGTQHDYLDHSNIIGWTREGGTEKPGSGLAALITNGDGGSKWMYVGKQHAGKVFYDLTGNRSDTVTINSDGWGEFKVNGGSVSVWVPRKTTVS

SEQ ID NO: 20877 - protein, 486 aa, Unidentified
AAPFNGTMMQYFEWYLPDDGTLWTKVANEANNLSSLGITALWLPPAYKGTSRSDVGYGVYDLYDLGEFNQKGTVRTKYGTKAQYLQAIQAAHAAGMQVYADVVFNHKAGADETEVFDVIEVDPNDRTKEISEPFEIEGWTKFTFPGRGDQYSSFKWNSEHFNGTDFDAKGERTGVFRIAGKKWNWEVDTEFGNYDYLMFANIDYNHPDVVTELKNWGKWYVNTTNIDGFRLDAVKHIKFSFFPDWLSYVRSQTGKPLFTVGEYWSYDINKLHNYITKTDGTMSLFDAPLHNKFYTASKSGGAFDMRTLMTNTLMKDQPTLAVTFVDNHDTEPGQALQSWVDPWFKPLAYAFILTRQEGYPCVFYGDYYGIPQYNIPSLKSKIDPLLIARRDYAYGTQHDYLDHSNIIGWTREGGTEKPGSGLAALITNGDGGSKWMYVGKQHAGKVFYDLTGNRSDTVTINSDGWGEFKVNGGSVSVWVPRKTTVS

SEQ ID NO: 20878 - protein, 486 aa, Unidentified
AAPFNGTMMQYFEWYLPDDGTLWTKVANEANNLSSLGITALWLPPAYKGTSRSDVGYGVYDLYDLGEFNQKGTVRTKYGTKAQYLQAIQAAHAAGMQVYADVVFDHKAGADETEVFKVIEVDPNDRTKEISEPFEIEGWTKFTFPGRGDQYSSFKWNSEHFNGTDFDAKGERTGVFRIAGKAWNWEVDTEFGNYDYLMFANIDYNHPDVVTELKNWGKWYVNTTNIDGFRLDAVKHIKFQFFPDWLSYVRSQTGKPLFTVGEYWSYDINKLHNYITKTDGTMSLFDAPLHNKFYTASKSGGAFDMRTLMTNTLMKDQPTLAVTFVDNHDTEPGQALQSWVDPWFKPLAYAFILTRQEGYPCVFYGDYYGIPQYNIPSLKSKIDPLLIARRDYAYGTQHDYLDHSNIIGWTREGGTEKPGSGLAALITNGDGGSKWMYVGKQHAGKVFYDLTGNRSDTVTINSDGWGEFKVNGGSVSVWVPRKTTVS

SEQ ID NO: 20879 - protein, 486 aa, Geobacillus stearothermophilus
AAPFNGTMMQYFEWYLPDDGTLWTKVANEANNLSSLGITALWLPPAYKGTSRSDVGYGVYDLYDLGEFNQKGTVRTKYGTKAQYLQAIQAAHAAGMQVYADVVFDHKAGADETEVFKVIEVDPNDRTKEISEPFEIEGWTKFTFPGRGDQYSSFKWNSEHFNGTDFDAKGERTGVFRIAGKAWNWEVDTEFGNYDYLMFANIDYNHPDVVTELKNWGKWYVNTTNIDGFRLDAVKHIKFSFFPDWLSYVRSQTGKPLFTVGEYWSYDINKLHNYITKTDGTMSLFDAPLHNKFYTASKSGGAFDMRTLMTNTLMKDQPTLAVTFVDNHDTEPGQALQSWVDPWFKPLAYAFILTRQEGYPCVFYGDYYGIPQYNIPSLKSKIDELLIARRDYAYGTQHDYLDHSNIIGWTREGGTEKPGSGLAALITNGDGGSKWMYVGKQHAGKVFYDLTGNRSDTVTINSDGWGEFKVNGGSVSVWVPRKTTVS

SEQ ID NO: 20880 - protein, 486 aa, Geobacillus stearothermophilus
AAPFNGTMMQYFEWYLPDDGTLWTKVANEANNLSSLGITALWLPPAYKGTSRSDVGYGVYDLYDLGEFNQKGTVRTKYGTKAQYLQAIQAAHAAGMQVYADVVFDHKAGADETEVFKVIEVDPNDRTKEISEPFEIEGWTKFTFPGRGDQYSSFKWNSEHFNGTDFDAKGERTGVFRIAGKKWNWEVDTEFGNYDYLMFANIDYNHPDVVTELKNWGKWYVNTTNIDGFRLDAVKHIKFSFFPDWLSYVRSQTGKPLFTVGEYWSYDINKLHNYITKTDGTMSLFDAPLHNKFYTASKSGGAFDMRTLMTNTLMKDQPTLAVTFVDNHDTEPGQALQSWVDPWFKPLAYAFILTRQEGYPCVFYGDYYGIPQYNIPSLKSKIDPLLIARRDYAYGTQHDYLDHSNIIGWTREGGTEKPGSGLAALITNGDGGSKWMYVGKQHAGKVFYDLTGNRSDTVTINSDGWGEFKVNGGSVSVWVPRKTTVS

SEQ ID NO: 20881 - protein, 486 aa, Geobacillus stearothermophilus
AAPFNGTMMQYFEWYLPDDGTLWTKVANEANNLSSLGITALWLPPAYKGTSRSDVGYGVYDLYDLGEFNQKGTVRTKYGTKAQYLQAIQAAHAAGMQVYADVVFDHKAGADETEVFKVIEVDPNDRTKEISEPFEIEGWTKFTFPGRGDQYSSFKWNSEYFNGTDFDAKGERTGVFRIAGKAWNWEVDTEFGNYDYLMFANIDYNHPDVVTELKNWGKWYVNTTNIDGFRLDAVKHIKFSFFPDWLSYVRSQTGKPLFTVGEYWSYDINKLHNYITKTDGTMSLFDAPLHNKFYTASKSGGAFDMRTLMTNTLMKDQPTLAVTFVDNHDTEPGQALQSWVDPWFKPLAYAFILTRQEGYPCVFYGDYYGIPQYNIPSLKSKIDPLLIARRDYAYGTQHDYLDHSNIIGWTREGGTEKPGSGLAALITNGDGGSKWMYVGKQHAGKVFYDLTGNRSDTVTINSDGWGEFKVNGGSVSVWVPRKTTVS

SEQ ID NO: 20882 - protein, 486 aa, Unidentified
AAPFNGTMMQYFEWYLPDDGTLWTKVANEANNLSSLGITALWLPPAYKGTSRSDVGYGVYDLYDLGEFNQKGTVRTKYGTKAQYLQAIQAAHAAGMQVYADVVFDHKAGADETEVFKVIEVDPNDRTKEISEPFEIEGWTKFTFPGRGDQYSSFKWNSEHFNGTDFDAKGERTGVFRIAGKAWNWEVDTEFGNYDYLMFANIDYNHPDVVTELKNWGKWYVNTTNIDGFRLDAVKHIKFSFFADWLSYVRSQTGKPLFTVGEYWSYDINKLHNYITKTDGTMSLFDAPLHNKFYTASKSGGAFDMRTLMTNTLMKDQPTLAVTFVDNHDTEPGQALQSWVDPWFKPLAYAFILTRQEGYPCVFYGDYYGIPQYNIPSLKSKIDPLLIARRDYAYGTQHDYLDHSNIIGWTREGGTEKPGSGLAALITNGDGGSKWMYVGKQHAGKVFYDLTGNRSDTVTINSDGWGEFKVNGGSVSVWVPRKTTVS

SEQ ID NO: 20883 - protein, 486 aa, Unidentified
AAPFNGTMMQYFEWYLPDDGTLWTKVANEANNLSSLGITALWLPPAYKGTSRSDVGYGVYDLYDLGEFNQKGTVRTKYGTKAQYLQAIQAAHAAGMQVYADVVFDHKAGADETEVFKVIEVDPNDRTKEISEPFEIEGWTKFTFPGRGDQYSSFKWNSEHFNGTDFDAKGERTGVFRIAGKAWNWEVDTEFGNYDYLMFANIDYNHPDVVTELKNWGKWYVNTTNIDGFRLDAVKHIKFSFFPDWLSYVRSQTGKPLFTVGEYWSYDINKLHNYITKTDGTMSLFDAPLHNKFYTASKSGGAFDMRTLMTNTLMKDQPTLAVTFVDNHDTEPGQALQSWVDPWFKPLAYAFILTRQEGYPCVFYGDYYGIPQYNIPSLKSKIDVLLIARRDYAYGTQHDYLDHSNIIGWTREGGTEKPGSGLAALITNGDGGSKWMYVGKQHAGKVFYDLTGNRSDTVTINSDGWGEFKVNGGSVSVWVPRKTTVS

SEQ ID NO: 20884 - protein, 486 aa, Geobacillus stearothermophilus
AAPFNGTMMQYFEWYLPDDGTLWTKVANEANNLSSLGITALWLPPAYKGTSRSDVGYGVYDLYDLGEFNQKGTVRTKYGTKAQYLQAIQAAHAAGMQVYADVVFDHKAGADETEVFKVIEVDPNDRTKEISEPFEIEGWTKFTFPGRGDQYSSFKWNSEHFNGTDFDAKGERTGVFRIAGKKWNWEVDTEFGNYDYLMFANIDKNHPDVVTELKNWGKWYVNTTNIDGFRLDAVKHIKFSFFPDWLSYVRSQTGKPLFTVGEYWSYDINKLHNYITKTDGTMSLFDAPLHNKFYTASKSGGAFDMRTLMTNTLMKDQPTLAVTFVDNHDTEPGQALQSWVDPWFKPLAYAFILTRQEGYPCVFYGDYYGIPQYNIPSLKSKIDPLLIARRDYAYGTQHDYLDHSNIIGWTREGGTEKPGSGLAALITNGDGGSKWMYVGKQHAGKVFYDLTGNRSDTVTINSDGWGEFKVNGGSVSVWVPRKTTVS

SEQ ID NO: 20885 - protein, 486 aa, Unidentified
AAPFNGTMMQYFEWYLPDDGTLWTKVANEANNLSSLGITALWLPPAYKGTSRSDVGYGVYDLYDLGEFNQKGTVRTKYGTKAQYLQAIQAAHAAGMQVYADVVFDHKAGADETEVFKVIEVDPNDRTKEISEPFEIEGWTKFTFPGRGDQYSSFKWNSEHFNGTDFDAKGERTGVFRIAGKAWNWEVDTEFGNYDYLMFANIDYNHPDVVTELKNWGKWYVNTTNIDGFRLDAVKHIKFSFFPDWLSYVRSQTGKPLFTVGEYWSYDINKLHNYITKTDGTMSLFDAPLHNKFYTASKSGGAFDMRTLMTNTLMKDQPTLAVTFVDNHDTEPGQALQSWVDPWFKPLAYAFILTRQEGYPCVFYGDYYGIPQYNIPSLKSKIDTLLIARRDYAYGTQHDYLDHSNIIGWTREGGTEKPGSGLAALITNGDGGSKWMYVGKQHAGKVFYDLTGNRSDTVTINSDGWGEFKVNGGSVSVWVPRKTTVS

SEQ ID NO: 20886 - protein, 486 aa, Geobacillus stearothermophilus
AAPFNGTMMQYFEWYLPDDGTLWTKVANEANNLSSLGITALWLPPAYKGTSRSDVGYGVYDLYDLGEFNQKGTVRTKYGTKAQYLQAIQAAHAAGMQVYADVVFDHKAGADETEVFKVIEVDPNDRTKEISEPFEIEGWTKFTFPGRGDQYSSFKWNSEHFNGTDFDAKGERTGVFRIAGKAWNWEVDTEFGNYDYLMFANIDYNHPDVVTELKNWGKWYVNTTNIDGFRLDAVKHIKFSFFPDWLSYVRSQTGKPLFTVGEYWSYDINKLHNYITKTDGTMSLFDAPLHNKFYTASKSGGAFDMRTLMTNTLMKDQPTLAVTFVDNHDTEPGQALQSWVDPWFKPLAYAFILTRQEGYPCVFYGDYYGIPQYNIPSLKSKIDQLLIARRDYAYGTQHDYLDHSNIIGWTREGGTEKPGSGLAALITNGDGGSKWMYVGKQHAGKVFYDLTGNRSDTVTINSDGWGEFKVNGGSVSVWVPRKTTVS

SEQ ID NO: 20887 - protein, 486 aa, Geobacillus stearothermophilus
AAPFNGTMMQYFEWYLPDDGTLWTKVANEANNLSSLGITALWLPPAYKGTSRSDVGYGVYDLYDLGEFNQKGTVRTKYGTKAQYLQAIQAAHAAGMQVYADVVFDHKAGADETEVFKVIEVDPNDRTKEISEPFEIEGWTKFTFPGRGDQYSSFKWNSEHFNGTDFDAKGERTGVFRIAGKAWNWEVDTEFGNYDYLMFANIDYNHPDVVTELKNWGKWYVNTTNIDGFRLDAVKHIKFSFFPDWLSYVRSQTGKPLFTVGEYWSYDINKLHNYITKTDGTMSLFDAPLHNKFYTASKSGGAFDMRTLMTNTLMKDQPTLAVTFVDNHDTEPGQALQSWVDPWFKTLAYAFILTRQEGYPCVFYGDYYGIPQYNIPSLKSKIDPLLIARRDYAYGTQHDYLDHSNIIGWTREGGTEKPGSGLAALITNGDGGSKWMYVGKQHAGKVFYDLTGNRSDTVTINSDGWGEFKVNGGSVSVWVPRKTTVS

SEQ ID NO: 20888 - protein, 486 aa, Unidentified
AAPFNGTMMQYFEWYLPDDGTLWTKVANEANNLSSLGITALWLPPAYKGTSRSDVGYGVYDLYDLGEFNQKGTVRTKYGTKAQYLQAIQAAHAAGMQVYADVVFDHKAGADETEVFKVIEVDPNDRTKEISEPFEIEGWTKFTFPGRGDQYSSFKWNSEHFNGTDFDAKGERTGVFRIAGKAWNWEVDTEFGNYDYLMFANIDYNHPDVVTELKNWGKWYVNTTNIDGFRLDAVKHIKFSFFPDWLSYVRSQTGKPLFTVGEYWSYDINKLHNYITKTDGTMSLFDAPLHNKFYTASKSGGAFDMRTLMTNTLMKDQPTLAVTFVDNHDTEPGQALQSWVDPWFKPLAYAFILTRQEGYPCVFYGDYYGIPQYNIPSLKSKIDPLLIARRDYAYGTQHDYLDHSNIIGWTREGGTEKPGSGLAALITNGDGGSKWMYVGKQHAGKVFYDLTGNRSDPVTINSDGWGEFKVNGGSVSVWVPRKTTVS

SEQ ID NO: 20889 - protein, 486 aa, Geobacillus stearothermophilus
AAPFNGTMMQYFEWYLPDDGTLWTKVANEANNLSSLGITALWLPPAYKGTSRSDVGYGVYDLYDLGEFNQKGTVRTKYGTKAQYLQAIQAAHAAGMQVYADVVFDHKAGADETEVFKVIEVDPNDRTKEISEPFEIEGWTKFTFPGRGDQYSSFKWNSEHFNGVDFDAKGERTGVFRIAGKAWNWEVDTEFGNYDYLMFANIDYNHPDVVTELKNWGKWVVNTTNIDGFRLDAVKHIKFSFFPDWLSYVRSQTGKPLFTVGEYWSYDINKLHNYITKTDGTMSLFDAPLHNKFYTASKSGGAFDLRTLMTNTLMKDQPTLAVTFVDNHDTEPGQALQSWVDPWFKPLAYAFILTRQEGYPCVFYGDYYGIPQYNIPSLKSKIDPLLIARRDYAYGTQHDYLDHSNIIGWTREGGTEKPGSGLAALITNGDGGSKWMYVGKQHAGKVFYDLTGNRSDTVTINSDGWGEFKVNGGSVSVWVPRKTTVS

SEQ ID NO: 20890 - protein, 515 aa, Unidentified
AAPFNGTMMQYFEWYLPDDGTLWTKVANEANNLSSLGITALWLPPAYKGTSRSDVGYGVYDLYDLGEFNQKGTVRTKYGTKAQYLQAIQAAHAAGMQVYADVVFNHKAGADETEVFKVIEVDPNDRTKEISEPFEIEGWTKFTFPGRGDQYSSFKWNSEHFNGTDFDAKGERTGVFRIAGENKKWNENVDDEFGNYDYLMFANIDYNHPDVVTELKNWGKWYVNTTNIDGFRLDAVKHIKFSFFPDWLSYVRSQTGKPLFTVGEYWSYDINKLHNYITKTNGTMSLFDAPLHNKFYTASKSGGAFDMRTLMTNTLMKDQPTLAVTFVDNHDTEPGQALQSWVDPWFKPLAYAFILTRQEGYPCVFYGDYYGIPQYNIPSLKSKIDPLLIARRDYAYGTQHDYLDHSDIIGWTREGVTEKPGSGLAALITDGPGGSKWMYVGKQHAGKVFYDLTGNRSDTVTINSDGWGEFKVNGGSVSVWVPRKTTVSTIARPITTRPWTGEFVRWTEPRLVAWP

SEQ ID NO: 20891 - protein, 482 aa, Unidentified
HHNGTNGTMMQYFEWHLPNDGNHWNRLRDDASNLRNRGITAIWIPPAWKGTSQNDVGYGAYDLYDLGEFNQKGTVRTKYGTRSQLESAIHALKNNGVQVYGDVVMNHKAGADETEVFKVIEVDPNDRTKEISEPFEIEGWTKFTFPGRGDQYSSFKWNSEHFNGTDFDAKGERTGVFRIAGKKWNWEVDTEFGNYDYLMFANIDYNHPDVRNELRRWGEWYTNTLNLDGFRIDAVKHIKYSFTRDWLTHVRNATGKEMFAVAEFWKNDLGALENYLNKTNWNHSVFDVPLHYNLYNASNSGGNYDMAKLLNGTVVQKHPMHAVTFVDNHDSQPGESLESFVQEWFKPLAYALILTREQGYPSVFYGDYYGIPTHSVPAMKAKIDPILEARQNFAYGTQHDYFDHHNIIGWTREGNTTHPNSGLATIMSDGPGGEKWMYVGQNKAGQVWHDITGNKPGTVTINADGWANFSVNGGSVSIWVKR

SEQ ID NO: 20892 - protein, 494 aa, Bacillus sp.
AAPFNGTMMQYFEWYLPDDGTLWTKLANDANNLSSLGISALWIPPAWKGTSRSDVGYGVYDLYDLGEFNQKGTIRTKYGTKAQYLQAINAAHAAGIQVYADVVFDHKGGADATEWVDAVEVNPSDRNQEISGTYQIQAWTKFDFPGRGNTHSSFKWRWYHFDGVDWDESRKLSNRIYKFRGIGKAWDWEVDTENGNYDYLMYADIDMDHPEVVTELKNWGKWYVNTTNIDGFRIDAVKHIKFSFFPDWISHVRSQTGKPLFTVAEFWSYDINKIHNYITKTNGTMSLFDAPLHNKFYTASKSGGAFDMRTIMTNTLMKDQPTLAVTFVDNHDSEPGQALQSFVDPWFKPLAYAFILTRQEGYPCVFYGDYYGIPQHNIPALKSKIDPILIARRDYAYGTQHDYLDHSDIIGWTREGVTEKPGSGLAAIISDGPGGSKWMFVGKNHAGKVFYDITGNRADTVTINADGWGEFKVNGGSVSIWVPKKTTVSTIARP

SEQ ID NO: 20893 - protein, 486 aa, Geobacillus stearothermophilus
AAPFNGTMMQYFEWYLPDDGTLWTKVANEANNLSSLGITALWLPPAYKGTSRSDVGYGVYDLYDLGEFNQKGTVRTKYGTKAQYLQAIQAAHAAGMQVYADVVFNHKAGADETEVFKVIEVDPNDRTKVISEPFEIEGWTKFTFPGRGDTYSSFKWNSEHFNGTDFDAKGERTGVFRIAGKKWNWEVDTEFGNYDYLMFANIDYNHPDVVTELKNWGKWYVNTTNIDGFRLDAVKHIKFSFFPDWLSYVRSQTGKPLFTVGEYWSYDINKLHNYITKTDGTMSLFDAPLHNKFYTASKSGGAFDMRTLMTNTLMKDQPTLAVTFVDNHDTEPGQALQSWVDPWFKPLAYAFILTRQEGYPCVFYGDYYGIPQYNIPSLKSKIDPLLIARRDYAYGTQHDYLDHSNIIGWTREGGTEKPGSGLAALITNGDGGSKWMYVGKQHAGKVFYDLTGNRSDTVTINSDGWGEFKVNGGSVSVWVPRKTTVS

SEQ ID NO: 20894 - protein, 486 aa, Unidentified
AAPFNGTMMQYFEWYLPDDGTLWTKVANEANNLSSLGITALWLPPAYKGTSRSDVGYGVYDLYDLGEFNQKGTVRTKYGTKAQYLQAIQAAHAAGMQVYADVVFDHKAGADETEVFKVIEVDPNDRTKEISEPFEIEGWTKFTFPGRGDTYSSFKWNSEHFNGTDFDAKGERTGVFRIAGKAWNWEVDTEFGNYDYLMFANIDYNHPDVVTELKNWGKWYVNTTNIDGFRLDAVKHIKFSFFPDWLSYVRSQTGKPLFTVGEYWSYDINKLHNYITKTDGTMSLFDAPLHNKFYTASKKGRDFDMRTLMTNTLMKDQPTLAVTFVDNHDTEPGQALQSWVDPWFKPLAYAFILTRQEGYPCVFYGDYYGIPQYNIPSLKSKIDPLLIARRDYAYGTQHDYLDHSNIIGWTREGGTEKPGSGLAALITNGDGGSKWMYVGKQHAGKVFYDLTGNRSDTVTINSDGWGEFKVNGGSVSVWVPRKTTVS

SEQ ID NO: 20895 - protein, 486 aa, Unidentified
AAPFNGTMMQYFEWYLPDDGTLWTKVANEANNLSSLGITALWLPPAYKGTSRSDVGYGVYDLYDLGEFNQKGTVRTKYGTKAQYLQAIQAAHAAGMQVYADVVFDHKAGADETEVFKVIEVDPNDRTKEISEPFEIEGWTKFTFPGRGDQYSSFKWNSEHFNGTDFDAKGERTGVFRIAGKAWNWEVDTEFGNYDYLMFANIDYNHPDVVTELKNWGKWYVNTTNIDGFRLDAVKHIKFQFFPDWLSYVRSQTGKPLFTVGEYWSYDINKLHNYITKTDWTMSLFDAPLHNKFYTASKSGGAFDMRTLMTNTLMKDQPTLAVTFVDNHDTEPGQALQSWVDPWFKPLAYAFILTRQEGYPCVFYGDYYGIPQYNIPSLKSKIDPLLIARRDYAYGTQHDYLDHSNIIGWTREGGTEKPGSGLAALITNGDGGSKWMYVGKQHAGKVFYDLTGNRSDTVTINSDGWGEFKVNGGSVSVWVPRKTTVS

SEQ ID NO: 20896 - protein, 486 aa, Geobacillus stearothermophilus
AAPFNGTMMQYFEWYLPDDGTLWTKVANEANNLSSLGITALWLPPAYKGTSRSDVGYGVYDLYDLGEFNQKGTVRTKYGTKAQYLQAIQAAHAAGMQVYLDVVFDHKAGADETEVFKVIEVDPNDRTKEISEPFEIEGWTKFTFPGRGDQYSSFKWNSEHFNGVDFDAKGERTGVFRIAGKAWNWEVDTEFGNYDYLMFANIDYNHPDVVTELKNWGKWVVNTTNIDGFRLDAVKHIKFSFFPDWLSYVRSQTGKPLFTVGEYWSYDINKLHNYITKTDGTMSLFDAPLHNKFYTASKSGGAFDLRTLMTNTLMKDQPTLAVTFVDNHDTEPGQALQSWVDPWFKPLAYAFILTRQEGYPCVFYGDYYGIPQYNIPSLKSKIDPLLIARRDYAYGTQHDYLDHSNIIGWTREGGTEKPGSGLAALITNGDGGSKWMYVGKQHAGKVFYDLTGNRSDTVTINSDGWGEFKVNGGSVSVWVPRKTTVS

SEQ ID NO: 20897 - protein, 486 aa, Unidentified
AAPFNGTMMQYFEWYLPDDGTLWTKVANEANNLSSLGITALWLPPAYKGTSRSDVGYGVYDLYDLGEFNQKGTVRTKYGTKAQYLQAIQAAHAAGMQVYADVVFDHKAGADETEVFKVIEVDPNDRTKEISEPFEIEGWTKFTFPGRGDQYSSFKWNSEHFNGVDFDAKGERTGVFRIAGKAWNWEVDTEFGNYDYLMFANIDYNHPDVVTELKNWGKWYVNTTNIDGFRLDAVKHIKFSFYPDWLSYVRSQTGKPLFTVGEYWSYDINKLHNYITKTDGTTSLFDAPLHNKFYTASKSGGAFDLRTLMTNTLMKDQPTLAVTFVDNHDTEPGQALQSWVDPWFKPLAYAFILTRQEGYPCVFYGDYYGIPQYNIPSLKSKIDPLLIARRDYAYGTQHDYLDHSNIIGWTREGGTEKPGSGLAALITNGDGGSKWMYVGKQHAGKVFYDLTGNRSDTVTINSDGWGEFKVNGGSVSVWVPRKTTVS

SEQ ID NO: 20898 - protein, 486 aa, Geobacillus stearothermophilus
AAPFNGTMMQYFEWYLPDDGTLWTKVANEANNLSSLGITALWLPPAYKGTSRSDVGYGVYDLYDLGEFNQKGTVRTKYGTKAQYLQAIQAAHAAGMQVYADVVFNHKAGADETEVFKVIEVDPNDRTKEISEPFEIEGWTKFTFPGRGDQYSSFKWNSEHFNGTDFDAKGERTGVFRIAGKVWNWEVDTEFGNYDYLMFANIDYNHPDVVTELKNWGKWYVNTTNIDGFRLDAVKHIKFSFFPDWLSYVRSQTGKPLFTVGEYWSYDINKLHNYITKTDGTMSLFDAPLHNKFYTASKSGGAFDMRTLMTNTLMKDQPTLAVTFVDNHDTEPGQALQSWVDPWFKPLAYAFILTRQEGYPCVFYGDYYGIPQYNIPSLKSKIDPLLIARRDYAYGTQHDYLDHSNIIGWTREGGTEKPGSGLAALITNGDGGSKWMYVGKQHAGKVFYDLTGNRSDTVTINSDGWGEFKVNGGSVSVWVPRKTTVS

SEQ ID NO: 20899 - protein, 486 aa, Geobacillus stearothermophilus
AAPFNGTMMQYFEWYLPDDGTLWTKVANEANNLSSLGITALWLPPAYKGTSRSDVGYGVYDLYDLGEFNQKGTVRTKYGTKAQYLQAIQAAHAAGMQVYADVVFDHKAGADETEVFKVIEVDPNDRTKEISEPFEIEGWTKFTFPGRGDQYSSFKWNSEHFNGVDFDAKGERTGVFRIAGKAWNWEVDTEFGNYDYLMFANIDYNHPDVVTELKNWGKWYVNTTNIDGFRLDAVKHIKFQFFPDWLSYVRSQTGKPLFTVGEYWSYDINKLHNYITKTDGTTSLFDAPLHNKFYTASKSGGAFDLRTLMTNTLMKDQPTLAVTFVDNHDTEPGQALQSWVDPWFKPLAYAFILTRQEGYPCVFYGDYYGIPQYNIPSLKSKIDPLLIARRDYAYGTQHDYLDHSNIIGWTREGGTEKPGSGLAALITNGDGGSKWMYVGKQHAGKVFYDLTGNRSDTVTINSDGWGEFKVNGGSVSVWVPRKTTVS

SEQ ID NO: 20900 - protein, 486 aa, Unidentified
AAPFNGTMMQYFEWYLPDDGTLWTKVANEANNLSSLGITALWLPPAYKGTSRSDVGYGVYDLYDLGEFNQKGTVRTKYGTKAQYLQAIQAAHAAGMQVYADVVFNHKAGADETEVFKVIEVDPNDRTKEISEPFEIEGWTKFTFPGRGDQYSSFKWNSEHFNGTDFDAKGERTGVFRIAGKKWNWEVDTEFGNYDYLMFANIDYNHPDVVTELKNWGKWYVNTTNIDGFRLDAVKHIKFSFFPDWLSYVRSQTGKPLFTVGEYWSYDINKLHNYITKTDGTMSLFDAPLHNKFYTASKSGGAFDMRTLMTNTLMKDQPTLAVTFVDNHDTEPGQALQSWVDPWFKPLAYAFILTRQEGYPCVFYGDYYGIPQYNIPSLKSKIDPLLIARRDYAYGTQHDYLDHSNIIGWTREGGTEKPGSGLAALITNGDGGSKWMYVGKQHAGKVFYDLTGNRSDTVTINSDGWGEFKVNGGSVSVWVPRKTTVS

SEQ ID NO: 20901 - protein, 486 aa, Unidentified
AAPFNGTMMQYFEWYLPDDGTLWTKVANEANNLSSLGITALWLPPAYKGTSRSDVGYGVYDLYDLGEFNQKGTVRTKYGTKAQYLQAIQAAHAAGMQVYADVVFNHKAGADETEVFKVIEVDPNDRTKEISEPFEIEGWTKFTFPGRGDQYSSFKWNSEHFNGTDFDAKGERTGVFRIAGKAWNWEVDTEFGNYDYLMFANIDYNHPDVVTELKNWGKWYVNTTNIDGFRLDAVKHIKFSFFPDWLSYVRSQTGKPLFTVGEYWSYDLNKLHNYITKTDGTMSLFDAPLHNKFYTASKSGGAFDMRTLMTNTLMKDQPTLAVTFVDNHDTEPGQALQSWVDPWFKPLAYAFILTRQEGYPCVFYGDYYGIPQYNIPSLKSKIDPLLIARRDYAYGTQHDYLDHSNIIGWTREGGTEKPGSGLAALITNGDGGSKWMYVGKQHAGKVFYDLTGNRSDTVTINSDGWGEFKVNGGSVSVWVPRKTTVS

SEQ ID NO: 20902 - protein, 486 aa, Geobacillus stearothermophilus
AAPFNGTMMQYFEWYLPDDGTLWTKVANEANNLSSLGITALWLPPAYKGTSRSDVGYGVYDLYDLGEFNQKGTVRTKYGTKAQYLQAIQAAHAAGMQVYADVVFDHKAGADETEVFKVIEVDPNDRTKEISEPFEIEGWTKFTFPGRGDQYSSFKWNSEHFNGTDFDAKGERTGVFRIAGKAWNWEVDTEFGNYDYLMFANIDYNHPDVVTELKNWGKWYVNTTNIDGFRLDWVKHIKFQFFPDWLSYVRSQTGKPLFTVGEYWSYDINKLHNYITKTDGTMSLFDAPLHNKFYTASKSGGAFDMRTLMTNTLMKDQPTLAVTFVDNHDTEPGQALQSWVDPWFKPLAYAFILTRQEGYPCVFYGDYYGIPQYNIPSLKSKIDPLLIARRDYAYGTQHDYLDHSNIIGWTREGGTEKPGSGLAALITNGDGGSKWMYVGKQHAGKVFYDLTGNRSDTVTINSDGWGEFKVNGGSVSVWVPRKTTVS

SEQ ID NO: 20903 - protein, 486 aa, Unidentified
AAPFNGTMMQYFEWYLPDDGTLWTKVANEANNLKSLGITALWLPPAYKGTSRSDVGYGVYDLYDLGEFNQKGTVRTKYGTKAQYLQAIQAAHAAGMQVYADVVFDHKAGADETEVFKVIEVDPNDRTKEISEPFEIEGWTKFTFPGRGDQYSSFKWNSEHFNGTDFDAKGERTGVFRIAGKAWNWEVDTEFGNYDYLMFANIDYNHPDVVTELKNWGKWYVNTTNIDGFRLDAVKHIKFQFFPDWLSYVRSQTGKPLFTVGEYWSYDINKLHNYITKTDGTMSLFDAPLHNKFYTASKSGGAFDMRTLMTNTLMKDQPTLAVTFVDNHDTEPGQALQSWVDPWFKPLAYAFILTRQEGYPCVFYGDYYGIPQYNIPSLKSKIDPLLIARRDYAYGTQHDYLDHSNIIGWTREGGTEKPGSGLAALITNGDGGSKWMYVGKQHAGKVFYDLTGNRSDTVTINSDGWGEFKVNGGSVSVWVPRKTTVS

SEQ ID NO: 20904 - protein, 486 aa, Unidentified
AAPFNGTMMQYFEWYLPDDGTLWTKVANEANNLSSLGITALWLPPAYKGTSGYDVGYGVYDLYDLGEFNQKGTVRTKYGTKAQYLQAIQAAHAAGMQVYADVVFDHKAGADETEVFKVIEVDPNDRTKEISEPFEIEGWTKFTFPGRGDQYSSFKWNSEHFNGTDFDAKGERTGVFRIAGKAWNWEVDTEFGNYDYLMFANIDYNHPDVVTELKNWGKWYVNTTNIDGFRLDAVKHIKFSFFPDWLSYVRSQTGKPLFTVGEYWSYDINKLHNYITKTDGTMSLFDAPLHNKFYTASKSGGAFDMRTLMTNTLMKDQPTLAVTFVDNHDTEPGQALQSWVDPWFKPLAYAFILTRQEGYPCVFYGDYYGIPQYNIPSLKSKIDPLLIARRDYAYGTQHDYLDHSNIIGWTREGGTEKPGSGLAALITNGDGGSKWMYVGKQHAGKVFYDLTGNRSDTVTINSDGWGEFKVNGGSVSVWVPRKTTVS

SEQ ID NO: 20905 - protein, 486 aa, Unidentified
AAPFNGTMMQYFEWYLPDDGTLWTKVANEANNLSSLGITALWLPPAYKGTSRSDVGYGVYDLYDLGEFNQKGTVRTKYGTKAQYLQAIQAAHAAGMQVYADVVFDHKAGADETEVFKVIEVDPNDRTKVISEPFEIEGWTKFTFPGRGDQYSSFKWNSEHFNGTDFDAKGERTGVFLIEGKKWNWEVDTEFGNYDYLMFANIDYNHPDVVTELKNWGKWYVNTTNIDGFRLDAVKHIKFSFFPDWLSYVRSQTGKPLFTVGEYWSYDINKLHNYITKTDGTMSLFDAPLHNKFYTASKSGGAFDMRTLMTNTLMKDQPTLAVTFVDNHDTEPGQALQSWVDPWFKPLAYAFILTRQEGYPCVFYGDYYGIPQYNIPSLKSKIDPLLIARRDYAYGTQHDYLDHSNIIGWTREGGTEKPGSGLAALITNGDGGSKWMYVGKQHAGKVFYDLTGNRSDTVTINSDGWGEFKVNGGSVSVWVPRKTTVS

SEQ ID NO: 20906 - protein, 486 aa, Unidentified
AAPFNGTMMQYFEWYLPDDGTLWTKVANEANNLSSLGITALWLPPAYKGTSRSDVGYGAYDLYDLGEFNQKGTVRTKYGTKAQYLQAIQAAHAAGMQVYGDVVFDHKAGADETEVFKVIEVDPNDRTKEISEPFEIEGWTKFTFPGRGDQYSSFKWNSEHFNGVDFDAKGERTGVFRIAGKAWNWEVDTEFGNYDYLMFANIDYNHPDVVTELKNWGKWYVNTTNIDGFRLDAVKHIKFSFFPDWLSYVRSQTGKPLFTVGEYWSYDINKLHNYITKTDGTMSLFDAPLHNKFYTASKSGGAFDLRTLMTNTLMKDQPTLAVTFVDNHDTEPGQALQSWVDPWFKPLAYAFILTRQEGYPCVFYGDYYGIPQYNIPSLKSKIDPLLIARRDYAYGTQHDYLDHSNIIGWTREGGTEKPGSGLAALITNGDGGSKWMYVGKQHAGKVFYDLTGNRSDTVTINSDGWGEFKVNGGSVSVWVPRKTTVS

SEQ ID NO: 20907 - protein, 486 aa, Unidentified
AAPFNGTMMQYFEWYLPDDGTLWTKVANEANNLSSLGITALWLPPAYKGTSRSDVGYGVYDLYDLGEFNQKGTVRTKYGTKAQYLQAIQAAHAAGMQVYADVVFDHKAGADETEVFKVIEVDPNDRTKEISEPFEIEGWTKFTFPGRGDQYSSFKWNSEHFNGVDFDAKGERTGVFRIAGKAWNWEVDTEFGNYDYLMFANIDYNHPDVVTELKNWGKWYVNTTNIDGFRLDAVKHIKFSFYPDWLSYVRSQTGKPLFTVGEYWSYDINKLHNYITKTDGTQSLFDAPLHNKFYTASKSGGAFDLRTLMTNTLMKDQPTLAVTFVDNHDTEPGQALQSWVDPWFKPLAYAFILTRQEGYPCVFYGDYYGIPQYNIPSLKSKIDPLLIARRDYAYGTQHDYLDHSNIIGWTREGGTEKPGSGLAALITNGDGGSKWMYVGKQHAGKVFYDLTGNRSDTVTINSDGWGEFKVNGGSVSVWVPRKTTVS

SEQ ID NO: 20908 - protein, 482 aa, Unidentified
HHNGTNGTMMQYFEWHLPNDGNHWNRLRDDASNLRNRGITAIWIPPAWKGTSQNDVGYGAYDLYDLGEFNQKGTVRTKYGTRSQLESAIHALKNNGVQVYGDVVMNHKAGADETEVFKVIEVDPNDRTKEISEPFEIEGWTKFTFPGRGDQYSSFKWNSEHFNGTDFDAKGERTGVFRIAGKKWNWEVDTEFGNYDYLMFANIDYNHPDVRRELRRWGEWYTNTLNLDGFRIDAVKHIKYSFTRDWLTHVRNATGKEMFAVAEFWKNDLGALENYLNKTNWNHSVFDVPLHYNLYNASNSGGNYDMAKLLNGTVVQKHPMHAVTFVDNHDSQPGESLESFVQEWFKPLAYALILTREQGYPSVFYGDYYGIPTHSVPAMKAKIDPILEARQNFAYGTQHDYFDHHNIIGWTREGNTTHPNSGLATIMSDGPGGEKWMYVGQNKAGQVWHDITGNKPGTVTINADGWANFSVNGGSVSIWVKR

SEQ ID NO: 20909 - protein, 484 aa, Bacillus sp. NCIB 12513
HHNGTNGTMMQYFEWHLPNDGNHWNRLRDDASNLRNRGITAIWIPPAWKGTSQNDVGYGAYDLYDLGEFNQKGTVRTKYGTRSQLESAIHALKNNGVQVYGDVVMNHKAGADETEVFKVIEVDPNDRTKEISEPFEIEGWTKFTFPGRGDQYSSFKWNSEHFNGTDFDAKGERTGVFRIAGENKKWNENVDDEFGNYDYLMFANIDYNHPDVVNELRRWGEWYTNTLNLDGFRIDAVKHIKYSFTRDWLTHVRNATGKEMFAVAEFWKNDLGALENYLNKTNWNHSVFDVPLHYNLYNASNSGGNYDMAKLLNGTVVQKHPMHAVTFVDNHDSQPGESLESFVQEWFKPLAYALILTREQGYPSVFYGDYYGIPTHSVPAMKAKIDPILEARQNFAYGTQHDYFDHHNIIGWTREGNTTHPNSGLATIMSDGPGGEKWMYVGQNKAGQVWHDITGNKPGTVTINADGWANFSVNGGSVSIWVKR

SEQ ID NO: 20910 - protein, 486 aa, Unidentified
AAPFNGTMMQYFEWYLPDDGTLWTKVANEANNLSSLGITALWLPPAYKGTSRSDVGYGVYDLYDLGEFNQKGTVRTKYGTKAQYLQAIQAAHAAGMQVYADVVFDHKAGADETEVFKVIEVDPNDRTKEISEPFEIEGWTKFTFPGRGDQYSSFKWNSEHFNGVDFDAKGERTGVFRIAGKAWNWEVDTEFGNYDYLMFANIDYNHPDVVTELKNWGKWYVQTTNIDGFRLDAVKHIKFQFFPDWLSYVRSQTGKPLFTVGEYWSYDINKLHNYITKTDGTTSLFDAPLHNKFYTASKSGGAFDLRTLMTNTLMKDQPTLAVTFVDNHDTEPGQALQSWVDPWFKPLAYAFILTRQEGYPCVFYGDYYGIPQYNIPSLKSKIDPLLIARRDYAYGTQHDYLDHSNIIGWTREGGTEKPGSGLAALITNGDGGSKWMYVGKQHAGKVFYDLTGNRSDTVTINSDGWGEFKVNGGSVSVWVPRKTTVS

SEQ ID NO: 20911 - protein, 486 aa, Geobacillus stearothermophilus
AAPFNGTMMQYFEWYLPDDGTLWTKVANEANNLSSLGITALWLPPAYKGTSRSDVGYGVYDLYDLGEFNQKGTVRTKYGTKAQYLQAIQAAHAAGMQVYADVVFNHKAGADETEVFKVIEVDPNDRTKEISEPFEIEGWTKFTFPGRGDQYSSFKWNSEHFNGTDFDAKGERTGVFRIAGKKWNWEVDTEFGNYDYLMFANIDYNHPDVVTELKNWGKWYVNTTNIDGFRLDAVKHIKFEFFPDWLSYVRSQTGKPLFTVGEYWSYDINKLHNYITKTDGTMSLFDAPLHNKFYTASKSGGAFDMRTLMTNTLMKDQPTLAVTFVDNHDTEPGQALQSWVDPWFKPLAYAFILTRQEGYPCVFYGDYYGIPQYNIPSLKSKIDPLLIARRDYAYGTQHDYLDHSNIIGWTREGGTEKPGSGLAALITNGDGGSKWMYVGKQHAGKVFYDLTGNRSDTVTINSDGWGEFKVNGGSVSVWVPRKTTVS

SEQ ID NO: 20912 - protein, 486 aa, Geobacillus stearothermophilus
AAPFNGTMMQYFEWYLPDDGTLWTKVANEANNLSSLGITALWLPPAYKGTSRSDVGYGVYDLYDLGEFNQKGTVRTKYGTKAQYLQAIQAAHAAGMQVYADVVFNHKAGADETEVFKVIEVDPNDRTKEISEPFEIEGWTKFTFPGRGDQYSSFKWNSEHFNGTDFDAKGERTGVFRIAGKKWNWEVDTEFGNYDYLMFANIDYNHPDVVTELKNWGKWYVNTTNIDGFRLDAVKHIKFSFFPDWLSYVRSQTGKPLFTVGEYWSYDINKLHNYITKTDGTMSLFDAPLHNKFYTASKSGGAFDMRTLMTNTLMKDQPTLAVTFVDNHDTEPGQALQSWVDPWFKPLAYAFILTRQEGYPCVFYGDYYGIPQYNIPSLKSKIDPLLIARRDYAYGTQHDYLDHSNIIGWTREGGTEKPGSGLAALITNGDGGSKWMYVGKQHAGKVFYDLTGNRSDTVTINSDGWGEFKVNGKSVSVWVPRKTTVS

SEQ ID NO: 20913 - protein, 486 aa, Geobacillus stearothermophilus
AAPFNGTMMQYFEWYLPDDGTLWTKVANEANNLSSLGITALWLPPAYKGTSRSDVGYGVYDLYDLGEFNQKGTVRTKYGTKAQYLQAIQAAHAAGMQVYADVVFDHKAGADETEVFKVIEVDPNDRTKEISEPFEIEGWTKFTFPGRGDQYSSFKWNSEHFNGTDFDAKGERTGVFRIAGKAWNWEVDTEFGNYDYLMFANIDYNHPDVVTELKNWGKWYVNTTNIDGFRLDAVKHIKFSFFPDWLSYVRSQTGKPLFTVGEYWSYDINKLHNYITKTDGTMSLFDAPLHNKFYTASKKGRDFDMRTLMTNTLMKDQPTLAVTFVDNHDTEPGQALQSWVDPWFKPLAYAFILTRQEGYPCVFYGDYYGIPQYNIPSLKSKIDPLLIARRDYAYGTQHDYLDHSNIIGWTREGGTEKPGSGLAALITNGDGGSKWMYVGKQHAGKVFYDLTGNRSDTVTINSDGWGEFKVNGGSVSVWVPRKTTVS

SEQ ID NO: 20914 - protein, 486 aa, Geobacillus stearothermophilus
AAPFNGTMMQYFEWYLPDDGTLWTKVQNEANNLSSLGITALWLPPAYKGTSRSDVGYGVYDLYDLGEFNQKGTVRTKYGTKAQYLSAIQSAHAAGMQVYADVVFDHKAGADETEVFKVIEVDPNDRTKEISEPFEIEGWTKFTFPGRGDQYSSFKWNSEHFNGTDFDAKGERTGVFRIAGKAWNWEVDTEFGNYDYLMFANIDYNHPDVVTELKNWGKWYVNTTNIDGFRLDAVKHIKFSFFPDWLSYVRSQTGKPLFTVGEYWSYDINKLHNYITKTDGTMSLFDAPLHNKFYTASKSGGAFDMRTLMTNTLMKDQPTLAVTFVDNHDTEPGQALQSWVDPWFKPLAYAFILTRQEGYPCVFYGDYYGIPQYNIPSLKSKIDPLLIARRDYAYGTQHDYLDHSNIIGWTREGGTEKPGSGLAALITNGDGGSKWMYVGKQHAGKVFYDLTGNRSDTVTINSDGWGEFKVNGGSVSVWVPRKTTVS

SEQ ID NO: 20915 - protein, 486 aa, Unidentified
AAPFNGTMMQYFEWYLPDDGTLWTKVANEANNLSSLGITALWLPPAYKGTSRSDVGYGVYDLYDLGEFNQKGTVRTKYGTKAQYLQAIQAAHAAGMQVYADVVFDHKAGADETEVFKVIEVDPNDRTKEISEPFEIEGWTKFTFPGRGDQYSSFKWNSEHFNGTDFDAKGERTGVFRIAGKKWNWEVDTEFGNYDYLMFANIDYNHPDVVTELKNWGPWYVLTTNIDGFRLDAVKHIKFSFFPDWLSYVRSQTGKPLFTVGEYWSYDINKLHNYITKTDGTMSLFDAPLHNKFYTASKSGGAFDMRTLMTNTLMKDQPTLAVTFVDNHDTEPGQALQSWVDPWFKPLAYAFILTRQEGYPCVFYGDYYGIPQYNIPSLKSKIDPLLIARRDYAYGTQHDYLDHSNIIGWTREGGTEKPGSGLAALITNGDGGSKWMYVGKQHAGKVFYDLTGNRSDTVTINSDGWGEFKVNGGSVSVWVPRKTTVS

SEQ ID NO: 20916 - protein, 486 aa, Geobacillus stearothermophilus
AAPFNGTMMQYFEWYLPDDGTLWTKVANEANNLSSLGITALWLPPAYKGTSRSDVGYGVYDLYDLGEFNQKGTVRTKYGTKAQYLQAIQAAHAAGMQVYADVVFNHKAGADETEVFKVIEVDPNDRTKEISEPFEIEGWTKFTFPGRGDQYSSFKWNSEHFNGTDFDAKGERTGVFRIAGKKWNWEVDTEFGNYDYLMFANIDYNHPDVVTELKNWGKWYVNTTNIDGFRLDAVKHIKFSFFPDWLSYVRSQTGKPLFTVGEYWSYDINKLHNYITKTDGTMSLFDAPLHNKFYTASKSGGAFDMRTLMTNTLMKDQPTLAVTFVDNHDTEPGQALQSWVDPWFKPLAYAFILTRQEGYPCVFYGDYYGIPQYNIPSLKSKIDPLLIARRDYAYGTQHDYLDHSNIIGWTREGGTEKPGSGLAALITNGDGGSKWMYVGKQHAGKVFYDLTGNRSDTVTINSDGWGEFKVNGQSVSVWVPRKTTVS

SEQ ID NO: 20917 - protein, 486 aa, Anoxybacillus flavithermus
PVNGTMMQYFEWYLPDDGTLWTKVANNAQSLANLGITALWLPPAYKGTSSSDVGYGVYDLYDLGEFNQKGTVRTKYGTKTQYIQAIQAAHTAGMQVYADVVFNHKAGADGTELVDAVEVNPSDRNQEISGTYQIQAWTKFDFPGRGNTYSSFKWRWYHFDGTDWDESRKLNRIYKFRGTGKAWDWEVDTENGNYDYLMYADLDMDHPEVVSELKNWGKWYVTTTNIDGFRLDAVKHIKYSFFPDWLSYVRTQTQKPLFAVGEFWSYDISKLHNYITKTNGSMSLFDAPLHNNFYIASKSGGYFDMRTLLNNTLMKDQPTLAVTLVDNHDTEPGQSLQSWVEPWFKPLAYAFILTRQEGYPCVFYGDYYGIPKYNIPALKSKLDPLLIARRDYAYGTQHDYIDSADIIGWTREGVAEKANSGLAALITDGPGGSKWMYVGKQHAGKTFYDLTGNRSDTVTINADGWGEFKVNGGSVSIWVPKISTTS

SEQ ID NO: 20918 - protein, 484 aa, Unidentified
HHNGTNGTMMQYFEWHLPNDGNHWNRLRDDASNLRNRGITAIWIPPAWKGTSQNDVGYGAYDLYDLGEFNQKGTVRTKYGTRSQLESAIHALKNNGVQVYGDVVMNHKAGADETEVFKVIEVDPNDRTKEISEPFEIEGWTKFTFPGRGDQYSSFKWNSEHFNGTDFDAKGERTGVFRIAGENKKWNENVDDEFGNYDYLMFANIDYNHPDVRNELRRWGEWYTNTLNLDGFRIDAVKHIKYSFTRDWLTHVRNATGKEMFAVAEFWKNDLGALENYLNKTNWNHSVFDVPLHYNLYNASNSGGNYDMAKLLNGTVVQKHPMHAVTFVDNHDSQPGESLESFVQEWFKPLAYALILTREQGYPSVFYGDYYGIPTHSVPAMKAKIDPILEARQNFAYGTQHDYFDHHNIIGWTREGNTTHPNSGLATIMSDGPGGEKWMYVGQNKAGQVWHDITGNKPGTVTINADGWANFSVNGGSVSIWVKR

SEQ ID NO: 20919 - protein, 486 aa, Unidentified
AAPFNGTMMQYFEWYLPDDGTLWTKVANEANNLSSLGITALWLPPAYKGTSRSDVGYGVYDLYDLGEFNQKGTVRTKYGTKAQYLQAIQAAHAAGMQVYADVVFDHKAGADETEVFKVIEVDPNDRTKEISEPFEIEGWTKFTFPGRGDQYSSFKWNSEHFNGVDFDAKGERTGVFRIAGKAWNWEVDTEFGNYDYLMFANIDYNHPDVVTELKNWGKWVVQTTNIDGFRLDAVKHIKFQFFPDWLSYVRSQTGKPLFTVGEYWSYDINKLHNYITKTDGTTSLFDAPLHNKFYTASKSGGAFDLRTLMTNTLMKDQPTLAVTFVDNHDTEPGQALQSWVDPWFKPLAYAFILTRQEGYPCVFYGDYYGIPQYNIPSLKSKIDPLLIARRDYAYGTQHDYLDHSNIIGWTREGGTEKPGSGLAALITNGDGGSKWMYVGKQHAGKVFYDLTGNRSDTVTINSDGWGEFKVNGGSVSVWVPRKTTVS

SEQ ID NO: 20920 - protein, 486 aa, Unidentified
AAPFNGTMMQYFEWYLPDDGTLWTKVANEANNLSSLGITALWLPPAYKGTSRSDVGYGVYDLYDLGEFNQKGTVRTKYGTKAQYLQAIQAAHAAGMQVYADVVFDHKAGADETEVFKVIEVDPNDRTKEISEPFEIEGWTKFTFPGRGDQYSSFKWNSEHFNGTDFDAKGERTGVFRIATKAWNWEVDTEFGNYDYLMFANIDYNHPDVVTELKNWGKWYVNTTNIDGFRLDAVKHIKFSFFPDWLSYVRSQTGKPLFTVGEYWSYDINKLHNYITKTDGTMSLFDAPLHNKFYTASKKGRDFDMRTLMTNTLMKDQPTLAVTFVDNHDTEPGQALQSWVDPWFKPLAYAFILTRQEGYPCVFYGDYYGIPQYNIPSLKSKIDPLLIARRDYAYGTQHDYLDHSNIIGWTREGGTEKPGSGLAALITNGDGGSKWMYVGKQHAGKVFYDLTGNRSDTVTINSDGWGEFKVNGGSVSVWVPRKTTVS

SEQ ID NO: 20921 - protein, 486 aa, Geobacillus stearothermophilus
AAPFNGTMMQYFEWYLPDDGTLWTKVANEANNLSSLGITALWLPPAYKGTSRSDVGYGVYDLYDLGEFNQKGTVRTKYGTKAQYLQAIQAAHAAGMQVYADVVFDHKAGADETEVFKVIEVDPNDRTKEISEPFEIEGWTKFTFPGRGDQYSSFKWNSEHFNGTDFDAKGERTGVFRIAGKKWNWEVDTEFGNYDYLMFANIDYNHPDVVTELKNWGKWYVNTTNIDGFRLDAVKHIKFSFFPDWLSYVRSQTGKPLFTVGEYWSYDINKLHNYITKTDGTMSLFDAPLHNKFYTASKKGRDFDMRTLMTNTLMKDQPTLAVTFVDNHDTEPGQALQSWVDPWFKPLAYAFILTRQEGYPCVFYGDYYGIPQYNIPSLKSKIDPLLIARRDYAYGTQHDYLDHSNIIGWTREGGTEKPGSGLAALITNGDGGSKWMYVGKQHAGKVFYDLTGNRSDTVTINSDGWGEFKVNGGSVSVWVPRKTTVS

SEQ ID NO: 20922 - protein, 488 aa, Unidentified
AAPFNGTMMQYFEWYLPDDGTLWTKVANEANNLSSLGITALWLPPAYKGTSRSDVGYGVYDLYDLGEFNQKGTVRTKYGTKAQYLQAIQAAHAAGMQVYADVVFNHKAGADETEVFKVIEVDPNDRTKEISEPFEIEGWTKFTFPGRGDQYSSFKWNSEHFNGTDFDAKGERTGVFRIAGENKKWNENVDDEFGNYDYLMFANIDYNHPDVVTELKNWGKWYVNTTNIDGFRLDAVKHIKFSFFPDWLSYVRSQTGKPLFTVGEYWSYDINKLHNYITKTNGTMSLFDAPLHNKFYTASKSGGAFDMRTLMTNTLMKDQPTLAVTFVDNHDTEPGQALQSWVDPWFKPLAYAFILTRQEGYPCVFYGDYYGIPQYNIPSLKSKIDPLLIARRDYAYGTQHDYLDHSDIIGWTREGVTEKPGSGLAALITDGPGGSKWMYVGKQHAGKVFYDLTGNRSDTVTINSDGWGEFKVNGGSVSVWVPRKTTVS

SEQ ID NO: 20923 - protein, 485 aa, Synthetic construct
HHNGTNGTMMQYFEWYLPNDGNHWNRLRSDASNLKDKGISAVWIPPAWKGASQNDVGYGAYDLYDLGEFNQKGTIRTKYGTRNQLQAAVNALKSNGIQVYGDVVMNHKGGADATENVLAVEVNPNNRNQEISGDYTIEAWTKFDFPGRGNTYSDFKWRWYHFDGVDWDQSRQFQNRIYKFRGDGKAWDWEVDSENGNYDYLMYADVDMDHPEVVNELRNWGVWYTNTLGLDGFRIDAVKHIKYSFTRDWINHVRSATGKNMFAVAEFWKNDLGAIENYLNKTNWNHSVFDVPLHYNLYNASKSGGNYDMRQIFNGTVVQRHPMHAVTFVDNHDSQPEEALESFVEEWFKPLAYALTLTREQGYPSVFYGDYYGIPTHGVPAMKSKIDPILEARQKYAYGRQNDYLDHHNIIGWTREGNTAHPNSGLATIMSDGAGGNKWMFVGRNKAGQVWTDITGNRAGTVTINADGWGNFSVNGGSVSIWVNK

SEQ ID NO: 20924 - protein, 484 aa, Unidentified
HHNGTNGTMMQYFEWHLPNDGNHWNRLRDDASNLRNRGITAIWIPPAWKGTSQNDVGYGAYDLYDLGEFNQKGTVRTKYGTRSQLESAIHALKNNGVQVYGDVVMNHKAGADETEVFKVIEVDPNDRTKEISEPFEIEGWTKFTFPGRGDQYSSFKWNSEHFNGTDFDAKGERTGVFRIAGENKKWNENVDDEFGNYDYLMFANIDYNHPDVRRELRRWGEWYTNTLNLDGFRIDAVKHIKYSFTRDWLTHVRNATGKEMFAVAEFWKNDLGALENYLNKTNWNHSVFDVPLHYNLYNASNSGGNYDMAKLLNGTVVQKHPMHAVTFVDNHDSQPGESLESFVQEWFKPLAYALILTREQGYPSVFYGDYYGIPTHSVPAMKAKIDPILEARQNFAYGTQHDYFDHHNIIGWTREGNTTHPNSGLATIMSDGPGGEKWMYVGQNKAGQVWHDITGNKPGTVTINADGWANFSVNGGSVSIWVKR

SEQ ID NO: 20925 - protein, 491 aa, Geobacillus stearothermophilus
AAPFNGTMMQYFEWYLPDDGTLWTKVANEANNLSSLGITALWLPPAYKGTSRSDVGYGVYDLYDLGEFNQKGTVRTKYGTKAQYLQAIQAAHAAGMQVYADVVFDHKAGADETEVFKVIEVDPNDRTKEISEPFEIEGWTKFTFPGRGDTYSSFKWNSEHFNGVDWDEKGKRTGVFRIAGKAWNWEVDTEFGNYDYLMFANIDYNHPDVVTELKNWGKWYVNTTNIDGFRLDAVKHIKFSFFPDWLSYVRSQTGKPLFTVGEYWSYDINKLHNYITKTDGTMSLFDAPLHNKFYTASKSGGAFDMRTLMTNTLMKDQPTLAVTFVDNHDTEPGQALQSWVDPWFKPLAYAFILTRQEGYPCVFYGDYYGIPQYNIPSLKSKIDPLLIARRDYAYGTQHDYLDHSDIIGWTREGGTEKPGSGLAALITDGPGGSKWMYVGKQHAGKVFYDLTGNRSDTVTINSDGWGEFKVNGGSVSVWVPRKTTVSTIARP

SEQ ID NO: 20926 - protein, 486 aa, Geobacillus stearothermophilus
AAPFNGTMMQYFEWYLPDDGTLWTKVANEANNLSSLGITALWLPPAYKGTSRSDVGYGVYDLYDLGEFNQKGTVRTKYGTKAQYLQAIQAAHAAGMQVYADVVFNHKAGADETEVFKVIEVDPNDRTKEISEPFEIEGWTKFTFPGRGDQYSSFKWNSEHFNGTDFDAKGERTGVFRIAGKKWNWEVDTEFGNYDYLMFANIDYNHPDVVTELKNWGKWYVNTTNIDGFRLDAVKHIKFSFFPDWLSYVRSQTGKPLFTVGEYWSYDINKLHNYITKTDGTMSLFDAPLHNKFYTASKKGRDFDMRTLMTNTLMKDQPTLAVTFVDNHDTEPGQALQSWVDPWFKPLAYAFILTRQEGYPCVFYGDYYGIPQYNIPSLKSKIDPLLIARRDYAYGTQHDYLDHSNIIGWTREGGTEKPGSGLAALITNGDGGSKWMYVGKQHAGKVFYDLTGNRSDTVTINSDGWGEFKVNGGSVSVWVPRKTTVS

SEQ ID NO: 20927 - protein, 488 aa, Bacteria
SVPVNGTMMQYFEWYLPDDGTLWTKVANNAQSLANLGITALWLPPAYKGTSSSDVGYGVYDLYDLGEFNQKGTVRTKYGTKTQYIQAIQAAHTAGMQVYADVVFNHKAGADGTELVDAVEVNPSDRNQEISGTYQIQAWTKFDFPGRGNTYSSFKWRWYHFDGTDWDESRKLNRIYKFRGTGKAWDWEVDTENGNYDYLMYADLDMDHPEVVSELKNWGKWYVTTTNIDGFRLDAVKHIKYSFFPDWLSYVRTQTQKPLFSVGEFWSYDISKLHNYITKTNGSMSLFDAPLHNNFYIASKSGGYFDMRTLLNNTLMKDQPTLAVTLVDNHDTEPGQSLQSWVEPWFKPLAYAFILTRQEGYPCVFYGDYYGIPKYNIPALKSKLDPLLIARRDYAYGTQHDYIDSADIIGWTREGVAEKANSGLAALITDGPGGSKWMYVGKQHAGKTFYDLTGNRSDTVTINADGWGEFKVNGGSVSIWVPKTSTTS

SEQ ID NO: 20928 - protein, 488 aa, Bacillus sp.
SVPVNGTMMQYFEWYLPDDGTLWTKVANNAQSLANLGITALWLPPAYKGTSSSDVGYGVYDLYDLGEFNQKGTVRTKYGTKTQYIQAIQAAHTAGMQVYADVVFNHKAGADGTELVDAVEVNPSDRNQEISGTYQIQAWTKFDFPGRGNTYSSFKWRWYHFDGTDWDESRKLNRIYKFRGTGKAWDWEVDTENGNYDYLMYADLDMDHPEVVSELKNWGKWYVTTTNIDGFRLDAVKHIKYSFFPDWLSYVRTQTQKPLFAVGEFWSYDISKLHNYITKTNGSMSLFDAPLHNNFYIASKSGGYFDMRTLLNNTLMKDQPTLAVTLVDNHDTEPGQSLQSWVEPWFKPLAYAFILTRQEGYPCVFYGDYYGIPKYNIPALKSKLDPLLIARRDYAYGTQHDYIDSADIIGWTREGVAEKANSGLAALITDGPGGSKWMYVGKQHAGKTFYDLTGNRSDTVTINADGWGEFKVNGGSVSIWVPKISTTS

SEQ ID NO: 20929 - protein, 488 aa, Anoxybacillus flavithermus
SVPVNGTMMQYFEWYLPDDGTLWTKVANNAQSLANLGITALWLPPAYKGTSSSDVGYGVYDLYDLGEFNQKGTVRTKYGTKTQYIQAIQAAHTAGMQVYADVVFNHKAGADGTELVDAVEVNPSDRNQEISGTYQIQAWTKFDFPGRGNTYSSFKWRWYHFDGTDWDESRKLNRIYKFRGTGKAWDWEVDTENGNYDYLMYADLDMDHPEVVSELKNWGKWYVTTTNIDGFRLDAVKHIKYSFFPDWLSYVRTQTQKPLFAVGEFWSYDISKLHNYITKTNGSMSLFDAPLHNNFYIASKSGGYFDMRTLLNNTLMKDQPTLAVTLVDNHDTEPGQSLQSWVEPWFKPLAYAFILTRQEGYPCVFYGDYYGIPKYNIPALKSKLDPLLIARRDYAYGTQHDYIDSADIIGWTREGVAEKANSGLAALITDGPGGSKWMYVGKQHAGKTFYDLTGNRSDTVTINADGWGEFKVNGGSVSIWVPKTSTTS

SEQ ID NO: 20930 - protein, 485 aa, Synthetic construct
HHNGTNGTMMQYFEWYLPNDGNHWNRLNSDASNLKSKGITAVWIPPAWKGASQNDVGYGAYDLYDLGEFNQKGTVRTKYGTRSQLQAAVTSLKNNGIQVYGDVVMNHKGGADATENVLAVEVNPNNRNQEISGDYTIEAWTKFDFPGRGNTYSDFKWRWYHFDGVDWDQSRQFQNRIYKFRGDGKAWDWEVDSENGNYDYLMYADVDMDHPEVVNELRNWGVWYTNTLGLDGFRIDAVKHIKYSFTRDWINHVRSATGKNMFAVAEFWKNDLGAIENYLQKTNWNHSVFDVPLHYNLYNASKSGGNYDMRNIFNGTVVQRHPSHAVTFVDNHDSQPEEALESFVEEWFKPLAYALTLTREQGYPSVFYGDYYGIPTHGVPAMRSKIDPILEARQKYAYGKQNDYLDHHNIIGWTREGNTAHPNSGLATIMSDGAGGSKWMFVGRNKAGQVWSDITGNRTGTVTINADGWGNFSVNGGSVSIWVNK

SEQ ID NO: 20931 - protein, 485 aa, Synthetic construct
HHNGTNGTMMQYFEWYLPNDGNHWNRLNSDASNLKSKGITAVWIPPAWKGASQNDVGYGAYDLYDLGEFNQKGTVRTKYGTRSQLQAAVTSLKNNGIQVYGDVVMNHKGGADATEMVRAVEVNPNNRNQEVTGEYTIEAWTRFDFPGRGNTHSSFKWRWYHFDGVDWDQSRRLNNRIYKFRGHGKAWDWEVDTEFGNYDYLMYADYDMDHPEVVNELRNWGVWYTNTLGLDGFRIDAVKHIKYSFTRDWINHVRSATGKNMFAVAEFWKNDLGAIENYLQKTNWNHSVFDVPLHYNLYNASKSGGNYDMRNIFNGTVVQRHPSHAVTFVDNHDSQPEEALESFVEEWFKPLAYALTLTREQGYPSVFYGDYYGIPTHGVPAMRSKIDPILEARQKYAYGPQHDYLDHPDVIGWTREGDSSHPKSGLATLITDGPGGSKRMYAGRKNAGETWYDITGNRSDTVKIGSDGWGEFHVNDGSVSIYVQK

SEQ ID NO: 20932 - protein, 491 aa, Unidentified
AAPFNGTMMQYFEWYLPDDGTLWTKVANEANNLSSLGITALWLPPAYKGTSRSDVGYGVYDLYDLGEFNQKGTVRTKYGTKAQYLQAIQAAHAAGMQVYADVVFNHKAGADETEWFKVIEVDPNDRTKEISEPYQIEGWTKFTFPGRGDQYSSFKWNSEHFNGTDFDASRELTRVYRIAGKKWNWEVDTEFGNYDYLMFANIDYNHPDVVTELKNWGKWYVNTTNIDGFRLDAVKHIKFSFFPDWLSYVRSQTGKPLFTVGEYWSYDINKLHNYITKTDGTMSLFDAPLHNKFYTASKSGGAFDMRTLMTNTLMKDQPTLAVTFVDNHDTEPGQALQSWVDPWFKPLAYAFILTRQEGYPCVFYGDYYGIPQYNIPSLKSKIDPLLIARRDYAYGTQHDYLDHSNIIGWTREGGTEKPGSGLAALITNGDGGSKWMYVGKQHAGKVFYDLTGNRSDTVTINSDGWGEFKVNGGSVSVWVPRKTTVSTIARP

SEQ ID NO: 20933 - protein, 488 aa, unidentified
SVPVNGTMMQYFEWYLPDDGTLWTKVANNAQSLANLGITALWLPPAYKGTSSSDVGYGVYDLYDLGEFNQKGTVRTKYGTKTQYIQAIQAAHTAGMQVYADVVFNHKAGADGTELVDAVEVNPSDRNQEISGTYQIQAWTKFDFPGRGNTYSSFKWRWYHFDGTDWDESRKLNRIYKFRGTGKAWDWEVDTENGNYDYLMYADLDMDHPEVVSELKNWGKWYVTTTNIDGFRLDAVKHIKYSFFPDWLSYVRTQTQKPLFAVGEFWSYDINKLHNYITKTNGSMSLFDAPLHNNFYIASKSGGYFDMRTLLNNTLMKDQPTLSVTLVDNHDTEPGQSLQSWVEPWFKPLAYAFILTRQEGYPCIFYGDYYGIPKYNIPALKSKLDPLLIARRDYAYGTQHDYIDNADIIGWTREGVAEKANSGLAALITDGPGGSKWMYVGKQHAGKTFYDLTGNRSDTVTINADGWGEFKVNGGSVSIWVPKTSTTS

SEQ ID NO: 20934 - protein, 491 aa, Geobacillus stearothermophilus
AAPFNGTMMQYFEWYLPDDGTLWTKVANEANNLSSLGITALWLPPAYKGTSRSDVGYGVYDLYDLGEFNQKGTVRTKYGTKAQYLQAIQAAHAAGMQVYADVVFNHKAGADETEVFKVIEVDPNDRTKEISEPYQIEGWTKFTFPGRGDQYSSFKWNSEHFNGTDFDASRELTRVYRIAGKKWNWEVDTEFGNYDYLMFANIDYNHPDVVTELKNWGKWYVNTTNIDGFRLDAVKHIKFSFFPDWLSYVRSQTGKPLFTVGEYWSYDINKLHNYITKTDGTMSLFDAPLHNKFYTASKSGGAFDMRTLMTNTLMKDQPTLAVTFVDNHDTEPGQALQSWVDPWFKPLAYAFILTRQEGYPCVFYGDYYGIPQYNIPSLKSKIDPLLIARRDYAYGTQHDYLDHSNIIGWTREGGTEKPGSGLAALITNGDGGSKWMYVGKQHAGKVFYDLTGNRSDTVTINSDGWGEFKVNGGSVSVWVPRKTTVSTIARP

SEQ ID NO: 20935 - protein, 497 aa, Bacillus sp.
AAPFNGTMMQYFEWYLPNDGQHWTRLANDANNLSSLGITALWIPPAYKGTSQSDVGYGAYDLYDLGEFNQKGTVRTKYGTKAQLLQAIQALHAAGIQVYGDVVMNHKGGADGTEWVDAVEVNPSDRNQEISGTYQIQAWTKFDFPGRGNTYSSFKWRWYHFDGVDWDESRKLNNRIYKFRGIGKAWDWEVDTENGNYDYLMYADIDMDHPEVVTELKNWGKWYVNTLNLDGFRLDAVKHIKFSFFRDWLSHVRSQTGKPLFTVGEYWSNDIGALENYLTKTNWNMSLFDVPLHYNFYTASKSGGAYDMRTLLTGTLVKDHPTLAVTFVDNHDTQPGQALESWVDPWFKPLAYAFILTREEGYPCVFYGDYYGIPQYNQREIPSLKSKIDPLLIARRDYAYGTQHDYLDHSDIIGWTREGVTSKPNSGLAALITDGPGGSKWMYVGKQHAGKVWYDLTGNRSDTVTINSDGWGEFKVNGGSVSVWVPRKTTVSTIARP

SEQ ID NO: 20936 - protein, 488 aa, unidentified
SVPVNGTMMQYFEWYLPDDGTLWTKVANNAQSLANLGITALWLPPAYKGTSSSDVGYGVYDLYDLGEFNQKGTVRTKYGTKTQYIQAIQAAHTAGMRVYADVVFNHKAGADGTELVDAVEVNPSDRNQEISGTYQIQAWTKFDFPGRGNTYSSFKWRWYHFDGTDWDESRKLNRIYKFRGTGKAWDWEVDTENGNYDYLMYADLDMDHPEVVSELKNWGKWYVTTTNIDGFRLDAVKHIKYSFFPDWLSYVRTQTQKPLFAVGEFWSYDISKLHNYITKTNGSMSLFDAPLHNNFYIASKSSGYFDMRTLLNNTLMKDQPTLAVTLVDNHDTEPGQSLQSWVEPWFKPLAYAFILTRQEGYPCVFYGDYYGIPKYNIPALKSKLDPLLIARRDYAYGTQHDYIDSADIIGWTREGVAEKANSGLAALITDGPGGSKWMYVGKQHAGKTFYDLTGNRSDTVTINADGWGEFKVNGGSVSIWVPKISTTS

SEQ ID NO: 20937 - protein, 488 aa, Bacillus sp.
SVPVNGTMMQYFEWYLPDDGTLWTKVANNAQSLANLGITALWLPPAYKGTSSSDVGYGVYDLYDLGEFNQKGTVRTKYGTKTQYIQAIQAAHTAGMQVYADVVFNHKAGADGTELVDAVEVNPSDRNQEISGTYQIQAWTKFDFPGRGNTYSSFKWRWYHFDGTDWDESRKLNRIYKFRGTGKAWDWEVDTENGNYDYLMYADLDMDHPEVVSELKNWGKWYVITTNIDGFRLDAVKHIKYSFFPDWLSYLRTQTQKPLFAVGEFWSYDINKLHNYITKTNGSMSLFDAPLHNNFYIASKSGGYFDMRTLLNNTLMKEQPTLSVTLVDNHDTEPGQSLQSWVEPWFKPLAYAFILTRQEGYPCVFYGDYYGIPKYNIPALKSKLDPLLIARRDYAYGTQHDYIDNADIIGWTREGVAEKANSGLAALITDGPGGSKWMYVGKQHAGKTFYDLTGNRSDTVTINADGWGEFKVNGGSVSIWVPKTSTTS

SEQ ID NO: 20938 - protein, 485 aa, Bacillus sp.
HHNGTNGTMMQYFEWYLPNDGNHWNRLNSDASNLKSKGITAVWIPPAWKGASQNDVGYGAYDLYDLGEFNQKGTVRTKYGTRSQLQAAVTSLKNNGIQVYGDVVMNHKGGADATEMVRAVEVNPNNRNQEVTGEYTIEAWTRFDFPGRGNTHSSFKWRWYHFDGVDWDQSRRLNNRIYKFRGHGKAWDWEVDTEFGNYDYLMYADYDMDHPEVVNELRNWGVWYTNTLGLDGFRIDAVKHIKYSFTRDWINHVRSATGKNMFAVAEFWKNDLGAIENYLQKTNWNHSVFDVPLHYNLYNASKSGGNYDMRNIFNGTVVQRHPSHAVTFVDNHDSQPEEALESFVEEWFKPLAYALTLTREQGYPSVFYGDYYGIPTHGVPAMRSKIDPILEARQKYAYGPQHDYLDHPDVIGWTREGDSSHPKSGLATLITDGPGGSKRMYAGLKNAGETWYDITGNRSDTVKIGSDGWGEFHVNDGSVSIYRQK

SEQ ID NO: 20939 - protein, 483 aa, Bacillus sp.
HHNGTNGTMMQYFEWYLPNDGNHWNRLNSDASNLKSKGITAVWIPPAWKGASQNDVGYGAYDLYDLGEFNQKGTVRTKYGTRSQLQAAVTSLKNNGIQVYGDVVMNHKGGADATEMVRAVEVNPNNRNQEVTGEYTIEAWTRFDFPGRGNTHSSFKWRWYHFDGVDWDQSRRLNNRIYKFRGKAWDWEVDTEFGNYDYLMYADYDMDHPEVVNELRNWGVWYTNTLGLDGFRIDAVKHIKYSFTRDWINHVRSATGKNMFAVAEFWKNDLGAIENYLQKTNWNHSVFDVPLHYNLYNASKSGGNYDMRNIFNGTVVQRHPSHAVTFVDNHDSQPEEALESFVEEWFKPLAYALTLTREQGYPSVFYGDYYGIPTHGVPAMRSKIDPILEARQKYAYGPQHDYLDHPDVIGWTREGDSSHPKSGLATLITDGPGGSKRMYAGLKNAGETWYDITGNRSDTVKIGSDGWGEFHVNDGSVSIYRQK

SEQ ID NO: 20940 - protein, 491 aa, Geobacillus stearothermophilus
AAPFNGTMMQYFEWYLPDDGTLWTKVANEANNLSSLGITALWLPPAYKGTSRSDVGYGVYDLYDLGEFNQKGTVRTKYGTKAQYLQAIQAAHAAGMQVYADVVFDHKAGADETEVFKVIEVDPNDRTKEISEPFEIEGWTKFTFPGRGDTYSSFKWNSEHFNGTDWDEKGKRTGVFRIAGKKWNWEVDTEFGNYDYLMFANIDYNHPDVVTELKNWGKWYVNTTNIDGFRLDAVKHIKFSFFPDWLSYVRSQTGKPLFTVGEYWSYDINKLHNYITKTDGTMSLFDAPLHNKFYTASKSGGAFDMRTLMTNTLMKDQPTLAVTFVDNHDTEPGQALQSWVDPWFKPLAYAFILTRQEGYPCVFYGDYYGIPQYNIPSLKSKIDPLLIARRDYAYGTQHDYLDHSNIIGWTREGGTEKPGSGLAALITNGDGGSKWMYVGKQHAGKVFYDLTGNRSDTVTINSDGWGEFKVNGGSVSVWVPRKTTVSTIARP

SEQ ID NO: 20941 - protein, 491 aa, Unidentified
AAPFNGTMMQYFEWYLPDDGTLWTKVANEANNLSSLGITALWLPPAYKGTSRSDVGYGVYDLYDLGEFNQKGTVRTKYGTKAQYLQAIQAAHAAGMQVYADVVFDHKAGADETEVFKVIEVDPNDRTKEISEPFEIEGWTKFTFPGRGDTYSSFKWNSEHFNGTDWDEKGKRTGVFRIAGKAWNWEVDTEFGNYDYLMFANIDYNHPDVVTELKNWGKWYVNTTNIDGFRLDAVKHIKFSFFPDWLSYVRSQTGKPLFTVGEYWSYDINKLHNYITKTDGTMSLFDAPLHNKFYTASKSGGAFDMRTLMTNTLMKDQPTLAVTFVDNHDTEPGQALQSWVDPWFKPLAYAFILTRQEGYPCVFYGDYYGIPQYNIPSLKSKIDPLLIARRDYAYGTQHDYLDHSNIIGWTREGGTEKPGSGLAALITNGDGGSKWMYVGKQHAGKVFYDLTGNRSDTVTINSDGWGEFKVNGGSVSVWVPRKTTVSTIARP

SEQ ID NO: 20942 - protein, 394 aa, Bacillus sp. TS-23
APINETMMQYFEWDLPNDGTLWTKVKNEAANLSSLGITALWLPPAYKGTSQSDVGYGVYDLYDLGEFNQKGTIRTKYGTKTQYIQAIQAAKAAGMQVYADVVFNHKAGADGTEFVDAVEVDPSNRNQETSGTYQIQAWTKFDFPGRGNTYSSFKWRWYHFDGTDWDESRKLNRIYKFTGKAWDWEVDTENGNYDYLMFADLDMDHPEVVTELKNWGTWYVNTTNIDGFRLDAVKHIKYTFFPDWLTYVRNQTGKNLFAVGEFWSYDVNKLHNYITKTNGSMSLFDAPLHNNFYTASKSSGYFDMRYLLNNTLMKDQPSLAVTLVDNHDTQPGQSLQSWVEPWFKPLAYAFILTRQEGYPCVFYGDYYGIPKYNIPGLKSKIDPLLIARRDYAYG

SEQ ID NO: 20943 - protein, 491 aa, Geobacillus stearothermophilus
AAPFNGTMMQYFEWYLPDDGTLWTKVANEANNLSSLGITALWLPPAYKGTSRSDVGYGVYDLYDLGEFNQKGTVRTKYGTKAQYLQAIQAAHAAGMQVYADVVFDHKAGADETEVFKVIEVDPNDRTKEISEPFEIEGWTKFTFPGRGDQYSSFKWNSEHFNGVDWDEKGKRTGVFRIAGKKWNWEVDTEFGNYDYLMFANIDYNHPDVVTELKNWGKWYVNTTNIDGFRLDAVKHIKFSFFPDWLSYVRSQTGKPLFTVGEYWSYDINKLHNYITKTDGTMSLFDAPLHNKFYTASKSGGAFDLRTLMTNTLMKDQPTLAVTFVDNHDTEPGQALQSWVDPWFKPLAYAFILTRQEGYPCVFYGDYYGIPQYNIPSLKSKIDPLLIARRDYAYGTQHDYLDHSNIIGWTREGGTEKPGSGLAALITNGDGGSKWMYVGKQHAGKVFYDLTGNRSDTVTINSDGWGEFKVNGGSVSVWVPRKTTVSTIARP

SEQ ID NO: 20944 - protein, 491 aa, Unidentified
AAPFNGTMMQYFEWYLPDDGTLWTKVANEANNLSSLGITALWLPPAYKGTSRSDVGYGVYDLYDLGEFNQKGTVRTKYGTKAQYLQAIQAAHAAGMQVYADVVFDHKAGADETEVFKVIEVDPNDRTKEISEPFEIEGWTKFTFPGRGDTYSSFKWNSEHFNGVDFDAKGERTGVFRIAGKAWNWEVDTEFGNYDYLMFANIDYNHPDVVTELKNWGKWYVNTTNIDGFRLDAVKHIKFQFFPDWLSYVRSQTGKPLFTVGEYWSYDINKLHNYITKTDGTTSLFDAPLHNKFYTASKSGGAFDMRTLMTNTLMKDQPTLAVTFVDNHDTEPGQALQSWVDPWFKPLAYAFILTRQEGYPCVFYGDYYGIPQYNIPSLKSKIDPLLIARRDYAYGTQHDYLDHSDIIGWTREGGTEKPGSGLAALITNGDGGSKWMYVGKQHAGKVFYDLTGNRSDTVTINSDGWGEFKVNGGSVSVWVPRKTTVSTIARP

SEQ ID NO: 20945 - protein, 491 aa, Unidentified
AAPFNGTMMQYFEWYLPDDGTLWTKVANEANNLSSLGITALWLPPAYKGTSRSDVGYGVYDLYDLGEFNQKGTVRTKYGTKAQYLQAIQAAHAAGMQVYADVVFDHKAGADETEVFKVIEVDPNDRTKEISEPFEIEGWTKFTFPGRGDQYSSFKWNSEHFNGTDWDEKGKRTGVFRIAGKKWNWEVDTEFGNYDYLMFANIDYNHPDVVTELKNWGKWYVNTTNIDGFRLDAVKHIKFSFFPDWLSYVRSQTGKPLFTVGEYWSYDINKLHNYITKTDGTMSLFDAPLHNKFYTASKSGGAFDMRTLMTNTLMKDQPTLAVTFVDNHDTEPGQALQSWVDPWFKPLAYAFILTRQEGYPCVFYGDYYGIPQYNIPSLKSKIDPLLIARRDYAYGTQHDYLDHSNIIGWTREGGTEKPGSGLAALITNGDGGSKWMYVGKQHAGKVFYDLTGNRSDTVTINSDGWGEFKVNGGSVSVWVPRKTTVSTIARP

SEQ ID NO: 20946 - protein, 491 aa, Unidentified
AAPFNGTMMQYFEWYLPDDGTLWTKVANEANNLSSLGITALWLPPAYKGTSRSDVGYGVYDLYDLGEFNQKGTVRTKYGTKAQYLQAIQAAHAAGMQVYADVVFDHKAGADETEVFKVIEVDPNDRTKEISEPFEIEGWTKFTFPGRGDQYSSFKWNSEHFNGTDFDAKGERTGVFRIAGKAWNWEVDTEFGNYDYLMFANIDYNHPDVVTELKNWGKWYVNTTNIDGFRLDAVKHIKFSFFPDWLSYVRSQTGKPLFTVGEYWSYDINKLHNYITKTDGTMSLFDAPLHNKFYTASKSGGAFDMRTLMTNTLMKDQPTLAVTFVDNHDTEPGQALQSWVDPWFKPLAYAFILTRQEGYPCVFYGDYYGIPQYNIPSLKSKIDPLLIARRDYAYGTQHDYLDHSDIIGWTREGGTEKPGSGLAALITDGPGGSKWMYVGKQHAGKVFYDLTGNRSDTVTINSDGWGEFKVNGGSVSVWVPRKTTVSTIARP

SEQ ID NO: 20947 - protein, 499 aa, Anoxybacillus flavithermus
PVNGTMMQYFEWYLPDDGTLWTKVANNAQSLANLGITALWLPPAYKGTSSSDVGYGVYDLYDLGEFNQKGTVRTKYGTKTQYIQAIQAAHTAGMQVYADVVFNHKAGADGTELVDAVEVNPSDRNQEISGTYQIQAWTKFDFPGRGNTYSSFKWRWYHFDGTDWDESRKLNRIYKFRGTGKAWDWEVDTENGNYDYLMYADLDMDHPEVVSELKNWGKWYVTTTNIDGFRLDAVKHIKYSFFPDWLSYVRTQTQKPLFAVGEFWSYDISKLHNYITKTNGSMSLFDAPLHNNFYIASKSGGYFDMRTLLNNTLMKDQPTLAVTLVDNHDTEPGQSLQSWVEPWFKPLAYAFILTRQEGYPCVFYGDYYGIPKYNIPALKSKLDPLLIARRDYAYGTQHDYIDSADIIGWTREGVAEKANSGLAALITDGPGGSKWMYVGKQHAGKTFYDLTGNRSDTVTINADGWGEFKVNGGSVSIWVPKISTTSQITFTVNNATTVW

SEQ ID NO: 20948 - protein, 486 aa, Bacillus sp.
HHNGTNGTMMQYFEWHLPNDGQHWNRLRNDAANLKNLGITAVWIPPAWKGTSQNDVGYGAYDLYDLGEFNQKGTIRTKYGTRSQLQSAITSLQNNGIQVYGDVVMNHKGGADGTEWVQAVEVNPSNRNQEVTGEYTIEAWTKFDFPGRGNTHSSFKWRWYHFDGTDWDQSRQLNNRIYKFRGTGKAWDWEVDTENGNYDYLMYADVDMDHPEVINELRRWGVWYTNTLNLDGFRIDAVKHIKYSFTRDWLNHVRSTTGKNNMFAVAEFWKNDLGAIENYLHKTNWNHSVFDVPLHYNLYNASKSGGNYDMRQILNGTVVSKHPIHAVTFVDNHDSQPGEALESFVEAWFKPLAYALILTREQGYPSVFYGDYYGIPTHGVAAMKGKIDPILEARQKYAYGTQHDYLDHHNIIGWTREGNTAHPNSGLATIMSDGPGGSKWMYVGRHKAGQVWRDITGNRTGTVTINADGWGNFSVNGGSVSIWVNK

SEQ ID NO: 20949 - protein, 491 aa, Geobacillus stearothermophilus
AAPFNGTMMQYFEWYLPDDGTLWTKVANEANNLSSLGITALWLPPAYKGTSRSDVGYGVYDLYDLGEFNQKGTVRTKYGTKAQYLQAIQAAHAAGMQVYADVVFDHKAGADETEVFKVIEVDPNDRTKVISEPFEIEGWTKFTFPGRGDQYSSFKWNSEHFNGTDFDAKGERTGVFLIEGKKWNWEVDTEFGNYDYLMFANIDYNHPDVVTELKNWGKWYVNTTNIDGFRLDAVKHIKFSFFPDWLSYVRSQTGKPLFTVGEYWSYDINKLHNYITKTDGTMSLFDAPLHNKFYTASKSGGAFDMRTLMTNTLMKDQPTLAVTFVDNHDTEPGQALQSWVDPWFKPLAYAFILTRQEGYPCVFYGDYYGIPQYNIPSLKSKIDPLLIARRDYAYGTQHDYLDHSNIIGWTREGGTEKPGSGLAALITNGDGGSKWMYVGKQHAGKVFYDLTGNRSDTVTINSDGWGEFKVNGGSVSVWVPRKTTVSTIARP

SEQ ID NO: 20950 - protein, 491 aa, Geobacillus stearothermophilus
AAPFNGTMMQYFEWYLPDDGTLWTKVANEANNLSSLGITALWLPPAYKGTSRSDVGYGVYDLYDLGEFNQKGTVRTKYGTKAQYLQAIQAAHAAGMQVYADVVFDHKAGADETEVFKVIEVDPNDRTKEISEPFEIEGWTKFTFPGRGDTYSSFKWNSEHFNGVDFDAKGERTGVFRIAGKAWNWEVDTEFGNYDYLMFANIDYNHPDVVTELKNWGKWYVNTTNIDGFRLDAVKHIKFQFFPDWLSYVRSQTGKPLFTVGEYWSYDINKLHNYITKTDGTTSLFDAPLHNKFYTASKSGGAFDMRTLMTNTLMKDQPTLAVTFVDNHDTEPGQALQSWVDPWFKPLAYAFILTRQEGYPCVFYGDYYGIPQYNIPSLKSKIDPLLIARRDYAYGTQHDYLDHDDIIGWTREGGTEKPGSGLAALITNGDGGSKWMYVGKQHAGKVFYDLTGNRSDTVTINSDGWGEFKVNGGSVSVWVPRKTTVSTIARP

SEQ ID NO: 20951 - protein, 491 aa, Geobacillus stearothermophilus
AAPFNGTMMQYFEWYLPDDGTLWTKVANEANNLSSLGITALWLPPAYKGTSRSDVGYGAYDLYDLGEFNQKGTVRTKYGTKAQYLQAIQAAHAAGMQVYADVVFDHKAGADETEVFKVIEVDPNDRTKEISEPFEIEGWTKFTFPGRGDTYSSFKWNSEHFNGVDFDAKGERTGVFRIAGKAWNWEVDTEFGNYDYLMFANIDYNHPDVVTELKNWGKWYVNTTNIDGFRLDAVKHIKFQFFPDWLSYVRSQTGKPLFTVGEYWSYDINKLHNYITKTDGTMSLFDAPLHNKFYTASKSGGAFDLRTLMTNTLMKDQPTLAVTFVDNHDTEPGQALQSWVDPWFKPLAYAFILTRQEGYPCVFYGDYYGIPQYNIPSLKSKIDPLLIARRDYAYGTQHDYLDHSNIIGWTREGGTEKPGSGLAALITNGDGGSKWMYVGKQHAGKVFYDLTGNRSDTVTINSDGWGEFKVNGGSVSVWVPRKTTVSTIARP

SEQ ID NO: 20952 - protein, 491 aa, Geobacillus stearothermophilus
AAPFNGTMMQYFEWYLPDDGTLWTKVANEANNLSSLGITALWLPPAYKGTSRSDVGYGVYDLYDLGEFNQKGTVRTKYGTKAQYLQAIQAAHAAGMQVYADVVFDHKAGADETEVFKVIEVDPNDRTKEISEPFEIEGWTKFTFPGRGDTYSSFKWNSEHFNGTDFDAKGERTGVFRIAGKAWNWEVDTEFGNYDYLMFANIDMNHPDVVTELKNWGKWYVNTTNIDGFRLDAVKHIKFSFFPDWLSYVRSQTGKPLFTVGEYWSYDINKLHNYITKTDGTMSLFDAPLHNKFYTASKSGGAFDMRTLMTNTLMKDQPTLAVTFVDNHDTEPGQALQSWVDPWFKPLAYAFILTRQEGYPCVFYGDYYGIPQYNIPSLKSKIDPLLIARRDYAYGTQHDYLDHSNIIGWTREGGTEKPGSGLAALITNGDGGSKWMYVGKQHAGKVFYDLTGNRSDTVTINSDGWGEFKVNGGSVSVWVPRKTTVSTIARP

SEQ ID NO: 20953 - protein, 482 aa, Synthetic construct
HHNGTNGTMMQYFEWYLPNDGNHWNRLRSDASNLKDKGITAVWIPPAWKGASQNDVGYGAYDLYDLGEFNQKGTVRTKYGTRNQLQAAVTALKSNGIQVYGDVVMNHKGGADATEVRAVEVNPSNRNQEVSGDYTIEAWTKFDFPGRGNTHSNFKWRWYHFDGVDWDQSRQLQNRIYKFRGDGKGWDWEVDTENGNYDYLMYADIDMDHPEVVNELRNWGVWYTNTLGLDGFRIDAVKHIKYSFTRDWLTHVRNTTGKNMFAVAEFWKNDIGAIENYLSKTNWNHSVFDVPLHYNLYNASRSGGNYDMRQIFNGTVVQRHPTHAVTFVDNHDSQPEEALESFVEEWFKPLAYALTLTRDQGYPSVFYGDYYGIPTHGVPAMKSKIDPILEARQKYAYGKQNDYLDHHNMIGWTREGNTAHPNSGLATIMSDGPGGNKWMYVGRNKAGQVWRDITGNRSGTVTINADGWGNFSVNGGSVSIWV

SEQ ID NO: 20954 - protein, 399 aa, Bacillus subtilis
HHNGTNGTMMQYFEWYLPNDGNHWNRLRSDASNLKDKGITAVWIPPAWKGASQNDVGYGAYDLYDLGEFNQKGTVRTKYGTRNQLQAAVTALKSNGIQVYGDVVMNHKGGADATEWVRAVEVNPSNRNQEVSGDYTIEAWTKFDFPGRGNTHSNFKWRWYHFDGVDWDQSRQLQNRIYKFRGDGKGWDWEVDTENGNYDYLMYADIDMDHPEVVNELRNWGVWYTNTLGLDGFRIDAVKHIKYSFTRDWLTHVRNTTGKNMFAVAEFWKNDIGAIENYLSKTNWNHSVFDVPLHYNLYNASRSGGNYDMRQIFNGTVVQRHPTHAVTFVDNHDSQPEEALESFVEEWFKPLAYALTLTRDQGYPSVFYGDYYGIPTHGVPAMKSKIDPILEARQKYAYG

SEQ ID NO: 20955 - protein, 487 aa, unidentified
APVNGTMMQYFEWDLPNDGTLWTKVKNEATNLSSLGITALWLPPAYKGTSQSDVGYGVYDLYDLGEFNQKGTIRTKYGTKAQYIQAIQAAKAAGMQVYADVVFNHKAGADGTEFVDAVEVNPSNRNQETSGTYQIQAWTKFDFPGRGNTYSSFKWRWYHFDGTDWDESRKLNRIYKFRGTGKAWDWEVDTENGNYDYLMFADLDMDHPEVVTELKNWGKWYVNTTNVDGFRLDAVKHIKYSFFPDWLTYVRNQTGKNLFAVGEFWSYDVNKLHNYITKTNGSMSLFDAPLHNNFYIASKSSGYFDMRYLLNNTLMKDQPSLAVTLVDNHDTQPGQSLQSWVEAWFKPLAYAFILTRQEGYPCVFYGDYYGIPKYNIPGLKSKIDPLLIARRDYAYGTQRDYIDHQDIIGWTREGIDAKPNSGLAALITDGPGGSKWMYVGKKHAGKVFYDLTGNRSDTVTINADGWGEFKVNGGSVSIWVAKTSNVT

SEQ ID NO: 20956 - protein, 486 aa, Bacillus sp.
HHNGTNGTMMQYFEWHLPNDGQHWNRLRNDAANLKNLGITAVWIPPAWKGTSQNDVGYGAYDLYDLGEFNQKGTIRTKYGTRSQLQSAIASLQNNGIQVYGDVVMNHKGGADGTEWVQAVEVNPSNRNQEVTGEYTIEAWTKFDFPGRGNTHSSFKWRWYHFDGTDWDQSRQLNNRIYKFRGTGKAWDWEVDTENGNYDYLMYADVDMDHPEVINELRRWGVWYTNTLNLDGFRIDAVKHIKYSFTRDWLNHVRSTTGKNNMFAVAEFWKNDLGAIENYLHKTNWNHSVFDVPLHYNLYNASKSGGNYDMRQILNGTVVSKHPIHAVTFVDNHDSQPGEALESFVEAWFKPLAYALILTREQGYPSVFYGDYYGIPTHGVAAMKGKIDPILEARQKYAYGTQHDYLDHHNIIGWTREGNSAHPNSGLATIMSDGPGGSKWMYVGRHKAGQVWRDITGNRTGTVTINADGWGNFSVNGGSVSIWVNK

SEQ ID NO: 20957 - protein, 485 aa, Synthetic construct
HHNGTNGTMMQYFEWYLPNDGNHWNRLRDDAANLKSKGITAVWIPPAWKGTSQNDVGYGAYDLYDLGEFNQKGTVRTKYGTRNQLQAAVTSLKNNGIQVYGDVVMNHKGGADGTEIVNAVEVNRSNRNQETSGEYAIEAWTKFDFPGRGNNHSSFKWRWYHFDGTDWDQSRQLQNKIYKFRGTGKAWDWEVDTENGNYDYLMYADVDMDHPEVIHELRNWGVWYTNTLNLDGFRIDAVKHIKYSFTRDWLTHVRNTTGKPMFAVAEFWKNDLGAIENYLNKTSWNHSVFDVPLHYNLYNASNSGGYYDMRNILNGSVVQKHPTHAVTFVDNHDSQPGEALESFVQQWFKPLAYALVLTREQGYPSVFYGDYYGIPTHGVPAMKSKIDPLLEARQTFAYGTQHDYFDHHDIIGWTREGNSSHPNSGLATIMSDGPGGNKWMYVGQNKAGQVWRDITGNRTGTVTINADGWGNFSVNGGSVSVWVKQ

SEQ ID NO: 20958 - protein, 491 aa, Geobacillus stearothermophilus
AAPFNGTMMQYFEWYLPDDGTLWTKVANEANNLSSLGITALWLPPAYKGTSRSDVGYGVYDLYDLGEFNQKGTVRTKYGTKAQYLQAIQAAHAAGMQVYADVVFNHKAGADETEVFKVIEVDPNDRTKVISEPFEIEGWTKFTFPGRGDTYSSFKWNSEHFNGTDFDAKGERTGVFRIAGKKWNWEVDTEFGNYDYLMFANIDYNHPDVVTELKNWGKWYVNTTNIDGFRLDAVKHIKFSFFPDWLSYVRSQTGKPLFTVGEYWSYDINKLHNYITKTDGTMSLFDAPLHNKFYTASKSGGAFDMRTLMTNTLMKDQPTLAVTFVDNHDTEPGQALQSWVDPWFKPLAYAFILTRQEGYPCVFYGDYYGIPQYNIPSLKSKIDPLLIARRDYAYGTQHDYLDHSNIIGWTREGGTEKPGSGLAALITNGDGGSKWMYVGKQHAGKVFYDLTGNRSDTVTINSDGWGEFKVNGGSVSVWVPRKTTVSTIARP

SEQ ID NO: 20959 - protein, 491 aa, Geobacillus stearothermophilus
AAPFNGTMMQYFEWYLPDDGTLWTKVANEANNLSSLGITALWLPPAYKGTSRSDVGYGVYDLYDLGEFNQKGTVRTKYGTKAQYLQAIQAAHAAGMQVYADVVFDHKAGADETEVFKVIEVDPNDRTKEISEPFEIEGWTKFTFPGRGDTYSSFKWNSEHFNGVDFDAKGERTGVFRIAGKAWNWEVDTEFGNYDYLMFANIDYNHPDVVTELKNWGKWYVNTTNIDGFRLDAVKHIKFQFFPDWLSYVRSQTGKPLFTVGEYWSYDINKLHNYITKTDGTTSLFDAPLHNKFYTASKSGGAFDLRTLMTNTLMKDQPTLAVTFVDNHDTEPGQALQSWVDPWFKPLAYAFILTRQEGYPCVFYGDYYGIPQYNIPSLKSKIDPLLIARRDYAYGTQHDYLDHSNIIGWTREGGTEKPGSGLAALITNGDGGSKWMYVGKQHAGKVFYDLTGNRSDTVTINSDGWGEFKVNGGSVSVWVPRKTTVSTIARP

SEQ ID NO: 20960 - protein, 491 aa, Unidentified
AAPFNGTMMQYFEWYLPDDGTLWTKVANEANNLSSLGITALWLPPAYKGTSRSDVGYGVYDLYDLGEFNQKGTVRTKYGTKAQYLQAIQAAHAAGMQVYADVVFDHKAGADETEVFKVIEVDPNDRTKEISEPFEIEGWTKFTFPGRGDTYSSFKWNSEHFNGTDFDAKGERTGVFRIAGKKWNWEVDTEFGNYDYLMFANIDYNHPDVVTELKNWGKWYVNTTNIDGFRLDAVKHIKFSFFPDWLSYVRSQTGKPLFTVGEYWSYDINKLHNYITKTDGTMSLFDAPLHNKFYTASKSGGAFDMRTLMTNTLMKDQPTLAVTFVDNHDTEPGQALQSWVDPWFKPLAYAFILTRQEGYPCVFYGDYYGIPQYNIPSLKSKIDPLLIARRDYAYGTQHDYLDHSNIIGWTREGGTEKPGSGLAALITNGDGGSKWMYVGKQHAGKVFYDLTGNRSDTVTINSDGWGEFKVNGGSVSVWVPRKTTVSTIARP

SEQ ID NO: 20961 - protein, 491 aa, Geobacillus stearothermophilus
AAPFNGTMMQYFEWYLPDDGTLWTKVANEANNLSSLGITALWLPPAYKGTSRSDVGYGVYDLYDLGEFNQKGTVRTKYGTKAQYLQAIQAAHAAGMQVYADVVFDHKAGADETEVFKVIEVDPNDRTKEISEPFEIEGWTKFTFPGRGDTYSSFKWNSEHFNGTDFDAKGERTGVFRIAGKAWNWEVDTEFGNYDYLMFANIDYNHPDVVTELKNWGKWYVNTTNIDGFRLDAVKHIKFSFFPDWLSYVRSQTGKPLFTVGEYWSYDINKLHNYITKTDGTMSLFDAPLHNKFYTASKSGGAFDMRTLMTNTLMKDQPTLAVTFVDNHDTEPGQALQSWVDPWFKPLAYAFILTRQEGYPCVFYGDYYGIPQYNIPSLKSKIDPLLIARRDYAYGTQHDYLDHSNIIGWTREGGTEKPGSGLAALITNGDGGSKWMYVGKQHAGKVFYDLTGNRSDTVTINSDGWGEFKVNGGSVSVWVPRKTTVSTIARP

SEQ ID NO: 20962 - protein, 491 aa, Geobacillus stearothermophilus
AAPFNGTMMQYFEWYLPDDGTLWTKVANEANNLSSLGITALWLPPAYKGTSRSDVGYGVYDLYDLGEFNQKGTVRTKYGTKAQYLQAIQAAHAAGMQVYADVVFDHKAGADETEVFKVIEVDPNDRTKEISEPFEIEGWTKFTFPGRGDQYSSFKWNSEHFNGTDFDAKGERTGVFRIAGKAWNWEVDTEFGNYDYLMFANIDYNHPDVVTELKNWGKWYVNTTNIDGFRLDAVKHIKFSFFPDWLSYVRSQTGKPLFTVGEYWSYDINKLHNYITKTDGTMSLFDAPLHNKFYTASKSGGAFDMRTLMTNTLMKDQPTLAVTFVDNHDTEPGQALQSWVDPWFKPLAYAFILTRQEGYPCVFYGDYYGIPQYNIPSLKSKIDPLLIARRDYAYGTQHDYLDHSNIIGWTREGGTEKPGSGLAALITNGPGGSKWMYVGKQHAGKVFYDLTGNRSDTVTINSDGWGEFKVNGGSVSVWVPRKTTVSTIARP

SEQ ID NO: 20963 - protein, 491 aa, Unidentified
AAPFNGTMMQYFEWYLPDDGTLWTKVANEANNLSSLGITALWLPPAYKGTSRSDVGYGVYDLYDLGEFNQKGTVRTKYGTKAQYLQAIQAAHAAGMQVYADVVFDHKAGADETEVFKVIEVDPNDRTKEISEPFEIEGWTKFTFPGRGDQYSSFKWNSEHFNGVDFDAKGERTGVFRIAGKAWNWEVDTEFGNYDYLMFANIDYNHPDVVTELKNWGKWYVNTTNIDGFRLDAVKHIKFSFFPDWLSYVRSQTGKPLFTVGEYWSYDINKLHNYITKTDGTVSLFDAPLHNKFYTASKSGGAFDLRTLMTNTLMKDQPTLAVTFVDNHDTEPGQALQSWVDPWFKPLAYAFILTRQEGYPCVFYGDYYGIPQYNIPSLKSKIDPLLIARRDYAYGTQHDYLDHSNIIGWTREGGTEKPGSGLAALITNGDGGSKWMYVGKQHAGKVFYDLTGNRSDTVTINSDGWGEFKVNGGSVSVWVPRKTTVSTIARP

SEQ ID NO: 20964 - protein, 491 aa, Geobacillus stearothermophilus
AAPFNGTMMQYFEWYLPDDGTLWTKVANEANNLSSLGITALWLPPAYKGTSRSDVGYGVYDLYDLGEFNQKGTVRTKYGTKAQYLQAIQAAHAAGMQVYADVVFDHKAGADETEVFKVIEVDPNDRTKEISEPFEIEGWTKFTFPGRGDQYSSFKWNSEHFNGTDFDAKGERTGVFRIAGKKWNWEVDTEFGNYDYLMFANIDMNHPDVVTELKNWGKWYVNTTNIDGFRLDAVKHIKFSFFPDWLSYVRSQTGKPLFTVGEYWSYDINKLHNYITKTDGTMSLFDAPLHNKFYTASKSGGAFDMRTLMTNTLMKDQPTLAVTFVDNHDTEPGQALQSWVDPWFKPLAYAFILTRQEGYPCVFYGDYYGIPQYNIPSLKSKIDPLLIARRDYAYGTQHDYLDHSNIIGWTREGGTEKPGSGLAALITNGDGGSKWMYVGKQHAGKVFYDLTGNRSDTVTINSDGWGEFKVNGGSVSVWVPRKTTVSTIARP

SEQ ID NO: 20965 - protein, 483 aa, Synthetic construct
HHNGTNGTMMQYFEWYLPNDGNHWNRLRSDASNLKDKGITAVWIPPAWKGASQNDVGYGAYDLYDLGEFNQKGTVRTKYGTRNQLQAAVTALKSNGIQVYGDVVMNHKGGADATEWVRAVEVNPSNRNQEVSGDYTIEAWTKFDFPGRGNTHSNFKWRWYHFDGVDWDQSRQLQNRIYKFRGDGKGWDWEVDTENGNYDYLMYADIDMDHPEVVNELRNWGVWYTNTLGLDGFRIDAVKHIKYSFTRDWLTHVRNTTGKNMFAVAEFWKNDIGAIENYLSKTNWNHSVFDVPLHYNLYNASRSGGNYDMRQIFNGTVVQAHPTHAVTFVDNHDSQPEEALESFVEEWFKPLAYALTLTRDQGYPSVFYGDYYGIPTHGVPAMKSKIDPILEARQKYAYGKQNDYLDHHNMIGWTREGNTAHPNSGLATIMSDGPGGNKWMYVGRNKAGQVWRDITGNRSGTVTINADGWGNFSVNGGSVSIWV

SEQ ID NO: 20966 - protein, 483 aa, Synthetic construct
HHNGTNGTMMQYFEWYLPNDGNHWNRLRSDASNLKDKGITAVWIPPAWKGASQNDVGYGAYDLYDLGEFNQKGTVRTKYGTRNQLQAAVTALKSNGIQVYGDVVMNHKGGADATEWVRAVEVNPSNRNQEVSGDYTIEAWTKFDFPGRGNTHSNFKWRWYHFDGVDWDQSRQLQNRIYKFRGDGKEWDWEVDTENGNYDYLMYADYDMDHPEVVNELRNWGVWYTNTLGLDGFRIDAVKHIKYSFTRDWLTHVRNTTGKNMFAVAEFWKNDIGAIENYLSKTNWNHSVFDVPLHYNLYNASRSGGNYDMRQIFNGTVVQRHPTHAVTFVDNHDSQPEEALESFVEEWFKPLAYALTLTRDQGYPSVFYGDYYGIPTHGVPAMKSKIDPILEARQKYAYGKQNDYLDHHNMIGWTREGNTAHPNSGLATIMSDGPGGNKWMYVGRNKAGQVWRDITGNRSGTVTINADGWGNFSVNGGSVSIWV

SEQ ID NO: 20967 - protein, 483 aa, Synthetic construct
HHNGTNGTMMQYFEWYLPNDGNHWNRLRSDASNLKDWGITAVWIPPAWKGASQNDVGYGAYDLYDLGEFNQKGTVRTKYGTRNQLQAAVTALKSNGIQVYGDVVMNHKGGADATEWVRAVEVNPSNRNQEVSGDYTIEAWTKFDFPGRGNTHSNFKWRWYHFDGVDWDQSRQLQNRIYKFRGDGKGWDWEVDTENGNYDYLMYADIDMDHPEVVNELRNWGVWYTNTLGLDGFRIDAVKHIKYSFTRDWLTHVRNTTGKNMFAVAEFWKNDIGAIENYLSKTNWNHSVFDVPLHYNLYNASRSGGNYDMRQIFNGTVVQRHPTHAVTFVDNHDSQPEEALESFVEEWFKPLAYALTLTRDQGYPSVFYGDYYGIPTHGVPAMKSKIDPILEARQKYAYGKQNDYLDHHNMIGWTREGNTAHPNSGLATIMSDGPGGNKWMYVGRNKAGQVWRDITGNRSGTVTINADGWGNFSVNGGSVSIWV

SEQ ID NO: 20968 - protein, 483 aa, Synthetic construct
HHNGTNGTMMQYFEWYLPNDGNHWNRLRSDASNLKDKGITAVWIPPAWKGASQNDVGYGAYDLYDLGEFNQKGTVRTKYGTRNQLQAAVTALKSNGIQVYGDVVMNHKGGADATEMVRAVEVNPSNRNQEVSGDYTIEAWTKFDFPGRGNTHSNFKWRWYHFDGVDWDQSRQLQNRIYKFRGDGKGWDWEVDTENGNYDYLMYADIDMDHPEVVNELRNWGVWYTNTLGLDGFRIDAVKHIKYSFTRDWLTHVRNTTGKNMFAVAEFWKNDIGAIENYLSKTNWNHSVFDVPLHYNLYNASRSGGNYDMRQIFNGTVVQRHPTHAVTFVDNHDSQPEEALESFVEEWFKPLAYALTLTRDQGYPSVFYGDYYGIPTHGVPAMKSKIDPILEARQKYAYGKQNDYLDHHNMIGWTREGNTAHPNSGLATIMSDGPGGNKWMYVGRNKAGQVWRDITGNRSGTVTINADGWGNFSVNGGSVSIWV

SEQ ID NO: 20969 - protein, 483 aa, Synthetic construct
HHNGTNGTMMQYFEWYLPNDGNHWNRLRSDASNLKHKGITAVWIPPAWKGASQNDVGYGAYDLYDLGEFNQKGTVRTKYGTRNQLQAAVTALKSNGIQVYGDVVMNHKGGADATEWVRAVEVNPSNRNQEVSGDYTIEAWTKFDFPGRGNTHSNFKWRWYHFDGVDWDQSRQLQNRIYKFRGDGKGWDWEVDTENGNYDYLMYADIDMDHPEVVNELRNWGVWYTNTLGLDGFRIDAVKHIKYSFTRDWLTHVRNTTGKNMFAVAEFWKNDIGAIENYLSKTNWNHSVFDVPLHYNLYNASRSGGNYDMRQIFNGTVVQRHPTHAVTFVDNHDSQPEEALESFVEEWFKPLAYALTLTRDQGYPSVFYGDYYGIPTHGVPAMKSKIDPILEARQKYAYGKQNDYLDHHNMIGWTREGNTAHPNSGLATIMSDGPGGNKWMYVGRNKAGQVWRDITGNRSGTVTINADGWGNFSVNGGSVSIWV

SEQ ID NO: 20970 - protein, 483 aa, Synthetic construct
HHNGTNGTMMQYFEWYLPNDGNHWNRLRSDASNLKDKGITAVWIPPAWKGASQNDVGYGAYDLYDLGEFNQKGTVRTKYGTRNQLQDAVTALKSNGIQVYGDVVMNHKGGADATEWVRAVEVNPSNRNQEVSGDYTIEAWTKFDFPGRGNTHSNFKWRWYHFDGVDWDQSRQLQNRIYKFRGDGKEWDWEVDTENGNYDYLMYADIDMDHPEVVNELRNWGVWYTNTLGLDGFRIDAVKHIKYSFTRDWLTHVRNTTGKNMFAVAEFWKNDIGAIENYLSKTNWNHSVFDVPLHYNLYNASRSGGNYDMRKIFEGTVVQRHPTHAVTFVDNHDSQPEEALESFVEEWFKPLAYALTLTRDQGYPSVFYGDYYGIPTHGVPAMKSKIDPILEARQKYAYGKQNDYLDHHNMIGWTREGNTKHPNSGLATIMSDGPGGNKWMYVGRNKAGQVWRDITGNRSGTVTINADGWGNFSVNGGSVSIWV

SEQ ID NO: 20971 - protein, 483 aa, Synthetic construct
HHNGTNGTMMQYFEWYLPNDGNHWNRLRSDASNLKDKGITAVWIPPAWKGASQNDVGYGAYDLYDLGEFNQKGTVRTKYGTRNQLQAAVTALKSNGIQVYGDVVMNHKGGADATEWVRAVEVNPSNRNQEVSGDYTIEAWTKFDFPGRGNTHSNFKWRWYHFDGVDWDQSRQLQNRIYKFRNDGKGWDWEVDTENGNYDYLMYADIDMDHPEVVNELRNWGVWYTNTLGLDGFRIDAVKHIKYSFTRDWLTHVRNTTGKNMFAVAEFWKNDIGAIENYLSKTNWNHSVFDVPLHYNLYNASRSGGNYDMRQIFNGTVVQRHPTHAVTFVDNHDSQPEEALESFVEEWFKPLAYALTLTRDQGYPSVFYGDYYGIPTHGVPAMKSKIDPILEARQKYAYGKQNDYLDHHNMIGWTREGNTAHPNSGLATIMSDGPGGNKWMYVGRNKAGQVWRDITGNRSGTVTINADGWGNFSVNGGSVSIWV

SEQ ID NO: 20972 - protein, 483 aa, Synthetic construct
HHNGTNGTMMQYFEWYLPNDGNHWNRLRSDASNLKDKGITAVWIPPAWKGASQNDVGYGAYDLYDLGEFNQKGTVRTKYGTRNQLQAAVTALKSNGIQVYGDVVMNHKGGADATEWVRAVEVNPSNRNQEVSGDYTIEAWTKFDFPGRGNTHSNFKWRWYHFDGVDWDQSRQLQNRIYKFRGDGKGWDWEVDTENGNYDYLMYADIDMDHPEVVNELRNWGVWYTNTLGLDGFRIDAVKHIKYSFTRDWLTHVRNTTGKNMFAVAEFWKNDIGAIENYLSKTNWNHSVFDVPLHYNLYNASRSGGNYDMRQIFNGTVVQRHPTHAVTFVDNHDSQPEEALESFVEEWFKPLAYALTLTRDQGYPSVFYGDYYGIPTHGVPAMKSKIDPILEARQKYAYGAQNDYLDHHNMIGWTREGNTAHPNSGLATIMSDGPGGNKWMYVGRNKAGQVWRDITGNRSGTVTINADGWGNFSVNGGSVSIWV

SEQ ID NO: 20973 - protein, 483 aa, Synthetic construct
HHNGTNGTMMQYFEWYLPNDGNHWNRLRSDASNLKDYGITAVWIPPAWKGASQNDVGYGAYDLYDLGEFNQKGTVRTKYGTRNQLQAAVTALKSNGIQVYGDVVMNHKGGADATEWVRAVEVNPSNRNQEVSGDYTIEAWTKFDFPGRGNTHSNFKWRWYHFDGVDWDQSRQLQNRIYKFRGDGKGWDWEVDTENGNYDYLMYADIDMDHPEVVNELRNWGVWYTNTLGLDGFRIDAVKHIKYSFTRDWLTHVRNTTGKNMFAVAEFWKNDIGAIENYLSKTNWNHSVFDVPLHYNLYNASRSGGNYDMRQIFNGTVVQRHPTHAVTFVDNHDSQPEEALESFVEEWFKPLAYALTLTRDQGYPSVFYGDYYGIPTHGVPAMKSKIDPILEARQKYAYGKQNDYLDHHNMIGWTREGNTAHPNSGLATIMSDGPGGNKWMYVGRNKAGQVWRDITGNRSGTVTINADGWGNFSVNGGSVSIWV

SEQ ID NO: 20974 - protein, 483 aa, Synthetic construct
HHNGTNGTMMQYFEWYLPNDGNHWNRLRSDASNLKDKGITAVWIPPAWKGASQNDVGYGAYDLYDLGEFNQKGTVRTKYGTRDQLQAAVTALKENGIQVYGDVVMNHKGGADATEWVRAVEVNPSNRNQEVSGDYTIEAWTKFDFPGRGNTHSNFKWRWYHFDGVDWDQSRQLQNRIYKFRGDGKGWDWEVDTENGNYDYLMYADIDMDHPEVVNELRNWGVWYTNTLGLDGFRIDAVKHIKYSFTRDWLTHVRNTTGKNMFAVAEFWKNDIGAIENYLSKTNWNHSVFDVPLHYNLYNASRSGGNYDMRQIFNGTVVQRHPTHAVTFVDNHDSQPEEALESFVEEWFKPLAYALTLTRDQGYPSVFYGDYYGIPTHGVPAMKSKIDPILEARQKYAYGKQNDYLDHHNMIGWTREGNTAHPNSGLATIMSDGPGGNKWMYVGRNKAGQVWRDITGNRSGTVTINADGWGNFSVNGGSVSIWV

SEQ ID NO: 20975 - protein, 483 aa, Synthetic construct
HHNGTNGTMMQYFEWYLPNDGNHWNRLRSDASNLKDKGITAVWIPPAWKGASQNDVGYGAYDLYDLGEFNQKGTVRTKYGTRNQLQAAVTALKSNGIQVYGDVVMNHKGGADATEWVRAVEVNPSNRNQEVSGDYTIEAWTKFDFPGRGNTHSNFKWRWYHFDGVDWDQSRQLQNRIYKFRGDGKGWDWEVDTENGNYDYLMYADIDMDHPEVVNELRNWGVWYTNTLGLDGFRIDAVKHIKYSFTRDWLTHVRNTTGKNMFAVAEFWKNDIGAIENYLSKTNWNHSVFDVPLHYNLYNASRSGGNYDMRQIFNGTVVQRHPTHAVTFVDNHDSQPEEALESFVEEWFKPLAYALTLTRDQGYPSVFYGDYYGIPTHGVPAMKSKIDPILEARQMYAYGKQNDYLDHHNMIGWTREGNTAHPNSGLATIMSDGPGGNKWMYVGRNKAGQVWRDITGNRSGTVTINADGWGNFSVNGGSVSIWV

SEQ ID NO: 20976 - protein, 483 aa, Synthetic construct
HHNGTNGTMMQYFEWYLPNDGNHWNRLRSDASNLKDKGITAVWIPPAWKGASQNDVGYGAYDLYDLGEFNQKGTVRTKYGTRNQLQAAVTALKSNGIQVYGDVVMNHKGGADATEWVRAVEVNPSNRNQEVSGDYTIEAWTKFDFPGRGNTHSNFKWRWYHFDGVDWDQSRQLQNRIYKFRGDGKGWDWEVDTENGNYDYLMYADIDMDHPEVVNELRNWGVWYTNTLGLDGFRIDAVKHIKYSFTRDWLTHVRNTTGKNMFAVAEFWKNDIGAIENYLSKTNWNHSVFDVPLHYNLYNASRSGGNYDMRQIFNGTVVQRHPTHAVTFVDNHDSQPEEALESFVEEWFKPLAYALTLTRDQGYPSVFYGDYYGIPTHGVPAMKSKIDPILEARQKYAYGKQNDYLDHHNMIGWTREGNTAHPNSGLATIMSDGPGGNKWMYVGRNKAGQVWRDITGNRNGTVTINADGWGNFSVNGGSVSIWV

SEQ ID NO: 20977 - protein, 483 aa, Synthetic construct
HHNGTNGTMMQYFEWYLPNDGNHWNRLRSDASNLKDKGITAVWIPPAWKGASQNDVGYGAYDLYDLGEFNQKGTVRTKYGTRNQLQAAVTALKSNGIQVYGDVVMNHKGGADATEWVRAVEVNPSNRNQEVSGDYTIEAWTKFDFPGRGNTHSNFKWRWYHFDGVDWDQSRQLQNRIYKFRGDGKEWDWEVDTENGNYDYLMYADIDMDHPEVVNELRNWGVWYTNTLGLDGFRIDAVKHIKYSFTRDWLTHVRNTTGKNMFAVAEFWKNDIGAIENYLSKTNWNHSVFDVPLHYNLYNASRSGGNYDMRQIFNGTVVQRHPTHAVTFVDNHDSQPEEALESFVEEWFKPLAYALTLTRDQGYPSVFYGDYYGIPTHGVPAMKSKIDPILEARQKYAYGKQNDYMDHHNMIGWTREGNTAHPNSGLATIMSDGPGGNKWMYVGRNKAGQVWRDITGNRSGTVTINADGWGNFSVNGGSVSIWV

SEQ ID NO: 20978 - protein, 483 aa, Synthetic construct
HHNGTNGTMMQYFEWYLPNDGNHWNRLRSDASNLKDKGITAVWIPPAWKGASQNDVGYGAYDLYDLGEFNQKGTVRTKYGTRNQLQAAVTALKDNGIQVYGDVVMNHKGGADATEWVRAVEVNPENRNQEVSGDYTIEAWTKFDFPGRGNTHSNFKWRWYHFDGVDWDQSRQLQNRIYKFRGDGKGWDWEVDTENGNYDYLMYADIDMDHPEVVNELRNWGVWYTNTLGLDGFRIDAVKHIKYSFTRDWLTHVRNTTGKNMFAVAEFWKNDIGAIENYLSKTNWNHSVFDVPLHYNLYNASRSGGNYDMRQIFNGTVVQRHPTHAVTFVDNHDSQPEEALESFVEEWFKPLAYALTLTRDQGYPSVFYGDYYGIPTHGVPAMKSKIDPILEARQKYAYGKQNDYLDHHNMIGWTREGNTAHPNSGLATIMSDGPGGNKWMYVGRNKAGQVWRDITGNRSGTVTINADGWGNFSVNGGSVSIWV

SEQ ID NO: 20979 - protein, 483 aa, Synthetic construct
HHNGTNGTMMQYFEWYLPNDGNHWNRLRSDASNLKDKGITAVWIPPAWKGASQNDVGYGAYDLYDLGEFNQKGTVRTKYGTRNQLQAAVTALKSNGIQVYGDVVMNHKGGADATEWVRAVEVNPSNRNQEVSGDYTIEAWTKFDFPGRGNTHSNFKWRWYHFDGVDWDQSRQLQNRIYKFRGDGKGWDWEVDTENGNYDYLMYADIDMDHPEVVNELRNWGVWYTNTLGLDGFRIDAVKHIKYSFTRDWLTHVRNTTGKNMFAVAEFWKNDIGAIENYLSKTNWNHSVFDVPLHYNLYNASRSGGNYDMRQIFNGTVVQRHPTHAVTFVDNHDSQPEEALESFVEEWFKPLAYALCLTRDQGYPSVFYGDYYGIPTHGVPAMKSKIDPILEARQKYAYGKQNDYLDHHNMIGWTREGNTAHPNSGLATIMSDGPGGNKWMYVGRNKAGQVWRDITGNRSGTVTINADGWGNFSVNGGSVSIWV

SEQ ID NO: 20980 - protein, 483 aa, Synthetic construct
HHNGTNGTMMQYFEWYLPNDGNHWNRLRSDASNLKDKGITAVWIPPAWKGASQNDVGYGAYDLYDLGEFNQKGTVRTKYGTRNQLQAAVTALKSNGIQVYGDVVMNHKGGADATEWVRAVEVNPSNRNQEVSGDYTIEAWTKFDFPGRGNTHSNFKWRWYHFDGVDWDQSRQLQNRIYKFRGDGKGWDWEVDTENGNYDYLMYADIDMDHPEVVNELRNWGVWYTNTLGLDGFRIDAVKHIKYSFTRDWLTHVRNTTGKNMFAVAEFWKNDIGAIENYLSKTNWNHSVFDVPLHYNLYNASRSGGNYDMRGIFNGTVVQRHPTHAVTFVDNHDSQPEEALESFVEEWFKPLAYALTLTRDQGYPSVFYGDYYGIPTHGVPAMKSKIDPILEARQKYAYGKQNDYLDHHNMIGWTREGNTAHPNSGLATIMSDGPGGNKWMYVGRNKAGQVWRDITGNRSGTVTINADGWGNFSVNGGSVSIWV

SEQ ID NO: 20981 - protein, 483 aa, Synthetic construct
HHNGTNGTMMQYFEWYLPNDGNHWNRLRSDASNLKDKGITAVWIPPAWKGASQNDVGYGAYDLYDLGEFNQKGTVRTKYGTRNQLQAAVTALKSNGIQVYGDVVMNHKGGADATEWVRAVEVNPSNRNQEVSGDYTIEAWTKFDFPGRGNTHSNFKWRWYHFDGVDWDQSRQLQNRIYKFRGDGKEWDWEVDTENGNYDYLMYADYDMDHPEVVNELRNWGVWYTNTLGLDGFRIDAVKHIKYSFTRDWLTHVRNTTGKNMFAVAEFWKNDIGAIENYLSKTNWNHSVFDVPLHYNLYNASRSGGNYDMRQIFNGTVVQRHPGHAVTFVDNHDSQPEEALESFVEEWFKPLAYALTLTRDQGYPSVFYGDYYGIPTHGVPAMKSKIDPILEARQKYAYGKQNDYMDHHNMIGWTREGNTAHPNSGLATIMSDGPGGNKWMYVGRNKAGQVWRDITGNRSGTVTINADGWGNFSVNGGSVSIWV

SEQ ID NO: 20982 - protein, 483 aa, Synthetic construct
HHNGTNGTMMQYFEWYLPNDGNHWNRLRSDASNLKDKGITAVWIPPAWKGASQNDVGYGAYDLYDLGEFNQKGTVRTKYGTRNQLQAAVTALKSNGIQVYGDVVMNHKGGADATEWVRAVEVNPSNRNQEVSGDYTIEAWTKFDFPGRGNTHSNFKWRWYHFDGVDWDQSRQLQNRIYKFRGDGKGWDWEVDTENGNYDYLMYADIDMDHPEVVNELRNWGVWYTNTLGLDGFRIDAVKHIKYSFTRDWLTHVRNTTGKNMFAVAEFWKNDIGAIENYLSKTNWNHSVFDVPLHYNLYNASRSGGNYDMRQIFNGTVVQRHPTHAVTFVDNHDSQPEEALESFVEEWFKPLAYALVLTRDQGYPSVFYGDYYGIPTHGVPAMKSKIDPILEARQKYAYGKQNDYLDHHNMIGWTREGNTAHPNSGLATIMSDGPGGNKWMYVGRNKAGQVWRDITGNRSGTVTINADGWGNFSVNGGSVSIWV

SEQ ID NO: 20983 - protein, 483 aa, unidentified
HHNGTNGTMMQYFEWYLPNDGNHWNRLRSDASNLKDKGITAVWIPPAWKGASQNDVGYGAYDLYDLGEFNQKGTVRTKYGTRNQLQAAVTALKSNGIQVYGDVVMNHKGGADATEWVRAVEVNPSNRNQEVSGDYTIEAWTKFDFPGRGNTHSNFKWRWYHFDGVDWDQSRQLQNRIYKFRGDGKGWDWEVDTENGNYDYLMYADIDMDHPEVVNELRNWGVWYTNTLGLDGFRIDAVKHIKYSFTRDWLTHVRNTTGKNMFAVAEFWKNDIGAIENYLSKTNWNHSVFDVPLHYNLYNASRSGGNYDMRQIFNGTVVQRHPTHAVTFVDNHDSQPEEALESFVEEWFKPLAYALTLTRDQGYPSVFYGDYYGIPTHGVPAMKSKIDPILEARQKYAYGKQNDYLDHHNMIGWTREGNTAHPNSGLATIMSDGPGGNKWMYVGRNKAGQVWRDITGNRSGTVTINADGWGNFSVNGGSVSIWV

SEQ ID NO: 20984 - protein, 483 aa, Synthetic construct
HHNGTNGTMMQYFEWYLPNDGNHWNRLRSDASNLKDKGITAVWIPPAWKGASQNDVGYGAYDLYDLGEFNQKGTVRTKYGTRNQLQAAVTALKENGIQVYGDVVMNHKGGADATEWVRAVEVNPSNRNQEVSGDYTIEAWTKFDFPGRGNTHSNFKWRWYHFDGVDWDQSRQLQNRIYKFRGDGKGWDWEVDTENGNYDYLMYADIDMDHPEVVNELRNWGVWYTNTLGLDGFRIDAVKHIKYSFTRDWLTHVRNTTGKNMFAVAEFWKNDIGAIENYLSKTNWNHSVFDVPLHYNLYNASRSGGNYDMRQIFNGTVVQRHPTHAVTFVDNHDSQPEEALESFVEEWFKPLAYALTLTRDQGYPSVFYGDYYGIPTHGVPAMKSKIDPILEARQKYAYGKQNDYLDHHNMIGWTREGNTAHPNSGLATIMSDGPGGNKWMYVGRNKAGQVWRDITGNRSGTVTINADGWGNFSVNGGSVSIWV

SEQ ID NO: 20985 - protein, 483 aa, Synthetic construct
HHNGTNGTMMQYFEWYLPNDGNHWNRLRSDASNLKDKGITAVWIPPAWKGASQNDVGYGAYDLYDLGEFNQKGTVRTKYGTRNQLQAAVTALKSNGIQVYGDVVMNHKGGADATEWVRAVEVNPSNRNQEVSGDYTIEAWTKFDFPGRGNTHSNFKWRWYHFDGVDWDQSRQLQNRIYKFRGDGKGWDWEVDTENGNYDYLMYADIDMDHPEVVNELRNWGVWYTNTLGLDGFRIDAVKHIKYSFTRDWLTHVRNTTGKNMFAVAEFWKNDIGAIENYLSKTNWNHSVFDVPLHYNLYNASRSGGNYDMRQIFNGTVVQRHPGHAVTFVDNHDSQPEEALESFVEEWFKPLAYALVLTRDQGYPSVFYGDYYGIPTHGVPAMKSKIDPILEARQKYAYGKQNDYLDHHNMIGWTREGNTAHPNSGLATIMSDGPGGNKWMYVGRNKAGQVWRDITGNRSGTVTINADGWGNFSVNGGSVSIWV

SEQ ID NO: 20986 - protein, 483 aa, Synthetic construct
HHNGTNGTMMQYFEWYLPNDGNHWNRLRSDASNLKDKGITAVWIPPAWKGASQNDVGYGAYDLYDLGEFNQKGTVRTKYGTRNQLQAAVTALKSNGIQVYGDVVMNHKGGADATEWVRAVEVNPSNRNQEVSGDYTIEAWTKFDFPGRGNTHSNFKWRWYHFDGVDWDQSRQLQNRIYKFRGDGKGWDWEVDTENGNYDYLMYADIDMDHPEVVNELRNWGVWYTNTLGLDGFRIDAVKHIKYSFTRDWLTHVRNTTGKNMFAVAEFWKNDIGAIENYLSKTNWNHSVFDVPLHYNLYNASRSGGNYDMRQIFNGTVVQRHPTHAVTFVDNHDSQPEEALESFVEEWFKPLAYALTLTRDQGYPSVFYGDYYGIPTHGVPAMKSKIDPILEARQKSAYGKQNDYLDHHNMIGWTREGNTAHPNSGLATIMSDGPGGNKWMYVGRNKAGQVWRDITGNRSGTVTINADGWGNFSVNGGSVSIWV

SEQ ID NO: 20987 - protein, 483 aa, Synthetic construct
HHNGTNGTMMQYFEWYLPNDGNHWNRLRSDASNLKDKGITAVWIPPAWKGASQNDVGYGAYDLYDLGEFNQKGTVRTKYGTRNQLQRAVTALKSNGIQVYGDVVMNHKGGADATEWVRAVEVNPSNRNQEVSGDYTIEAWTKFDFPGRGNTHSNFKWRWYHFDGVDWDQSRQLQNRIYKFRGDGKEWDWEVDTENGNYDYLMYADIDMDHPEVVNELRNWGVWYTRTLGLDGFRIDAVKHIKYSFTRDWLTHVRNTTGKNMFAVAEFWKNDIGAIENYLSKTNWNHSVFDVPLHYNLYNASRSGGNYDMRKIFNGTVVQRHPTHAVTFVDNHDSQPEEALESFVEEWFKPLAYALTLTRDQGYPSVFYGDYYGIPTHGVPAMKSKIDPILEARQKYAYGKQNDYLDHHNMIGWTREGNTKHPNSGLATIMSDGPGGNKWMYVGRNKAGQVWRDITGNRSGTVTINADGWGNFSVNGGSVSIWV

SEQ ID NO: 20988 - protein, 483 aa, Synthetic construct
HHNGTNGTMMQYFEWYLPNDGNHWNRLRSDASNLKDKGITAVWIPPAWKGASQNDVGYGAYDLYDLGEFNQKGTVRTKYGTRNQLQAAVTALKSNGIQVYGDVVMNHKGGADATEWVRAVEVNPSNRNQEVSGDYTIEAWTKFDFPGRGNTHSNFKWRWYHFDGVDWDQSRQLQNRIYKFRGDGKGWDWEVDTENGNYDYLMYADIDMDHPEVVNELRNWGVWYTNTLGLDGFRIDAVKHIKYSFTRDWLTHVRNTTGKNMFAVAEFWKNDIGAIENYLSKTNWNHSVFDVPLHYNLYNASRSGGNYDMRQIFNGTVVQRHPTHAVTFVDNHDSQPEEALESFVEEWFKPLAYALTLTRDQGYPSVFYGDYYGIPTHGVPAMKSKIDPILEARQKCAYGKQNDYLDHHNMIGWTREGNTAHPNSGLATIMSDGPGGNKWMYVGRNKAGQVWRDITGNRSGTVTINADGWGNFSVNGGSVSIWV

SEQ ID NO: 20989 - protein, 481 aa, Bacillus sp.
HHNGTNGTMMQYFEWYLPNDGNHWNRLRSDASNLKDKGITAVWIPPAWKGASQNDVGYGAYDLYDLGEFNQKGTVRTKYGTRNQLQAAVTALKSNGIQVYGDVVMNHKGGADATEWVRAVEVNPSNRNQEVSGDYTIEAWTKFDFPGRGNTHSNFKWRWYHFDGVDWDQSRQLQNRIYKFRGKGWDWEVDTENGNYDYLMYADIDMDHPEVVNELRNWGVWYTNTLGLDGFRIDAVKHIKYSFTRDWLTHVRNTTGKNMFAVAEFWKNDIGAIENYLSKTNWNHSVFDVPLHYNLYNASRSGGNYDMRQIFNGTVVQRHPTHAVTFVDNHDSQPEEALESFVEEWFKPLAYALTLTRDQGYPSVFYGDYYGIPTHGVPAMKSKIDPILEARQKYAYGKQNDYLDHHNMIGWTREGNTAHPNSGLATIMSDGPGGNKWMYVGRNKAGQVWRDITGNRSGTVTINADGWGNFSVNGGSVSIWV

SEQ ID NO: 20990 - protein, 483 aa, Synthetic construct
HHNGTNGTMMQYFEWYLPNDGNHWNRLRSDASNLKDKGITAVWIPPAWKGASQNDVGYGAYDLYDLGEFNQKGTVRTKYGTRNQLQAAVTALKSNGIQVYGDVVMNHKGGADATEWVRAVEVNPSNRNQEVSGDYTIEAWTKFDFPGRGNTHSNFKWRWYHFDGVDWDQSRQLQNRIYKFRGDGKGWDWEVDTENGNYDYLMYADIDMDHPEVVNELRNWGVWYTNTLGLDGFRIDAVKHIKYSFTRDWLTHVRNTTGKNMFAVAEFWKNDIGAIENYLSKTNWNHSVFDVPLHYNLYNASRSGGNYDMRWIFNGTVVQRHPTHAVTFVDNHDSQPEEALESFVEEWFKPLAYALTLTRDQGYPSVFYGDYYGIPTHGVPAMKSKIDPILEARQKYAYGKQNDYLDHHNMIGWTREGNTAHPNSGLATIMSDGPGGNKWMYVGRNKAGQVWRDITGNRSGTVTINADGWGNFSVNGGSVSIWV

SEQ ID NO: 20991 - protein, 483 aa, Synthetic construct
HHNGTNGTMMQYFEWYLPNDGNHWNRLRSDASNLKDKGITAVWIPPAWKGASQNDVGYGAYDLYDLGEFNQKGTVRTKYGTRNQLQAAVTALKSNGIQVYGDVVMNHKGGADATEWVRAVEVNPSNRNQEVSGDYTIEAWTKFDFPGRGNTHSNFKWRWYHFDGVDWDQSRQLQNRIYKFRGDGKGWDWEVDTENGNYDYLMYADIDMDHPEVVNELRNWGVWYTNTLGLDGFRIDAVKHIKYSFTRDWLTHVRNTTGKNMFAVAEFWKNDIGAIENYLSKTNWNHSVFDVPLHYNLYNASRSGGNYDMRQIFNGTVVQRHPTHAVTFVDNHDSQPEEALESFVEEWFKPLAYALTLTRDQGYPSVFYGDYYGIPTHEVPAMKSKIDPILEARQKYAYGKQNDYLDHHNMIGWTREGNTAHPNSGLATIMSDGPGGNKWMYVGRNKAGQVWRDITGNRSGTVTINADGWGNFSVNGGSVSIWV

SEQ ID NO: 20992 - protein, 483 aa, Synthetic construct
HHNGTNGTMMQYFEWYLPNDGNHWNRLRSDASNLKDKGITAVWIPPAWKGASQNDVGYGAYDLYDLGEFNQKGTVRTKYGTRNQLQAAVTALKSNGIQVYGDVVMNHKGGADATEWVRAVEVNPSNRNQEVSGDYTIEAWTKFDFPGRGNTHSNFKWRWYHFDGVDWDQSRQLQNRIYKFRDDGKGWDWEVDTENGNYDYLMYADIDMDHPEVVNELRNWGVWYTNTLGLDGFRIDAVKHIKYSFTRDWLTHVRNTTGKNMFAVAEFWKNDIGAIENYLSKTNWNHSVFDVPLHYNLYNASRSGGNYDMRQIFNGTVVQRHPTHAVTFVDNHDSQPEEALESFVEEWFKPLAYALTLTRDQGYPSVFYGDYYGIPTHGVPAMKSKIDPILEARQKYAYGKQNDYLDHHNMIGWTREGNTAHPNSGLATIMSDGPGGNKWMYVGRNKAGQVWRDITGNRSGTVTINADGWGNFSVNGGSVSIWV

SEQ ID NO: 20993 - protein, 483 aa, Synthetic construct
HHNGTNGTMMQYFEWYLPNDGNHWNRLRSDASNLKDKGITAVWIPPAWKGASQNDVGYGAYDLYDLGEFNQKGTVRTKYGTRNQLQAAVTALKSNGIQVYGDVVMNHKGGADATEWVRAVEVNPSNRNQEVSGDYTIEAWTKFDFPGRGNTHSNFKWRWYHFDGVDWDQSRQLQNRIYKFRGDGKGWDWEVDTENGNYDYLMYADIDMDHPEVVNELRNWGVWYTNTLGLDGFRIDAVKHIKYSFTRDWLTHVRNTTGKNMFAVAEFWKNDIGAIENYLSKTNWNHSVFDVPLHYNLYNASRSGGNYDMRQIFNGTVVQRHPTHAVTFVDNHDSQPEEALESFVEEWFKPLAYALTLTRDQGYPSVFYGDYYGIPTHGVPAMKSKIDPILEARQKYAYGKQNDYHDHHNMIGWTREGNTAHPNSGLATIMSDGPGGNKWMYVGRNKAGQVWRDITGNRSGTVTINADGWGNFSVNGGSVSIWV

SEQ ID NO: 20994 - protein, 483 aa, Synthetic construct
HHNGTNGTMMQYFEWYLPNDGNHWNRLRSDASNLKDKGITAVWIPPAWKGASQNDVGYGAYDLYDLGEFNQKGTVRTKYGTRNQLQAAVTALKSNGIQVYGDVVMNHKGGADATEWVRAVEVNPSNRNQEVSGDYTIEAWTKFDFPGRGNTHSNFKWRWYHFDGVDWDQSRQLQNRIYKFRGDGKGWDWEVDTENGNYDYLMYADIDMDHPEVVNELRQWGVWYTNTLGLDGFRIDAVKHIKYSFTRDWLTHVRNTTGKNMFAVAEFWKNDIGAIENYLSKTNWNHSVFDVPLHYNLYNASRSGGNYDMRQIFNGTVVQRHPTHAVTFVDNHDSQPEEALESFVEEWFKPLAYALTLTRDQGYPSVFYGDYYGIPTHGVPAMKSKIDPILEARQKYAYGKQNDYLDHHNMIGWTREGNTAHPNSGLATIMSDGPGGNKWMYVGRNKAGQVWRDITGNRSGTVTINADGWGNFSVNGGSVSIWV

SEQ ID NO: 20995 - protein, 483 aa, Synthetic construct
HHNGTNGTMMQYFEWYLPNDGNHWNRLRSDASNLKDKGITAVWIPPAWKGASQNDVGYGAYDLYDLGEFNQKGTVRTKYGTREQLQAAVTALKSNGIQVYGDVVMNHKGGADATEWVRAVEVNPSNRNQEVSGDYTIEAWTKFDFPGRGNTHSNFKWRWYHFDGVDWDQSRQLQNRIYKFRGDGKEWDWEVDTENGNYDYLMYADIDMDHPEVVNELRRWGVWYTRTLGLDGFRIDAVKHIKYSFTRDWLTHVRNTTGKNMFAVAEFWKNDIGAIENYLSKTNWNHSVFDVPLHYNLYNASRSGGNYDMRQIFNGTVVQRHPTHAVTFVDNHDSQPEEALESFVEEWFKPLAYALTLTRDQGYPSVFYGDYYGIPTHGVPAMKSKIDPILEARQKYAYGKQNDYLDHHNMIGWTREGNTAHPNSGLATIMSDGPGGNKWMYVGRNKAGQVWRDITGNRSGTVTINADGWGNFSVNGGSVSIWV

SEQ ID NO: 20996 - protein, 483 aa, Synthetic construct
HHNGTNGTMMQYFEWYLPNDGNHWNRLRSDASNLKDKGITAVWIPPAWKGASQNDVGYGAYDLYDLGEFNQKGTVRTKYGTRNQLQAAVTALKSNGIQVYGDVVMNHKGGADATEWVRAVEVNPSNRNQEVSGDYTIEAWTKFDFPGRGNTHSNFKWRWYHFDGVDWDQSRQLQNRIYKFRGDGKGWDWEVDTENGNYDYLMYADIDMDHPEVVNELRNWGVWYTNTLGLDGFRIDAVKHIKYSFTRDWLTHVRNTTGKNMFAVAEFWKNDIGAVENYLSKTNWNHSVFDVPLHYNLYNASRSGGNYDMRQIFNGTVVQRHPTHAVTFVDNHDSQPEEALESFVEEWFKPLAYALTLTRDQGYPSVFYGDYYGIPTHGVPAMKSKIDPILEARQKYAYGKQNDYLDHHNMIGWTREGNTAHPNSGLATIMSDGPGGNKWMYVGRNKAGQVWRDITGNRSGTVTINADGWGNFSVNGGSVSIWV

SEQ ID NO: 20997 - protein, 483 aa, Synthetic construct
HHNGTNGTMMQYFEWYLPNDGNHWNRLRSDASNLKDKGITAVWIPPAWKGASQNDVGYGAYDLYDLGEFNQKGTVRTKYGTRNQLQAAVTALKSNGIQVYGDVVMNHKGGADATEWVRAVEVNPSNRNQEVSGDYTIEAWTKFDFPGRGNTHSNFKWRWYHFDGVDWDQSRQLQNRIYKFRGDGKEWDWEVDTENGNYDYLMYADYDMDHPEVVNELRNWGVWYTNTLGLDGFRIDAVKHIKYSFTRDWLTHVRNTTGKNMFAVAEFWKNDIGAIENYLSKTNWNHSVFDVPLHYNLYNASRSGGNYDMRQIFNGTVVQRHPTHAVTFVDNHDSQPEEALESFVEEWFKPLAYALTLTRDQGYPSVFYGDYYGIPTHGVPAMKSKIDPILEARQKYAYGKQNDYMDHHNMIGWTREGNTAHPNSGLATIMSDGPGGNKWMYVGRNKAGQVWRDITGNRSGTVTINADGWGNFSVNGGSVSIWV

SEQ ID NO: 20998 - protein, 483 aa, Synthetic construct
HHNGTNGTMMQYFEWYLPNDGNHWNRLRSDASNLKDKGITAVWIPPAWKGASQNDVGYGAYDLYDLGEFNQKGTVRTKYGTRNQLQAAVTALKSNGIQVYGDVVMNHKGGADATEWVRAVEVNPSNRNQEVSGDYTIEAWTKFDFPGRGNTHSNFKWRWYHFDGVDWDQSRQLQNRIYKFRGDGKGWDWEVDTENGNYDYLMYADIDMDHPEVVNELRNWGVWYTNTLGLDGFRIDAVKHIKYSFTRDWLTHVRNTTGKNMFAVAEFWKNDIGAIENYLSKTNWNHSVFDVPLHYNLYNASRSGGNYDMRQIFNGTVVQRHPTHAVTFVDNHDSQPEEALESFVEEWFKPLAYALTLTRDQGYPSVFYGDYYGIPTHGVPAMKSKIDPILEARQKYAYGLQNDYLDHHNMIGWTREGNTAHPNSGLATIMSDGPGGNKWMYVGRNKAGQVWRDITGNRSGTVTINADGWGNFSVNGGSVSIWV

SEQ ID NO: 20999 - protein, 483 aa, Synthetic construct
HHNGTNGTMMQYFEWYLPNDGNHWNRLRSDASNLKDKGITAVWIPPAWKGASQNDVGYGAYDLYDLGEFNQKGTVRTKYGTRNQLQRAVTALKSNGIQVYGDVVMNHKGGADATEWVRAVEVNPSNRNQEVSGDYTIEAWTKFDFPGRGNTHSNFKWRWYHFDGVDWDQSRQLQNRIYKFRGDGKEWDWEVDTENGNYDYLMYADIDMDHPEVVNELRNWGVWYTNTLGLDGFRIDAVKHIKYSFTRDWLTHVRNTTGKNMFAVAEFWKNDIGAIENYLSKTNWNHSVFDVPLHYNLYNASRSGGNYDMRKIFEGTVVQRHPTHAVTFVDNHDSQPEEALESFVEEWFKPLAYALTLTRDQGYPSVFYGDYYGIPTHGVPAMKSKIDPILEARQKYAYGKQNDYLDHHNMIGWTREGNTAHPNSGLATIMSDGPGGNKWMYVGRNKAGQVWRDITGNRSGTVTINADGWGNFSVNGGSVSIWV

SEQ ID NO: 21000 - protein, 483 aa, Synthetic construct
HHNGTNGTMMQYFEWYLPNDGNHWNRLRSDASNLKDKGITAVWIPPAWKGASQNDVGYGAYDLYDLGEFNQKGTVRTKYGTRNQLQAAVTALKSNGIQVYGDVVMNHKGGADATEWVRAVEVNPSNRNQEVSGDYTIEAWTKFDFPGRGNTHSNFKWRWYHFDGVDWDQSRQLQNRIYKFRGDGKGWDWEVDTENGNYDYLMYADIDMDHPEVVNELRNWGVWYTNTLGLDGFRIDAVKHIKYSFTRDWLTHVRNTTGKNMFAVAEFWKNDIGAIENYLSKTNWNHSVFDVPLHYNLYNASRSGGNYDMRQIFNGTVVQRHPTHAVTFVDNHDSQPEEALESFVEEWFKPLAYALTLTRTQGYPSVFYGDYYGIPTHGVPAMKSKIDPILEARQKYAYGKQNDYLDHHNMIGWTREGNTAHPNSGLATIMSDGPGGNKWMYVGRNKAGQVWRDITGNRSGTVTINADGWGNFSVNGGSVSIWV

SEQ ID NO: 21001 - protein, 483 aa, Synthetic construct
HHNGTNGTMMQYFEWYLPNDGNHWNRLRSDASNLKDKGITAVWIPPAWKGASQNDVGYGAYDLYDLGEFNQKGTVRTKYGTRNQLQAAVTALKSNGIQVYGDVVMNHKGGADATEWVRAVEVNPSNRNQEVSGDYTIEAWTKFDFPGRGNTHSNFKWRWYHFDGVDWDQSRQLQNRIYKFRSDGKGWDWEVDTENGNYDYLMYADIDMDHPEVVNELRNWGVWYTNTLGLDGFRIDAVKHIKYSFTRDWLTHVRNTTGKNMFAVAEFWKNDIGAIENYLSKTNWNHSVFDVPLHYNLYNASRSGGNYDMRQIFNGTVVQRHPTHAVTFVDNHDSQPEEALESFVEEWFKPLAYALTLTRDQGYPSVFYGDYYGIPTHGVPAMKSKIDPILEARQKYAYGKQNDYLDHHNMIGWTREGNTAHPNSGLATIMSDGPGGNKWMYVGRNKAGQVWRDITGNRSGTVTINADGWGNFSVNGGSVSIWV

SEQ ID NO: 21002 - protein, 483 aa, Synthetic construct
HHNGTNGTMMQYFEWYLPNDGNHWNRLRSDASNLKDKGITAVWIPPAWKGASQNDVGYGAYDLYDLGEFNQKGTVRTKYGTRNQLQAAVTALKSNGIQVYGDVVMNHKGGADATEWVRAVEVNPSNRNQEVSGDYTIEAWTKFDFPGRGNTHSNFKWRWYHFDGVDWDQSRQLQNRIYKFRGDGKEWDWEVDTENGNYDYLMYADIDMDHPEVVNELRNWGVWYTNTLGLDGFRIDAVKHIKYSFTRDWLTHVRNTTGKNMFAVAEFWKNDIGAIENYLSKTNWNHSVFDVPLHYNLYNASRSGGNYDMRKIFKGTVVQRHPTHAVTFVDNHDSQPEEALESFVEEWFKPLAYALTLTRDQGYPSVFYGDYYGIPTHGVPAMKSKIDPILEARQKYAYGKQNDYLDHHNMIGWTREGNTAHPNSGLATIMSDGPGGNKWMYVGRNKAGQVWRDITGNRSGTVTINADGWGNFSVNGGSVSIWV

SEQ ID NO: 21003 - protein, 483 aa, Synthetic construct
HHNGTNGTMMQYFEWYLPNDGNHWNRLRSDASNLKDMGITAVWIPPAWKGASQNDVGYGAYDLYDLGEFNQKGTVRTKYGTRNQLQAAVTALKSNGIQVYGDVVMNHKGGADATEWVRAVEVNPSNRNQEVSGDYTIEAWTKFDFPGRGNTHSNFKWRWYHFDGVDWDQSRQLQNRIYKFRGDGKGWDWEVDTENGNYDYLMYADIDMDHPEVVNELRNWGVWYTNTLGLDGFRIDAVKHIKYSFTRDWLTHVRNTTGKNMFAVAEFWKNDIGAIENYLSKTNWNHSVFDVPLHYNLYNASRSGGNYDMRQIFNGTVVQRHPTHAVTFVDNHDSQPEEALESFVEEWFKPLAYALTLTRDQGYPSVFYGDYYGIPTHGVPAMKSKIDPILEARQKYAYGKQNDYLDHHNMIGWTREGNTAHPNSGLATIMSDGPGGNKWMYVGRNKAGQVWRDITGNRSGTVTINADGWGNFSVNGGSVSIWV

SEQ ID NO: 21004 - protein, 483 aa, Synthetic construct
HHNGTNGTMMQYFEWYLPNDGNHWNRLRSDASNLKDKGITAVWIPPAWKGASQNDVGYGAYDLYDLGEFNQKGTVRTKYGTRNQLQAAVTALKSNGIQVYGDVVMNHKGGADATEWVRAVEVNPSNRNQEVSGDYTIEAWTKFDFPGRGNTHSNFKWRWYHFDGVDWDQSRQLQNRIYKFRGDGKGWDWEVDVENGNYDYLMYADIDMDHPEVVNELRNWGVWYTNTLGLDGFRIDAVKHIKYSFTRDWLTHVRNTTGKNMFAVAEFWKNDIGAIENYLSKTNWNHSVFDVPLHYNLYNASRSGGNYDMRQIFNGTVVQRHPTHAVTFVDNHDSQPEEALESFVEEWFKPLAYALTLTRDQGYPSVFYGDYYGIPTHGVPAMKSKIDPILEARQKYAYGKQNDYLDHHNMIGWTREGNTAHPNSGLATIMSDGPGGNKWMYVGRNKAGQVWRDITGNRSGTVTINADGWGNFSVNGGSVSIWV

SEQ ID NO: 21005 - protein, 483 aa, Synthetic construct
HHNGTNGTMMQYFEWYLPNDGNHWNRLRSDASNLKDKGITAVWIPPAWKGASQNDVGYGAYDLYDLGEFNQKGTVRTKYGTRNQLQAAVTALKSNGIQVYGDVVMNHKGGADATEWVRAVEVNPSNRNQEVSGDYTIEAWTKFDFPGRGNTHSNFKWRWYHFDGVDWDQSRQLQNRIYKFRGDGKGWDWEVDTENGNYDYLMYADIDMDHPEVVNELRNWGVWYTNTLGLDGFRIDAVKHIKYSFTRDWLTHVRNTTGKNMFAVAEFWKNDIGAIENYLSKTNWNHSVFDVPLHYNLYNASRSGGNYDMRQIFNGTVVQRHPTHAVTFVDNHDSQPEEALESFVEEWFKPLAYALLLTRDQGYPSVFYGDYYGIPTHGVPAMKSKIDPILEARQKYAYGKQNDYLDHHNMIGWTREGNTAHPNSGLATIMSDGPGGNKWMYVGRNKAGQVWRDITGNRSGTVTINADGWGNFSVNGGSVSIWV

SEQ ID NO: 21006 - protein, 483 aa, Synthetic construct
HHNGTNGTMMQYFEWYLPNDGNHWNRLRSDASNLKDKGITAVWIPPAWKGASQNDVGYGAYDLYDLGEFNQKGTVRTKYGTRNQLQAAVTALKSNGIQVYGDVVMNHKGGADATEWVRAVEVNPSNRNQEQSGDYTIEAWTKFDFPGRGNTHSNFKWRWYHFDGVDWDQSRQLQNRIYKFRGDGKGWDWEVDTENGNYDYLMYADIDMDHPEVVNELRNWGVWYTNTLGLDGFRIDAVKHIKYSFTRDWLTHVRNTTGKNMFAVAEFWKNDIGAIENYLSKTNWNHSVFDVPLHYNLYNASRSGGNYDMRQIFNGTVVQRHPTHAVTFVDNHDSQPEEALESFVEEWFKPLAYALTLTRDQGYPSVFYGDYYGIPTHGVPAMKSKIDPILEARQKYAYGKQNDYLDHHNMIGWTREGNTAHPNSGLATIMSDGPGGNKWMYVGRNKAGQVWRDITGNRSGTVTINADGWGNFSVNGGSVSIWV

SEQ ID NO: 21007 - protein, 483 aa, Synthetic construct
HHNGTNGTMMQYFEWYLPNDGNHWNRLRSDASNLKDKGITAVWIPPAWKGASQNDVGYGAYDLYDLGEFNQKGTVRTKYGTRNQLQAAVTALKSNGIQVYGDVVMNHKGGADATEWVRAVEVNPSNRNQEVSGDYTIEAWTKFDFPGRGNTHSNFKWRWYHFDGVDWDQSRQLQNRIYKFRGDGKGWDWEVDTENGNYDYLMYADIDMDHPEVVNELRNWGVWYTNTLGLDGFRIDAVKHIKYSFTRDWLTHVRNTTGKNMFAVAEFWKNDIGAIENYLSKTNWNHSVFDVPLHYNLYNASRSGGNYDMRQIFNGTVVQRHPTHAVTFVDNHDSQPEEALESFVEEWFKPLAYALTLTRDQGYPSVFYGDYYGIPTHGVPAMKSKIDPILEARQKYAYGSQNDYLDHHNMIGWTREGNTAHPNSGLATIMSDGPGGNKWMYVGRNKAGQVWRDITGNRSGTVTINADGWGNFSVNGGSVSIWV

SEQ ID NO: 21008 - protein, 483 aa, Synthetic construct
HHNGTNGTMMQYFEWYLPNDGNHWNRLRSDASNLKDKGITAVWIPPAWKGASQNDVGYGAYDLYDLGEFNQKGTVRTKYGTRNQLQAAVTALKSNGIQVYGDVVMNHKGGADATEWVRAVEVNPSNRNQEVSGDYTIEAWTKFDFPGRGNTHSNFKWRWYHFDGVDWDQSRQLQNRIYKFRGDGKEWDWEVDTENGNYDYLMYADIDMDHPEVVNELRNWGVWYTNTLGLDGFRIDAVKHIKYSFTRDWLTHVRNTTGKNMFAVAEFWKNDIGAIENYLSKTNWNHSVFDVPLHYNLYNASRSGGNYDMRKIFNGTVVQRHPTHAVTFVDNHDSQPEEALESFVEEWFKPLAYALTLTRDQGYPSVFYGDYYGIPTHGVPAMKSKIDPILEARQKYAYGKQNDYLDHHNMIGWTREGNTEHPNSGLATIMSDGPGGNKWMYVGRNKAGQVWRDITGNRSGTVTINADGWGEFSVNGGSVSIWV

SEQ ID NO: 21009 - protein, 483 aa, Synthetic construct
HHNGTNGTMMQYFEWYLPNDGNHWNRLRSDASNLKDKGITAVWIPPAWKGASQNDVGYGAYDLYDLGEFNQKGTVRTKYGTRNQLQAAVTALKSNGIQVYGDVVMNHKGGADATEWVRAVEVNPSNRNQEVSGDYTIEAWTKFDFPGRGNTHSNFKWRWYHFDGVDWDQSRQLQNRIYKFRQDGKGWDWEVDTENGNYDYLMYADIDMDHPEVVNELRNWGVWYTNTLGLDGFRIDAVKHIKYSFTRDWLTHVRNTTGKNMFAVAEFWKNDIGAIENYLSKTNWNHSVFDVPLHYNLYNASRSGGNYDMRQIFNGTVVQRHPTHAVTFVDNHDSQPEEALESFVEEWFKPLAYALTLTRDQGYPSVFYGDYYGIPTHGVPAMKSKIDPILEARQKYAYGKQNDYLDHHNMIGWTREGNTAHPNSGLATIMSDGPGGNKWMYVGRNKAGQVWRDITGNRSGTVTINADGWGNFSVNGGSVSIWV

SEQ ID NO: 21010 - protein, 483 aa, Synthetic construct
HHNGTNGTMMQYFEWYLPNDGNHWNRLRSDASNLKDLGITAVWIPPAWKGASQNDVGYGAYDLYDLGEFNQKGTVRTKYGTRNQLQAAVTALKSNGIQVYGDVVMNHKGGADATEWVRAVEVNPSNRNQEVSGDYTIEAWTKFDFPGRGNTHSNFKWRWYHFDGVDWDQSRQLQNRIYKFRGDGKGWDWEVDTENGNYDYLMYADIDMDHPEVVNELRNWGVWYTNTLGLDGFRIDAVKHIKYSFTRDWLTHVRNTTGKNMFAVAEFWKNDIGAIENYLSKTNWNHSVFDVPLHYNLYNASRSGGNYDMRQIFNGTVVQRHPTHAVTFVDNHDSQPEEALESFVEEWFKPLAYALTLTRDQGYPSVFYGDYYGIPTHGVPAMKSKIDPILEARQKYAYGKQNDYLDHHNMIGWTREGNTAHPNSGLATIMSDGPGGNKWMYVGRNKAGQVWRDITGNRSGTVTINADGWGNFSVNGGSVSIWV

SEQ ID NO: 21011 - protein, 483 aa, Synthetic construct
HHNGTNGTMMQYFEWYLPNDGNHWNRLRSDASNLKDKGITAVWIPPAWKGASQNDVGYGAYDLYDLGEFNQKGTVRTKYGTRNQLQAAVTALKSNGIQVYGDVVMNHKGGADATEWVDAVEVNPSNRNQEVSGDYTIEAWTKFDFPGRGNTHSNFKWRWYHFDGVDWDQSRQLQNRIYKFRGDGKGWDWEVDTENGNYDYLMYADIDMDHPEVVNELRNWGVWYTNTLGLDGFRIDAVKHIKYSFTRDWLTHVRNTTGKNMFAVAEFWKNDIGAIENYLSKTNWNHSVFDVPLHYNLYNASRSGGNYDMRQIFNGTVVQRHPTHAVTFVDNHDSQPEEALESFVEEWFKPLAYALTLTRDQGYPSVFYGDYYGIPTHGVPAMKSKIDPILEARQKYAYGKQNDYLDHHNMIGWTREGNTAHPNSGLATIMSDGPGGNKWMYVGRNKAGQVWRDITGNRSGTVTINADGWGNFSVNGGSVSIWV

SEQ ID NO: 21012 - protein, 483 aa, Synthetic construct
HHNGTNGTMMQYFEWYLPNDGNHWNRLRSDASNLKDKGITAVWIPPAWKGASQNDVGYGAYDLYDLGEFNQKGTVRTKYGTRNQLQAAVTALKSNGIQVYGDVVMNHKGGADATEWVRAVEVNPSNRNQEVSGDYTIEAWTKFDFPGRGNTHSNFKWRWYHFDGVDWDQSRQLQNRIYKFRGDGKGWDWEVDTENGNYDYLMYADIDMDHPEVVNELRNWGVWYTNTLGLDGFRIDAVKHIKYSFTRDWLTHVRNTTGKNMFAVAEFWKNDIGAIENYLKKTNWNHSVFDVPLHYNLYNASRSGGNYDMRQIFNGTVVQRHPTHAVTFVDNHDSQPEEALESFVEEWFKPLAYALTLTRDQGYPSVFYGDYYGIPTHGVPAMKSKIDPILEARQKYAYGKQNDYLDHHNMIGWTREGNTAHPNSGLATIMSDGPGGNKWMYVGRNKAGQVWRDITGNRSGTVTINADGWGNFSVNGGSVSIWV

SEQ ID NO: 21013 - protein, 483 aa, Synthetic construct
HHNGTNGTMMQYFEWYLPNDGNHWNRLRSDASNLKDKGITAVWIPPAWKGASQNDVGYGAYDLYDLGEFNQKGTVRTKYGTREQLQAAVTALKSNGIQVYGDVVMNHKGGADATEWVRAVEVNPSNRNQEVSGDYTIEAWTKFDFPGRGNTHSNFKWRWYHFDGVDWDQSRQLQNRIYKFRGDGKGWDWEVDTENGNYDYLMYADIDMDHPEVVNELRNWGVWYTNTLGLDGFRIDAVKHIKYSFTRDWLTHVRNTTGKNMFAVAEFWKNDIGAIENYLSKTNWNHSVFDVPLHYNLYNASRSGGNYDMRQIFNGTVVQRHPTHAVTFVDNHDSQPEEALESFVEEWFKPLAYALTLTRDQGYPSVFYGDYYGIPTHGVPAMKSKIDPILEARQKYAYGKQNDYLDHHNMIGWTREGNTAHPNSGLATIMSDGPGGNKWMYVGRNKAGQVWRDITGNRSGTVTINADGWGNFSVNGGSVSIWV

SEQ ID NO: 21014 - protein, 483 aa, Synthetic construct
HHNGTNGTMMQYFEWYLPNDGNHWNRLRSDASNLKDKGITAVWIPPAWKGASQNDVGYGAYDLYDLGEFNQKGTVRTKYGTRNQLQAAVTALKSNGIQVYGDVVMNHKGGADATEWVRAVEVNPSNRNQEVSGDYTIEAWTKFDFPGRGNTHSNFKWRWYHFDGVDWDQSRQLQNRIYKFRGDGKGWDWEVDTENGNYDYLMYADIDMDHPEVVNELRNWGVWYTNTLGLDGFRIDAVKHIKYSFTRDWLTHVRNTTGKNMFAVAEFWKNDIGAIENYLRKTNWNHSVFDVPLHYNLYNASRSGGNYDMRQIFNGTVVQRHPTHAVTFVDNHDSQPEEALESFVEEWFKPLAYALTLTRDQGYPSVFYGDYYGIPTHGVPAMKSKIDPILEARQKYAYGKQNDYLDHHNMIGWTREGNTAHPNSGLATIMSDGPGGNKWMYVGRNKAGQVWRDITGNRSGTVTINADGWGNFSVNGGSVSIWV

SEQ ID NO: 21015 - protein, 483 aa, Synthetic construct
HHNGTNGTMMQYFEWYLPNDGNHWNRLRSDASNLKDKGITAVWIPPAWKGASQNDVGYGAYDLYDLGEFNQKGTVRTKYGTRNQLQAAVTALKSNGIQVYGDVVMNHKGGADATEWVRAVEVNPSNRNQEVSGDYTIEAWTKFDFPGRGNTHSNFKWRWYHFDGVDWDQSRQLQNRIYKFRGDGKGWDWEVDTENGNYDYLMYADIDMDHPEVVNELRNWGVWYTNTLGLDGFRIDAVKHIKYSFTRDWLTHVRNTTGKNMFAVAEFWKNDIGAIENYLGKTNWNHSVFDVPLHYNLYNASRSGGNYDMRQIFNGTVVQRHPTHAVTFVDNHDSQPEEALESFVEEWFKPLAYALTLTRDQGYPSVFYGDYYGIPTHGVPAMKSKIDPILEARQKYAYGKQNDYLDHHNMIGWTREGNTAHPNSGLATIMSDGPGGNKWMYVGRNKAGQVWRDITGNRSGTVTINADGWGNFSVNGGSVSIWV

SEQ ID NO: 21016 - protein, 483 aa, Synthetic construct
HHNGTNGTMMQYFEWYLPNDGNHWNRLRSDASNLKDKGITAVWIPPAWKGASQNDVGYGAYDLYDLGEFNQKGTVRTKYGTRNQLQAAVTALKSNGIQVYGDVVMNHKGGADATEWVRAVEVNPSNRNQEVSGDYTIEAWTKFDFPGRGNTHSNFKWRWYHFDGVDWDQSRQLQNRIYKFRGDGKGWDWEVDTENGNYDYLMYADIDMDHPEVVNELRNWGVWYTNTLGLDGFRIDAVKHIKYSFTRDWLTHVRNTTGKNMFAVAEFWKNDIGAIENYLFKTNWNHSVFDVPLHYNLYNASRSGGNYDMRQIFNGTVVQRHPTHAVTFVDNHDSQPEEALESFVEEWFKPLAYALTLTRDQGYPSVFYGDYYGIPTHGVPAMKSKIDPILEARQKYAYGKQNDYLDHHNMIGWTREGNTAHPNSGLATIMSDGPGGNKWMYVGRNKAGQVWRDITGNRSGTVTINADGWGNFSVNGGSVSIWV

SEQ ID NO: 21017 - protein, 483 aa, Synthetic construct
HHNGTNGTMMQYFEWYLPNDGNHWNRLRSDASNLKDKGITAVWIPPAWKGASQNDVGYGAYDLYDLGEFNQKGTVRTKYGTRNQLQAAVTALKSNGIQVYGDVVMNHKGGADATEWVRAVEVNPSNRNQEVSGDYTIEAWTKFDFPGRGNTHSNFKWRWYHFDGVDWDQSRQLQNRIYKFRGDGKGWDWEVDTENGNYDYLMYADIDMDHPEVVNELRNWGVWYTNTLGLDGFRIDAVKHIKYSFTRDWLTHVRNTTGKNMFAVAEFWKNDIGAIENYLSKTNWNHSVFDVPLHYNLYNASRSGGNYDMRQIFNGTVVQRHPTHAVTFVDNHDSQPEEALESFVEEWFKPLAYALTLTRDQGYPSVFYGDYYGIPTHGVPAMKSKIDPILEARQCYAYGKQNDYLDHHNMIGWTREGNTAHPNSGLATIMSDGPGGNKWMYVGRNKAGQVWRDITGNRSGTVTINADGWGNFSVNGGSVSIWV

SEQ ID NO: 21018 - protein, 483 aa, Synthetic construct
HHNGTNGTMMQYFEWYLPNDGNHWNRLRSDASNLKDKGITAVWIPPAWKGASQNDVGYGAYDLYDLGEFNQKGTVRTKYGTRRQLQAAVTALKSNGIQVYGDVVMNHKGGADATEWVRAVEVNPSNRNQEVSGDYTIEAWTKFDFPGRGNTHSNFKWRWYHFDGVDWDQSRQLQNRIYKFRGDGKEWDWEVDTENGNYDYLMYADIDMDHPEVVNELRRWGVWYTDTLGLDGFRIDAVKHIKYSFTRDWLTHVRNTTGKNMFAVAEFWKNDIGAIENYLSKTNWNHSVFDVPLHYNLYNASRSGGNYDMRQIFNGTVVQRHPTHAVTFVDNHDSQPEEALESFVEEWFKPLAYALTLTRDQGYPSVFYGDYYGIPTHGVPAMKSKIDPILEARQKYAYGKQNDYLDHHNMIGWTREGNTAHPNSGLATIMSDGPGGNKWMYVGRNKAGQVWRDITGNRSGTVTINADGWGNFSVNGGSVSIWV

SEQ ID NO: 21019 - protein, 483 aa, Synthetic construct
HHNGTNGTMMQYFEWYLPNDGNHWNRLRSDASNLKDKGITAVWIPPAWKGASQNDVGYGAYDLYDLGEFNQKGTVRTKYGTRNQLQAAVTALKSNGIQVYGDVVMNHKGGADATEWVRAVEVNPSNRNQEVSGDYTIEAWTKFDFPGRGNTHSNFKWRWYHFDGVDWDQSRQLQNRIYKFRGDGKGWDWEVDDENGNYDYLMYADIDMDHPEVVNELRNWGVWYTNTLGLDGFRIDAVKHIKYSFTRDWLTHVRNTTGKNMFAVAEFWKNDIGAIENYLSKTNWNHSVFDVPLHYNLYNASRSGGNYDMRQIFNGTVVQRHPTHAVTFVDNHDSQPEEALESFVEEWFKPLAYALTLTRDQGYPSVFYGDYYGIPTHGVPAMKSKIDPILEARQKYAYGKQNDYLDHHNMIGWTREGNTAHPNSGLATIMSDGPGGNKWMYVGRNKAGQVWRDITGNRSGTVTINADGWGNFSVNGGSVSIWV

SEQ ID NO: 21020 - protein, 483 aa, Synthetic construct
HHNGTNGTMMQYFEWYLPNDGNHWNRLRSDASNLKDKGITAVWIPPAWKGASQNDVGYGAYDLYDLGEFNQKGTVRTKYGTRNQLQAAVTALKSNGIQVYGDVVMNHKGGADATEWVEAVEVNPSNRNQEVSGDYTIEAWTKFDFPGRGNTHSNFKWRWYHFDGVDWDQSRQLQNRIYKFRGDGKGWDWEVDTENGNYDYLMYADIDMDHPEVVNELRNWGVWYTNTLGLDGFRIDAVKHIKYSFTRDWLTHVRNTTGKNMFAVAEFWKNDIGAIENYLSKTNWNHSVFDVPLHYNLYNASRSGGNYDMRQIFNGTVVQRHPTHAVTFVDNHDSQPEEALESFVEEWFKPLAYALTLTRDQGYPSVFYGDYYGIPTHGVPAMKSKIDPILEARQKYAYGKQNDYLDHHNMIGWTREGNTAHPNSGLATIMSDGPGGNKWMYVGRNKAGQVWRDITGNRSGTVTINADGWGNFSVNGGSVSIWV

SEQ ID NO: 21021 - protein, 483 aa, Synthetic construct
HHNGTNGTMMQYFEWYLPNDGNHWNRLRSDASNLKKKGITAVWIPPAWKGASQNDVGYGAYDLYDLGEFNQKGTVRTKYGTRNQLQAAVTALKSNGIQVYGDVVMNHKGGADATEWVRAVEVNPSNRNQEVSGDYTIEAWTKFDFPGRGNTHSNFKWRWYHFDGVDWDQSRQLQNRIYKFRGDGKGWDWEVDTENGNYDYLMYADIDMDHPEVVNELRNWGVWYTNTLGLDGFRIDAVKHIKYSFTRDWLTHVRNTTGKNMFAVAEFWKNDIGAIENYLSKTNWNHSVFDVPLHYNLYNASRSGGNYDMRQIFNGTVVQRHPTHAVTFVDNHDSQPEEALESFVEEWFKPLAYALTLTRDQGYPSVFYGDYYGIPTHGVPAMKSKIDPILEARQKYAYGKQNDYLDHHNMIGWTREGNTAHPNSGLATIMSDGPGGNKWMYVGRNKAGQVWRDITGNRSGTVTINADGWGNFSVNGGSVSIWV

SEQ ID NO: 21022 - protein, 483 aa, Synthetic construct
HHNGTNGTMMQYFEWYLPNDGNHWNRLRSDASNLKDKGITAVWIPPAWKGASQNDVGYGAYDLYDLGEFNQKCTVRTKYGTRNQLQAAVTALKSNGIQVYGDVVMNHKGGADATEWVRAVEVNPSNRNQEISGDYTIEAWTKFDFPGRGNTHSNFKWRWYHFDGVDWDQSRQLQNRIYKFRGDGKGWDWEVDTENGNYDYLMYADIDMDHPEVVNELRNWGVWYTNTLGLDGFRIDAVKHIKYSFTRDWLTHVRNTTGKNMFAVAEFWKNDIGAIENYLSKTNWNHSVFDVPLHYNLYNASRSGGNYDMRQIFNGTVVQRHPTHAVTFVDNHDSQPEEALESFVEEWFKPLAYALTLTRDQGYPSVFYGDYYGIPTHGVPAMKSKIDPILEARQKYAYGKQNDYLDHHNMIGWTREGNTAHPNSGLATIMSDGPGGNKWMYVGRNKAGQVWRDITGNRSGTVTINADGWGNFSVNGGSVSIWV

SEQ ID NO: 21023 - protein, 483 aa, Synthetic construct
HHNGTNGTMMQYFEWYLPNDGNHWNRLRSDASNLKDKGITAVWIPPAWKGASQNDVGYGAYDLYDLGEFNQKGTVRTKYGTRNQLQAAVTALKSNGIQVYGDVVMNHKGGADATEWVRAVEVNPSNRNQEVSGDYTIEAWTKFDFPGRGNTHSNFKWRWYHFDGVDWDQSRQLQNRIYKFRGDGKGWDWEVDEENGNYDYLMYADIDMDHPEVVNELRNWGVWYTNTLGLDGFRIDAVKHIKYSFTRDWLTHVRNTTGKNMFAVAEFWKNDIGAIENYLSKTNWNHSVFDVPLHYNLYNASRSGGNYDMRQIFNGTVVQRHPTHAVTFVDNHDSQPEEALESFVEEWFKPLAYALTLTRDQGYPSVFYGDYYGIPTHGVPAMKSKIDPILEARQKYAYGKQNDYLDHHNMIGWTREGNTAHPNSGLATIMSDGPGGNKWMYVGRNKAGQVWRDITGNRSGTVTINADGWGNFSVNGGSVSIWV

SEQ ID NO: 21024 - protein, 483 aa, Synthetic construct
HHNGTNGTMMQYFEWYLPNDGNHWNRLRSDASNLKDFGITAVWIPPAWKGASQNDVGYGAYDLYDLGEFNQKGTVRTKYGTRNQLQAAVTALKSNGIQVYGDVVMNHKGGADATEWVRAVEVNPSNRNQEVSGDYTIEAWTKFDFPGRGNTHSNFKWRWYHFDGVDWDQSRQLQNRIYKFRGDGKGWDWEVDTENGNYDYLMYADIDMDHPEVVNELRNWGVWYTNTLGLDGFRIDAVKHIKYSFTRDWLTHVRNTTGKNMFAVAEFWKNDIGAIENYLSKTNWNHSVFDVPLHYNLYNASRSGGNYDMRQIFNGTVVQRHPTHAVTFVDNHDSQPEEALESFVEEWFKPLAYALTLTRDQGYPSVFYGDYYGIPTHGVPAMKSKIDPILEARQKYAYGKQNDYLDHHNMIGWTREGNTAHPNSGLATIMSDGPGGNKWMYVGRNKAGQVWRDITGNRSGTVTINADGWGNFSVNGGSVSIWV

SEQ ID NO: 21025 - protein, 483 aa, Synthetic construct
HHNGTNGTMMQYFEWYLPNDGNHWNRLRSDASNLKDKGITAVWIPPAWKGASQNDVGYGAYDLYDLGEFNQKGTVRTKYGTRNQLQAAVTALKSNGIQVYGDVVMNHKGGADATEWVAAVEVNPSNRNQEVSGDYTIEAWTKFDFPGRGNTHSNFKWRWYHFDGVDWDQSRQLQNRIYKFRGDGKGWDWEVDTENGNYDYLMYADIDMDHPEVVNELRNWGVWYTNTLGLDGFRIDAVKHIKYSFTRDWLTHVRNTTGKNMFAVAEFWKNDIGAIENYLSKTNWNHSVFDVPLHYNLYNASRSGGNYDMRQIFNGTVVQRHPTHAVTFVDNHDSQPEEALESFVEEWFKPLAYALTLTRDQGYPSVFYGDYYGIPTHGVPAMKSKIDPILEARQKYAYGKQNDYLDHHNMIGWTREGNTAHPNSGLATIMSDGPGGNKWMYVGRNKAGQVWRDITGNRSGTVTINADGWGNFSVNGGSVSIWV

SEQ ID NO: 21026 - protein, 483 aa, Synthetic construct
HHNGTNGTMMQYFEWYLPNDGNHWNRLRSDASNLKDKGITAVWIPPAWKGASQNDVGYGAYDLYDLGEFNQKGTVRTKYGTRNQLQAAVTALKSNGIQVYGDVVMNHKGGADATEWVRAVEVNPSNRNQEVSGDYTIEAWTKFDFPGRGNTHSNFKWRWYHFDGVDWDQSRQLQNRIYKFRGDGKEWDWEVDEENGNYDYLMYADYDMDHPEVVNELRNWGVWYTNTLGLDGFRIDAVKHIKYSFTRDWLTHVRNTTGKNMFAVAEFWKNDIGAIENYLSKTNWNHSVFDVPLHYNLYNASRSGGNYDMRQIFNGTVVQRHPTHAVTFVDNHDSQPEEALESFVEEWFKPLAYALTLTRDQGYPSVFYGDYYGIPTHGVPAMKSKIDPILEARQKYAYGKQNDYMDHHNMIGWTREGNTAHPNSGLATIMSDGPGGNKWMYVGRNKAGQVWRDITGNRSGTVTINADGWGNFSVNGGSVSIWV

SEQ ID NO: 21027 - protein, 483 aa, Synthetic construct
HHNGTNGTMMQYFEWYLPNDGNHWNRLRSDASNLKDKGITAVWIPPAWKGASQNDVGYGAYDLYDLGEFNQKGTVRTKYGTRNQLQAAVTALKSNGIQVYGDVVMNHKGGADATEWVRAVEVNPSNRNQEVSGDYTIEAWTKFDFPGRGNTHSNFKWRWYHFDGVDWDQSRQLQNRIYKFRGDGKGWDWEVDTENGNYDYLMYADIDMDHPEVVNELRNWGVWYTNTLGLDGFRIDAVKHIKYSFTRDWLTHVRNTTGKNMFAVAEFWKNDIGAIENYLSKTNWNHSVFDVPLHYNLYNASRSGGNYDMRQIFNGTVVQRHPGHAVTFVDNHDSQPEEALESFVEEWFKPLAYALTLTRDQGYPSVFYGDYYGIPTHGVPAMKSKIDPILEARQKYAYGKQNDYLDHHNMIGWTREGNTAHPNSGLATIMSDGPGGNKWMYVGRNKAGQVWRDITGNRSGTVTINADGWGNFSVNGGSVSIWV

SEQ ID NO: 21028 - protein, 483 aa, Synthetic construct
HHNGTNGTMMQYFEWYLPNDGNHWNRLRSDASNLKDKGITAVWIPPAWKGASQNDVGYGAYDLYDLGEFNQKGTVRTKYGTRNQLQAAVTALKSNGIQVYGDVVMNHKGGADATEWVRAVEVNPSNRNQEVSGDYTIEAWTKFDFPGRGNTHSNFKWRWYHFDGVDWDQSRQLQNRIYKFRGDGKGWDWEVDTENGNYDYLMYADIDMDHPEVVNELRNWGVWYTNTLGLDGFRIDAVKHIKYSFTRDWLTHVRNTTGKHMFAVAEFWKNDIGAIENYLSKTNWNHSVFDVPLHYNLYNASRSGGNYDMRQIFNGTVVQRHPTHAVTFVDNHDSQPEEALESFVEEWFKPLAYALTLTRDQGYPSVFYGDYYGIPTHGVPAMKSKIDPILEARQKYAYGKQNDYLDHHNMIGWTREGNTAHPNSGLATIMSDGPGGNKWMYVGRNKAGQVWRDITGNRSGTVTINADGWGNFSVNGGSVSIWV

SEQ ID NO: 21029 - protein, 483 aa, Synthetic construct
HHNGTNGTMMQYFEWYLPNDGNHWNRLRSDASNLKDKGITAVWIPPAWKGASQNDVGYGAYDLYDLGEFNQKGTVRTKYGTRNQLQAAVTALKSNGIQVYGDVVMNHKGGADATEWVRAVEVNPSNRNQEVSGDYTIEAWTKFDFPGRGNTHSNFKWRWYHFDGVDWDQSRQLQNRIYKFREDGKGWDWEVDTENGNYDYLMYADIDMDHPEVVNELRNWGVWYTNTLGLDGFRIDAVKHIKYSFTRDWLTHVRNTTGKNMFAVAEFWKNDIGAIENYLSKTNWNHSVFDVPLHYNLYNASRSGGNYDMRQIFNGTVVQRHPTHAVTFVDNHDSQPEEALESFVEEWFKPLAYALTLTRDQGYPSVFYGDYYGIPTHGVPAMKSKIDPILEARQKYAYGKQNDYLDHHNMIGWTREGNTAHPNSGLATIMSDGPGGNKWMYVGRNKAGQVWRDITGNRSGTVTINADGWGNFSVNGGSVSIWV

SEQ ID NO: 21030 - protein, 483 aa, Synthetic construct
HHNGTNGTMMQYFEWYLPNDGNHWNRLRSDASNLKDKGITAVWIPPAWKGASQNDVGYGAYDLYDLGEFNQKGTVRTKYGTRNQLQAAVTALKSNGIQVYGDVVMNHKGGADATEWVRAVEVNPSNRNQEVSGDYTIEAWTKFDFPGRGNTHSNFKWRWYHFDGVDWDQSRQLQNRIYKFRGDGKGWDWEVDTENGNYDYLMYADIDMDHPEVVNELRNWGVWYTNTLGLDGFRIDAVKHIKYSFTRDWLTHVRNTTGKNMFAVAEFWKNDIGAIENYLDKTNWNHSVFDVPLHYNLYNASRSGGNYDMRQIFNGTVVQRHPTHAVTFVDNHDSQPEEALESFVEEWFKPLAYALTLTRDQGYPSVFYGDYYGIPTHGVPAMKSKIDPILEARQKYAYGKQNDYLDHHNMIGWTREGNTAHPNSGLATIMSDGPGGNKWMYVGRNKAGQVWRDITGNRSGTVTINADGWGNFSVNGGSVSIWV

SEQ ID NO: 21031 - protein, 483 aa, Synthetic construct
HHNGTNGTMMQYFEWYLPNDGNHWNRLRSDASNLKDKGITAVWIPPAWKGASQNDVGYGAYDLYDLGEFNQKGTVRTKYGTRNQLQAAVTALKSNGIQVYGDVVMNHKGGADATEWVRAVEVNPSNRNQEVSGDYTIEAWTKFDFPGRGNTHSNFKWRWYHFDGVDWDQSRQLQNRIYKFRGDGKGWDWEVDTENGNYDYLMYADIDMDHPEVVNELRNWGVWYTNTLGLDGFRIDAVKHIKYSFTRDWLTHVRNTTGKNMFAVAEFWKNDIGAIENYLSKTNWNHSVFDVPLHYNLYNASRSGGNYDMRQIFNGTVVQRHPTHAVTFVDNHDSQPEEALESFVEEWFKPLAYALTLTRDQGYPSVFYGDYYGIPTHGVPAMKSKIDPILEARQKYAYGKQNDYMDHHNMIGWTREGNTAHPNSGLATIMSDGPGGNKWMYVGRNKAGQVWRDITGNRSGTVTINADGWGNFSVNGGSVSIWV

SEQ ID NO: 21032 - protein, 483 aa, Synthetic construct
HHNGTNGTMMQYFEWYLPNDGNHWNRLRSDASNLKDKGITAVWIPPAWKGASQNDVGYGAYDLYDLGEFNQKGTVRTKYGTRNQLQAAVTALKSNGIQVYGDVVMNHKGGADATEWVRAVEVNPSNRNQEVSGDYTIEAWTKFDFPGRGNTHSNFKWRWYHFDGVDWDQSRQLQNRIYKFRGDGKGWDWEVDTENGNYDYLMYADIDMDHPEVVNELRNWGVWYTNTLGLDGFRIDAVKHIKYSFTRDWLTHVRNTTGKNMFAVAEFWKNDSGAIENYLSKTNWNHSVFDVPLHYNLYNASRSGGNYDMRQIFNGTVVQRHPTHAVTFVDNHDSQPEEALESFVEEWFKPLAYALTLTRDQGYPSVFYGDYYGIPTHGVPAMKSKIDPILEARQKYAYGKQNDYLDHHNMIGWTREGNTAHPNSGLATIMSDGPGGNKWMYVGRNKAGQVWRDITGNRSGTVTINADGWGNFSVNGGSVSIWV

SEQ ID NO: 21033 - protein, 483 aa, Synthetic construct
HHNGTNGTMMQYFEWYLPNDGNHWNRLRSDASNLKDKGITAVWIPPAWKGASQNDVGYGAYDLYDLGEFNQKGTVRTKYGTRNQLQAAVTALKSNGIQVYGDVVMNHKGGADATEWVRAVEVNPSNRNQEVSGDYTIEAWTKFDFPGRGNTHSNFKWRWYHFDGVDWDQSRQLQNRIYKFRGDGKGWDWEVDTENGNYDYLMYADIDMDHPEVVNELRNWGVWYTNTLGLDGFRIDAVKHIKYSFTRDWLTHVRNTTGKNMFAVAEFWKNDFGAIENYLSKTNWNHSVFDVPLHYNLYNASRSGGNYDMRQIFNGTVVQRHPTHAVTFVDNHDSQPEEALESFVEEWFKPLAYALTLTRDQGYPSVFYGDYYGIPTHGVPAMKSKIDPILEARQKYAYGKQNDYLDHHNMIGWTREGNTAHPNSGLATIMSDGPGGNKWMYVGRNKAGQVWRDITGNRSGTVTINADGWGNFSVNGGSVSIWV

SEQ ID NO: 21034 - protein, 483 aa, Synthetic construct
HHNGTNGTMMQYFEWYLPNDGNHWNRLRSDASNLKDKGITAVWIPPAWKGASQNDVGYGAYDLYDLGEFNQKGTVRTKYGTRNQLQAAVTALKSNGIQVYGDVVMNHKGGADATEWVRAVEVNPSNRNQEVSGDYTIEAWTKFDFPGRGNTHSNFKWRWYHFDGVDWDQSRQLQNRIYKFRGDGKGWDWEVDGENGNYDYLMYADIDMDHPEVVNELRNWGVWYTNTLGLDGFRIDAVKHIKYSFTRDWLTHVRNTTGKNMFAVAEFWKNDIGAIENYLSKTNWNHSVFDVPLHYNLYNASRSGGNYDMRQIFNGTVVQRHPTHAVTFVDNHDSQPEEALESFVEEWFKPLAYALTLTRDQGYPSVFYGDYYGIPTHGVPAMKSKIDPILEARQKYAYGKQNDYLDHHNMIGWTREGNTAHPNSGLATIMSDGPGGNKWMYVGRNKAGQVWRDITGNRSGTVTINADGWGNFSVNGGSVSIWV

SEQ ID NO: 21035 - protein, 483 aa, Synthetic construct
SVPVNGTMMQYFEWYLPDDGTLWTKVANNAQSLANLGITALWLPPAYKGTSSSDVGYGVYDLYDLGEFNQKGTVRTKYGTKTQYIQAIQAAHTAGMQVYADVVFDHKGGADGTEWVDAVEVNPSDRNQEISGTYQIQAWTKFDFPGRGNTYSSFKWRWYHFDGVDWDESRKLSRIYKFRGIGKAWDWEVDTENGNYDYLMYADLDMDHPEVVSELKNWGKWYVTTTNIDGFRLDAVKHIKYSFFPDWLSYVRTQTQKPLFAVGEFWSYDISKLHNYITKTNGSMSLFDAPLHNNFYIASKSGGYFDMRTLLNNTLMKDQPTLAVTLVDNHDTEPGQSLQSWVEPWFKPLAYAFILTRQEGYPCVFYGDYYGIPKYNIPALKSKLDPLLIARRDYAYGTQHDYIDSADIIGWTREGVAEKANSGLAALITDGPGGSKWMYVGKQHAGKTFYDLTGNRSDTVTINADGWGEFKVNGGSVSIWVPK

SEQ ID NO: 21036 - protein, 501 aa, Anoxybacillus flavithermus
SVPVNGTMMQYFEWYLPDDGTLWTKVANNAQSLANLGITALWLPPAYKGTSSSDVGYGVYDLYDLGEFNQKGTVRTKYGTKTQYIQAIQAAHTAGMQVYADVVFNHKAGADGTELVDAVEVNPSDRNQEISGTYQIQAWTKFDFPGRGNTYSSFKWRWYHFDGTDWDESRKLNRIYKFRGTGKAWDWEVDTENGNYDYLMYADLDMDHPEVVSELKNWGKWYVTTTNIDGFRLDAVKHIKYSFFPDWLSYVRTQTQKPLFAVGEFWSYDISKLHNYITKTNGSMSLFDAPLHNNFYIASKSGGYFDMRTLLNNTLMKDQPTLAVTLVDNHDTEPGQSLQSWVEPWFKPLAYAFILTRQEGYPCVFYGDYYGIPKYNIPALKSKLDPLLIARRDYAYGTQHDYIDSADIIGWTREGVAEKANSGLAALITDGPGGSKWMYVGKQHAGKTFYDLTGNRSDTVTINADGWGEFKVNGGSVSIWVPKISTTSQITFTVNNATTVW

SEQ ID NO: 21037 - protein, 482 aa, Synthetic construct
HHNGTNGTMMQYFEWYLPNDGNHWNRLRSDASNLKDKGITAVWIPPAWKGASQNDVGYGAYDLYDLGEFNQKGTVRTKYGTRNQLQAAVTALKSNGIQVYGDVVMNHKGGADATEWVRAVEVNPSNRNQEVSGDYTIEAWTKFDFPGRGNTHSNFKWRWYHFDGVDWDQSRQLQNRIYKFRGDGKGWDWEVDTENGNYDYLMYADIDMDHPEVVNELRNWGVWYTNTLGLDGFRIDAVKHIKYSFTRDWLTHVRNTTGKNMFAVAEFWKNIGAIENYLSKTNWNHSVFDVPLHYNLYNASRSGGNYDMRQIFNGTVVQRHPTHAVTFVDNHDSQPEEALESFVEEWFKPLAYALTLTRDQGYPSVFYGDYYGIPTHGVPAMKSKIDPILEARQKYAYGKQNDYLDHHNMIGWTREGNTAHPNSGLATIMSDGPGGNKWMYVGRNKAGQVWRDITGNRSGTVTINADGWGNFSVNGGSVSIWV

SEQ ID NO: 21038 - protein, 482 aa, Synthetic construct
HHNGTNGTMMQYFEWYLPNDGNHWNRLRSDASNLKDKGITAVWIPPAWKGASQNDVGYGAYDLYDLGEFNQKGTVRTKYGTRNQLQAAVTALKSNGIQVYGDVVMNHKGGADATEWVRAVEVNPSNRNQESGDYTIEAWTKFDFPGRGNTHSNFKWRWYHFDGVDWDQSRQLQNRIYKFRGDGKGWDWEVDTENGNYDYLMYADIDMDHPEVVNELRNWGVWYTNTLGLDGFRIDAVKHIKYSFTRDWLTHVRNTTGKNMFAVAEFWKNDIGAIENYLSKTNWNHSVFDVPLHYNLYNASRSGGNYDMRQIFNGTVVQRHPTHAVTFVDNHDSQPEEALESFVEEWFKPLAYALTLTRDQGYPSVFYGDYYGIPTQGVPAMKSKIDPILEARQKYAYGKQNDYLDHHNHIGWTREGNTAHPNSGLATIMSDGPGGNKWMYVGRNKAGQVWRDITGNRSGTVTINADGWGNFSVNGGSVSIWV

SEQ ID NO: 21039 - protein, 482 aa, Synthetic construct
HHGTNGTMMQYFEWYLPNDGNHWNRLRSDASNLKDKGITAVWIPPAWKGASQNDVGYGAYDLYDLGEFNQKGTVRTKYGTRNQLQAAVTALKSNGIQVYGDVVMNHKGGADATEWVRAVEVNPSNRNQEVSGDYTIEAWTKFDFPGRGNTHSNFKWRWYHFDGVDWDQSRQLQNRIYKFRGDGKGWDWEVDTENGNYDYLMYADIDMDHPEVVNELRNWGVWYTNTLGLDGFRIDAVKHIKYSFTRDWLTHVRNTTGKNMFAVAEFWKNDIGAIENYLSKTNWNHSVFDVPLHYNLYNASRSGGNYDMRQIFNGTVVQRHPTHAVTFVDNHDSQPEEALESFVEEWFKPLAYALILTRDQGYPSVFYGDYYGIPTHGVPAMKSKIDPILEARQKYAYGKQNDYLDHHNMIGWTREGNTAHPNSGLATIMSDGPGGNKWMYVGRNKAGQVWRDITGNRSGTVTINADGWGNFSVNGGSVSIWV

SEQ ID NO: 21040 - protein, 482 aa, Synthetic construct
HHNGTNGTMMQYFEWYLPNDGNHWNRLRSDASNLKDKGITAVWIPPAWKGASQNDVGYGAYDLYDLGEFNQKGTRTKYGTRNQLQAAVTALKSNGIQVYGDVVMNHKGGADATEWVRAVEVNPSNRNQEVSGDYTIEAWTKFDFPGRGNTHSNFKWRWYHFDGVDWDQSRQLQNRIYKFRGDGKGWDWEVDTENGNYDYLMYADIDMDHPEVVNELRNWGVWYTNTLGLDGFRIDAVKHIKYSFTRDWLTHVRNTTGKNMFAVAEFWKNDIGAIENYLSKTNWNHSVFDVPLHYNLYNASRSGGNYDMRQIFNGTVVQRHPTHAVTFVDNHDSQPEEALESFVEEWFKPLAYALTLTRDQGYPSVFYGDYYGIPTHGVPAMKSKIDPILEARQKYAYGKQNDYLDHHNMIGWTREGNTAHPNSGLATIMSDGPGGNKWMYVGRNKAGQVWRDITGNRSGTVTINADGWGNFSVNGGSVSIWV

SEQ ID NO: 21041 - protein, 482 aa, Synthetic construct
HHNGTNGTMMQYFEWYLPNDGNHWNRLRSDASNLKDKGITAVWIPPAWKGASQNDVGYGAYDLYDLGEFNQKGTVRTKYGTRNQLQAAVTALKSNGIQVYGDVVMNHKGGADATEWVRAVEVNPSNRNQEVSGDYTIEAWTKFDFPGRGNTHSNFKWRWYHFDGVDWDQSRQLQNRIYKFRGDGKGWDEVDTENGNYDYLMYADIDMDHPEVVNELRNWGVWYTNTLGLDGFRIDAVKHIKYSFTRDWLTHVRNTTGKNMFAVAEFWKNDIGAIENYLSKTNWNHSVFDVPLHYNLYNASRSGGNYDMRQIFNGTVVQRHPTHAVTFVDNHDSQPEEALESFVEEWFKPLAYALTLTRDQGYPSVFYGDYYGIPTHGVPAMKSKIDPILEARQKYAYGKQNDYLDHHNMIGWTREGNTAHPNSGLATIMSDGPGGNKWMYVGRNKAGQVWRDITGNRSGTVTINADGWGNFSVNGGSVSIWV

SEQ ID NO: 21042 - protein, 482 aa, Synthetic construct
APVNGTMMQYFEWDLPNDGTLWTKVKNEAANLSSLGITALWLPPAYKGTSQSDVGYGVYDLYDLGEFNQKGTVRTKYGTKDQYIQAIQAAKAAGMQVYADVVFDHKGGADGTEWVDAVEVNPSDRNQEISGTYQIQAWTKFDFPGRGNTYSSFKWRWYHFDGVDWDESRKLSRIYKFRGIGKAWDWEVDTENGNYDYLMYADLDMDHPEVVTELKNWGKWYVNTTNVDGFRLDAVKHIKYSFFPDWLASVRSQTGKNLFAVGEFWSYDVNKLHNYITKTNGTMSLFDAPLHNNFYTASKSSGYFDMRYLLNNTLMKDQPVLAVTLVDNHDTQPGQSLQSWVEPWFKPLAYAFILTRQEGYPCVFYGDYYGIPKYNIPGLKSKIDPLLIARRDYAYGTQRDYIDHQDIIGWTREGIDSKPNSGLAALITDGPGGSKWMYVGKKHAGKVFYDLTGNRSDTVTINADGWGEFKVNGGSVSIWVAK

SEQ ID NO: 21043 - protein, 486 aa, Bacillus sp.
HHNGTNGTMMQYFEWHLPNDGQHWNRLRNDAANLKNLGITAVWIPPAWKGTSQNDVGYGAYDLYDLGEFNQKGTIRTKYGTRSQLQSAIASLQNNGIQVYGDVVMNHKGGADGTEWVQAVEVNPSNRNQEVTGEYTIEAWTKFDFPGRGNTHSSFKWRWYHFDGTDWDQSRRLNNRIYKFRGTGKAWDWEVDTENGNYDYLMYADVDMDHPEVINELRRWGVWYTNTLNLDGFRIDAVKHIKYSFTRDWLNHVRSTTGKNNMFAVAEFWKNDLGAIENYLHKTNWNHSVFDVPLHYNLYNASKSGGNYDMRQILNGTVVSKHPMHAVTFVDNHDSQPAEALESFVEAWFKPLAYALILTREQGYPSVFYGDYYGIPTHGVAAMKGKIDPILEARQKYAYGTQHDYLDHHNIIGWTREGNSAHPNSGLATIMSDGPGGSKWMYVGRHKAGQVWRDITGNRTGTVTINADGWGNFSVNGGSVSIWVNK

SEQ ID NO: 21044 - protein, 483 aa, Synthetic construct
HHNGTNGTMMQYFEWYLPNDGNHWNRLRDDAANLKSKGITAVWIPPAWKGTSQNDVGYGAYDLYDLGEFNQKGTVRTKYGTRNQLQAAVTSLKNNGIQVYGDVVMNHKGGADGTEIVNAVEVNPSNRNQETSGEYAIEAWTKFDFPGRGNNHSSFKWRWYHFDGTDWDQSRQLQNKIYKFRGKAWDWEVDTENGNYDYLMYADVDMDHPEVIHELRNWGVWYTNTLNLDGFRIDAVKHIKYSFTRDWLTHVRNTTGKPMFAVAEFWKNDLGAIENYLNKTSWNHSVFDVPLHYNLYNASNSGGYYDMRNILNGSVVQKHPTHAVTFVDNHDSQPGEALESFVQQWFKPLAYALVLTREQGYPSVFYGDYYGIPTHGVPAMKSKIDPLLQARQTFAYGTQHDYFDHHDIIGWTREGNSSHPNSGLATIMSDGPGGNKWMYVGKNKAGQVWRDITGNRTGTVTINADGWGNFSVNGGSVSVWVKQ

SEQ ID NO: 21045 - protein, 486 aa, Bacillus sp.
HHNGTNGTMMQYFEWHLPNDGQHWNRLRNDAANLKNLGITAVWIPPAWKGTSQNDVGYGAYDLYDLGEFNQKGTIRTKYGTRSQLQSAIASLQNNGIQVYGDVVMNHKGGADGTEWVQAVEVNPSNRNQEVTGEYTIEAWTKFDFPGRGNTHSSFKWRWYHFDGTDWDQSRQLNNRIYKFRGTGKGWDWEVDTENGNYDYLMYADVDMDHPEVINELRRWGVWYTNTLNLDGFRIDAVKHIKYSFTRDWLNHVRSTTGKNNMFAVAEFWKNDLGAIENYLHKTNWNHSVFDVPLHYNLYNASKSGGNYDMRQILNGTVVSKHPMHAVTFVDNHDSQPAEALESFVEAWFKPLAYALILTREQGYPSVFYGDYYGIPTHGVAAMKGKIDPILEARQKYAYGTQHDYLDHHNIIGWTREGNSAHPNSGLATIMSDGPGGSKWMYVGRHKAGQVWRDITGNRTGTVTINADGWGNFSVNGGSVSIWVNK

SEQ ID NO: 21046 - protein, 485 aa, Synthetic construct
HHNGTNGTMMQYFEWYLPNDGNHWNRLRDDAANLKSKGITAVWIPPAWKGTSQNDVGYGAYDLYDLGEFNQKGTVRTKYGTRNQLQAAVTSLKNNGIQVYGDVVMNHKGGADGTEIVNAVEVNPSNRNQETSGEYAIEAWTKFDFPGRGNNHSSFKWRWYHFDGTDWDQSRQLQNKIYKFRGTGKAWDWEVDTENGNYDYLMYADVDMDHPEVIHELRNWGVWYTNTLNLDGFRIDAVKHIKYSFTRDWLTHVRNTTGKPMFAVAEFWKNDLGAIENYLNKTSWNHSVFDVPLHYNLYNASNSGGYYDMRNILNGSVVQKHPTHAVTFVDNHDSQPGEALESFVQQWFKPLAYALVLTREQGYPSVFYGDYYGIPTHGVPAMKSKIDPLLQARQTFAYGTQHDYFDHHDIIGWTREGNSSHPNSGLATIMSDGPGGNKWMYVGKNKAGQVWRDITGNRTGTVTINADGWGNFSVNGGSVSVWVKQ

SEQ ID NO: 21047 - protein, 485 aa, Synthetic construct
HHNGTNGTMMQYFEWYLPNDGNHWNRLRSDASNLKDKGITAVWIPPAWKGASQNDVGYGAYDLYDLGEFNQKGTVRTKYGTRNQLQAAVTALKSNGIQVYGDVVMNHKGGADATEWVRAVEVNPSNRNQEVSGDYTIEAWTKFDFPGRGNTHSNFKWRWYHFDGVDWDQSRQLQNRIYKFRGDGKEWDWEVDTENGNYDYLMYADIDMDHPEVVNELRNWGVWYTNTLGLDGFRIDAVKHIKYSFTRDWLTHVRNTTGKNMFAVAEFWKNDIGAIENYLSKTNWNHSVFDVPLHYNLYNASRSGGNYDMRKIFNGTVVQRHPTHAVTFVDNHDSQPEEALESFVEEWFKPLAYALTLTRDQGYPSVFYGDYYGIPTHGVPAMKSKIDPILEARQKYAYGKQNDYLDHHNMIGWTREGNTAHPNSGLATIMSDGPGGNKWMYVGRNKAGQVWRDITGNRSGEVTINADGWGNFSVNGGSVSIWVNR

SEQ ID NO: 21048 - protein, 485 aa, Synthetic construct
HHNGTNGTMMQYFEWYLPNDGNHWNRLRDDAANLKSKGITAVWIPPAWKGTSQNDVGYGAYDLYDLGEFNQKGTVRTKYGTRNQLQAAVTSLKNNGIQVYGDVVMNHKGGADGTEIVNAVEVNRSNRNQETSGEYAIEAWTKFDFPGRGNNHSSFKWRWYHFDGTDWDQSRQLQNKIYKFRGTGKAWDWEVDTENGNYDYLMYADVDMDHPEVIHELRNWGVWYTNTLNLDGFRIDAVKHIKYSFTRDWLTHVRNTTGKEMFAVAEFWKNDLGAIENYLNKTSWNHSVFDVPLHYNLYNASNSGGYYDMRNILNGSVVQKHPTHAVTFVDNHDSQPGEALESFVQQWFKPLAYALVLTREQGYPSVFYGDYYGIPTHGVPAMKSKIDPLLQARQTFAYGTQHDYFDHHDIIGWTREGNSSHPNSGLATIMSDGPGGNKWMYVGKNKAGQVWRDITGNRTGTVTINADGWGNFSVNGGSVSVWVKQ

SEQ ID NO: 21049 - protein, 486 aa, Bacillus sp.
HHNGTNGTMMQYFEWHLPNDGQHWNRLRNDAANLKNLGITAVWIPPAWKGTSQNDVGYGAYDLYDLGEFNQKGTIRTKYGTRSQLQSAIASLQNNGIQVYGDVVMNHKGGADGTEWVQAVEVNPSNRNQEVTGEYTIEAWTKFDFPGRGNTHSSFKWRWYHFDGTDWDQSRQLNNRIYKFRGTGKAWDWEVDTENGNYDYLMYADVDMDHPEVINELRRWGVWYTNTLNLDGFRIDAVKHIKYSFTRDWLNHVRSTTGKNNMFAVAEFWKNDLGAIENYLHKTNWNHSVFDVPLHYNLYNASKSGGNYDMRQILNGTVVSKHPIHAVTFVDNHDSQPAEALESFVEAWFKPLAYALILTREQGYPSVFYGDYYGIPTHGVAAMKGKIDPILEARQKYAYGTQHDYLDHHNIIGWTREGNSAHPNSGLATIMSDGPGGSKWMYVGRHKAGQVWRDITGNRTGTVTINADGWGNFSVNGGSVSIWVNK

SEQ ID NO: 21050 - protein, 484 aa, Bacillus sp.
HHNGTNGTMMQYFEWHLPNDGQHWNRLRNDAANLKNLGITAVWIPPAWKGTSQNDVGYGAYDLYDLGEFNQKGTIRTKYGTRSQLQSAIASLQNNGIQVYGDVVMNHKGGADGTEWVQAVEVNPSNRNQEVTGEYTIEAWTKFDFPGRGNTHSSFKWRWYHFDGTDWDQSRQLNNRIYKFRGKAWDWEVDTENGNYDYLMYADVDMDHPEVINELRRWGVWYTNTLNLDGFRIDAVKHIKYSFTRDWLNHVRSTTGKNNMFAVAEFWKNDLGAIENYLHKTNWNHSVFDVPLHYNLYNASKSGGNYDMRQILNGTVVSKHPIHAVTFVDNHDSQPAEALESFVEAWFKPLAYALILTREQGYPSVFYGDYYGIPTHGVAAMKGKIDPILEARQKYAYGTQHDYLDHHNIIGWTREGNSAHPNSGLATIMSDGPGGSKWMYVGRHKAGQVWRDITGNRTGTVTINADGWGNFSVNGGSVSIWVNK

SEQ ID NO: 21051 - protein, 491 aa, Geobacillus stearothermophilus
AAPFNGTMMQYFEWYLPDDGTLWTKVANEANNLSSLGITALWLPPAYKGTSRSDVGYGVYDLYDLGEFNQKGTVRTKYGTKAQYLQAIQAAHAAGMQVYADVVFNHKAGADETEVFDVIEVDPNDRTKEISEPFEIEGWTKFTFPGRGDQYSSFKWNSEHFNGTDFDAKGERTGVFRIAGKKWNWEVDTEFGNYDYLMFANIDYNHPDVVTELKNWGKWYVNTTNIDGFRLDAVKHIKFSFFPDWLSYVRSQTGKPLFTVGEYWSYDINKLHNYITKTDGTMSLFDAPLHNKFYTASKSGGAFDMRTLMTNTLMKDQPTLAVTFVDNHDTEPGQALQSWVDPWFKPLAYAFILTRQEGYPCVFYGDYYGIPQYNIPSLKSKIDPLLIARRDYAYGTQHDYLDHSNIIGWTREGGTEKPGSGLAALITNGDGGSKWMYVGKQHAGKVFYDLTGNRSDTVTINSDGWGEFKVNGGSVSVWVPRKTTVSTIARP

SEQ ID NO: 21052 - protein, 491 aa, Unidentified
AAPFNGTMMQYFEWYLPDDGTLWTKVANEANNLSSLGITALWLPPAYKGTSRSDVGYGVYDLYDLGEFNQKGTVRTKYGTKAQYLQAIQAAHAAGMQVYADVVFNHKAGADETEVFKVIEVDPNDRTKEISEPFEIEGWTKFTFPGRGDQYSSFKWNSEHFNGTDFDAKGERTGVFRIAGKAWNWEVDTEFGNYDYLMFANLDYNHPDVVTELKNWGKWYVNTTNIDGFRLDAVKHIKFSFFPDWLSYVRSQTGKPLFTVGEYWSYDINKLHNYITKTDGTMSLFDAPLHNKFYTASKSGGAFDMRTLMTNTLMKDQPTLAVTFVDNHDTEPGQALQSWVDPWFKPLAYAFILTRQEGYPCVFYGDYYGIPQYNIPSLKSKIDPLLIARRDYAYGTQHDYLDHSNIIGWTREGGTEKPGSGLAALITNGDGGSKWMYVGKQHAGKVFYDLTGNRSDTVTINSDGWGEFKVNGGSVSVWVPRKTTVSTIARP

SEQ ID NO: 21053 - protein, 491 aa, Geobacillus stearothermophilus
AAPFNGTMMQYFEWYLPDDGTLWTKVANEANNLSSLGITALWLPPAYKGTSRSDVGYGVYDLYDLGEFNQKGTVRTKYGTKAQYLQAIQAAHAAGMQVYADVVFDHKAGADETEVFKVIEVDPNDRTKEISEPFEIEGWTKFTFPGRGDQYSSFKWNSEHFNGTDFDAKGERTGVFRIDGKAWNWEVDTEFGNYDYLMFANIDYNHPDVVTELKNWGKWYVNTTNIDGFRLDAVKHIKFSFFPDWLSYVRSQTGKPLFTVGEYWSYDINKLHNYITKTDGTMSLFDAPLHNKFYTASKSGGAFDMRTLMTNTLMKDQPTLAVTFVDNHDTEPGQALQSWVDPWFKPLAYAFILTRQEGYPCVFYGDYYGIPQYNIPSLKSKIDPLLIARRDYAYGTQHDYLDHSNIIGWTREGGTEKPGSGLAALITNGDGGSKWMYVGKQHAGKVFYDLTGNRSDTVTINSDGWGEFKVNGGSVSVWVPRKTTVSTIARP

SEQ ID NO: 21054 - protein, 491 aa, Unidentified
AAPFNGTMMQYFEWYLPDDGTLWTKVANEANNLSSLGITALWLPPAYKGTSRSDVGYGVYDLYDLGEFNQKGTVRTKYGTKAQYLQAIQAAHAAGMQVYADVVFDHKAGADETEVFKVIEVDPNDRTKEISEPFEIEGWTKFTFPGRGDQYSSFKWNSEHFNGTDFDAKGERTGVFRIAGKAWNWEVDTEFGNYDYLMFANIDYNHPVVVTELKNWGKWYVNTTNIDGFRLDAVKHIKFSFFPDWLSYVRSQTGKPLFTVGEYWSYDINKLHNYITKTDGTMSLFDAPLHNKFYTASKSGGAFDMRTLMTNTLMKDQPTLAVTFVDNHDTEPGQALQSWVDPWFKPLAYAFILTRQEGYPCVFYGDYYGIPQYNIPSLKSKIDPLLIARRDYAYGTQHDYLDHSNIIGWTREGGTEKPGSGLAALITNGDGGSKWMYVGKQHAGKVFYDLTGNRSDTVTINSDGWGEFKVNGGSVSVWVPRKTTVSTIARP

SEQ ID NO: 21055 - protein, 491 aa, Geobacillus stearothermophilus
AAPFNGTMMQYFEWYLPDDGTLWTKVANEANNLSSLGITALWLPPAYKGTSRSDVGYGVYDLYDLGEFNQKGTVRTKYGTKAQYLQAIQAAHAAGMQVYADVVFDHKAGADETEVFKVIEVDPNDRTKEISEPFEIEGWTKFTFPGRGDQYSSFKWNSEHFNGTDFDAKGERTGVFRIQGKAWNWEVDTEFGNYDYLMFANIDYNHPDVVTELKNWGKWYVNTTNIDGFRLDAVKHIKFSFFPDWLSYVRSQTGKPLFTVGEYWSYDINKLHNYITKTDGTMSLFDAPLHNKFYTASKSGGAFDMRTLMTNTLMKDQPTLAVTFVDNHDTEPGQALQSWVDPWFKPLAYAFILTRQEGYPCVFYGDYYGIPQYNIPSLKSKIDPLLIARRDYAYGTQHDYLDHSNIIGWTREGGTEKPGSGLAALITNGDGGSKWMYVGKQHAGKVFYDLTGNRSDTVTINSDGWGEFKVNGGSVSVWVPRKTTVSTIARP

SEQ ID NO: 21056 - protein, 491 aa, Geobacillus stearothermophilus
AAPFNGTMMQYFEWYLPDDGTLWTKVANEANNLSSLGITALWLPPAYKGTSRSDVGYGVYDLYDLGEFNQKGTVRTKYGTKAQYLQAIQAAHAAGMQVYADVVFDHKAGADETEVFKVIEVDPNDRTKEISEPFEIEGWTKFTFPGRGDQYSSFKWNSEHFNGTDFDAKGERTGVFRIAGKAWNWEVDTEFGNYDYLMFANIDYNHPDVVTELKNWGKWYVNTTNIDGFRLDAVKHIKFEFFPDWLSYVRSQTGKPLFTVGEYWSYDINKLHNYITKTDGTMSLFDAPLHNKFYTASKSGGAFDMRTLMTNTLMKDQPTLAVTFVDNHDTEPGQALQSWVDPWFKPLAYAFILTRQEGYPCVFYGDYYGIPQYNIPSLKSKIDPLLIARRDYAYGTQHDYLDHSNIIGWTREGGTEKPGSGLAALITNGDGGSKWMYVGKQHAGKVFYDLTGNRSDTVTINSDGWGEFKVNGGSVSVWVPRKTTVSTIARP

SEQ ID NO: 21057 - protein, 491 aa, Unidentified
AAPFNGTMMQYFEWYLPDDGTLWTKVANEANNLSSLGITALWLPPAYKGTSRSDVGYGVYDLYDLGEFNQKGTVRTKYGTKAQYLQAIQAAHAAGMQVYADVVFDHKAGADETEVFKVIEVDPNDRTKEISDPFEIEGWTKFTFPGRGDQYSSFKWNSEHFNGTDFDAKGERTGVFRIAGKAWNWEVDTEFGNYDYLMFANIDYNHPDVVTELKNWGKWYVNTTNIDGFRLDAVKHIKFSFFPDWLSYVRSQTGKPLFTVGEYWSYDINKLHNYITKTDGTMSLFDAPLHNKFYTASKSGGAFDMRTLMTNTLMKDQPTLAVTFVDNHDTEPGQALQSWVDPWFKPLAYAFILTRQEGYPCVFYGDYYGIPQYNIPSLKSKIDPLLIARRDYAYGTQHDYLDHSNIIGWTREGGTEKPGSGLAALITNGDGGSKWMYVGKQHAGKVFYDLTGNRSDTVTINSDGWGEFKVNGGSVSVWVPRKTTVSTIARP

SEQ ID NO: 21058 - protein, 491 aa, Geobacillus stearothermophilus
AAPFNGTMMQYFEWYLPDDGTLWTKVANEANNLSSLGITALWLPPAYKGTSRSDVGYGVYDLYDLGEFNQKGTVRTKYGTKAQYLQAIQAAHAAGMQVYADVVFNHKAGADETEVFKVIEVDPNDRTKEISEPFEIEGWTKFTFPGRGDTYSSFKWNSEHFNGTDFDAKGERTGVFRIAGKKWNWEVDTEFGNYDYLMFANIDYNHPDVVTELKNWGKWYVNTTNIDGFRLDAVKHIKFSFFPDWLSYVRSQTGKPLFTVGEYWSYDINKLHNYITKTDGTMSLFDAPLHNKFYTASKSGGAFDMRTLMTNTLMKDQPTLAVTFVDNHDTEPGQALQSWVDPWFKPLAYAFILTRQEGYPCVFYGDYYGIPQYNIPSLKSKIDPLLIARRDYAYGTQHDYLDHSNIIGWTREGGTEKPGSGLAALITNGDGGSKWMYVGKQHAGKVFYDLTGNRSDTVTINSDGWGEFKVNGGSVSVWVPRKTTVSTIARP

SEQ ID NO: 21059 - protein, 491 aa, Geobacillus stearothermophilus
AAPFNGTMMQYFEWYLPDDGTLWTKVANEANNLSSLGITALWLPPAYKGTSRSDVGYGVYDLYDLGEFNQKGTVRTKYGTKAQYLQAIQAAHAAGMQVYADVVFDHKAGADETEVFKVIEVDPNDRTKEISEPFEIEGWTKFTFPGRGDQYSSFKWNSEHFNGTDWDEKGKRTGVFRIAGKKWNWEVDTEFGNYDYLMFANIDYNHPDVVTELKNWGKWYVNTTNIDGFRLDAVKHIKFSFFPDWLSYVRSQTGKPLFTVGEYWSYDINKLHNYITKTDGTMSLFDAPLHNKFYTASKKGRDFDMRTLMTNTLMKDQPTLAVTFVDNHDTEPGQALQSWVDPWFKPLAYAFILTRQEGYPCVFYGDYYGIPQYNIPSLKSKIDPLLIARRDYAYGTQHDYLDHSNIIGWTREGGTEKPGSGLAALITNGDGGSKWMYVGKQHAGKVFYDLTGNRSDTVTINSDGWGEFKVNGGSVSVWVPRKTTVSTIARP

SEQ ID NO: 21060 - protein, 491 aa, Unidentified
AAPFNGTMMQYFEWYLPDDGTLWTKVANEANNLSSLGITALWLPPAYKGTSRSDVGYGVYDLYDLGEFNQKGTVRTKYGTKAQYLQAIQAAHAAGMQVYADVVFDHKAGADETEVFKVIEVDPNDRTKEISEPFEIEGWTKFTFPGRGDQYSSFKWNSEHFNGVDFDAKGERTGVFRIAGKAWNWEVDTEFGNYDYLMFANIDYNHPDVVTELKNWGKWYVNTTNIDGFRLDAVKHIKFQFFPDWLSYVRSQTGKPLFTVGEYWSYDINKLHNYITKTDGTTSLFDAPLHNKFYTASKSGGAFDLRTLMTNTLMKDQPTLAVTFVDNHDTEPGQALQSWVDPWFKPLAYAFILTRQEGYPCVFYGDYYGIPQYNIPSLKSKIDPLLIARRDYAYGTQHDYLDHSNIIGWTREGGTEKPGSGLAALITNGDGGSKWMYVGKQHAGKVFYDLTGNRSDTVTINSDGWGEFKVNGGSVSVWVPRKTTVSTIARP

SEQ ID NO: 21061 - protein, 491 aa, Unidentified
AAPFNGTMMQYFEWYLPDDGTLWTKVANEANNLSSLGITALWLPPAYKGTSRSDVGYGVYDLYDLGEFNQKGTVRTKYGTKAQYLQAIQAAHAAGMQVYADVVFNHKAGADETEVFKVIEVDPNDRTKEISEPFEIEGWTKFTFPGRGDQYSSFKWNSEHFNGTDFDAKGERTGVFRIAGKKWNWEVDTEFGNYDYLMFANIDMNHPDVVTELKNWGKWYVNTTNIDGFRLDAVKHIKFSFFPDWLSYVRSQTGKPLFTVGEYWSYDINKLHNYITKTDGTMSLFDAPLHNKFYTASKSGGAFDMRTLMTNTLMKDQPTLAVTFVDNHDTEPGQALQSWVDPWFKPLAYAFILTRQEGYPCVFYGDYYGIPQYNIPSLKSKIDPLLIARRDYAYGTQHDYLDHSNIIGWTREGGTEKPGSGLAALITNGDGGSKWMYVGKQHAGKVFYDLTGNRSDTVTINSDGWGEFKVNGGSVSVWVPRKTTVSTIARP

SEQ ID NO: 21062 - protein, 491 aa, Unidentified
AAPFNGTMMQYFEWYLPDDGTLWTKVANEANNLSSLGITALWLPPAYKGTSRSDVGYGVYDLYDLGEFNQKGTVRTKYGTKAQYLQAIQAAHAAGMQVYADVVFNHKAGADETEVFKVIEVDPNDRTKEISEPFEIEGWTKFTFPGRGDQYSSFKWNSEHFNGVDFDAKGERTGVFRIAGKKWNWEVDTEFGNYDYLMFANIDYNHPDVVTELKNWGKWYVNTTNIDGFRLDAVKHIKFSFFPDWLSYVRSQTGKPLFTVGEYWSYDINKLHNYITKTDGTMSLFDAPLHNKFYTASKSGGAFDMRTLMTNTLMKDQPTLAVTFVDNHDTEPGQALQSWVDPWFKPLAYAFILTRQEGYPCVFYGDYYGIPQYNIPSLKSKIDPLLIARRDYAYGTQHDYLDHSNIIGWTREGGTEKPGSGLAALITNGDGGSKWMYVGKQHAGKVFYDLTGNRSDTVTINSDGWGEFKVNGGSVSVWVPRKTTVSTIARP

SEQ ID NO: 21063 - protein, 491 aa, Geobacillus stearothermophilus
AAPFNGTMMQYFEWYLPDDGTLWTKVANEANNLSSLGITALWLPPAYKGTSRSDVGYGVYDLYDLGEFNQKGTVRTKYGTKAQYLQAIQAAHAAGMQVYADVVFDHKAGADETEVFKVIEVDPNDRTKEISEPFEIEGWTKFTFPGRGDQYSSFKWNSEHFNGTDFDAKGERTGVFRIAGKKWNWEVDTEFGNYDYLMFANIDYNHPDVVTELKNWGKWYVNTTNIDGFRLDAVKHIKFSFFPDWLSYVRSQTGKPLFTVGEYWSYDINKLHNYITKTDGTMSLFDAPLHNKFYTASKSGGAFDMRTLMTNTLMKDQPTLAVTFVDNHDTEPGQALQSWVDPWFKPLAYAFILTRQEGYPCVFYGDYYGIPQYNIPSLKSKIDPLLIARRDYAYGTQHDYLDHSNIIGWTREGGTEKPGSGLAALITNGDGGSKWMYVGKQHAGKVFYDLTGNRSDTVTINSDGWGEFKVNGGSVSVWVPRKTTVSTIARP

SEQ ID NO: 21064 - protein, 491 aa, Geobacillus stearothermophilus
AAPFNGTMMQYFEWYLPDDGTLWTKVANEANNLSSLGITALWLPPAYKGTSRSDVGYGVYDLYDLGEFNQKGTVRTKYGTKAQYLQAIQAAHAAGMQVYADVVFDHKAGADETEVFKVIEVDPNDRTKEISEPEEIEGWTKFTFPGRGDQYSSFKWNSEHFNGTDFDAKGERTGVFRIAGKAWNWEVDTEFGNYDYLMFANIDYNHPDVVTELKNWGKWYVNTTNIDGFRLDAVKHIKFSFFPDWLSYVRSQTGKPLFTVGEYWSYDINKLHNYITKTDGTMSLFDAPLHNKFYTASKSGGAFDMRTLMTNTLMKDQPTLAVTFVDNHDTEPGQALQSWVDPWFKPLAYAFILTRQEGYPCVFYGDYYGIPQYNIPSLKSKIDPLLIARRDYAYGTQHDYLDHSNIIGWTREGGTEKPGSGLAALITNGDGGSKWMYVGKQHAGKVFYDLTGNRSDTVTINSDGWGEFKVNGGSVSVWVPRKTTVSTIARP

SEQ ID NO: 21065 - protein, 491 aa, Unidentified
AAPFNGTMMQYFEWYLPDDGTLWTKVANEANNLSSLGITALWLPPAYKGTSRSDVGYGVYDLYDLGEFNQKGTVRTKYGTKAQYLQAIQAAHAAGMQVYADVVFDHKAGADETEVFKVIEVDPNDRTKEISEPFEIEGWTKFTFPGRGDQYSSFKWNSEHFNGVDFDAKGERTGVFRIAGKAWNWEVDTEFGNYDYLMFANIDYNHPDVVTELKNWGKWYVNTTNIDGFRLDAVKHIKFSFFPDWLSYVRSQTGKPLFTVGEYWSYDINKLHNYITKTDGTQSLFDAPLHNKFYTASKSGGAFDLRTLMTNTLMKDQPTLAVTFVDNHDTEPGQALQSWVDPWFKPLAYAFILTRQEGYPCVFYGDYYGIPQYNIPSLKSKIDPLLIARRDYAYGTQHDYLDHSNIIGWTREGGTEKPGSGLAALITNGDGGSKWMYVGKQHAGKVFYDLTGNRSDTVTINSDGWGEFKVNGGSVSVWVPRKTTVSTIARP

SEQ ID NO: 21066 - protein, 491 aa, Geobacillus stearothermophilus
AAPFNGTMMQYFEWYLPDDGTLWTKVANEANNLSSLGITALWLPPAYKGTSRSDVGYGVYDLYDLGEFNQKGTVRTKYGTKAQYLQAIQAAHAAGMQVYADVVFDHKAGADETEVFKVIEVDPNDRTKEISEPEEIEGWTKFTFPGRGDQYSSFKWNSEHFNGTDFDAKGERTGVFRINGKAWNWEVDTEFGNYDYLMFANIDYNHPDVVTELKNWGKWYVNTTNIDGFRLDAVKHIKFSFFPDWLSYVRSQTGKPLFTVGEYWSYDINKLHNYITKTDGTMSLFDAPLHNKFYTASKSGGAFDMRTLMTNTLMKDQPTLAVTFVDNHDTEPGQALQSWVDPWFKPLAYAFILTRQEGYPCVFYGDYYGIPQYNIPSLKSKIDPLLIARRDYAYGTQHDYLDHSNIIGWTREGGTEKPGSGLAALITNGDGGSKWMYVGKQHAGKVFYDLTGNRSDTVTINSDGWGEFKVNGGSVSVWVPRKTTVSTIARP

SEQ ID NO: 21067 - protein, 491 aa, Unidentified
AAPFNGTMMQYFEWYLPDDGTLWTKVANEANNLSSLGITALWLPPAYKGTSRSDVGYGVYDLYDLGEFNQKGTVRTKYGTKAQYLQAIQAAHAAGMQVYADVVFDHKAGADETEVFKVIEVDPNDRTKEISEPFEIEGWTKFTFPGRGDQYSSFKWNSEHFNGTDFDAKGERTGVFRIAGKAWNWEVDTEFGNYDYLMFANIDYNHPDVVTELKNWGKWYVNTTNIDGFRLDAVKHIKFSFFPDWLSYVRSQTGKPLFTVGEYWSYDINKLHNYITKTDGTMSLFDAPLHNKFYTASKSGGAFDMRTLMTNTLMKDQPTLAVTFVDNHDTEPGQALQSWVDPWFKPLAYAFILTRQEGYPCVFYGDYYGIPQYNIPSLKSKIDPLLIARRDYAYGTQHDYLDHSNIIGWTREGGTEKPGSGLAALITNGDGGSKWMYVGKQHAGKVFYDLTGNRSDTVTINSDGWGEFKVNGGSVSVWVPRKTTVSTIARP

SEQ ID NO: 21068 - protein, 491 aa, Unidentified
AAPFNGTMMQYFEWYLPDDGTLWTKVANEANNLSSLGITALWLPPAYKGTSRSDVGYGVYDLYDLGEFNQKGTVRTKYGTKAQYLQAIQAAHAAGMQVYADVVFDHKAGADETEVFKVIEVDPNDRTKEISEPFNIEGWTKFTFPGRGDQYSSFKWNSEHFNGTDFDAKGERTGVFRINGKAWNWEVDTEFGNYDYLMFANIDYNHPDVVTELKNWGKWYVNTTNIDGFRLDAVKHIKFSFFPDWLSYVRSQTGKPLFTVGEYWSYDINKLHNYITKTDGTMSLFDAPLHNKFYTASKSGGAFDMRTLMTNTLMKDQPTLAVTFVDNHDTEPGQALQSWVDPWFKPLAYAFILTRQEGYPCVFYGDYYGIPQYNIPSLKSKIDPLLIARRDYAYGTQHDYLDHSNIIGWTREGGTEKPGSGLAALITNGDGGSKWMYVGKQHAGKVFYDLTGNRSDTVTINSDGWGEFKVNGGSVSVWVPRKTTVSTIARP

SEQ ID NO: 21069 - protein, 491 aa, Geobacillus stearothermophilus
AAPFNGTMMQYFEWYLPDDGTLWTKVANEANNLSSLGITALWLPPAYKGTSRSDVGYGVYDLYDLGEFNQKGTVRTKYGTKAQYLQAIQAAHAAGMQVYADVVFDHKAGADETEVFKVIEVDPNDRTKEISEPFEIEGWTKFTFPGRGDQYSSFKWNSEHFNGVDFDAKGERTGVFRIAGKAWNWEVDTEFGNYDYLMFANIDYNHPDVVTELKNWGKWYVNTTNIDGFRLDAVKHIKFSFFPDWLSYVRSQTGKPLFTVGEYWSYDINKLHNYITKTDGTMSLFDAPLHNKFYTASKSGGAFDLRTLMTNTLMKDQPTLAVTFVDNHDTEPGQALQSWVDPWFKPLAYAFILTRQEGYPCVFYGDYYGIPQYNIPSLKSKIDPLLIARRDYAYGTQHDYLDHSNIIGWTREGGTEKPGSGLAALITNGDGGSKWMYVGKQHAGKVFYDLTGNRSDTVTINSDGWGEFKVNGGSVSVWVPRKTTVSTIARP

SEQ ID NO: 21070 - protein, 491 aa, Unidentified
AAPFNGTMMQYFEWYLPDDGTLWTKVANEANNLSSLGITALWLPPAYKGTSRSDVGYGVYDLYDLGEFNQKGTVRTKYGTKAQYLQAIQAAHAAGMQVYADVVFDHKAGADETEVFKVIEVDPNDRTKEISEPFEIEGWTKFTFPGRGDQYSSFKWNSEHFNGTDFDAKGERTGVFRIAGKKWNWEVDTEFGNYDYLMFANIDKNHPDVVTELKNWGKWYVNTTNIDGFRLDAVKHIKFSFFPDWLSYVRSQTGKPLFTVGEYWSYDINKLHNYITKTDGTMSLFDAPLHNKFYTASKSGGAFDMRTLMTNTLMKDQPTLAVTFVDNHDTEPGQALQSWVDPWFKPLAYAFILTRQEGYPCVFYGDYYGIPQYNIPSLKSKIDPLLIARRDYAYGTQHDYLDHSNIIGWTREGGTEKPGSGLAALITNGDGGSKWMYVGKQHAGKVFYDLTGNRSDTVTINSDGWGEFKVNGGSVSVWVPRKTTVSTIARP

SEQ ID NO: 21071 - protein, 491 aa, Unidentified
AAPFNGTMMQYFEWYLPDDGTLWTKVANEANNLSSLGITALWLPPAYKGTSRSDVGYGVYDLYDLGEFNQKGTVRTKYGTKAQYLQAIQAAHAAGMQVYADVVFDHKAGADETEVFKVIEVDPNDRTKEISEPFEIEGWTKFTFPGRGDQYSSFKWNSEHFNGTDFDAKGERTGVFRIAGKAWNWEVDTEFGNYDYLMFANIDYNHPDVVTELKNWGKWYVNTTNIDGFRLDAVKHIKFQFFPDWLSYVRSQTGKPLFTVGEYWSYDINKLHNYITKTDGTMSLFDAPLHNKFYTASKSGGAFDMRTLMTNTLMKDQPTLAVTFVDNHDTEPGQALQSWVDPWFKPLAYAFILTRQEGYPCVFYGDYYGIPQYNIPSLKSKIDPLLIARRDYAYGTQHDYLDHSNIIGWTREGGTEKPGSGLAALITNGDGGSKWMYVGKQHAGKVFYDLTGNRSDTVTINSDGWGEFKVNGGSVSVWVPRKTTVSTIARP

SEQ ID NO: 21072 - protein, 491 aa, Geobacillus stearothermophilus
AAPFNGTMMQYFEWYLPDDGTLWTKVANEANNLSSLGITALWLPPAYKGTSRSDVGYGVYDLYDLGEFNQKGTVRTKYGTKAQYLQAIQAAHAAGMQVYADVVFDHKAGADETEVFKVIEVDPNDRTKEISEPFEIEGWTKFTFPGRGDQYSSFKWNSEHFNGTDFDAKGERTGVFRINGKAWNWEVDTEFGNYDYLMFANIDYNHPDVVTELKNWGKWYVNTTNIDGFRLDAVKHIKFSFFPDWLSYVRSQTGKPLFTVGEYWSYDINKLHNYITKTDGTMSLFDAPLHNKFYTASKSGGAFDMRTLMTNTLMKDQPTLAVTFVDNHDTEPGQALQSWVDPWFKPLAYAFILTRQEGYPCVFYGDYYGIPQYNIPSLKSKIDPLLIARRDYAYGTQHDYLDHSNIIGWTREGGTEKPGSGLAALITNGDGGSKWMYVGKQHAGKVFYDLTGNRSDTVTINSDGWGEFKVNGGSVSVWVPRKTTVSTIARP

SEQ ID NO: 21073 - protein, 491 aa, Unidentified
AAPFNGTMMQYFEWYLPDDGTLWTKVANEANNLSSLGITALWLPPAYKGTSRSDVGYGAYDLYDLGEFNQKGTVRTKYGTKAQYLQAIQAAHAAGMQVYGDVVFDHKAGADETEVFKVIEVDPNDRTKEISEPFEIEGWTKFTFPGRGDQYSSFKWNSEHFNGVDFDAKGERTGVFRIAGKAWNWEVDTEFGNYDYLMFANIDYNHPDVVTELKNWGKWYVNTTNIDGFRLDAVKHIKFSFFPDWLSYVRSQTGKPLFTVGEYWSYDINKLHNYITKTDGTMSLFDAPLHNKFYTASKSGGAFDLRTLMTNTLMKDQPTLAVTFVDNHDTEPGQALQSWVDPWFKPLAYAFILTRQEGYPCVFYGDYYGIPQYNIPSLKSKIDPLLIARRDYAYGTQHDYLDHSNIIGWTREGGTEKPGSGLAALITNGDGGSKWMYVGKQHAGKVFYDLTGNRSDTVTINSDGWGEFKVNGGSVSVWVPRKTTVSTIARP

SEQ ID NO: 21074 - protein, 484 aa, Bacillus sp. NCIB 12512
HHNGTNGTMMQYFEWYLPNDGNHWNRLRDDAANLKSKGITAVWIPPAWKGTSQNDVGYGAYDLYDLGEFNQKGTVRTKYGTRNQLQAAVTSLKNNGIQVYGDVVMNHKGGADGTEIVNAVEVNRSNRNQETSGEYAIEAWTKFDFPGRGNNHSSFKWRWYHFDGTDWDQSRQLQNKIYKFRGTGKAWDWEVDTENGNYDYLMYADVDMDHPEVIHELRNWGVWYTNTLNLDGFRIDAVKHIKYSFTRDWLTHVRNTTGKPMFAVAEFWKNDLGAIENYLNKTSWNHSVFDVPLHYNLYNASNSGGYYDMRNILNGSVVQKHPTHAVTFVDNHDSQPGEALESFVQQWFKPLAYALVLTREQGYPSVFYGDYYGIPTHGVPAMKSKIDPLLQARQTFAYGTQHDYFDHHDIIGWTREGNSSHPNSGLATIMSDGPGGNKWMYVGKNKAGQVWRDITGNRTGTVTINADGWGNFSVNGGSVSVWVK

SEQ ID NO: 21075 - protein, 483 aa, Synthetic construct
HHNGTNGTMMQYFEWYLPNDGNHWNRLRSDASNLKDKGITAVWIPPAWKGASQNDVGYGAYDLYDLGEFNQKGTVRTKYGTRNQLQAAVTALKSNGIQVYGDVVMNHKGGADATEWVRAGEVNPSNRNQEVSGDYTIEAWTKFDFPGRGNTHSNFKWRWYHFDGVDWDQSRQLQNRIYKFRGDGKGWDWEVDTENGNYDYLMYADIDMDHPEVVNELRNWGVWYTNTLGLDGFRIDAVKHIKYSFTRDWLTHVRNTTGKNMFAVAEFWKNDIGAIENYLSKTNWNHSVFDVPLHYNLYNASRSGGNYDMRQIFNGTVVQRHPTHAVTFVDNHDSQPEEALESFVEEWFKPLAYALTLTRDQGYPSVFYGDYYGIPTHGVPAMKSKIDPILEARQKYAYGKQNDYLDHHNMIGWTREGNTAHPNSGLATIMSDGPGGNKWMYVGRNKAGQVWRDITGNRSGTVTINADGWGNFSVNGGSVSIWV

SEQ ID NO: 21076 - protein, 483 aa, Synthetic construct
HHNGTNGTMMQYFEWYLPNDGNHWNRLRSDASNLKDKGITAVWIPPAWKGASQNDVGYGAYDLYDLGEFNQKGTVRTKYGTRNQLQAAVTALKSNGIQVYGDVVMNHKGGADATEWVRAVEVNPSNRNQEVSGDYTIEAWTKFDFPGRGNTHSNFKWRWYHFDGVDWDQSRQLQNRIYKFRGDGKGWDWEVDTENGNYDYLMYADIDMDHPEVVNELRNWGVWYTNTLGLDGFRIDAVKHIKYSFTRDWLTHVRNTTGKNMFAVAEFWKNDIGAIENYLSKTNWNHSVFDVPLHYNLYNASRSGGNYDMRQIFNGTVVQRHPTHAVTFVDNHDSQPEEALESFVEEWFKPLAYALTLTRDQGYPSVFYGDYYGIPTHGVPAMKSKIDEILEARQKYAYGKQNDYLDHHNMIGWTREGNTAHPNSGLATIMSDGPGGNKWMYVGRNKAGQVWRDITGNRSGTVTINADGWGNFSVNGGSVSIWV

SEQ ID NO: 21077 - protein, 483 aa, Synthetic construct
HHNGTNGTMMQYFEWYLPNDGNHWGRLRSDASNLKDKGITAVWIPPAWKGASQNDVGYGAYDLYDLGEFNQKGTVRTKYGTRNQLQAAVTALKSNGIQVYGDVVMNHKGGADATEWVRAVEVNPSNRNQEVSGDYTIEAWTKFDFPGRGNTHSNFKWRWYHFDGVDWDQSRQLQNRIYKFRGDGKGWDWEVDTENGNYDYLMYADIDMDHPEVVNELRNWGVWYTNTLGLDGFRIDAVKHIKYSFTRDWLTHVRNTTGKNMFAVAEFWKNDIGAIENYLSKTNWNHSVFDVPLHYNLYNASRSGGNYDMRQIFNGTVVQRHPTHAVTFVDNHDSQPEEALESFVEEWFKPLAYALTLTRDQGYPSVFYGDYYGIPTHGVPAMKSKIDPILEARQKYAYGKQNDYLDHHNMIGWTREGNTAHPNSGLATIMSDGPGGNKWMYVGRNKAGQVWRDITGNRSGTVTINADGWGNFSVNGGSVSIWV

SEQ ID NO: 21078 - protein, 483 aa, Synthetic construct
HHNGTNGTMMQYFEWYLPNDGNHWNRLRSDASNLKDKGITAVWIPPAWKGASQNDVGYGAYDLYDLGEFNQKGTVRTKYGTRNQLQAAVTALKSNGIQVYGDVVMNHKGGADATEWVRAVEVNPSNRNQEVSGDYTIEAWTKFDFPGRGNTHSNFKWRWYHFDGVDWDQSRQLQNRIYKFRGDGKGWDWEVDTENGNYDYLMYADIDMDHPEVVNELRNWGVWYTNTLGLDGFRIDAVKHIKYSFTRDWLTHVRNTTGKNMFAVAEFWKNDIGAIENYLSKTNWNHSVFDVPLHYNLYNASRSGGNYDMRQIFNGTVVQRHPTHAVTFVDNHDSQPEEALESFVEEWFKPLAYALTLTRDQGYPSVFYGDYYGIPTHGVPAMKSKIDPIFEARQKYAYGKQNDYLDHHNMIGWTREGNTAHPNSGLATIMSDGPGGNKWMYVGRNKAGQVWRDITGNRSGTVTINADGWGNFSVNGGSVSIWV

SEQ ID NO: 21079 - protein, 483 aa, Synthetic construct
HHNGTNFTMMQYFEWYLPNDGNHWNRLRSDASNLKDKGITAVWIPPAWKGASQNDVGYGAYDLYDLGEFNQKGTVRTKYGTRNQLQAAVTALKSNGIQVYGDVVMNHKGGADATEWVRAVEVNPSNRNQEVSGDYTIEAWTKFDFPGRGNTHSNFKWRWYHFDGVDWDQSRQLQNRIYKFRGDGKGWDWEVDTENGNYDYLMYADIDMDHPEVVNELRNWGVWYTNTLGLDGFRIDAVKHIKYSFTRDWLTHVRNTTGKNMFAVAEFWKNDIGAIENYLSKTNWNHSVFDVPLHYNLYNASRSGGNYDMRQIFNGTVVQRHPTHAVTFVDNHDSQPEEALESFVEEWFKPLAYALTLTRDQGYPSVFYGDYYGIPTHGVPAMKSKIDPILEARQKYAYGKQNDYLDHHNMIGWTREGNTAHPNSGLATIMSDGPGGNKWMYVGRNKAGQVWRDITGNRSGTVTINADGWGNFSVNGGSVSIWV

SEQ ID NO: 21080 - protein, 483 aa, Synthetic construct
HHNGTNGTMMQYFEWYLPNDGNHWNRLRSDASNLKDKGITAVWIPPAWKGASQNDVGYGAYDLYDLGEFNQKGTVRTKYGTREQLQAAVTALKSNGIQVYGDVVMNHKGGADATEWVRAVEVNPSNRNQEVSGDYTIEAWTKFDFPGRGNTHSNFKWRWYHFDGVDWDQSRQLQNRIYKFRGDGKEWDWEVDTENGNYDYLMYADIDMDHPEVVNELRDWGVWYTRTLGLDGFRIDAVKHIKYSFTRDWLTHVRNTTGKNMFAVAEFWKNDIGAIENYLSKTNWNHSVFDVPLHYNLYNASRSGGNYDMRQIFNGTVVQRHPTHAVTFVDNHDSQPEEALESFVEEWFKPLAYALTLTRDQGYPSVFYGDYYGIPTHGVPAMKSKIDPILEARQKYAYGKQNDYLDHHNMIGWTREGNTAHPNSGLATIMSDGPGGNKWMYVGRNKAGQVWRDITGNRSGTVTINADGWGNFSVNGGSVSIWV

SEQ ID NO: 21081 - protein, 483 aa, Synthetic construct
HHNGTNGTMMQYFEWYLPNDGNHWNRLRSDASNLKDKGITAVWIPPAWKGASQNDVGYGAYDLYDLGEFNQKGTVRTKYGTRNQLQAAVTALKSNGIQVYGDVVMNHKGGADATEWVRAVEVNPSNRNQEVSGDYTIEAWTKFDFPGRGNTHSNFKWRWYHFDGVDWDQSRQLQNRIYKFRGDGKGWDWEVDTENGNYDYLMYADIDMDHPEVVNELRNWGVWYTNTLGLDGFRIDAVKHIKYSFTRDWLTHVRNTTGKNMFAVAEFWKNDIGAIENYLSKTNWNHSVFDVPLHYNLYNASRSGGNYDMRQIFNGTVVQRHPTHAVTFVDNHDSQPEEALESFVEEWFKPLAYALTLTRDQGYPSVFYGDYYGIPTHGVPAMKSKIDPILEARQKYAYGKQNDYLDHHNMIGWTREGNTAHPNSGLATIMSDGPGGNKWMYVGRNKAGQVWRDITGNRSGTVTIHADGWGNFSVNGGSVSIWV

SEQ ID NO: 21082 - protein, 483 aa, Synthetic construct
HHNGTNGTMMQYFEWYLPNDGNHWNRLRSDASNLKDKGITGVWIPPAWKGASQNDVGYGAYDLYDLGEFNQKGTVRTKYGTRNQLQAAVTALKSNGIQVYGDVVMNHKGGADATEWVRAVEVNPSNRNQEVSGDYTIEAWTKFDFPGRGNTHSNFKWRWYHFDGVDWDQSRQLQNRIYKFRGDGKGWDWEVDTENGNYDYLMYADIDMDHPEVVNELRNWGVWYTNTLGLDGFRIDAVKHIKYSFTRDWLTHVRNTTGKNMFAVAEFWKNDIGAIENYLSKTNWNHSVFDVPLHYNLYNASRSGGNYDMRQIFNGTVVQRHPTHAVTFVDNHDSQPEEALESFVEEWFKPLAYALTLTRDQGYPSVFYGDYYGIPTHGVPAMKSKIDPILEARQKYAYGKQNDYLDHHNMIGWTREGNTAHPNSGLATIMSDGPGGNKWMYVGRNKAGQVWRDITGNRSGTVTINADGWGNFSVNGGSVSIWV

SEQ ID NO: 21083 - protein, 483 aa, Synthetic construct
HHNGTNGTMMQYFEWYLPNDGNHWNRLRSDASNLKDKGITAVWIPPAWKGASQNDVGYGAYDLYDLGEFNQKGTVRTKYGTRNQLQAAVTALKSNGIQVYGDVVMNHKGGADATEWVRAVEVNPSNRNQEVSGDYTIEAWTKFDFPGRGNTHSNFKWRWYHFDGVDWDQSRQLQNRIYKFRGDGKGWDWEVDTENGNYDYLMYADIDMDHPEVVNELRNWGVWYTNTLGLDGFRIDAVKHIKYSFTRDWLTHVRNTTGKNMFAVAEFWKNDIGAIENYLSNTNWNHSVFDVPLHYNLYNASRSGGNYDMRQIFNGTVVQRHPTHAVTFVDNHDSQPEEALESFVEEWFKPLAYALTLTRDQGYPSVFYGDYYGIPTHGVPAMKSKIDPILEARQKYAYGKQNDYLDHHNMIGWTREGNTAHPNSGLATIMSDGPGGNKWMYVGRNKAGQVWRDITGNRSGTVTINADGWGNFSVNGGSVSIWV

SEQ ID NO: 21084 - protein, 483 aa, Synthetic construct
HHNGTNGTMMQYFEWYLPNDGNHWNRLRSDASNLKDKGITAVWIPPAWKGASQNDVGYGAYDLYDLGEFNQKGTVRTKYGTRNQLQAAVTALKSNGIQVYGDVVMNHKGGADATEWVRAVEVNPSNRNQEVSGDYTIEAWTKFDFPGRGNTHSNFKWRWYHFDGVDWDQSRQLQNRIYKFRGDGKGWDWEVDTENGNYDYLMYADIDMDHPEVVNELRNWGVWYTNTLGLDGFRIDAVKHIKYSFTRDWLTHVRNTTGKNMFAVAEFWKNDIGAIENYLSKTNWNHSVFDVPLHYNLYNASRSGGNYDMRQIFNGTVVQRYPTHAVTFVDNHDSQPEEALESFVEEWFKPLAYALTLTRDQGYPSVFYGDYYGIPTHGVPAMKSKIDPILEARQKYAYGKQNDYLDHHNMIGWTREGNTAHPNSGLATIMSDGPGGNKWMYVGRNKAGQVWRDITGNRSGTVTINADGWGNFSVNGGSVSIWV

SEQ ID NO: 21085 - protein, 483 aa, Synthetic construct
HHNGTNGTMMQYFEWYLPNDGNHWNRLRSDASNLKDKGITAVWIPPAWKGASQNDVGYGAYDLYDLGEFNQKGTVRTKYGTRNQLQAAVTALKSNGIQVYGDVVMNHKGGADATEWVRAVEVNPKNRNQEVSGDYTIEAWTKFDFPGRGNTHSNFKWRWYHFDGVDWDQSRQLQNRIYKFRGDGKGWDWEVDTENGNYDYLMYADIDMDHPEVVNELRNWGVWYTNTLGLDGFRIDAVKHIKYSFTRDWLTHVRNTTGKNMFAVAEFWKNDIGAIRNYLSKTNWNHSVFDVPLHYNLYNASRSGGNYDMRQIFNGTVVQRHPTHAVTFVDNHDSQPEEALESFVEEWFKPLAYALTLTRDQGYPSVFYGDYYGIPTHGVPAMKSKIDPILEARQKYAYGKQNDYLDHHNMIGWTREGNTAHPNSGLATIMSDGPGGNKWMYVGRNKAGQVWRDITGNRSGTVTINADGWGNFSVNGGSVSIWV

SEQ ID NO: 21086 - protein, 483 aa, Synthetic construct
HHNGTNGTMMQYFEWYLPNDGNHWNRLRSDASNLKDKGITAVWIPPAWKGASQNDVGYGAYDLYDLGEFNQKGTVRTKYGTRNQLQAAVTALKSNGIQVYGDVVMNHKGGADATEWVRAVEVNPSNRNQEVSGDYTIEAWTKFDFPGRGNTHSNFKWRWWHFDGVDWDQSRQLQNRIYKFRGDGKEWDWEVDEENGNYDYLMYADYDMDHPEVVNELRNWGVWYTNTLGLDGFRIDAVKHIKYSFTRDWLTHVRNTTGKNMFAVAEFWKNDIGAIENYLSKTNWNHSVFDVPLHYNLYNASRSGGNYDMRQIFNGTVVQRHPTHAVTFVDNHDSQPEEALESFVEEWFKPLAYALTLTRDQGYPSVFYGDYYGIPTHGVPAMKSKIDPILEARQKYAYGKQNDYLDHHNMIGWTREGNTAHPNSGLATIMSDGPGGNKWMYVGRNKAGQVWRDITGNRSGTVTINADGWGNFSVNGGSVSIWV

SEQ ID NO: 21087 - protein, 483 aa, Synthetic construct
HHNQTNGTMMQYFEWYLPNDGNHWNRLRSDASNLKDKGITAVWIPPAWKGASQNDVGYGAYDLYDLGEFNQKGTVRTKYGTRNQLQAAVTALKSNGIQVYGDVVMNHKGGADATEWVRAVEVNPSNRNQEVSGDYTIEAWTKFDFPGRGNTHSNFKWRWYHFDGVDWDQSRQLQNRIYKFRGDGKGWDWEVDTENGNYDYLMYADYDMDHPEVVNELRNWGVWYTNTLGLDGFRIDAVKHIKYSFTRDWLTHVRNTTGKNMFAVAEFWKNDIGAIENYLSKTNWNHSVFDVPLHYNLYNASRSGGNYDMRQIFNGTVVQRHPTHAVTFVDNHDSQPEEALESFVEEWFKPLAYALTLTRDQGYPSVFYGDYYGIPTHGVPAMKSKIDPILEARQKYAYGKQNDYLDHHNMIGWTREGNTAHPNSGLATIMSDGPGGNKWMYVGRNKAGQVWRDITGNRSGTVTINADGWGNFSVNGGSVSIWV

SEQ ID NO: 21088 - protein, 483 aa, Synthetic construct
HHNGTNGTMMQYFEWYLPNDGNHWNRLRSDASNLKDKVITAVWIPPAWKGASQNDVGYGAYDLYDLGEFNQKGTVRTKYGTRNQLQAAVTALKSNGIQVYGDVVMNHKGGADATEWVRAVEVNPSNRNQEVSGDYTIEAWTKFDFPGRGNTHSNFKWRWYHFDGVDWDQSRQLQNRIYKFRGDGKGWDWEVDTENGNYDYLMYADIDMDHPEVVNELRNWGVWYTNTLGLDGFRIDAVKHIKYSFTRDWLTHVRNTTGKNMFAVAEFWKNDIGAIENYLSKTNWNHSVFDVPLHYNLYNASRSGGNYDMRQIFNGTVVQRHPTHAVTFVDNHDSQPEEALESFVEEWFKPLAYALVLTRDQGYPSVFYGDYYGIPTHGVPAMKSKIDPILEARQKYAYGKQNDYLDHHNMIGWTREGNTAHPNSGLATIMSDGPGGNKWMYVGRNKAGQVWRDITGNRSGTVTINADGWGNFSVNGGSVSIWV

SEQ ID NO: 21089 - protein, 483 aa, Synthetic construct
HHNGTNGTMMQYFEWYLPNDGNHWNRLRSDASNLKDKGITAVWIPPAWKGASQNDVGYGAYDLYDLGEFNQKGTVRTKYGTRNQLQAAVTALKSNGIQVYGDVVMNHKGGADATEWVRAVEVNPSNRNQEVSGDYTIEAWTKFDFPGRGNTHSNFKWRWYHFDGVDWDQSRQLHNRIYKFRGDGKGWDWEVDTENGNYDYLMYADIDMDHPEVVNELRNWGVWYTNTLGLDGFRIDAVKHIKYSFTRDWLTHVRNTTGKNMFAVAEFWKNDIGAIENYLSKTNWNHSVFDVPLHYNLYNASRSGGNYDMRQIFNGTVVQRHPTHAVTFVDNHDSQPEEALESFVEEWFKPLAYALTLTRDQGYPSVFYGDYYGIPTHGVPAMKSKIDPILEARQKYAYGKQNDYMDHHNMIGWTREGNTAHPNSGLATIMSDGPGGNKWMYVGRNKAGQVWRDITGNRSGTVTINADGWGNFSVNGGSVSIWV

SEQ ID NO: 21090 - protein, 483 aa, Synthetic construct
HHNGTNGTMMQYFEWYLPNDGNHWNRLRSDASNLKDKGITAVWIPPAWKGASQNDVGYGAYDLYDLGEFNQKGTVRTKYGTRNQLQAAVTALKSNGIQVYGDVVMNHKGGADATEWVRAVEVNPSNRNQEVSGDYTIEAWTKFDFPGRGNTHSNFKWRWYHFDGVDWDQSRQLQNRIYKFRGDGKGWDWEVDTENGNYDYLMYADIDMDHPEVVNELRNWGVWYTNTLGLDGFRIDAVKHIKYSFTRDWLTHVRNTTGKNMFAVAEFWKNDIGAIETYLSKTNWNHSVFDVPLHYNLYNASRSGGNYDMRQIFNGTVVQRHPTHAVTFVDNHDSQPEEALESFVEEWFKPLAYALTLTRDQGYPSVFYGDYYGIPTHGVPAMKSKIDPILEARQKYAYGKQNDYLDHHNMIGWTREGNTAHPNSGLATIMSDGPGGNKWMYVGRNKAGQVWRDITGNRSGTVTINADGWGNFSVNGGSVSIWV

SEQ ID NO: 21091 - protein, 483 aa, Synthetic construct
HHNGTNGTMMQYFEWYLPNDGNHWNRLRSDASNLKDKGITAVWIPPAWKGASQNDVGYGAYDLYDLGEFNQKGTVRTKYGTRNQLQAAVTALKSNGIQVYGDVVMNHKGGADATEWVRAVEVNPSNRNQEVSGDYTIEAWTKFDFPGRGNTHSNFKWRWYHFDGVDWDQSRQLQNRIYKFRGDGKGADWEVDTENGNYDYLMYADIDMDHPEVVNELRNWGVWYTNTLGLDGFRIDAVKHIKYSFTRDWLTHVRNTTGKNMFAVAEFWKNDIGAIENYLSKTNWNHSVFDVPLHYNLYNASRSGGNYDMRQIFNGTVVQRHPTHAVTFVDNHDSQPEEALESFVEEWFKPLAYALTLTRDQGYPSVFYGDYYGIPTHGVPAMKSKIDPILEARQKYAYGKQNDYLDHHNMIGWTREGNTAHPNSGLATIMSDGPGGNKWMYVGRNKAGQVWRDITGNRSGTVTINADGWGNFSVNGGSVSIWV

SEQ ID NO: 21092 - protein, 483 aa, Synthetic construct
HHNGTNGTMMQYFEWYLPNDGNHWNRLRSDASNLKDKGITAVWIPPAWKGASQNDVGYGAYDLYDLGEFNQKGTVRTKYGTRNQLQAAVTALKSNGIAVYGDVVMNHKGGADATEWVRAVEVNPSNRNQEVSGDYTIEAWTKFDFPGRGNTHSNFKWRWYHFDGVDWDQSRQLQNRIYKFRGDGKGWDWEVDTENGNYDYLMYADIDMDHPEVVNELRNWGVWYTNTLGLDGFRIDAVKHIKYSFTRDWLTHVRNTTGKNMFAVAEFWKNDIGAIENYLSKTNWNHSVFDVPLHYNLYNASRSGGNYDMRQIFNGTVVQRHPTHAVTFVDNHDSQPEEALESFVEEWFKPLAYALTLTRDQGYPSVFYGDYYGIPTHGVPAMKSKIDPILEARQKYAYGKQNDYLDHHNMIGWTREGNTAHPNSGLATIMSDGPGGNKWMYVGRNKAGQVWRDITGNRSGTVTINADGWGNFSVNGGSVSIWV

SEQ ID NO: 21093 - protein, 483 aa, Synthetic construct
HHNGTNGTMMQYFEWYLPNDGNHWNRLRSDASNLKDKGITAVWIPPAWKGASQNDVGYGAYDLYDLGEFNQKGTVRTKYGTRNQLQRAVTALKSNGIQVYGDVVMNHKGGADATEWVRAVEVNPSNRNQEVSGDYTIEAWTKFDFPGRGNTHSNFKWRWYHFDGVDWDQSRQLQNRIYKFRGDGKEWDWEVDTENGNYDYLMYADIDMDHPEVVNELRNWGVWYTNTLGLDGFRIDAVKHIKYSFTRDWLTHVRNTTGKNMFAVAEFWKNDIGAIENYLSKTNWNHSVFDVPLHYNLYNASRSGGNYDMRQIFNGTVVQRHPTHAVTFVDNHDSQPEEALESFVEEWFKPLAYALTLTRDQGYPSVFYGDYYGIPTHGVPAMKSKIDPILEARQKYAYGKQNDYLDHHNMIGWTREGNTEHPNSGLATIMSDGPGGNKWMYVGRNKAGQRWRDITGNRSGTVTINADGWGNFSVNGGSVSIWV

SEQ ID NO: 21094 - protein, 483 aa, Synthetic construct
HHNGTNGTMMQYFEWYLPNDGNHWNRLRSDASNLKDKGITAVWIPPAWKGASQNDVGYGAYDLYDLGEFNQKGTVRTKYGTRNQLQAAVTALKSNGIQVYGDVVMNHKGGADATEWVRAVEVNPSNRNQEVSGDYTIEAWTKFDFPGRGNTHSNFKWRWYHFDGVDWDQSRQLQNRIYKFRGDGKGWDWEVDTENGNYDYLMYADIDMDHPEVVNELRNWGVWYTNTLGLDGFRIDAVKHIKYSFTRDWLTHVRNTTGKNMFAVAEFWKNDIGAIENYLSKTNWNHSVFDVPLHYNLYNASRSGGNYDMRQIFNGTVVQRHPTHAVTFVDNHDSQPEEALESFVEEWFKPLAYALTLTRDQGHPSVFYGDYYGIPTHGVPAMKSKIDPILEARQKYAYGKQNDYLDHHNMIGWTREGNTAHPNSGLATIMSDGPGGNKWMYVGRNKAGQVWRDITGNRSGTVTINADGWGNFSVNGGSVSIWV

SEQ ID NO: 21095 - protein, 483 aa, Synthetic construct
HHNGTNGTMMQYFEWYLPNDGNHWNRLRSDASNLKDKGITAVWIPPAWKGASQNDVGYGAYDLYDLGEFNQKGTVRTKYGTRNQLQAAVTALKSNGIQVYGDVVMNHKGGADATEWVRAVEVNPSNRNQEVSGDYTIEAWTKFDFPGRGNTHSNFKWRWWHFDGVDWDQSRQLQNRIYKFRGDGKEWDWEVDTENGNYDYLMYADIDMDHPEVVNELRNWGVWYTNTLGLDGFRIDAVKHIKYSFTRDWLTHVRNTTGKNMFAVAEFWKNDIGAIENYLSKTNWNHSVFDVPLHYNLYNASRSGGNYDMRQIFNGTVVQRHPTHAVTFVDNHDSQPEEALESFVEEWFKPLAYALTLTRDQGYPSVFYGDYYGIPTHGVPAMKSKIDPILEARQKYAYGKQNDYLDHHNMIGWTREGNTAHPNSGLATIMSDGPGGNKWMYVGRNKAGQVWRDITGNRSGTVTINADGWGNFSVNGGSVSIWV

SEQ ID NO: 21096 - protein, 483 aa, Synthetic construct
HHNGTNGTMMQYFEWYLPNDGNHWNRLRSDASNLKDKGITAVWIPPAWKGASQNDVGYGAYDLYDLGEFNQKGTVRTKYGTRNQLQAAVTALKSNGIQVYGDVVMNHKGGADATEWVRAVEVNPSNRNQEVSGDYTIEAWTKFDFPGRGNTHSNFKWRWYHFDGVDWDQSRQLMNRIYKFRGDGKGWDWEVDTENGNYDYLMYADIDMDHPEVVNELRNWGVWYTNTLGLDGFRIDAVKHIKYSFTRDWLTHVRNTTGKNMFAVAEFWKNDIGAIENYLSKTNWNHSVFDVPLHYNLYNASRSGGNYDMRQIFNGTVVQRHPTHAVTFVDNHDSQPEEALESFVEEWFKPLAYALTLTRDQGYPSVFYGDYYGIPTHGVPAMKSKIDPILEARQKYAYGKQNDYLDHHNMIGWTREGNTAHPNSGLATIMSDGPGGNKWMYVGRNKAGQVWRDITGNRSGTVTINADGWGNFSVNGGSVSIWV

SEQ ID NO: 21097 - protein, 483 aa, Synthetic construct
HHNGTNGTMMQYFEWYLPNDGNHWNRLRSDASNLKDKGITAVWIPPAWKGASQNDVGYGAYDLYDLGEFNQKGTVRTKYGTLNQLQAAVTALKSNGIQVYGDVVMNHKGGADATEWVRAVEVNPSNRNQEVSGDYTIEAWTKFDFPGRGNTHSNFKWRWYHFDGVDWDQSRQLQNRIYKFRGDGKGWDWEVDTENGNYDYLMYADIDMDHPEVVNELRNWGVWYTNTLGLDGFRIDAVKHIKYSFTRDWLTHVRNTTGKNMFAVAEFWKNDIGAIENYLSKTNWNHSVFDVPLHYNLYNASRSGGNYDMRQIFNGTVVQRHPTHAVTFVDNHDSQPEEALESFVEEWFKPLAYALTLTRDQGYPSVFYGDYYGIPTHGVPAMKSKIDPILEARQKYAYGKQNDYLDHHNMIGWTREGNTAHPNSGLATIMSDGPGGNKWMYVGRNKAGQVWRDITGNRSGTVTINADGWGNFSVNGGSVSIWV

SEQ ID NO: 21098 - protein, 483 aa, Synthetic construct
HHNGTNGTMMQYFEWYLPNDGNHWNRLRSDASNLKDKGITAVWIPPAWKGASQNDVGYGAYDLYDLGEFNQKGTVRTKYGTRNQLQAAVTALKSNGIQVYGDVVMNHKGGADATEWVRAVEVNPSNRNQEVSGDYTIEAWTKFDFPGRGNTHSNFKWRWYHFDGVDWDQSRQLQNRIYKWRGDGKGWDWEVDTENGNYDYLMYADIDMDHPEVVNELRNWGVWYTNTLGLDGFRIDAVKHIKYSFTRDWLTHVRNTTGKNMFAVAEFWKNDIGAIENYLSKTNWNHSVFDVPLHYNLYNASRSGGNYDMRQIFNGTVVQRHPTHAVTFVDNHDSQPEEALESFVEEWFKPLAYALTLTRDQGYPSVFYGDYYGIPTHGVPAMKSKIDPILEARQKYAYGKQNDYLDHHNMIGWTREGNTAHPNSGLATIMSDGPGGNKWMYVGRNKAGQVWRDITGNRSGTVTINADGWGNFSVNGGSVSIWV

SEQ ID NO: 21099 - protein, 483 aa, Synthetic construct
HHNGTNGTMMQYFEWYLPNDGNHWNRLRSDASNLKDKGITAVWIPPAWKGASQNDVGYGAYDLYDLGEFNQKGTTRTKYGTRNQLQAAVTALKSNGIQVYGDVVMNHKGGADATEWVRAVEVNPSNRNQEVSGDYTIEAWTKFDFPGRGNTHSNFKWRWYHFDGVDWDQSRQLQNRIYKFRGDGKGWDWEVDTENGNYDYLMYADIDMDHPEVVNELRNWGVWYTNTLGLDGFRIDAVKHIKYSFTRDWLTHVRNTTGKNMFAVAEFWKNDIGAIENYLSKTNWNHSVFDVPLHYNLYNASRSGGNYDMRQIFNGTVVQRHPTHAVTFVDNHDSQPEEALESFVEEWFKPLAYALTLTRDQGYPSVFYGDYYGIPTHGVPAMKSKIDPILEARQKYAYGKQNDYLDHHNMIGWTREGNTAHPNSGLATIMSDGPGGNKWMYVGRNKAGQVWRDITGNRSGTVTINADGWGNFSVNGGSVSIWV

SEQ ID NO: 21100 - protein, 483 aa, Synthetic construct
HHNGTNGTMMQYFEWYLPNDGNHWNRLRSDASNLKDKGITAVWIPPAWKGASQNDVGYGAYDLYDLGEFNQKGTVRTKYGTRNQLQAAVTALKSNGIQVYGDVVMNHKGGADATEWVRAVEVNPSNRNQEVSGDYTIEAWTKFDFPGRGNTHSNFKWRWYHFDGVDWDQSRQLQNRIYKFRGDGKGWDWEVDTENGNYDYLMYADIDMDHPEVVNELRNWGVWYTNTLGLDGFRIDAVKHIKYSFTRDWLTHVRNTTGKNMFAVAEFWKNDIGAIENYLSKTNWNHSVFDVPLHYNLYNASRSGGNYDMRQIFNGTVVQRHPTHAVTFVDNHDSQPEEALESFVEEWFKPLAYALTLTRDQGYPSVFYGDYYGIPTHGVPAMKSWIDPILEARQKYAYGKQNDYLDHHNMIGWTREGNTAHPNSGLATIMSDGPGGNKWMYVGRNKAGQVWRDITGNRSGTVTINADGWGNFSVNGGSVSIWV

SEQ ID NO: 21101 - protein, 483 aa, Synthetic construct
HHNGTNGTMMQYFEWYLPNDGNHWNRLRSDASNLKDKGITAVWIPPAWKGASQNDVGYGAYDLYDLGEFNQKGTVRTKYGTRNQLQAAVTALKSNGIQVYGDVVMNHKGGADATEWVRAVEVNPSNRNQEVSGDYTIEAWTKFDFPGRGNTHSNFKWRWYHFDGVDWDQSRQLQNRIYKFRGDGKGMDWEVDTENGNYDYLMYADIDMDHPEVVNELRNWGVWYTNTLGLDGFRIDAVKHIKYSFTRDWLTHVRNTTGKNMFAVAEFWKNDIGAIENYLSKTNWNHSVFDVPLHYNLYNASRSGGNYDMRQIFNGTVVQRHPTHAVTFVDNHDSQPEEALESFVEEWFKPLAYALTLTRDQGYPSVFYGDYYGIPTHGVPAMKSKIDPILEARQKYAYGKQNDYLDHHNMIGWTREGNTAHPNSGLATIMSDGPGGNKWMYVGRNKAGQVWRDITGNRSGTVTINADGWGNFSVNGGSVSIWV

SEQ ID NO: 21102 - protein, 483 aa, Synthetic construct
HHNQTNGTMMQYFEWYLPNDGNHWNRLRSDASNLKDKGITAVWIPPAWKGASQNDVGYGAYDLYDLGEFNQKGTVRTKYGTRNQLQAAVTALKSNGIQVYGDVVMNHKGGADATEWVRAVEVNPSNRNQEVSGDYTIEAWTKFDFPGRGNTHSNFKWRWYHFDGVDWDQSRQLQNRIYKFRGDGKGWDWEVDTENGNYDYLMYADIDMDHPEVVNELRNWGVWYTNTLGLDGFRIDAVKHIKYSFTRDWLTHVRNTTGKNMFAVAEFWKNDIGAIENYLSKTNWNHSVFDVPLHYNLYNASRSGGNYDMRQIFNGTVVQRHPTHAVTFVDNHDSQPEEALESFVEEWFKPLAYALTLTRDQGYPSVFYGDYYGIPTHGVPAMKSKIDPILEARQKYAYGKQNDYLDHHNMIGWTREGNTAHPNSGLATIMSDGPGGNKWMYVGRNKAGQVWRDITGNRSGTVTINADGWGNFSVNGGSVSIWV

SEQ ID NO: 21103 - protein, 483 aa, Synthetic construct
HHNGTNGTMMQYFEWYLPNDGNHWNRLRSDASNLKDKGITAVWIPPAFKGASQNDVGYGAYDLYDLGEFNQKGTVRTKYGTRNQLQAAVTALKDNGIQVYGDVVMNHKGGADATEWVRAVEVNPSNRNQEVSGDYTIEAWTKFDFPGRGNTHSNFKWRWYHFDGVDWDQSRQLQNRIYKFRGDGKGWDWEVDTENGNYDYLMYADIDMDHPEVVNELRNWGVWYTNTLGLDGFRIDAVKHIKYSFTRDWLTHVRNTTGKNMFAVAEFWKNDIGAIENYLSKTNWNHSVFDVPLHYNLYNASRSGGNYDMRQIFNGTVVQRHPTHAVTFVDNHDSQPEEALESFVEEWFKPLAYALTLTRDQGYPSVFYGDYYGIPTHGVPAMKSKIDPILEARQKYAYGKQNDYLDHHNMIGWTREGNTAHPNSGLATIMSDGPGGNKWMYVGRNKAGQVWRDITGNRSGTVTINADGWGNFSVNGGSVSIWV

SEQ ID NO: 21104 - protein, 483 aa, Synthetic construct
HHNGTNGTMMQYFEWYLPNDGNHWNRLRSDASNLKDKGITAVWIPPAWKGASQNDVGYGAYDLYDLGEFNQKGTVRTKYGTRNQLQAAVTALKSNGIQVYGDVVMNHKGGADATEWVRAYEVNPSNRNQEVSGDYTIEAWTKFDFPGRGNTHSNFKWRWYHFDGVDWDQSRQLQNRIYKFRGDGKGWDWEVDTENGNYDYLMYADIDMDHPEVVNELRNWGVWYTNTLGLDGFRIDAVKHIKYSFTRDWLTHVRNTTGKNMFAVAEFWKNDIGAIENYLSKTNWNHSVFDVPLHYNLYNASRSGGNYDMRQIFNGTVVQRHPTHAVTFVDNHDSQPEEALESFVEEWFKPLAYALTLTRDQGYPSVFYGDYYGIPTHGVPAMKSKIDPILEARQKYAYGKQNDYLDHHNMIGWTREGNTAHPNSGLATIMSDGPGGNKWMYVGRNKAGQVWRDITGNRSGTVTINADGWGNFSVNGGSVSIWV

SEQ ID NO: 21105 - protein, 483 aa, Synthetic construct
HHNGTNGTMMQYFEWYLPNDGNHWNRLRSDASNLKDKGITAVWIPPAWKGASQNDVGYGAYDLYDLGEFNQKCTVRTKYGTRNQLQAAVTALKSNGIQVYGDVVMNHKGGADATEWVRAVEVNPSNRNQEVSGDYTIEAWTKFDFPGRGNTHSNFKWRWYHFDGVDWDQSRQLQNRIYKFRGDGKGWDWEVDTENGNYDYLMYADIDMDHPEVVNELRNWGVWYTNTLGLDGFRIDAVKHIKYSFTRDWLTHVRNTTGKNMFAVAEFWKNDIGAIENYLSKTNWNHSVFDVPLHYNLYNASRSGGNYDMRQIFNGTVVQRHPTHAVTFVDNHDSQPEEALESFVEEWFKPLAYALTLTRDQGYPSVFYGDYYGIPTHGVPAMKSKIDPILEARQKYAYGKQNDYLDHHNMIGWTREGNTAHPNSGLATIMSDGPGGNKWMYVGRNKAGQVWRDITGNRSGTVTINADGWGNFSVNGGSVSIWV

SEQ ID NO: 21106 - protein, 483 aa, Synthetic construct
HHNGTNGTMMQYFEWYLPNDGNHWNRLRSDASNLKDKGITAVWIPPAWKGASQNDVGYGAYDLYDLGEFNQKGTVRTKYGTRNQLQAAVTALKSNGIQVYGDVVMNHKGGADATEWVRAVEVNPSNRNQEVSGDYTIEAWTKFDFPGRGNTHSNFKWRWYHFDGVDWDQSRQLQNRIYKFRGDGKGWDWEVDTENGNYDYLMYADIDMDHPEVVNELRNWGVWYTNTLGLDGFRIDAVKHIKYSFTRDWLTHVRNTTQKNMFAVAEFWKNDIGAIENYLSKTNWNHSVFDVPLHYNLYNASRSGGNYDMRQIFNGTVVQRHPTHAVTFVDNHDSQPEEALESFVEEWFKPLAYALTLTRDQGYPSVFYGDYYGIPTHGVPAMKSKIDPILEARQKYAYGKQNDYLDHHNMIGWTREGNTAHPNSGLATIMSDGPGGNKWMYVGRNKAGQVWRDITGNRSGTVTINADGWGNFSVNGGSVSIWV

SEQ ID NO: 21107 - protein, 483 aa, Synthetic construct
HHNQTNGTMMQYFEWYLPNDGNHWNRLRSDASNLKDKGITAVWIPPAWKGASQNDVGYGAYDLYDLGEFNQKGTVRTKYGTRNQLQAAVTALKSNGIQVYGDVVMNHKGGADATEWVRAVEVNPSNRNQEVSGDYTIEAWTKFDFPGRGNTHSNFKWRWYHFDGVDWDQSRQLQNRIYKFRGDGKEWDWEVDEENGNYDYLMYADYDMDHPEVVNELRNWGVWYTNTLGLDGFRIDAVKHIKYSFTRDWLTHVRNTTGKNMFAVAEFWKNDIGAIENYLSKTNWNHSVFDVPLHYNLYNASRSGGNYDMRQIFNGTVVQRHPTHAVTFVDNHDSQPEEALESFVEEWFKPLAYALTLTRDQGYPSVFYGDYYGIPTHGVPAMKSKIDPILEARQKYAYGKQNDYMDHHNMIGWTREGNTAHPNSGLATIMSDGPGGNKWMYVGRNKAGQVWRDITGNRSGTVTINADGWGNFSVNGGSVSIWV

SEQ ID NO: 21108 - protein, 483 aa, Synthetic construct
HHNGTNGTMMQYFEWYLPNDGNHWNRLRSDASNLKDKGITAVWIPPAWKGASQNDVGYGAYDLYDLGEFNQKGTVRTKYGTRNQLQAAVTALKSNGIQVYGDVVMNHKGGADATEWVRAVEVNPSNRNQEVSGDYTIEAWTKFDFPGRGNTHSNFKWRWYHFDGVDWDQSRQLQNRIYKFRGDGKGWDWEVDTENGNYDYLMYADIDMDHPEVVNELRNWGVWYTNTLGLDGFRIDAVKHIKYSFTRDWLTHVRNTTGKNMFAVAEFWKNDIGAIENYLSKTNWNHSVFDVPLHYNLYNASRSGGNYDMRQIFNGTVVQRHPTHAVTFVDNHDSQPEEALESFVEEWFKPLAYALTLTRDQGYPSVFYGDYYGIPTHGVPAMKSKIDPILEARQKYAYGKQNDYLDHHNMIGWTREGNTAHPNSGLATIMSDGPGGNKWMYVGRNKAGQVWRDITSNRSGTVTINADGWGNFSVNGGSVSIWV

SEQ ID NO: 21109 - protein, 483 aa, Synthetic construct
HHNGTNGTMMQYFEWYLPNDGNHWNRLRSDASNLKDKGITAVWIPPAWKGASQNDVGYGAYDLYDLGEFNQKGTVRTKYGTRNQLQAAVTALKSNGIQVYGDVVMNHKGGADATEWVRAVEVNPSNRNQEVSGDYTIEAWTKFDFPGRGNTHSNFKWRWYHFDGVDWDQSRQLQNRIYKFRGDGKGWDWEVDTENGNYDYLMYADIDMDHPEVVNELRNWGVWYTNTLGLDGFRIDAVKHIKYSFTRDWLTHVRNTTGKNMFAVAEFWKNDIGAIENYLSKTNWNQSVFDVPLHYNLYNASRSGGNYDMRQIFNGTVVQRHPTHAVTFVDNHDSQPEEALESFVEEWFKPLAYALTLTRDQGYPSVFYGDYYGIPTHGVPAMKSKIDPILEARQKYAYGKQNDYLDHHNMIGWTREGNTAHPNSGLATIMSDGPGGNKWMYVGRNKAGQVWRDITGNRSGTVTINADGWGNFSVNGGSVSIWV

SEQ ID NO: 21110 - protein, 483 aa, Synthetic construct
HHNGTNGTMMQYFEWYLPNDGNHWNRLRSDASNLKDKGITAVWIPPAWKGASQNDVGYGAYDLYDLGEFNQKGTVRTKYGTRNQLQAAVTALKSNGIQVYGDVVMNHKGGADATEWVRAVEVNPSNRNQEVSGDYTIEAWTKFDFPGRGNTHSNFKWRWYHFDGVDWDQSRQLQNRIYKFRGDGKGWDWEVDTENGNYDYLMYADIDMDHPEVVNELRNWGVWYTNTLGLDGFRIDAVKHIKYSFTRDWLTHVRNTTGKNMFAVAEFWKNDIGAIENYLSKTNWNHSVFDVPLHYNLYNASRSGGNYDMRQIFNGTVVQRHPTHAVTFVDNHDSQPEEALESFVEEWFKPLAYALTLTRDQGMPSVFYGDYYGIPTHGVPAMKSKIDPILEARQKYAYGKQNDYLDHHNMIGWTREGNTAHPNSGLATIMSDGPGGNKWMYVGRNKAGQVWRDITGNRSGTVTINADGWGNFSVNGGSVSIWV

SEQ ID NO: 21111 - protein, 483 aa, Synthetic construct
HHNGTNGTMMQYFEWYLPNDGNHWNRLRSDASNLKDKGITAVWIPPAWKGASQNDVGYGAYDLYDLGEFNQKGTVRTKYGTRNQLQAAVTALKSNGIQVYGDVVMNHKGGADATEWVRAVEVNPSNRNQEVSGDYTIEAWTKFDFPGRGNTHSNFKWRWYHFDGVDWDQSRQLQNKIYKFRGDGKEWDWEVDEENGNYDYLMYADIDMDHPEVVNELRNWGVWYTNTLGLDGFRIDAVKHIKYSFTRDWLTHVRNTTGKNMFAVAEFWKNDIGAIENYLSKTNWNHSVFDVPLHYNLYNASRSGGNYDMRQIFNGTVVQRHPTHAVTFVDNHDSQPEEALESFVEEWFKPLAYALTLTRDQGYPSVFYGDYYGIPTHGVPAMKSKIDPILEARQKYAYGKQNDYMDHHNMIGWTREGNTAHPNSGLATIMSDGPGGNKWMYVGRNKAGQVWRDITGNRSGTVTINADGWGNFSVNGGSVSIWV

SEQ ID NO: 21112 - protein, 483 aa, Synthetic construct
HHNGTNGTMMQYFEWYLPNDGNHWNRLRSDASNLKDKGITAVWIPPAWKGASQNDVGYGAYDLYDLGEFNQKGTVRTKYGTRNQLQAAVTALKSNGIQVYGDVVMNHKGGADATEWVRAVEVNPSNRNQEVSGDYTIEAWTKFDFPGRGNTHSNFKWRWYHFDGVDWDQSRQLQNRIYKFRGDGKGWDWEVDTENGNYDYLMYADIDMDHPEVVNELRNWGVWYTNTLGLDGFRIDAVKHIKYSFTRDWLTHVRNTTGKNMFAVAEFWKNDIQAIENYLSKTNWNHSVFDVPLHYNLYNASRSGGNYDMRQIFNGTVVQRHPTHAVTFVDNHDSQPEEALESFVEEWFKPLAYALTLTRDQGYPSVFYGDYYGIPTHGVPAMKSKIDPILEARQKYAYGKQNDYLDHHNMIGWTREGNTAHPNSGLATIMSDGPGGNKWMYVGRNKAGQVWRDITGNRSGTVTINADGWGNFSVNGGSVSIWV

SEQ ID NO: 21113 - protein, 483 aa, Synthetic construct
HHNGTNGTMMQYFEWYLPNDGNHWNRLRSDASNLKDKGITAVWIPPAWKGASQNDVGYGAYDLYDLGEFNQKGTVRTKYGTRNQLQAAVTALKSNGIQVYGDVVMNHKGGADATEWVRAVEVNPSNRNQEVSGDYTIEAWTKFDFPGRGNTHSNFKWRWYHFDGVDWDQSRQLQNRIYKFRGDGKGWTWEVDTENGNYDYLMYADIDMDHPEVVNELRNWGVWYTNTLGLDGFRIDAVKHIKYSFTRDWLTHVRNTTGKNMFAVAEFWKNDIGAIENYLSKTNWNHSVFDVPLHYNLYNASRSGGNYDMRQIFNGTVVQRHPTHAVTFVDNHDSQPEEALESFVEEWFKPLAYALTLTRDQGYPSVFYGDYYGIPTHGVPAMKSKIDPILEARQKYAYGKQNDYLDHHNMIGWTREGNTAHPNSGLATIMSDGPGGNKWMYVGRNKAGQVWRDITGNRSGTVTINADGWGNFSVNGGSVSIWV

SEQ ID NO: 21114 - protein, 483 aa, Synthetic construct
HHNGTNGTMMQYFEWYLPNDGNHWNRLRSDASNLKDKGITAVWIPPAWKGASQNDVGYGAYDLYDLGEFNQKGTVRTKYGTRNQLQAAVTALKSNGIQVYGDVVMNHKGGADATEWVRAVEVNPSNRNQEVSGDYTIEAWTKFDFPGRGNTHSNFKWRWYHFDGVDWDQSRQLQNRIYKFRGDGKGWDWEVDTENGNYDYLMYADIDMDHPEVVNELRNWGVWYTNTLGLDGFRIDAVKHIKYSFTRDWLTHVRNTTGKNMFAVAEFWKNDIGAIENYLSKTNWNHSVFDVPLHYNLYNASRSGGNYDMRQIFNGTVVQRHPTHAVTFVDNHDSQPEEALESFVEEWFKPLAYALTLTRDQGYPSVFYGDYYGIPTHGRPAMKSKIDPILEARQKYAYGKQNDYLDHHNMIGWTREGNTAHPNSGLATIMSDGPGGNKWMYVGRNKAGQVWRDITGNRSGTVTINADGWGNFSVNGGSVSIWV

SEQ ID NO: 21115 - protein, 483 aa, Synthetic construct
HHNGTNGTMMQYFEWYLPNDGNHWNRLRSDASNLKDKGITAVWIPPAWKGASQNDVGYGAYDLYDLGEFNQKGTVRTKYGTRNQLQAAVTALKSNGIQVYGDVVMNHKGGADATEWVRAVEVNPSNRNQEVSGDYTIEAWTKFDFPGRGNTHSNFKWRWDHFDGVDWDQSRQLQNRIYKFRGDGKGWDWEVDTENGNYDYLMYADIDMDHPEVVNELRNWGVWYTNTLGLDGFRIDAVKHIKYSFTRDWLTHVRNTTGKNMFAVAEFWKNDIGAIENYLSKTNWNHSVFDVPLHYNLYNASRSGGNYDMRQIFNGTVVQRHPTHAVTFVDNHDSQPEEALESFVEEWFKPLAYALTLTRDQGYPSVFYGDYYGIPTHGVPAMKSKIDPILEARQKYAYGKQNDYLDHHNMIGWTREGNTAHPNSGLATIMSDGPGGNKWMYVGRNKAGQVWRDITGNRSGTVTINADGWGNFSVNGGSVSIWV

SEQ ID NO: 21116 - protein, 483 aa, Synthetic construct
HHNGTNGTMMQYFEWYLPNDGNHWNRLRSDASNLKDKGITAVWIPPAWKGASQNDVGYGAYDLYDLGEFNQKGTVRTKYGTRNQLQAAVTALKSNGIQVYGDVVMNHKGGADATEWVRAVEVNPSNRNQEVSGDYTIEAWTKFDFPGRGNTHSNFKWRWYHFDGVDWDQSRQLQNRIYKFRGDGKGWDWEVDTENGNYDYLMYADIDMDHPEVVNELRNWGVWYTNTLGLDGFRIDAVKHIKYSFTRDWLTHVRNTTGKNMFAVAEFWKNDIGAIENYLSKTNWNHSVFDVPLHYNLYNASRSGGNYDMRQIFNGTVVQRHPTHAVTFVDNHDSQPEEALESFVEEWFKPLAYALTLTRDQGYPSVFYGDYYGIPTHGVPAMKSKIDPILEARQKYAYGKQNDYLDHHNMIGWTREGNTAHPNSGLATIMSDGPGGNKWMYVGRNKAGQVWRDITGNRSGTVVINADGWGNFSVNGGSVSIWV

SEQ ID NO: 21117 - protein, 483 aa, Synthetic construct
HHNGTNGTMMQYFEWYLPNDGNHWNRLRSDASNLKDKGITAVWIPPAWKGASQNDVGYGAYDLYDLGEFNQKGTVRTKYGTRNQLQAAVTALKSNGIQVYGDVVMNHKGGADATEWVRAVEVNPSNRNQEVSGDTTIEAWTKFDFPGRGNTHSNFKWRWYHFDGVDWDQSRQLQNRIYKFRGDGKGWDWEVDTENGNYDYLMYADIDMDHPEVVNELRNWGVWYTNTLGLDGFRIDAVKHIKYSFTRDWLTHVRNTTGKNMFAVAEFWKNDIGAIENYLSKTNWNHSVFDVPLHYNLYNASRSGGNYDMRQIFNGTVVQRHPTHAVTFVDNHDSQPEEALESFVEEWFKPLAYALTLTRDQGYPSVFYGDYYGIPTHGVPAMKSKIDPILEARQKYAYGKQNDYLDHHNMIGWTREGNTAHPNSGLATIMSDGPGGNKWMYVGRNKAGQVWRDITGNRSGTVTINADGWGNFSVNGGSVSIWV

SEQ ID NO: 21118 - protein, 483 aa, Synthetic construct
HHNGTNGTMMQYFEWYLPNDGNHWNRLRSDASNLKDKGITAVWIPPAWKGASQNDVGYGAYDLYDLGEFNQKGTVRTKYGTRNQLQAAVTALKSNGIQVYGDVVMNHKGGADATEWVRAVEVNPSNRNQEVSGDYTIEAWTKFDFPGRGNTHSNFKWRWYHFDGVDWDQSRQLQNRIYKFRGDGKGWDWEVDTENGNYDYLMYADIDMDHPEVVNELRNWGVWYTNTLGLDGFRIDAVKHIKYSFTRDWLTHVRNTTGKNMFAVAEFWKNDIGAIENYLSKTNWNHSVFDVPLHYNLYNASRSGGNYDMRQIFNGTVVQRHPTHAVTFVDNHDSQPEEALESFVEEWFKPLAYALTLTRDQGYPSVFYGDYYGIPTHGVPAMKSKIDHILEARQKYAYGKQNDYLDHHNMIGWTREGNTAHPNSGLATIMSDGPGGNKWMYVGRNKAGQVWRDITGNRSGTVTINADGWGNFSVNGGSVSIWV

SEQ ID NO: 21119 - protein, 483 aa, Synthetic construct
HHNGTNGTMMQYFEWYLPNDGNHWNRLRSDASNLKDKGITAVWIPPAWKGASQNDVGYGAYDLYDLGEFNQKGTVRTKYGTRNQLQAAVTALKSNGIQVYGDVVMNHKGGADATEWVRAVEVNPSNRNQEVSGDYTIEAWTKFDFPGRGNTHSNFKWRWYHFDGVDWDQSRQLQNRIYKFRGDGKGWDWEVDTENGNYDYLMYADIDMDHPEVVNELRNWGVWYTNTLGLDGFRIDAVKHIKYSFTRDWLTHVRNTTGKNMFAVAEFWKNDIGAIENYLSKTNWNHSVFDVPLHYNLYNASRSGGNYDMRQIFNGTVVQRHPTHAVTFVDNHDSQPEEALESFVEEWFKPLAYALTLTRDQGYPSVFYGDYYGIPTHGVPAMKSKIDPILEARQKYAYGKQNDYLDHHNMIGWTREGNTAHPNSGLATIMSDGHGGNKWMYVGRNKAGQVWRDITGNRSGTVTINADGWGNFSVNGGSVSIWV

SEQ ID NO: 21120 - protein, 483 aa, Synthetic construct
HHNGTNGTMMQYFEWYLPNDGNHWNRLRSDASNLKDKGITAVWIPPAWKGASQNDVGYGAYDLYDLGEFNQKGTVRTKYGTRNQLQAAVTALKSNGIQVYGDVVMNHKGGADATEWVRAVEVNPSNRNQEVSGDYTIEAWTKFDFPGRGNTHSNFKWRWYHFDGVDWDQSRQLQNRIYKFRGDGKGWDWEVDTENGNYDYLMYADIDMDHPEVVNELRNWGVWYTNTLGLDGFRIDAFKHIKYSFTRDWLTHVRNTTGKNMFAVAEFWKNDIGAIENYLSKTNWNHSVFDVPLHYNLYNASRSGGNYDMRQIFNGTVVQRHPTHAVTFVDNHDSQPEEALESFVEEWFKPLAYALTLTRDQGYPSVFYGDYYGIPTHGVPAMKSKIDPILEARQKYAYGKQNDYLDHHNMIGWTREGNTAHPNSGLATIMSDGPGGNKWMYVGRNKAGQVWRDITGNRSGTVTINADGWGNFSVNGGSVSIWV

SEQ ID NO: 21121 - protein, 483 aa, Synthetic construct
HHNGTNGTMMQYFEWYLPNDGNHWNRLRSDASNLKDKGITAVWIPPAWKGASQNDVGYGAYDLYDLGEFNQKGTVRTKYGTRNQLQAAVTALKSNGIQVYGDVVMNHKGGADATEWVRAVEVNPSNRNQEVSGDYTIEAWTKFDFPGRGNTHSNFKWRWYHFDGVDWDQSRQLQNRIYKFRGDGKGWDWEVDTENGNYDYLMYADIDMDHPEVVNELRNWGVWYTNTLGLDGFRIDAVKHIKYSFTRDWLTHVRNTTGKNMFAVAEFWKNDIGAIENYLSKVNWNHSVFDVPLHYNLYNASRSGGNYDMRQIFNGTVVQRHPTHAVTFVDNHDSQPEEALESFVEEWFKPLAYALTLTRDQGYPSVFYGDYYGIPTHGVPAMKSKIDPILEARQKYAYGKQNDYLDHHNMIGWTREGNTAHPNSGLATIMSDGPGGNKWMYVGRNKAGQVWRDITGNRSGTVTINADGWGNFSVNGGSVSIWV

SEQ ID NO: 21122 - protein, 483 aa, Synthetic construct
HHNGTNGTMMQYFEWYLPNDGNHWNRLRSDASNLKDKGITAVWIPPAWKGASQNDVGYGAYDLYDLGEFNQKGTVRTKYGTRNQLQAAVTALKSNGIQVYGDVVMNHKGGADATEWVRAVEVNPSNRNQEVSGDYTIEAWTKFDFPGRGNTHSNFKWRWYHFDGVDWDQSRQLQNRIYKFRGDGKGWDWEVDTENGNYDYLMYADIDMDHPEVVNELRNWGVWYTNTLGLDGFRIDAVKHIKYSFTRDWLTHVRNTTGKNMFAVAEFWKNDIGAIENYLSETNWNHSVFDVPLHYNLYNASRSGGNYDMRQIFNGTVVQRHPTHAVTFVDNHDSQPEEALESFVEEWFKPLAYALTLTRDQGYPSVFYGDYYGIPTHGVPAMKSKIDPILEARQKYAYGKQNDYLDHHNMIGWTREGNTAHPNSGLATIMSDGPGGNKWMYVGRNKAGQVWRDITGNRSGTVTINADGWGNFSVNGGSVSIWV

SEQ ID NO: 21123 - protein, 483 aa, Synthetic construct
HHNGTNGTMMQYFEWYLPNDGNHWNRLRSDASNLKDKGITAVWIPPAWKGASQNDVGYGAYDLYDLGEFNQKGTVRTKYGTRNQLQAAVTALKSNGIQVYGDVVMNHKGGADATEWVRAVEVNPSNRNQEVSGDYTIEAWTKFDFPGRGNTHSNFKWRWWHFDGVDWDQSRQLQNRIYKFRGDGKEWDWEVDEENGNYDYLMYADYDMDHPEVVNELRNWGVWYTNTLGLDGFRIDAVKHIKYSFTRDWLTHVRNTTGKNMFAVAEFWKNDIGAIENYLSKTNWNHSVFDVPLHYNLYNASRSGGNYDMRQIFNGTVVQRHPTHAVTFVDNHDSQPEEALESFVEEWFKPLAYALTLTRDQGYPSVFYGDYYGIPTHGVPAMKSKIDPILEARQKYAYGKQNDYMDHHNMIGWTREGNTAHPNSGLATIMSDGPGGNKWMYVGRNKAGQVWRDITGNRSGTVTINADGWGNFSVNGGSVSIWV

SEQ ID NO: 21124 - protein, 483 aa, Synthetic construct
HHNGTNHTMMQYFEWYLPNDGNHWNRLRSDASNLKDKGITAVWIPPAWKGASQNDVGYGAYDLYDLGEFNQKGTVRTKYGTRNQLQAAVTALKSNGIQVYGDVVMNHKGGADATEWVRAVEVNPSNRNQEVSGDYTIEAWTKFDFPGRGNTHSNFKWRWYHFDGVDWDQSRQLQNRIYKFRGDGKGWDWEVDTENGNYDYLMYADIDMDHPEVVNELRNWGVWYTNTLGLDGFRIDAVKHIKYSFTRDWLTHVRNTTGKNMFAVAEFWKNDIGAIENYLSKTNWNHSVFDVPLHYNLYNASRSGGNYDMRQIFNGTVVQRHPTHAVTFVDNHDSQPEEALESFVEEWFKPLAYALTLTRDQGYPSVFYGDYYGIPTHGVPAMKSKIDPILEARQKYAYGKQNDYLDHHNMIGWTREGNTAHPNSGLATIMSDGPGGNKWMYVGRNKAGQVWRDITGNRSGTVTINADGWGNFSVNGGSVSIWV

SEQ ID NO: 21125 - protein, 483 aa, Synthetic construct
HHNGTNGTMMQYFEWYLPNDGNHWNRLRSDASNLKDKGITAVWIPPAWKGASQNDVGYGAYDLYDLGEFNQKGTVRTKYGTRNQLQAAVTALKSNGIQVYGDVVMNHKGGADATEWVRAVEVNPRNRNQEVSGDYTIEAWTKFDFPGRGNTHSNFKWRWYHFDGVDWDQSRQLQNRIYKFRGDGKGWDWEVDTENGNYDYLMYADIDMDHPEVVNELRNWGVWYTNTLGLDGFRIDAVKHIKYSFTRDWLTHVRNTTGKNMFAVAEFWKNDIGAIRNYLSKTNWNHSVFDVPLHYNLYNASRSGGNYDMRQIFNGTVVQRHPTHAVTFVDNHDSQPEEALESFVEEWFKPLAYALTLTRDQGYPSVFYGDYYGIPTHGVPAMKSKIDPILEARQKYAYGKQNDYLDHHNMIGWTREGNTAHPNSGLATIMSDGPGGNKWMYVGRNKAGQVWRDITGNRSGTVTINADGWGNFSVNGGSVSIWV

SEQ ID NO: 21126 - protein, 483 aa, Synthetic construct
HHNGTNGTMMQYFEWYLPNDGNHWNRLRSDASNLKDKGITAVWIPPAWKGASQNDVGYGAYDLYDLGEFNQKGTVRTKYGTRNQLQDAVTALKSNGIQVYGDVVMNHKGGADATEWVRAVEVNPSNRNQEVSGDYTIEAWTKFDFPGRGNTHSNFKWRWYHFDGVDWDQSRQLQNRIYKFRGDGKEWDWEVDTENGNYDYLMYADIDMDHPEVVNELRNWGVWYTNTLGLDGFRIDAVKHIKYSFTRDWLTHVRNTTGKNMFAVAEFWKNDIGAIENYLSKTNWNHSVFDVPLHYNLYNASRSGGNYDMRQIFNKTVVQRHPTHAVTFVDNHDSQPEEALESFVEEWFKPLAYALTLTRDQGYPSVFYGDYYGIPTHGVPAMKSKIDPILEARQKYAYGKQNDYLDHHNMIGWTREGNTKHPNSGLATIMSDGPGGNKWMYVGRNKAGQVWRDITGNRSGTVTINADGWGNFSVNGGSVSIWV

SEQ ID NO: 21127 - protein, 483 aa, Synthetic construct
HHNGTNGTMMQYFEWYLPNDGNHWNRLRSDASNLKDKGITAVWIPPAWKGASQNDVGYGAYDLYDLGEFNQKGTVRTKYGTREQLQAAVTALKSNGIQVYGDVVMNHKGGADATEWVRAVEVNPSNRNQEVSGDYTIEAWTKFDFPGRGNTHSNFKWRWYHFDGVDWDQSRQLQNRIYKFEGDGKGWDWEVDTENGNYDYLMYADIDMDHPEVVNELRNWGVWYTNTLGLDGFRIDAVKHIKYSFTRDWLTHVRNTTGKNMFAVAEFWKNDIGAIENYLSKTNWNHSVFDVPLHYNLYNASRSGGNYDMRQIFNGTVVQRHPTHAVTFVDNHDSQPEEALESFVEEWFKPLAYALTLTRDQGYPSVFYGDYYGIPTHGVPAMKSKIDPILEARQKYAYGKQNDYLDHHNMIGWTREGNTAHPNSGLATIMSDGPGGNKWMYVGRNKAGQVWRDITGNRSGTVTINADGWGNFSVNGGSVSIWV

SEQ ID NO: 21128 - protein, 483 aa, Synthetic construct
HHNGTNGTMMQYFEWYLPNDGNHWNRLRSDASNLKDKGITAVWIPPAWKGASQNDVGYGAYDLYDLGEFNQKGTVRTKYGTRNQLQAAVTALKSNGIQVYGDVVMNHKGGADATEWVRAVEVNPSNRNQEVSGDYTIEAWTKFDFPGRGNTHSNFKWRWYHFDGVDWDQSRQLQNRIYKFRGDGKGWDWEMDTENGNYDYLMYADIDMDHPEVVNELRNWGVWYTNTLGLDGFRIDAVKHIKYSFTRDWLTHVRNTTGKNMFAVAEFWKNDIGAIENYLSKTNWNHSVFDVPLHYNLYNASRSGGNYDMRQIFNGTVVQRHPTHAVTFVDNHDSQPEEALESFVEEWFKPLAYALTLTRDQGYPSVFYGDYYGIPTHGVPAMKSKIDPILEARQKYAYGKQNDYLDHHNMIGWTREGNTAHPNSGLATIMSDGPGGNKWMYVGRNKAGQVWRDITGNRSGTVTINADGWGNFSVNGGSVSIWV

SEQ ID NO: 21129 - protein, 483 aa, Synthetic construct
HHNGTNGTMMQYFEWYLPNDGNHWNRLRSDASNLKDKGITAVWIPPAWKGASQNDVGYGAYDLYDLGEFNQKGTVRTKYGTRNQLQAAVTALKSNGIQVYGDVVMNHKGGADATEWVRAVEVNPSNRNQEVSGDYTIEAWTKFDFPGRGNTHSNFKWRWYHFDGVDWDQSRQLQNRIYKFRGDGKGWDWEVDTENGNYDYLMYADIDMDHPEVVNELRNWGVWYTNTLGLDGFRIDAVKHIKYSFTRDWLTHVRNTTGKNMFAVAEFWKQDIGAIENYLSKTNWNHSVFDVPLHYNLYNASRSGGNYDMRQIFNGTVVQRHPTHAVTFVDNHDSQPEEALESFVEEWFKPLAYALTLTRDQGYPSVFYGDYYGIPTHGVPAMKSKIDPILEARQKYAYGKQNDYLDHHNMIGWTREGNTAHPNSGLATIMSDGPGGNKWMYVGRNKAGQVWRDITGNRSGTVTINADGWGNFSVNGGSVSIWV

SEQ ID NO: 21130 - protein, 483 aa, Synthetic construct
HHNGTNGTMMQYFEWYLPNDGNHWNRLRSDASNLKDKGITAVWIPPAWKGASQNDVGYGAYDLYDLGEFNQKGTVRTKYGTRNQLQAAVTALKSAGIQVYGDVVMNHKGGADATEWVRAVEVNPSNRNQEVSGDYTIEAWTKFDFPGRGNTHSNFKWRWYHFDGVDWDQSRQLQNRIYKFRGDGKGWDWEVDTENGNYDYLMYADIDMDHPEVVNELRNWGVWYTNTLGLDGFRIDAVKHIKYSFTRDWLTHVRNTTGKNMFAVAEFWKNDIGAIENYLSKTNWNHSVFDVPLHYNLYNASRSGGNYDMRQIFNGTVVQRHPTHAVTFVDNHDSQPEEALESFVEEWFKPLAYALTLTRDQGYPSVFYGDYYGIPTHGVPAMKSKIDPILEARQKYAYGKQNDYLDHHNMIGWTREGNTAHPNSGLATIMSDGPGGNKWMYVGRNKAGQVWRDITGNRSGTVTINADGWGNFSVNGGSVSIWV

SEQ ID NO: 21131 - protein, 483 aa, Synthetic construct
HHNGTNGTMMQYFEWYLPNDGNHWNRLRSDASNLKDKGITAVWIPPAWKGASQNDVGYGAYDLYDLGEFNQKGTVRTKYGTCNQLQAAVTALKSNGIQVYGDVVMNHKGGADATEWVRAVEVNPSNRNQEVSGDYTIEAWTKFDFPGRGNTHSNFKWRWYHFDGVDWDQSRQLQNRIYKFRGDGKGWDWEVDTENGNYDYLMYADIDMDHPEVVNELRNWGVWYTNTLGLDGFRIDAVKHIKYSFTRDWLTHVRNTTGKNMFAVAEFWKNDIGAIENYLSKTNWNHSVFDVPLHYNLYNASRSGGNYDMRQIFNGTVVQRHPTHAVTFVDNHDSQPEEALESFVEEWFKPLAYALTLTRDQGYPSVFYGDYYGIPTHGVPAMKSKIDPILEARQKYAYGKQNDYLDHHNMIGWTREGNTAHPNSGLATIMSDGPGGNKWMYVGRNKAGQVWRDITGNRSGTVTINADGWGNFSVNGGSVSIWV

SEQ ID NO: 21132 - protein, 483 aa, Synthetic construct
HHNGTNGTMMQYFEWYLPNDGNHWNRLRSDASNLKDKGITAVWIPPAWKGASQNDVGYGAYDLYDLGEFNQKGTVRTKYGTRNQLQAAVTALKSNGIQVYGDVVMNHKGGADATEWVRAVEVNPKNRNQEVSGDYTIEAWTKFDFPGRGNTHSNFKWRWYHFDGVDWDQSRQLQNRIYKFRGDGKGWDWEVDTENGNYDYLMYADIDMDHPEVVNELRNWGVWYTNTLGLDGFRIDAVKHIKYSFTRDWLTHVRNTTGKNMFAVAEFWKNDIGAIENYLSKTNWNHSVFDVPLHYNLYNASRSGGNYDMRQIFNGTVVQRHPTHAVTFVDNHDSQPEEALESFVEEWFKPLAYALTLTRDQGYPSVFYGDYYGIPTHGVPAMKSKIDPILEARQKYAYGKQNDYLDHHNMIGWTREGNTAHPNSGLATIMSDGPGGNKWMYVGRNKAGQVWRDITGNRSGLVTINADGWGNFSVNGGSVSIWV

SEQ ID NO: 21133 - protein, 483 aa, Synthetic construct
HHNGTNGTMMQYFEWYLPNDGNHWHRLRSDASNLKDKGITAVWIPPAWKGASQNDVGYGAYDLYDLGEFNQKGTVRTKYGTRNQLQAAVTALKSNGIQVYGDVVMNHKGGADATEWVRAVEVNPSNRNQEVSGDYTIEAWTKFDFPGRGNTHSNFKWRWYHFDGVDWDQSRQLQNRIYKFRGDGKEWDWEVDEENGNYDYLMYADYDMDHPEVVNELRNWGVWYTNTLGLDGFRIDAVKHIKYSFTRDWLTHVRNTTGKNMFAVAEFWKNDIGAIENYLSKTNWNHSVFDVPLHYNLYNASRSGGNYDMRQIFNGTVVQRHPTHAVTFVDNHDSQPEEALESFVEEWFKPLAYALTLTRDQGYPSVFYGDYYGIPTHGVPAMKSKIDPILEARQKYAYGKQNDYMDHHNMIGWTREGNTAHPNSGLATIMSDGPGGNKWMYVGRNKAGQVWRDITGNRSGTVTINADGWGNFSVNGGSVSIWV

SEQ ID NO: 21134 - protein, 483 aa, Synthetic construct
HHNGTNGTMMQYFEWYLPNDGNHWNRLRSDASNLKDKGITAVWIPPAWKGASQNDVGYGAYDLYDLGEFNQKGTVRTKYGTRNQLQAAVTALKSNGIQVYGDVVMNHKGGADATEWVRAVEVNPSNRNQEVSGDYTIEAWTKFDFPGRGNTHSNFKWRWYHFDGVDWDQSRQLQNKIYKFRGDGKEWDWEVDEENGNYDYLMYADYDMDHPEVVNELRNWGVWYTNTLGLDGFRIDAVKHIKYSFTRDWLTHVRNTTGKNMFAVAEFWKNDIGAIENYLSKTNWNHSVFDVPLHYNLYNASRSGGNYDMRQIFNGTVVQRHPTHAVTFVDNHDSQPEEALESFVEEWFKPLAYALTLTRDQGYPSVFYGDYYGIPTHGVPAMKSKIDPILEARQKYAYGKQNDYMDHHNMIGWTREGNTAHPNSGLATIMSDGPGGNKWMYVGRNKAGQVWRDITGNRSGTVTINADGWGNFSVNGGSVSIWV

SEQ ID NO: 21135 - protein, 483 aa, Synthetic construct
HHNGTNGTMMQYFEWYLPNDGNHWNRLRSDASNLKDKGITAVWIPPAWKGASQNDVGYGAYDLYDLGEFNQKGTVRTKYGTRNQLQAAVTALKSNGIQVYGDVVMNHKGGADATEWVRASEVNPSNRNQEVSGDYTIEAWTKFDFPGRGNTHSNFKWRWYHFDGVDWDQSRQLQNRIYKFRGDGKGWDWEVDTENGNYDYLMYADIDMDHPEVVNELRNWGVWYTNTLGLDGFRIDAVKHIKYSFTRDWLTHVRNTTGKNMFAVAEFWKNDIGAIENYLSKTNWNHSVFDVPLHYNLYNASRSGGNYDMRQIFNGTVVQRHPTHAVTFVDNHDSQPEEALESFVEEWFKPLAYALTLTRDQGYPSVFYGDYYGIPTHGVPAMKSKIDPILEARQKYAYGKQNDYLDHHNMIGWTREGNTAHPNSGLATIMSDGPGGNKWMYVGRNKAGQVWRDITGNRSGTVTINADGWGNFSVNGGSVSIWV

SEQ ID NO: 21136 - protein, 483 aa, Synthetic construct
HHNGTNGTMMQYFEWYLPNDGNHWNRLRSDASNLKDKGITAVWIPPAWKGASQNDVGYGAYDLYDLGEFNQKGTVRTKYGTRNQLQAAVTALKSNGIQVYGDVVMNHKGGADATEWVRAVEVNPSNRNQEVSGDYTIEAWTKFDFPGRGNTHSNFKWRWYHFDGVDWDQSRQLQNRIFKFRGDGKGWDWEVDTENGNYDYLMYADIDMDHPEVVNELRNWGVWYTNTLGLDGFRIDAVKHIKYSFTRDWLTHVRNTTGKNMFAVAEFWKNDIGAIENYLSKTNWNHSVFDVPLHYNLYNASRSGGNYDMRQIFNGTVVQRHPTHAVTFVDNHDSQPEEALESFVEEWFKPLAYALTLTRDQGYPSVFYGDYYGIPTHGVPAMKSKIDPILEARQKYAYGKQNDYLDHHNMIGWTREGNTAHPNSGLATIMSDGPGGNKWMYVGRNKAGQVWRDITGNRSGTVTINADGWGNFSVNGGSVSIWV

SEQ ID NO: 21137 - protein, 483 aa, Bacillus sp.
HHNGTNGTMMQYFEWYLPNDGNHWNRLRSDASNLKDKGITAVWIPPAWKGASQNDVGYGAYDLYDLGEFNQKGTVRTKYGTRNQLQAAVTALKSNGIQVYGDVVMNHKGGADATEWVRAVEVNPSNRNQEVSGDYTIEAWTKFDFPGRGNTHSNFKWRWYHFDGVDWDQSRQLQNRIYKFRGDGKGWDWEVDTENGNYDYLMYADIDMDHPEVVNELRNWGVWYTNTLGLDGFRIDAVKHIKYSFTRDWLTHVRNTTGKNMFAVAEFWKNDIGAIENYLSKTNWNHSVFDVPLHYNLYNASRSGGNYDMRQIFNGTVVQRHPTHAVTFVDNHDSQPEEALESFVEEWFKPLACALTLTRDQGYPSVFYGDYYGIPTHGVPAMKSKIDPILEARQKYAYGKQNDYLDHHNMIGWTREGNTAHPNSGLATIMSDGPGGNKWMYVGRNKAGQVWRDITGNRSGTVTINADGWGNFSVNGGSVSIWV

SEQ ID NO: 21138 - protein, 483 aa, Synthetic construct
HHNGTNGTMMQYFEWYLPNDGNHWNRLRSDASNLKDKGITAVWIPPAWKGASQNDVGYGAYDLYDLGEFNQKGTHRTKYGTRNQLQAAVTALKSNGIQVYGDVVMNHKGGADATEWVRAVEVNPSNRNQEVSGDYTIEAWTKFDFPGRGNTHSNFKWRWYHFDGVDWDQSRQLQNRIYKFRGDGKGWDWEVDTENGNYDYLMYADIDMDHPEVVNELRNWGVWYTNTLGLDGFRIDAVKHIKYSFTRDWLTHVRNTTGKNMFAVAEFWKNDIGAIENYLSKTNWNHSVFDVPLHYNLYNASRSGGNYDMRQIFNGTVVQRHPTHAVTFVDNHDSQPEEALESFVEEWFKPLAYALTLTRDQGYPSVFYGDYYGIPTHGVPAMKSKIDPILEARQKYAYGKQNDYLDHHNMIGWTREGNTAHPNSGLATIMSDGPGGNKWMYVGRNKAGQVWRDITGNRSGTVTINADGWGNFSVNGGSVSIWV

SEQ ID NO: 21139 - protein, 483 aa, Synthetic construct
HHNGTNGTMMQYFEWYLPNDGNHWNRLRSDASNLKDKGITAVWIPPAWKGASQNDVGYGAYDLYDLGEFNQKGTVRTKYGTRNQLQAAVTALKSNGIQVYGDVVMNHKGGADATEWVRAVEVNPSNRNQEVSGDYTIEAWTKFDFPGRGNTHSNFKWRWYHFDGVDWDQSRQLQNRIYKFRGDGKGWDWEVDTENGNYDYLMYADIDMDHPEVVNELRNWGVWYTNTLGLDGFRIDAVKHIKYSFTRDWLTHVRNTTGKNMFAVAEFFKNDIGAIENYLSKTNWNHSVFDVPLHYNLYNASRSGGNYDMRQIFNGTVVQRHPTHAVTFVDNHDSQPEEALESFVEEWFKPLAYALTLTRDQGYPSVFYGDYYGIPTHGVPAMKSKIDPILEARQKYAYGKQNDYLDHHNMIGWTREGNTAHPNSGLATIMSDGPGGNKWMYVGRNKAGQVWRDITGNRSGTVTINADGWGNFSVNGGSVSIWV

SEQ ID NO: 21140 - protein, 483 aa, Synthetic construct
HHNGTNGTMMQYFEWYLPNDGNHWNRLRSDASLLKDKGITAVWIPPAWKGASQNDVGYGAYDLYDLGEFNQKGTVRTKYGTRNQLQAAVTALKSNGIQVYGDVVMNHKGGADATEWVRAVEVNPSNRNQEVSGDYTIEAWTKFDFPGRGNTHSNFKWRWYHFDGVDWDQSRQLQNRIYKFRGDGKGWDWEVDTENGNYDYLMYADIDMDHPEVVNELRNWGVWYTNTLGLDGFRIDAVKHIKYSFTRDWLTHVRNTTGKNMFAVAEFWKNDIGAIENYLSKTNWNHSVFDVPLHYNLYNASRSGGNYDMRQIFNGTVVQRHPTHAVTFVDNHDSQPEEALESFVEEWFKPLAYALTLTRDQGYPSVFYGDYYGIPTHGVPAMKSKIDPILEARQKYAYGKQNDYLDHHNMIGWTREGNTAHPNSGLATIMSDGPGGNKWMYVGRNKAGQVWRDITGNRSGTVTINADGWGNFSVNGGSVSIWV

SEQ ID NO: 21141 - protein, 483 aa, Synthetic construct
HHNGTNGTMMQYFEWYLPNDGNHWNRLRSDASNLKDKGITAVWIPPAWKGASQNDVGYGAYDLYDLGEFNQKGTVRTKYGTRNQLQAAVTALKSNGIQVYGDVVMNHKGGADATEWVRAVEVNPSNRNQEVSGDYTIEAWTKFDFPGRGNTHSNFKWRWYHFDGVDWDQSRQLQNRIYKFRGDGKGWDWEVDTENGNYDYLMYADIDMDHPEVVNELRNWGVWYTNTLGLDGFRIDAVKHIKYSFTRDWLTHVRNTTGKNMFAVAEFWKNDIGAIENYLSKTNWNHSVFDVPLHYNLYNASRSGGNYDMRQIFSGTVVQRHPTHAVTFVDNHDSQPEEALESFVEEWFKPLAYALTLTRDQGYPSVFYGDYYGIPTHGVPAMKSKIDPILEARQKYAYGKQNDYLDHHNMIGWTREGNTAHPNSGLATIMSDGPGGNKWMYVGRNKAGQVWRDITGNRSGTVTINADGWGNFSVNGGSVSIWV

SEQ ID NO: 21142 - protein, 483 aa, Synthetic construct
HHNGTNGTMMQYFEWYLPNDGNHWNRLRSDASNLKDKGITAVWIPPAWKGASQNDVGYGAYDLYDLGEFNQKGTVRTKYGTRNQLQAAVTALKSNGIQVYGDVVMNHKGGADATEWVRAVEVNPSNRNQEVSGDYTIEAWTKFDFPGRGNTHSNFKWRWYHFDGVDWDQSRQLQNRIYKFRGDGKGWDWEVDTENGNYDYLMYADIDMDHPEVVNELRNWGVWYTNTLGLDGFRIDAVKHIKYSFTRDWLTHVRNTTGKNMFAVAEFWKNDIGAIENYLSKTNWNHSVFDVPLHYNLYNASRSGGNYDMRQIFNGTVVQRHPTHAVTFVDNHDSQPEEALESFVEEWFKPLAYALTLTRDQMYPSVFYGDYYGIPTHGVPAMKSKIDPILEARQKYAYGKQNDYLDHHNMIGWTREGNTAHPNSGLATIMSDGPGGNKWMYVGRNKAGQVWRDITGNRSGTVTINADGWGNFSVNGGSVSIWV

SEQ ID NO: 21143 - protein, 483 aa, Synthetic construct
HHNGTNGTMMQYFEWYLPNDGNHWNRLRSDASNLKDKGITAVWIPPAWKGASQNDVGYGAYDLYDLGEFNQKGTVRTKYGTRNQLQAAVTALKSNGIQVYGDVVMNHKGGADATEWVRAVEVNPSNRNQEVSGDYTIEAWTKFDFPGRGNTHSNFKWRWYHFDGVDWDQSRQLQNRKYKFRGDGKGWDWEVDTENGNYDYLMYADIDMDHPEVVNELRNWGVWYTNTLGLDGFRIDAVKHIKYSFTRDWLTHVRNTTGKNMFAVAEFWKNDIGAIENYLSKTNWNHSVFDVPLHYNLYNASRSGGNYDMRQIFNGTVVQRHPTHAVTFVDNHDSQPEEALESFVEEWFKPLAYALTLTRDQGYPSVFYGDYYGIPTHGVPAMKSKIDPILEARQKYAYGKQNDYLDHHNMIGWTREGNTAHPNSGLATIMSDGPGGNKWMYVGRNKAGQVWRDITGNRSGTVTINADGWGNFSVNGGSVSIWV

SEQ ID NO: 21144 - protein, 483 aa, Synthetic construct
HHNGTNGTMMQYFEWYLPNDGNHWNRLRSDASNLKDKGITAVWIPPAWKGASQNDVGYGAYDLYDLGEFNQKGTVRTKYGTRNQLQAAVTALKSNGIQVYGDVVMNHKGGADATEWVRSVEVNPSNRNQEVSGDYTIEAWTKFDFPGRGNTHSNFKWRWYHFDGVDWDQSRQLQNRIYKFRGDGKGWDWEVDTENGNYDYLMYADIDMDHPEVVNELRNWGVWYTNTLGLDGFRIDAVKHIKYSFTRDWLTHVRNTTGKNMFAVAEFWKNDIGAIENYLSKTNWNHSVFDVPLHYNLYNASRSGGNYDMRQIFNGTVVQRHPTHAVTFVDNHDSQPEEALESFVEEWFKPLAYALTLTRDQGYPSVFYGDYYGIPTHGVPAMKSKIDPILEARQKYAYGKQNDYLDHHNMIGWTREGNTAHPNSGLATIMSDGPGGNKWMYVGRNKAGQVWRDITGNRSGTVTINADGWGNFSVNGGSVSIWV

SEQ ID NO: 21145 - protein, 483 aa, Synthetic construct
HHNGTNGTMMQYFEWYLPNDGNHWNRLRSDASNLKDKGITAVWIPPAWKGASQNDVGYGAYDLYDLGEFNQKGTVRTKYGTRNQLQAAVTALKSNGIQVYGDVVMNHKGGADATEWVRAVEVNPSNRNQEVSGDYTIEAWTKFDFPGRGNTHSNFKWRWYHFDGVDWDQSRQLQNRIYKFRGDGKGWDWEVDTENGNYDYLMYADIDMDHPEVVNELRNWGVWYTNTLGLDGFRIDAVKHIKYSFTRDWLTHVRNTTGKNMFAVAEFWKNDIGAIENYASKTNWNHSVFDVPLHYNLYNASRSGGNYDMRQIFNGTVVQRHPTHAVTFVDNHDSQPEEALESFVEEWFKPLAYALTLTRDQGYPSVFYGDYYGIPTHGVPAMKSKIDPILEARQKYAYGKQNDYLDHHNMIGWTREGNTAHPNSGLATIMSDGPGGNKWMYVGRNKAGQVWRDITGNRSGTVTINADGWGNFSVNGGSVSIWV

SEQ ID NO: 21146 - protein, 483 aa, Synthetic construct
HHNGTNGTMMQYFEWYLPNDGNHWNRLRSDASNLKDKGITAVWIPPAWKGASQNDVGYGAYDLYDLGEFNQKGTVRTKYGTRNQLQAAVTALKSNGIQVYGDVVMNHKGGADATEWVRAVEVNPSNRNQEVSGDYTIEAWTKFDFPGRGNTHSNFKWRWYHFDGVDWDQSRQLQNRWYKFRGDGKGWDWEVDTENGNYDYLMYADIDMDHPEVVNELRNWGVWYTNTLGLDGFRIDAVKHIKYSFTRDWLTHVRNTTGKNMFAVAEFWKNDIGAIENYLSKTNWNHSVFDVPLHYNLYNASRSGGNYDMRQIFNGTVVQRHPTHAVTFVDNHDSQPEEALESFVEEWFKPLAYALTLTRDQGYPSVFYGDYYGIPTHGVPAMKSKIDPILEARQKYAYGKQNDYLDHHNMIGWTREGNTAHPNSGLATIMSDGPGGNKWMYVGRNKAGQVWRDITGNRSGTVTINADGWGNFSVNGGSVSIWV

SEQ ID NO: 21147 - protein, 483 aa, Synthetic construct
HHNGTNGTMMQYFEWYLPNDGNHWNRLRSDASNLKDKGITAVWIPPAWKGASQNDVGYGAYDLYDLGEFNQKGTVRTKYGTRNQLQAAVTALKSNGIQVYGDVVMNHKGGADATEWVRAVEVNPSNRNQEVSGDYTIEAWTKFDFPGRGNTHSNFKWRWEHFDGVDWDQSRQLQNRIYKFRGDGKGWDWEVDTENGNYDYLMYADIDMDHPEVVNELRNWGVWYTNTLGLDGFRIDAVKHIKYSFTRDWLTHVRNTTGKNMFAVAEFWKNDIGAIENYLSKTNWNHSVFDVPLHYNLYNASRSGGNYDMRQIFNGTVVQRHPTHAVTFVDNHDSQPEEALESFVEEWFKPLAYALTLTRDQGYPSVFYGDYYGIPTHGVPAMKSKIDPILEARQKYAYGKQNDYLDHHNMIGWTREGNTAHPNSGLATIMSDGPGGNKWMYVGRNKAGQVWRDITGNRSGTVTINADGWGNFSVNGGSVSIWV

SEQ ID NO: 21148 - protein, 483 aa, Synthetic construct
HHNGTNGTMMQYFEWYLPNDGNHWNRLRSDASNLKDKGITAVWIPPAWKGASQNDVGYGAYDLYDLGEFNQKGTVRTKYGTRNQLQAAVTALKSNGIQVYGDVVMNHKGGADATEWVRAVEVNPSNRNQEVSGDYTIEAWTKFDFPGRGNTHSNFKWRWYHFDGVDWDDSRQLQNRIYKFRGDGKGWDWEVDTENGNYDYLMYADIDMDHPEVVNELRNWGVWYTNTLGLDGFRIDAVKHIKYSFTRDWLTHVRNTTGKNMFAVAEFWKNDIGAIENYLSKTNWNHSVFDVPLHYNLYNASRSGGNYDMRQIFNGTVVQRHPTHAVTFVDNHDSQPEEALESFVEEWFKPLAYALTLTRDQGYPSVFYGDYYGIPTHGVPAMKSKIDPILEARQKYAYGKQNDYLDHHNMIGWTREGNTAHPNSGLATIMSDGPGGNKWMYVGRNKAGQVWRDITGNRSGTVTINADGWGNFSVNGGSVSIWV

SEQ ID NO: 21149 - protein, 483 aa, Synthetic construct
HHNGTNGTMMQYFEWYLPNDGNHWNRLRSDASNLKDKGITAVWIPPAWKGASQNDVGYGAYDLYDLGEFNQKGTVRTKYGTRNQLQAAVTALKSNGIQVYGDVVMNHKGGADATEWVRAVEVNPSNRNQEVSGDYTIEAWTKFDFPGRGNTHSNFKWRWYHFDGVDWDQSRQLQNRIYKFRGDGKGWDWEVDTENGNYDYLMYADIDMDHPEVVNELRNWGVWYTNTLGLDGFRIDAVKHIKYSFTRDWLTHVRNTTGKNMFAVAEFWKNDIGAIENYLSKTNWNHSVFDVPLHYNLYNASRSGGNYDMRQIFNGTVVQRHPTHAVTFVDNHDSQPEEALESFVEEWFKPLAYALTLTRDQGYPSVFFGDYYGIPTHGVPAMKSKIDPILEARQKYAYGKQNDYLDHHNMIGWTREGNTAHPNSGLATIMSDGPGGNKWMYVGRNKAGQVWRDITGNRSGTVTINADGWGNFSVNGGSVSIWV

SEQ ID NO: 21150 - protein, 483 aa, Synthetic construct
HHNGTNGTMMQYFEWYLPNDGNHWNRLRSDASNLKDKGITAVWIPPAWKGASQNDVGYGAYDLYDLGEFNQKGTVRTKYGTRNQLQAAVTALKSNGIQVYGDVVMNHKGGADATEWVRAVEVNPSNRNQEVSGDYTIEAWTKFDFPGRGNTHSNFKWRWYHFDGVDWDQSRQLQNRIYKFRGDGKGWDWEVDTENGNYDYLMYADIDMDHPEVVNELRNWGVWYTNTLGLDGFRIDAVKHIKYSFTRDWLTHVRNTTGKNMFAVAEFWKNDIGAIENYLSKTNWNHSVFDVPLHYNLYNASRSGGNYDMRQIFNGTVVQRHPTHAVTFVDNHDSQPEEALESFVEEWFKPLAYALTLTRDQGYPSVFYGDYYGIPTHGVPAMKSKIDKILEARQKYAYGKQNDYLDHHNMIGWTREGNTAHPNSGLATIMSDGPGGNKWMYVGRNKAGQVWRDITGNRSGTVTINADGWGNFSVNGGSVSIWV

SEQ ID NO: 21151 - protein, 483 aa, Synthetic construct
HHNGTNGTMMQYFEWYLPNDGNHWNRLRSDASNLKDKGITCVWIPPAWKGASQNDVGYGAYDLYDLGEFNQKGTVRTKYGTRNQLQAAVTALKSNGIQVYGDVVMNHKGGADATEWVRAVEVNPSNRNQEVSGDYTIEAWTKFDFPGRGNTHSNFKWRWYHFDGVDWDQSRQLQNRIYKFRGDGKGWDWEVDTENGNYDYLMYADIDMDHPEVVNELRNWGVWYTNTLGLDGFRIDAVKHIKYSFTRDWLTHVRNTTGKNMFAVAEFWKNDIGAIENYLSKTNWNHSVFDVPLHYNLYNASRSGGNYDMRQIFNGTVVQRHPTHAVTFVDNHDSQPEEALESFVEEWFKPLAYALTLTRDQGYPSVFYGDYYGIPTHGVPAMKSKIDPILEARQKYAYGKQNDYLDHHNMIGWTREGNTAHPNSGLATIMSDGPGGNKWMYVGRNKAGQVWRDITGNRSGTVTINADGWGNFSVNGGSVSIWV

SEQ ID NO: 21152 - protein, 483 aa, Synthetic construct
HHNGTNGTMMQYFEWYLPNDGNHWNRLRSDASNLKDKGITAVWIPPAWKGASQNDVGYGAYDLYDLGEFNQKGTVRTKYGTRNQLQAAVTALKSNGIQVYGDVVMNHKGGADATEWVRAVEVNPSNRNQEVSGDYEIEAWTKFDFPGRGNTHSNFKWRWYHFDGVDWDQSRQLQNRIYKFRGDGKGWDWEVDTENGNYDYLMYADIDMDHPEVVNELRNWGVWYTNTLGLDGFRIDAVKHIKYSFTRDWLTHVRNTTGKNMFAVAEFWKNDIGAIENYLSKTNWNHSVFDVPLHYNLYNASRSGGNYDMRQIFNGTVVQRHPTHAVTFVDNHDSQPEEALESFVEEWFKPLAYALTLTRDQGYPSVFYGDYYGIPTHGVPAMKSKIDPILEARQKYAYGKQNDYLDHHNMIGWTREGNTAHPNSGLATIMSDGPGGNKWMYVGRNKAGQVWRDITGNRSGTVTINADGWGNFSVNGGSVSIWV

SEQ ID NO: 21153 - protein, 483 aa, Synthetic construct
HHNGTNGTMMQYFEWYLPNDGNHWNRLRSDASNLKDKGITAVWIPPAWKGASQNDVGYGAYDLYDLGEFNQKGTVRTKYGTRNQLQAAVTALKSNGIQVYGDVVMNHKGGADATEWVRAVEVNPSNRNQEVSGDYTIEAWTKFDFPGRGNTHSNFKWRWYHFDGVDWDQSRQLHNRIYKFRGDGKGWDWEVDTENGNYDYLMYADIDMDHPEVVNELRNWGVWYTNTLGLDGFRIDAVKHIKYSFTRDWLTHVRNTTGKNMFAVAEFWKNDIGAIENYLSKTNWNHSVFDVPLHYNLYNASRSGGNYDMRQIFNGTVVQRHPTHAVTFVDNHDSQPEEALESFVEEWFKPLAYALTLTRDQGYPSVFYGDYYGIPTHGVPAMKSKIDPILEARQKYAYGKQNDYLDHHNMIGWTREGNTAHPNSGLATIMSDGPGGNKWMYVGRNKAGQVWRDITGNRSGTVTINADGWGNFSVNGGSVSIWV

SEQ ID NO: 21154 - protein, 483 aa, Synthetic construct
HHNGTNGTMMQYFEWYLPNDGNHWNRLRSDASNLKDKGITAVWIPPAWKGASQNDVGYGAYDLYDLGEFNQKGTVRTKYGTRNQLQAAVTALKSNGIQVYGDVVMNHKGGADATEWVRAVEVNPSNRNQEVSGDYTIEAWTKFDFPGRGNTHSNFKWRWDHFDGVDWDQSRQLQNRIYKFRGDGKEWDWEVDTENGNYDYLMYADIDMDHPEVVNELRNWGVWYTNTLGLDGFRIDAVKHIKYSFTRDWLTHVRNTTGKNMFAVAEFWKNDIGAIENYLSKTNWNHSVFDVPLHYNLYNASRSGGNYDMRQIFNGTVVQRHPTHAVTFVDNHDSQPEEALESFVEEWFKPLAYALTLTRDQGYPSVFYGDYYGIPTHGVPAMKSKIDPILEARQKYAYGKQNDYLDHHNMIGWTREGNTEHPNSGLATIMSDGPGGNKWMYVGRNKAGQVWRDITGNRSGTVTINADGWGNFSVNGGSVSIWV

SEQ ID NO: 21155 - protein, 483 aa, Synthetic construct
HHNGTNGTMMQYFEWYLPNDGNHWNRLRSDASNLKDKGITAVWIPPAWKGASQNDVGYGAYDLYDLGEFNQKGTVRTKYGTRNQLQAAVTALKSNGIQVYGDVVMNHKGGADATEWVRAVEVNPSNRNQEVSGDYTIEAWTKFDFPGRGNTHSNFKWRWYHFDGVDWDQSRQLQNRIYKFRGDGKGWDWEVDTENGNYDYLMYADIDMDHPEVVNELRNWGVWYTNTLGLDGFRIDAVKHIKYSFTRDWLTHVRNTTGKNMFAVAEFWKNDIGFIENYLSKTNWNHSVFDVPLHYNLYNASRSGGNYDMRQIFNGTVVQRHPTHAVTFVDNHDSQPEEALESFVEEWFKPLAYALTLTRDQGYPSVFYGDYYGIPTHGVPAMKSKIDPILEARQKYAYGKQNDYLDHHNMIGWTREGNTAHPNSGLATIMSDGPGGNKWMYVGRNKAGQVWRDITGNRSGTVTINADGWGNFSVNGGSVSIWV

SEQ ID NO: 21156 - protein, 483 aa, Synthetic construct
HHNGTNGTMMQYFEWYLPNDGNHWNRLRSDASNLKDKGITAVWIPPAWKGASQNDVGYGAYDLYDLGEFNQKGTVRTKYGTRNQLQAAVTALKSNGIQVYGDVVMNHKGGADATEWVRAVEVNPSNRNQEVSGDYTIEAWTKFDFPGRGNTHSNFKWRWYHFDGVDWDQSRQLQNRIYKFRGDGKGWDWEVDTENGNYDYLMYADIDMDHPEVVNELRNWGVWYTNTLGLDGFRIDAVKHIKYSFTRDWLTHVRNTTGKNMFAVAEFWKNDIGAIENYLSKTNWNHSVFDVPLHYNLYNASRSGGNYDMRQIFNGTVLQRHPTHAVTFVDNHDSQPEEALESFVEEWFKPLAYALTLTRDQGYPSVFYGDYYGIPTHGVPAMKSKIDPILEARQKYAYGKQNDYLDHHNMIGWTREGNTAHPNSGLATIMSDGPGGNKWMYVGRNKAGQVWRDITGNRSGTVTINADGWGNFSVNGGSVSIWV

SEQ ID NO: 21157 - protein, 483 aa, Synthetic construct
HHNGTNGTMMQYFEWYLPNDGNHWNRLRSDASNLKDKGITAVWIPPAWKGASQNDVGYGAYDLYDLGEFNQKGTVRTKYGTRNQLQAAVTALKSNGIQVYGDVVMNHKGGADATEWVRAVEVNPSNRNQEVSGDYTIEAWTKFDFPGRGNTHSNFKWRWYHFDGVDWDQSRQLQNRIYKFRGDGKGWDWEVDTENGNYDYLMYADIDMDHPEVVNELRNWGVWYTNTLGLDGFRIDAVKHIKYSFTRDWLTHVRNTTGKNMFAVAEFWKNDIGAIENYLSKTNWNHSVFDVPLHYNLYNASRSGGNYDMRQIFNGTVVQRHPTHAVTFVDNHDSQPEEALESFVEEWFKPLAYALTLTRDQGYPSVFYGDYYGIPTHGVPAMKSKIEPILEARQKYAYGKQNDYLDHHNMIGWTREGNTAHPNSGLATIMSDGPGGNKWMYVGRNKAGQVWRDITGNRSGTVTINADGWGNFSVNGGSVSIWV

SEQ ID NO: 21158 - protein, 483 aa, Synthetic construct
HHNGTNGTMMQYFEWYLPNDGNHWNRLRSDASNLKDKGITAVWIPPAWKGASQNDVGYGAYDLYDLGEFNQKGTVRTKYGTRNQLQAAVTALKSNGIQVYGDVVMNHKGGADATEWVRAVEVNPSNRNQEVSGDYTIEAWTKFDFPGRGNTHSNFKWRWYHFDGVDWDQSRQLQNRIYKFRGDGKGWDWEVDTENGNYDYLMYADIDMDHPEVVNELRNWGVWYTNTLGLDGFRIDAVKHIKYSFTRDWLTHVRNTTGKNMFAVAEFWKADIGAIENYLSKTNWNHSVFDVPLHYNLYNASRSGGNYDMRQIFNGTVVQRHPTHAVTFVDNHDSQPEEALESFVEEWFKPLAYALTLTRDQGYPSVFYGDYYGIPTHGVPAMKSKIDPILEARQKYAYGKQNDYLDHHNMIGWTREGNTAHPNSGLATIMSDGPGGNKWMYVGRNKAGQVWRDITGNRSGTVTINADGWGNFSVNGGSVSIWV

SEQ ID NO: 21159 - protein, 483 aa, Synthetic construct
HHNGTNGTMMQYFEWYLPNDGNHWNRLRSDASNLKDKGITAVWIPPAWKGASQNDVGYGAYDLYDLGEFNQKGTVRTKYGTRNQLQAAVTALKSNGIQVYGDVVMNHKGGADATEWVRAVEVNPSNRNQEVSGDYTIEAWTKFDFPGRGNTHSNFKWRWYHFDGVDWDQSRQLQNRIYKFRGDGKGWDWEVDTENGNYDYLMYADIDMDHPEVVNELRNWGVWYTNTLGLDGFRIDAVKHIKYSFTRDWLTHVRNTTGKNMFAVAEFWKNDIGAIENYLSKTNWNHSVFDVPLHYNLYNASRSGGNYDMRQIFNGTVVQRHPTHAVTFVDNHDSQPEEALESFVEEWFKPLAYALTLTRDQGYPSVFYGDYCGIPTHGVPAMKSKIDPILEARQKYAYGKQNDYLDHHNMIGWTREGNTAHPNSGLATIMSDGPGGNKWMYVGRNKAGQVWRDITGNRSGTVTINADGWGNFSVNGGSVSIWV

SEQ ID NO: 21160 - protein, 483 aa, Synthetic construct
HHNGTNGTMMQYFEWYLPNDGNHWNRLRSDASNLKDKGITAVWIPPAWKGASQNDVGYGAYDLYDLGEFNQCGTVRTKYGTRNQLQAAVTALKSNGIQVYGDVVMNHKGGADATEWVRAVEVNPSNRNQEVSGDYTIEAWTKFDFPGRGNTHSNFKWRWYHFDGVDWDQSRQLQNRIYKFRGDGKGWDWEVDTENGNYDYLMYADIDMDHPEVVNELRNWGVWYTNTLGLDGFRIDAVKHIKYSFTRDWLTHVRNTTGKNMFAVAEFWKNDIGAIENYLSKTNWNHSVFDVPLHYNLYNASRSGGNYDMRQIFNGTVVQRHPTHAVTFVDNHDSQPEEALESFVEEWFKPLAYALTLTRDQGYPSVFYGDYYGIPTHGVPAMKSKIDPILEARQKYAYGKQNDYLDHHNMIGWTREGNTAHPNSGLATIMSDGPGGNKWMYVGRNKAGQVWRDITGNRSGTVTINADGWGNFSVNGGSVSIWV

SEQ ID NO: 21161 - protein, 483 aa, Synthetic construct
HHNGTNGTMMQYFEWYLPNDGNHWNRLRSDASNLKDKGITAVWIPPAWKGASQNDVGYGAYDLYDLGEFNQKGTVRTKYGTRNQLQAAVTALKSNGIQVYGDVVMNHKGGADATEWVRAVEVNPSNRNQEVSGDYTIEAWTKFDFPGRGNTHSNFKWRWYHFDGVDWDQSRQLQNRIYKFRGDGKGWDWEVDTENGNYDYLMYADIDMDHPEVVNELRNWGVWYTNTLGLDGFRIDAVKHINYSFTRDWLTHVRNTTGKNMFAVAEFWKNDIGAIENYLSKTNWNHSVFDVPLHYNLYNASRSGGNYDMRQIFNGTVVQRHPTHAVTFVDNHDSQPEEALESFVEEWFKPLAYALTLTRDQGYPSVFYGDYYGIPTHGVPAMKSKIDPILEARQKYAYGKQNDYLDHHNMIGWTREGNTAHPNSGLATIMSDGPGGNKWMYVGRNKAGQVWRDITGNRSGTVTINADGWGNFSVNGGSVSIWV

SEQ ID NO: 21162 - protein, 483 aa, Synthetic construct
HHNGTNGTMMQYFEWYLPNDGNHWNRLRSDASNLKDKGITAVWIPPAWKGASQNDVGYGAYDLYDLGEFNQKGTVRTKYGTRNQLQAAVTALKSNGIQVYGDVVMNHKGGADATEWVRAVEVNPSNRNQEVSGDYTIEAWTKFDFPGRGNTHSNFKWRWYHFDGVDWDQSRQLQNRIYKFRGDGKGWDWEVDTENGNYDYLMYADIDMDHPEVVNELRNWGVWYTNTLGLDGFRIDAVKHIKYSFTRDWLTHVRNTTGKNMFAVAEFWKNDIGAIENYLSKTNWNHSVFDVPLHYNLYNASRSGGNYDMRQIFNGTVVQRHPTHAVTFVDNHDSQPEEALESFVEEWFKPLAYALTLTRDQGYPSVFYGDYYGIPTHGVPAMKSKIDPILEARQKYAYGKQNDYLDHHNMIGWTREGNTAHPNSGLATIMSDGPGGNKWMYVGRNKAGQVWRDITGNRSGTVAINADGWGNFSVNGGSVSIWV

SEQ ID NO: 21163 - protein, 483 aa, Synthetic construct
HHNGTNWTMMQYFEWYLPNDGNHWNRLRSDASNLKDKGITAVWIPPAWKGASQNDVGYGAYDLYDLGEFNQKGTVRTKYGTRNQLQAAVTALKSNGIQVYGDVVMNHKGGADATEWVRAVEVNPSNRNQEVSGDYTIEAWTKFDFPGRGNTHSNFKWRWYHFDGVDWDQSRQLQNRIYKFRGDGKGWDWEVDTENGNYDYLMYADIDMDHPEVVNELRNWGVWYTNTLGLDGFRIDAVKHIKYSFTRDWLTHVRNTTGKNMFAVAEFWKNDIGAIENYLSKTNWNHSVFDVPLHYNLYNASRSGGNYDMRQIFNGTVVQRHPTHAVTFVDNHDSQPEEALESFVEEWFKPLAYALTLTRDQGYPSVFYGDYYGIPTHGVPAMKSKIDPILEARQKYAYGKQNDYLDHHNMIGWTREGNTAHPNSGLATIMSDGPGGNKWMYVGRNKAGQVWRDITGNRSGTVTINADGWGNFSVNGGSVSIWV

SEQ ID NO: 21164 - protein, 483 aa, Synthetic construct
HHNQTNGTMMQYFEWYLPNDGNHWNRLRSDASNLKDKGITAVWIPPAWKGASQNDVGYGAYDLYDLGEFNQKGTVRTKYGTRNQLQAAVTALKSNGIQVYGDVVMNHKGGADATEWVRAVEVNPSNRNQEVSGDYTIEAWTKFDFPGRGNTHSNFKWRWYHFDGVDWDQSRQLQNRIYKFRGDGKEWDWEVDTENGNYDYLMYADIDMDHPEVVNELRNWGVWYTNTLGLDGFRIDAVKHIKYSFTRDWLTHVRNTTGKNMFAVAEFWKNDIGAIENYLSKTNWNHSVFDVPLHYNLYNASRSGGNYDMRQIFNGTVVQRHPTHAVTFVDNHDSQPEEALESFVEEWFKPLAYALTLTRDQGYPSVFYGDYYGIPTHGVPAMKSKIDPILEARQKYAYGKQNDYLDHHNMIGWTREGNTAHPNSGLATIMSDGPGGNKWMYVGRNKAGQVWRDITGNRSGTVTINADGWGNFSVNGGSVSIWV

SEQ ID NO: 21165 - protein, 483 aa, Synthetic construct
HHNGTNGTMMQYFEWYLPNDGNHWNRLRSDASNLKDKGITAVWIPPAWKGASQNDVGYGAYDLYDLGEFNQKGTVRTKYGTRNQLQAAVTALKSNGIQVYGDVVMNHKGGADATEWVRAVEVNPSNRNQEVSGDYTIEAWTKFDFPGRGNTHSNFKWRWYHFAGVDWDQSRQLQNRIYKFRGDGKGWDWEVDTENGNYDYLMYADIDMDHPEVVNELRNWGVWYTNTLGLDGFRIDAVKHIKYSFTRDWLTHVRNTTGKNMFAVAEFWKNDIGAIENYLSKTNWNHSVFDVPLHYNLYNASRSGGNYDMRQIFNGTVVQRHPTHAVTFVDNHDSQPEEALESFVEEWFKPLAYALTLTRDQGYPSVFYGDYYGIPTHGVPAMKSKIDPILEARQKYAYGKQNDYLDHHNMIGWTREGNTAHPNSGLATIMSDGPGGNKWMYVGRNKAGQVWRDITGNRSGTVTINADGWGNFSVNGGSVSIWV

SEQ ID NO: 21166 - protein, 483 aa, Synthetic construct
HHNGTNGTMMQYFEWYLPNDGNHWNRLRSDASNLKDKGITAVWIPPAWKGASQNDVGYGAYDLYDLGEFNQKGTVRTKYGTRNQLQAAVTALKSNGIQVYGDVVMNHKGGADATEWVRAVEVNPSNRNQEVSGDYTIEAWTKFDFPGRGNTHSNFKWRWYHFDGVDWDQSRQLQNRIYKFRGDGKGWDWEVDTENGNYDYLMYADIDMDHPEVVNELRNWGVWYTNTLGLDGFRIDAVKHIKYSFTRDWLTHVRNTTGKNMFAVAEFWKNDIGAIENYLSKTNWNHSVFDVPLHYNLYNASRSGGNYDMRQIFNGTVVQRHPTHAVTFVDNHDSQPEEALESFVEEWFKPLAYALTLTRDQGYPSVFYGDYSGIPTHGVPAMKSKIDPILEARQKYAYGKQNDYLDHHNMIGWTREGNTAHPNSGLATIMSDGPGGNKWMYVGRNKAGQVWRDITGNRSGTVTINADGWGNFSVNGGSVSIWV

SEQ ID NO: 21167 - protein, 483 aa, Synthetic construct
HHNGTNGTMMQYFEWYLPNDGNHWNRLRSDASNLKDKGITAVWIPPAWKGASQNDVGYGAYDLYDLGEFNQKGTVRTKYGTRNQLQAAVTALKSNGIQVYGDVVMNHKGGADATEWVRAVEVNPSNRNQEVSGDYTIEAWTKFDFPGRGNTHSNFKWRWYHFDGVDWDQSRQLQNRRYKFRGDGKGWDWEVDTENGNYDYLMYADIDMDHPEVVNELRNWGVWYTNTLGLDGFRIDAVKHIKYSFTRDWLTHVRNTTGKNMFAVAEFWKNDIGAIENYLSKTNWNHSVFDVPLHYNLYNASRSGGNYDMRQIFNGTVVQRHPTHAVTFVDNHDSQPEEALESFVEEWFKPLAYALTLTRDQGYPSVFYGDYYGIPTHGVPAMKSKIDPILEARQKYAYGKQNDYLDHHNMIGWTREGNTAHPNSGLATIMSDGPGGNKWMYVGRNKAGQVWRDITGNRSGTVTINADGWGNFSVNGGSVSIWV

SEQ ID NO: 21168 - protein, 483 aa, Synthetic construct
HHNGTNGTMMQYFEWYLPNDGNHWNRLRSDASNLKDKGITAVWIPPAWKGASQNDVGYGAYDLYDLGEFNQKGTVRTKYGTRNQLQAAVTALKSNGIQVYGDVVMNHKGGADATEWVRAVEVNPSNRNQEVSGDYTIEAWTKFDFPGRGNTHSNFKWRWYHFDGVDWDQSRQLQNRIYKFRGDGKGWDWEVDTENGNYDYLMYADIDMDHPEVVNELRNWGVWYTNTLGLDGFRIDAVKHIKYSFTRDWLTHVRNTTGKNMFAVAEFWKNDIGAIENYLSKTNWNHSVFDVPLHYNLYNASRSGGNYDMRQIFNGTVVQRHPGHAVTFVDNHDSQPEEALESFVEEWFKPLAYALTLTRDQGYTSVFYGDYYGIPTHGVPAMKSKIDPILEARQKYAYGKQNDYLDHHNMIGWTREGNTAHPNSGLATIMSDGPGGNKWMYVGRNKAGQVWRDITGNRSGTVTINADGWGNFSVNGGSVSIWV

SEQ ID NO: 21169 - protein, 483 aa, Synthetic construct
HHNGTNGTMMQYFEWYLPNDGNHWNRLRSDASNLKDKGITAVWIPPAWKGASQNDVGYGAYDLYDLGEFNQKGTVRTKYGTRNQLQAAVTALKSNGIQVYGDVVMNHKGGADATEWVRAVEVNPSNRNQEVSGDYTIEAWTKFDFPGRGNTHSNFKWRWYHFDGVDWDQSRQLQNRIYKFRGDGKGWDWEVDTENGNYDYLMYADIDMDHPEVVNELRNWGVWYTNTLGLDGFRIDAVKHIKYSFTRDWLTHVRNTTGKNMFAVAEFWKNDIGAIENYLSKTNWNHSVFDVPLHYNLVNASRSGGNYDMRQIFNGTVVQRHPTHAVTFVDNHDSQPEEALESFVEEWFKPLAYALTLTRDQGYPSVFYGDYYGIPTHGVPAMKSKIDPILEARQKYAYGKQNDYLDHHNMIGWTREGNTAHPNSGLATIMSDGPGGNKWMYVGRNKAGQVWRDITGNRSGTVTINADGWGNFSVNGGSVSIWV

SEQ ID NO: 21170 - protein, 483 aa, Synthetic construct
HHNGTNGTMMQYFEWYLPNDGNHWNRLRSDASNLKDKGITAVWIPPAWKGASQNDVGYGAYDLYDLGEFNQKGTVRTKYGTRNQLQAAVTALKSNGIQVYGDVVMNHKGGADATEWVRAVEVNPSNRNQEVSGDYTIEAWTKFDFPGRGNTHSNFKWRWYHFDGVDWDQSRQLQNRIYKFRGDGKGWDWEVDTENGNYDYLMYADIDMDHPEVVNELRNWGVWYTNTLGLDGFRIDAVKHIKYSFTRDWLTHVRNTTGKNMFAVAEFWKNDIGAIENYLSKTNWNHSVFDVPLHYNLYNASRSGGNYDMRQIFNGTVVQRHPTHAVTFVDNHDSQPEEALESFVEEWFKPLAYALTLTRDQGYPSVFYGDYYGIPTHGVPAMKSKIDPILEARQKYAYGKQNDYLDHHNMIGWTREGNTAHPNSGLATIMSDGPGGNKWMYVGRNKAGQVWRDITGNRSGLVTINADGWGNFSVNGGSVSIWV

SEQ ID NO: 21171 - protein, 483 aa, Synthetic construct
HHNGTNGTMMQYFEWYLPNDGNHWNRLRSDASNLKDKGITAVWIPPAWKGASQNDVGYGAYDLYDLGEFNQKGTVRTKYGTRNQLQAAVTALKSNGIQVYGDVVMNHKGGADATEWVRAWEVNPSNRNQEVSGDYTIEAWTKFDFPGRGNTHSNFKWRWYHFDGVDWDQSRQLQNRIYKFRGDGKGWDWEVDTENGNYDYLMYADIDMDHPEVVNELRNWGVWYTNTLGLDGFRIDAVKHIKYSFTRDWLTHVRNTTGKNMFAVAEFWKNDIGAIENYLSKTNWNHSVFDVPLHYNLYNASRSGGNYDMRQIFNGTVVQRHPTHAVTFVDNHDSQPEEALESFVEEWFKPLAYALTLTRDQGYPSVFYGDYYGIPTHGVPAMKSKIDPILEARQKYAYGKQNDYLDHHNMIGWTREGNTAHPNSGLATIMSDGPGGNKWMYVGRNKAGQVWRDITGNRSGTVTINADGWGNFSVNGGSVSIWV

SEQ ID NO: 21172 - protein, 483 aa, Synthetic construct
HHNGTNGTMMQYFEWYLPNDGNHWNRLRSDASNLKDKGITAVWIPPAWKGASQNDVGYGAYDLYDLGEFNQKGTVRTKYGTRNQLQAAVTALKSNGIQVYGDVVMNHKGGADATEWVRAVEVNPSNRNQEVSGDYTIEAWTKFDFPGRGNTHSNFKWRWYHFQGVDWDQSRQLQNRIYKFRGDGKGWDWEVDTENGNYDYLMYADIDMDHPEVVNELRNWGVWYTNTLGLDGFRIDAVKHIKYSFTRDWLTHVRNTTGKNMFAVAEFWKNDIGAIENYLSKTNWNHSVFDVPLHYNLYNASRSGGNYDMRQIFNGTVVQRHPTHAVTFVDNHDSQPEEALESFVEEWFKPLAYALTLTRDQGYPSVFYGDYYGIPTHGVPAMKSKIDPILEARQKYAYGKQNDYLDHHNMIGWTREGNTAHPNSGLATIMSDGPGGNKWMYVGRNKAGQVWRDITGNRSGTVTINADGWGNFSVNGGSVSIWV

SEQ ID NO: 21173 - protein, 483 aa, Synthetic construct
HHNGTNGTMMQYFEWYLPNDGNHWNRLRSDASNLKDKGITAVWIPPAWKGASQNDVGYGAYDLYDLGEFNQKGTVRTKYGTRNQLQAAVTALKSNGIQVYGDVVMNHKGGADATEWVRAVEVNPSNRNQEVSGDYTIEAWTKFDFPGRGNTHSNFKWRWYHFDGVDWDQSRQLQNRIYKFRGDGKGWDWEVDTENGNYDYLMYADIDMDHPEVVNELRNWGVWYTNTLGLDGFRIDAVKHIKYSFTRDWLTHVRNTTGKNMFAVAEFWKNDIGAIENYLSKTNWNHSVFDVPLHYNLYNASRSGGNYDMRQIFNGTVVQRHPTHAVTFVDNHDSQPEEALESFVEEWFKPLAYALTLMRDQGYPSVFYGDYYGIPTHGVPAMKSKIDPILEARQKYAYGKQNDYLDHHNMIGWTREGNTAHPNSGLATIMSDGPGGNKWMYVGRNKAGQVWRDITGNRSGTVTINADGWGNFSVNGGSVSIWV

SEQ ID NO: 21174 - protein, 483 aa, Synthetic construct
HHNGTNGTMMQYFEWYLPNDGNHWNRLRSDASNLKDKGITAVWIPPAWKGASQNDVGYGAYDLYDLGEFNQKGTVRTKYGTRNQLQAAVTALKSNGIQVYGDVVMNHKGGADATEWVRAVEVNPSNRNQEVSGDYTIEAWTKFDFPGRGNTHSNFKWRWYHFDGVDWDQSRQLQNRIYKFRGDGKGWDWEVDTENGNYDYLMYADIDMDHPEVVNELRNWGVWYTNTLGLDGFRIDAVKHIKYSFTRDWLTHVRNTTGKNMFAVAEFWKNDIGAIENYLSKTNWNHSVFDVPLHYNLYNASRSGGNYDMRQIFNGTVVQRHPTHAVTFVDNHDSQPEEALESFVEEWFKPLAYALTLTRDQGSPSVFYGDYYGIPTHGVPAMKSKIDPILEARQKYAYGKQNDYLDHHNMIGWTREGNTAHPNSGLATIMSDGPGGNKWMYVGRNKAGQVWRDITGNRSGTVTINADGWGNFSVNGGSVSIWV

SEQ ID NO: 21175 - protein, 483 aa, Synthetic construct
HHNGTEGTMMQYFEWYLPNDGNHWNRLRSDASNLKDKGITAVWIPPAWKGASQNDVGYGAYDLYDLGEFNQKGTVRTKYGTRNQLQAAVTALKSNGIQVYGDVVMNHKGGADATEWVRAVEVNPSNRNQEVSGDYTIEAWTKFDFPGRGNTHSNFKWRWYHFDGVDWDQSRQLQNRIYKFRGDGKGWDWEVDTENGNYDYLMYADIDMDHPEVVNELRNWGVWYTNTLGLDGFRIDAVKHIKYSFTRDWLTHVRNTTGKNMFAVAEFWKNDIGAIENYLSKTNWNHSVFDVPLHYNLYNASRSGGNYDMRQIFNGTVVQRHPTHAVTFVDNHDSQPEEALESFVEEWFKPLAYALTLTRDQGYPSVFYGDYYGIPTHGVPAMKSKIDPILEARQKYAYGKQNDYLDHHNMIGWTREGNTAHPNSGLATIMSDGPGGNKWMYVGRNKAGQVWRDITGNRSGTVTINADGWGNFSVNGGSVSIWV

SEQ ID NO: 21176 - protein, 483 aa, Synthetic construct
HHNGTNGTMMQYFEWYLPNDGNHWNRLRSDASNLKDKGITAVWIPPAWKGASQNDVGYGAYDLYDLGEFNQKGTVRTKYGTRNQLQAAVTALKSNGIQVYGDVVMNHKGGADATEWVRAVEVNPSNRNQEVSGDYTIEAWTKFDFPGRGNTHSNFKWRWYHFDGVDWDQSRQLQNRIYKFRGDGKEWDWEVDTENGNYDYLMYADYDMDHPEVVNELRNWGVWYTNTLGLDGFRIDAVKHIKYSFTRDWLTHVRNTTGKNMFAVAEFWKNDIGAIRNYLSKTNWNHSVFDVPLHYNLYNASRSGGNYDMRQIFNGTVVQRHPTHAVTFVDNHDSQPEEALESFVEEWFKPLAYALTLTRDQGYPSVFYGDYYGIPTHGVPAMKSKIDPILEARQKYAYGKQNDYLDHHNMIGWTREGNTAHPNSGLATIMSDGPGGNKWMYVGRNKAGQVWRDITGNRSGTVTINADGWGNFSVNGGSVSIWV

SEQ ID NO: 21177 - protein, 483 aa, Synthetic construct
HHNGTNGTMMQYFEWYLPNDGNHWNRLRSDASNLKDKGITAVWIPPAWKGASQNDVGYGAYDLYDLGEFNQKGTVRTKYGTRNQLQAAVTALKSNGIQVYGDVVMNHKGGADATEWVRAVEVNPSNRNQEVSGDYTIEAWTKFDFPGRGNTHSNFKWRWYHFDGVDWDQSRQLQNRIYKFRGDGKGWDWEVDTENGNYDYLMYADIDMDHPEVVNELRNWGVWYTNTLGLDGFRIDAVKHIKYSFTRDWLTHVRNTTGKNMFAVAEFWKNDIGAIENYLSKTNWNHSVFDVPLHYNLYNASRSGGNYDMRQIFNGTVVQRHPTHAVTFVDNHDSQPEEALESFVEEWFKPLAYALTLTRDQGYPSVFYGDYYGIPTHGVPAMKSKINPILEARQKYAYGKQNDYLDHHNMIGWTREGNTAHPNSGLATIMSDGPGGNKWMYVGRNKAGQVWRDITGNRSGTVTINADGWGNFSVNGGSVSIWV

SEQ ID NO: 21178 - protein, 483 aa, Synthetic construct
HHNQTNGTMMQYFEWYLPNDGNHWNRLRSDASNLKDKGITAVWIPPAWKGASQNDVGYGAYDLYDLGEFNQKGTVRTKYGTRNQLQAAVTALKSNGIQVYGDVVMNHKGGADATEWVRAVEVNPSNRNQEVSGDYTIEAWTKFDFPGRGNTHSNFKWRWYHFDGVDWDQSRQLQNRIYKFRGDGKEWDWEVDTENGNYDYLMYADYDMDHPEVVNELRNWGVWYTNTLGLDGFRIDAVKHIKYSFTRDWLTHVRNTTGKNMFAVAEFWKNDIGAIENYLSKTNWNHSVFDVPLHYNLYNASRSGGNYDMRQIFNGTVVQRHPTHAVTFVDNHDSQPEEALESFVEEWFKPLAYALTLTRDQGYPSVFYGDYYGIPTHGVPAMKSKIDPILEARQKYAYGKQNDYMDHHNMIGWTREGNTAHPNSGLATIMSDGPGGNKWMYVGRNKAGQVWRDITGNRSGTVTINADGWGNFSVNGGSVSIWV

SEQ ID NO: 21179 - protein, 483 aa, Synthetic construct
HHNGTNGTMMQYFEWYLPNDGNHWNRLRSDASNLKDKGITAVWIPPAWKGASQNDVGYGAYDLYDLGEFNQKGTVRTKYGTRNQLQAAVTALKSNGIQVYGDVVMNHKGGADATEWVRAVEVNPSNRNQEVSGDYTIEAWTKFDFPGRGNTHSNFKWRWYHFDGVDWDQSRQLQNRIYKFRGDGKGWDWEVDTENGNYDYLMYADIDMDHPEVVNELRNWGVWYTNTLGLDGFRIDAVKHIKYSFTRDWLTHVRNTTGKNMFAVAEFWKNDIGAIENYLSKTNWNHSVFDVPLHYNLYNASRSGGNYDMRQIFNGTVVQRHPTHAVTFVDNHDSQPEEALESFVEEWFKPLAYALTLTRDQGYPSVFYGDYYGIPTHGVPAMKSKIDPILEARQKYAYGKQNDYLDHHNMIGWTREGNTAHPNSGLATIMSDGSGGNKWMYVGRNKAGQVWRDITGNRSGTVTINADGWGNFSVNGGSVSIWV

SEQ ID NO: 21180 - protein, 483 aa, Synthetic construct
HHNGTNGTMMQYFEWYLPNDGNHWNRLRSDASNLKDKGITAVWIPPAWKGASQNDVGYGAYDLYDLGEFNQKGTVRTKYGTRNQLQAAVTALKSNGIQVYGDVVMNHKGGADATEWVRAVEVNPSNRNQEVSGDYTIEAWTKFDFPGRGNTHSNFKWRWYHFDGSDWDQSRQLQNRIYKFRGDGKGWDWEVDTENGNYDYLMYADIDMDHPEVVNELRNWGVWYTNTLGLDGFRIDAVKHIKYSFTRDWLTHVRNTTGKNMFAVAEFWKNDIGAIENYLSKTNWNHSVFDVPLHYNLYNASRSGGNYDMRQIFNGTVVQRHPTHAVTFVDNHDSQPEEALESFVEEWFKPLAYALTLTRDQGYPSVFYGDYYGIPTHGVPAMKSKIDPILEARQKYAYGKQNDYLDHHNMIGWTREGNTAHPNSGLATIMSDGPGGNKWMYVGRNKAGQVWRDITGNRSGTVTINADGWGNFSVNGGSVSIWV

SEQ ID NO: 21181 - protein, 483 aa, Synthetic construct
HHNGTNGTMMQYFEWYLPNDGNHWNRLRSDASNLKDKGITAVWIPPAWKGASQNDVGYGAYDLYDLGEFNQKGTVRTKYGTRNQLQAAVTALKSNGIQVYGDVVMNHKGGADATEWVRAVEVNPSNRNQEVSGDYTIEAWTKFDFPGRGNTHSNFKWRWYHFDGVDWDQSRQLQNRIYKFRGDGKGWDWEVDTENGNYDYLMYADIDMDHPEVVNELRNWGVWYTNTLGLDGFRIDAVKHIKYSFTRDWLTHVRNTTGKNMFAVAEFWKNDIGAIENYLSKTNWNHSVFDTPLHYNLYNASRSGGNYDMRQIFNGTVVQRHPTHAVTFVDNHDSQPEEALESFVEEWFKPLAYALTLTRDQGYPSVFYGDYYGIPTHGVPAMKSKIDPILEARQKYAYGKQNDYLDHHNMIGWTREGNTAHPNSGLATIMSDGPGGNKWMYVGRNKAGQVWRDITGNRNGTVTINADGWGNFSVNGGSVSIWV

SEQ ID NO: 21182 - protein, 483 aa, Synthetic construct
HHNGTNGTMMQYFEWYLPNDGNHWNRLRSDASNLKDKGITAVWIPPAWKGASQNDVGYGAYDLYDLGEFNQKGTVRTKYGTRNQLQAAVTALKSNGIQVYGDVVMNHKGGADATEWVRAVEVNPSNRNQEVSGDYTIEAWTKFDFPGRGNTHSNFKWRWYHFDGVDWDQSRQLQNRIYKFRGDGKGWDWEVDTENGNYDYLMYADIDMDHPEVVNELRNWGVWYTNTLGLDGFRIDAVKHIKYSFTRDWLTHVRNTTGKNMFAVAEFWMNDIGAIENYLSKTNWNHSVFDVPLHYNLYNASRSGGNYDMRQIFNGTVVQRHPTHAVTFVDNHDSQPEEALESFVEEWFKPLAYALTLTRDQGYPSVFYGDYYGIPTHGVPAMKSKIDPILEARQKYAYGKQNDYLDHHNMIGWTREGNTAHPNSGLATIMSDGPGGNKWMYVGRNKAGQVWRDITGNRSGTVTINADGWGNFSVNGGSVSIWV

SEQ ID NO: 21183 - protein, 483 aa, Synthetic construct
HHNGTNGTMMQYFEWYLPNDGNHWNRLRSDASNLKDKGITAVWIPPAWKGASQNDVGYGAYDLYDLGEFNQKGTVRTKYGTRNQLQAAVTALKSNGIQVYGDVVMNHKGGADATEWVRAVEVNPSNRNQEVSGDYTIEAWTKFDFPGRGNTHSNFKWRWYHFDGVDWDQSRQLENRIYKFRGDGKGWDWEVDTENGNYDYLMYADIDMDHPEVVNELRNWGVWYTNTLGLDGFRIDAVKHIKYSFTRDWLTHVRNTTGKNMFAVAEFWKNDIGAIENYLSKTNWNHSVFDVPLHYNLYNASRSGGNYDMRQIFNGTVVQRHPTHAVTFVDNHDSQPEEALESFVEEWFKPLAYALTLTRDQGYPSVFYGDYYGIPTHGVPAMKSKIDPILEARQKYAYGKQNDYLDHHNMIGWTREGNTAHPNSGLATIMSDGPGGNKWMYVGRNKAGQVWRDITGNRSGTVTINADGWGNFSVNGGSVSIWV

SEQ ID NO: 21184 - protein, 483 aa, Synthetic construct
HHNGTNGTMMQYFEWYLPNDGNHWNRLRSDASNLKDKGITAVWIPPAWKGASQNDVGYGAYDLYDLGEFNQKGTVRTKYGTRNQLQAAVTALKSNGIQVYGDVVMNHKGGADATEWVRAVEVNPSNRNQEVSGDYTIEAWTKFDFPGRGNTHSNFKWRWYHFDGVDWDQSRQLQNRIYKFRGDGKGWDWEVDTENGNYDYLMYADIDMDHPEVVNELRNWGVWYTNTLGLDGFRIDAVKHIKYSFTRDWLTHVRNTTGKNMFAVAEFWKNDIGAIENYLSATNWNHSVFDVPLHYNLYNASRSGGNYDMRQIFNGTVVQRHPTHAVTFVDNHDSQPEEALESFVEEWFKPLAYALTLTRDQGYPSVFYGDYYGIPTHGVPAMKSKIDPILEARQKYAYGKQNDYLDHHNMIGWTREGNTAHPNSGLATIMSDGPGGNKWMYVGRNKAGQVWRDITGNRSGTVTINADGWGNFSVNGGSVSIWV

SEQ ID NO: 21185 - protein, 483 aa, Synthetic construct
HHNGTNGTMMQYFEWYLPNDGNHWNRLRSDASNLKDKGITAVWIPPAWKGASQNDVGYGAYDLYDLGEFNQKGTVRTKYGTRNQLQAAVTALKMNGIQVYGDVVMNHKGGADATEWVRAVEVNPSNRNQEVSGDYTIEAWTKFDFPGRGNTHSNFKWRWYHFDGVDWDQSRQLQNRIYKFRGDGKGWDWEVDTENGNYDYLMYADIDMDHPEVVNELRNWGVWYTNTLGLDGFRIDAVKHIKYSFTRDWLTHVRNTTGKNMFAVAEFWKNDIGAIENYLSKTNWNHSVFDVPLHYNLYNASRSGGNYDMRQIFNGTVVQRHPTHAVTFVDNHDSQPEEALESFVEEWFKPLAYALTLTRDQGYPSVFYGDYYGIPTHGVPAMKSWIDPILEARQKYAYGKQNDYLDHHNMIGWTREGNTAHPNSGLATIMSDGPGGNKWMYVGRNKAGQVWRDITGNRSGTVTINADGWGNFSVNGGSVSIWV

SEQ ID NO: 21186 - protein, 483 aa, Synthetic construct
HHNGTNGTMMQYFEWYLPNDGNHWNRLRSDASNLKDKGITAVWIPPAWKGASQNDVGYGAYDLYDLGEFNQKGTVRTKYGTRNQLQAAVTALKSNGIQVYGDVVMNHKGGADATEWVRAVEVNPSNRNQEVSGDYTIEAWTKFDFPGRGNTHSNFKWRWYHFDGVDWDQSRQLQNRIYKFRGDGKGWDWEVDTENGNYDYLMYADIDMDHPEVVNELRNWGVWYTNTLGLDGFRIDAAKHIKYSFTRDWLTHVRNTTGKNMFAVAEFWKNDIGAIENYLSKTNWNHSVFDVPLHYNLYNASRSGGNYDMRQIFNGTVVQRHPTHAVTFVDNHDSQPEEALESFVEEWFKPLAYALTLTRDQGYPSVFYGDYYGIPTHGVPAMKSKIDPILEARQKYAYGKQNDYLDHHNMIGWTREGNTAHPNSGLATIMSDGPGGNKWMYVGRNKAGQVWRDITGNRSGTVTINADGWGNFSVNGGSVSIWV

SEQ ID NO: 21187 - protein, 483 aa, Synthetic construct
HHNGTNGTMMQYFEWYLPNDGNHWNRLRSDASNLKDKGITAVWIPPAWKGASQNDVGYGAYDLYDLGEFNQKGTVRTKYGTRNQLQAAVTALKSNGIQVYGDVVMNHKGGADATEWVRAVEVNPSNRNQEVSGDYTIEAWTKFDFPGRGNTHSNFKWRWYHFDGVDWDQSRQLQNRIYKFRGDGKGWDWEVDTENGNYDYLMYADIDMDDPEVVNELRNWGVWYTNTLGLDGFRIDAVKHIKYSFTRDWLTHVRNTTGKNMFAVAEFWKNDIGAIENYLSKTNWNHSVFDVPLHYNLYNASRSGGNYDMRQIFNGTVVQRHPTHAVTFVDNHDSQPEEALESFVEEWFKPLAYALTLTRDQGYPSVFYGDYYGIPTHGVPAMKSKIDPILEARQKYAYGKQNDYLDHHNMIGWTREGNTAHPNSGLATIMSDGPGGNKWMYVGRNKAGQVWRDITGNRSGTVTINADGWGNFSVNGGSVSIWV

SEQ ID NO: 21188 - protein, 483 aa, Synthetic construct
HHNGTNGTMMQYFEWYLPNDGNHWNRLRSDASNLKDKGITAVWIPPAWKGASQNDVGYGAYDLYDLGEFNQKGTVRTKYGTRNQLQAAVTALKSNGIQVYGDVVMNHKGGADATEWVRAVEVNPSNRNQEVSGDYTIEAWTKFDFPGRGNTHSNFKWRWYHFDGVDWDQSRQLQNRIYKFRGDGKEWDWEVDTENGNYDYLMYADIDMDHPEVVNELRNWGVWYTDTLGLDGFRIDAVKHIKYSFTRDWLTHVRNTTGKNMFAVAEFWKNDIGAIENYLSKTNWNHSVFDVPLHYNLYNASRSGGNYDMRKIFNGTVVQRHPTHAVTFVDNHDSQPEEALESFVEEWFKPLAYALTLTRDQGYPSVFYGDYYGIPTHGVPAMKSKIDPILEARQKYAYGKQNDYLDHHNMIGWTREGNTAHPNSGLATIMSDGPGGNKWMYVGRNKAGQVWRDITGNRSDTVTINADGWGNFSVNGGSVSIWV

SEQ ID NO: 21189 - protein, 483 aa, Synthetic construct
HHNGTNGTMMQYFEWYLPNDGNHWNRLRSDASNLKDKGITAVWIPPAWKGASQNDVGYGAYDLYDLGEFNQKGTVRTKYGTRNQLQAAVTALKSNGIQVYGDVVMNHKGGADATEWVRAVEVNPSNRNQEVSGDYTIEAWTKFDFPGRGNTHSNFKWRWYHFDGVDWDQSRQLQNRIYKNRGDGKGWDWEVDTENGNYDYLMYADIDMDHPEVVNELRNWGVWYTNTLGLDGFRIDAVKHIKYSFTRDWLTHVRNTTGKNMFAVAEFWKNDIGAIENYLSKTNWNHSVFDVPLHYNLYNASRSGGNYDMRQIFNGTVVQRHPTHAVTFVDNHDSQPEEALESFVEEWFKPLAYALTLTRDQGYPSVFYGDYYGIPTHGVPAMKSKIDPILEARQKYAYGKQNDYLDHHNMIGWTREGNTAHPNSGLATIMSDGPGGNKWMYVGRNKAGQVWRDITGNRSGTVTINADGWGNFSVNGGSVSIWV

SEQ ID NO: 21190 - protein, 483 aa, Synthetic construct
HHNGTNGTMMQYFEWYLPNDGNHWNRLRSDASNLKDKGITAVWIPPAWKGASQNDVGYGAYDLYDLGEFNQKGTVRTKYGTRNQLQAAVTALKSNGIQVYGDVVMNHKGGADATEWVRAVEVNPSNRNQEVSGDETIEAWTKFDFPGRGNTHSNFKWRWYHFDGVDWDQSRQLQNRIYKFRGDGKGWDWEVDTENGNYDYLMYADIDMDHPEVVNELRNWGVWYTNTLGLDGFRIDAVKHIKYSFTRDWLTHVRNTTGKNMFAVAEFWKNDIGAIENYLSKTNWNHSVFDVPLHYNLYNASRSGGNYDMRQIFNGTVVQRHPTHAVTFVDNHDSQPEEALESFVEEWFKPLAYALTLTRDQGYPSVFYGDYYGIPTHGVPAMKSKIDPILEARQKYAYGKQNDYLDHHNMIGWTREGNTAHPNSGLATIMSDGPGGNKWMYVGRNKAGQVWRDITGNRSGTVTINADGWGNFSVNGGSVSIWV

SEQ ID NO: 21191 - protein, 483 aa, Synthetic construct
HHNGTNGTMMQYFEWYLPNDGNHWNRLRSDASNLKDKGITAVWIPPAWKGASQNDVGYGAYDLYDLGEFNQKGTVRTKYGTRNQLQAAVTALKSNGIQVYGDVVMNHKGGADATEWVRAVEVNPSNRNQEVSGDYTIEAWTKFDFPGRGNTHSNFKWRWYHFDGVDWDQSRQLQNRIYKFRGDGKGWDWEVDTENGNYDYLMYADIDMDHPEVVNELRNWGVWYTNTLGLDGFRIDAVKHIKYSFTRDWLTHVRNTTGKNMFAVAEFWKNDIGAIENYLSKTNWNHSVFDVPLHYNLYNASRSGGNYDMRQIFNGTVVQRHPTHAVTFVDNHDSQPEEALESFVEEWFKPLAYALTLTRDQGYPSVFYGDYYGIPTHGVPAMKSKIDPILEARQKYAYGKQNDYLDHHNMIGWTREGNTAHPNSGLATIMSDGEGGNKWMYVGRNKAGQVWRDITGNRSGTVTINADGWGNFSVNGGSVSIWV

SEQ ID NO: 21192 - protein, 483 aa, Synthetic construct
HHNGTNGTMMQYFEWYLPNDGNHWNRLRSDASNLKDKGITAVWIPPAWKGASQNDVGYGAYDLYDLGEFHQKGTVRTKYGTRNQLQAAVTALKSNGIQVYGDVVMNHKGGADATEWVRAVEVNPSNRNQEVSGDYTIEAWTKFDFPGRGNTHSNFKWRWYHFDGVDWDQSRQLQNRIYKFRGDGKGWDWEVDTENGNYDYLMYADIDMDHPEVVNELRNWGVWYTNTLGLDGFRIDAVKHIKYSFTRDWLTHVRNTTGKNMFAVAEFWKNDIGAIENYLSKTNWNHSVFDVPLHYNLYNASRSGGNYDMRQIFNGTVVQRHPTHAVTFVDNHDSQPEEALESFVEEWFKPLAYALTLTRDQGYPSVFYGDYYGIPTHGVPAMKSKIDPILEARQKYAYGKQNDYLDHHNMIGWTREGNTAHPNSGLATIMSDGPGGNKWMYVGRNKAGQVWRDITGNRSGTVTINADGWGNFSVNGGSVSIWV

SEQ ID NO: 21193 - protein, 483 aa, Synthetic construct
HHNGTNGTMMQYFEWYLPNDGNHWNRLRSDASNLKDKGITAVWIPPAWKGASQNDVGYGAYDLYDLGEFNQKGTVRTKYGTRNQLQAAVTALKSNGIQVYGDVVMNHKGGADATEWVRAMEVNPSNRNQEVSGDYTIEAWTKFDFPGRGNTHSNFKWRWYHFDGVDWDQSRQLQNRIYKFRGDGKGWDWEVDTENGNYDYLMYADIDMDHPEVVNELRNWGVWYTNTLGLDGFRIDAVKHIKYSFTRDWLTHVRNTTGKNMFAVAEFWKNDIGAIENYLSKTNWNHSVFDVPLHYNLYNASRSGGNYDMRQIFNGTVVQRHPTHAVTFVDNHDSQPEEALESFVEEWFKPLAYALTLTRDQGYPSVFYGDYYGIPTHGVPAMKSKIDPILEARQKYAYGKQNDYLDHHNMIGWTREGNTAHPNSGLATIMSDGPGGNKWMYVGRNKAGQVWRDITGNRSGTVTINADGWGNFSVNGGSVSIWV

SEQ ID NO: 21194 - protein, 483 aa, Synthetic construct
HHNGTNGTMMQYFEWYLPNDGNHWNRLRSDASNLKDKGITAVWIPPAWKGASQNDVGYGAYDLYDLGEFNQKGTVRTKYGTRNQLQAAVTALKSNGIQVYGDVVMNHKGGADATEWVRAVEVNPSNRNQEVSGDYTIEAWTKFDFPGRGNTHSNFKWRWYHFDGVDWDQSRQLQNRGYKFRGDGKGWDWEVDTENGNYDYLMYADIDMDHPEVVNELRNWGVWYTNTLGLDGFRIDAVKHIKYSFTRDWLTHVRNTTGKNMFAVAEFWKNDIGAIENYLSKTNWNHSVFDVPLHYNLYNASRSGGNYDMRQIFNGTVVQRHPTHAVTFVDNHDSQPEEALESFVEEWFKPLAYALTLTRDQGYPSVFYGDYYGIPTHGVPAMKSKIDPILEARQKYAYGKQNDYLDHHNMIGWTREGNTAHPNSGLATIMSDGPGGNKWMYVGRNKAGQVWRDITGNRSGTVTINADGWGNFSVNGGSVSIWV

SEQ ID NO: 21195 - protein, 483 aa, Synthetic construct
HHNGTNGTMMQYFEWYLPNDGNHWNRLRSDASNLKDKGITAVWIPPAWKGASQNDVGYGAYDLYDLGEFNQKGTVRTKYGTRNQLQAAVTALKSNGIQVYGDVVMNHKGGADATEWVRAVEVNPSNRNQEVSGDYTIEAWTKFDFPGRGNTHSNFKWRWYHFDGVDWDQSRQLQNRIYKFRGDGKGWDWEVDTENGNYDYLMYADIDMDHPEVVNELRNWGVWYTNTLGLDGFRIDAVKHIKYSFTRDWLTHVRNTTGKNMFAVAEFWKNDIGAIENYLSKTNWNHSVFDVPLHYNLYNASRSGGNYDMRQIFNGTVVQRHPTHAVTFVDNHDSQPEEALESFVEEWFKPLAYALTLTRDQCYPSVFYGDYYGIPTHGVPAMKSKIDPILEARQKYAYGKQNDYLDHHNMIGWTREGNTAHPNSGLATIMSDGPGGNKWMYVGRNKAGQVWRDITGNRSGTVTINADGWGNFSVNGGSVSIWV

SEQ ID NO: 21196 - protein, 483 aa, Synthetic construct
HHNGTNGTMMQYFEWYLPNDGNHWNRLRSDASNLKDKGITAVWIPPAWKGASQNDVGYGAYDLYDLGEFNQKGTVRTKYGLRNQLQAAVTALKSNGIQVYGDVVMNHKGGADATEWVRAVEVNPSNRNQEVSGDYTIEAWTKFDFPGRGNTHSNFKWRWYHFDGVDWDQSRQLQNRIYKFRGDGKGWDWEVDTENGNYDYLMYADIDMDHPEVVNELRNWGVWYTNTLGLDGFRIDAVKHIKYSFTRDWLTHVRNTTGKNMFAVAEFWKNDIGAIENYLSKTNWNHSVFDVPLHYNLYNASRSGGNYDMRQIFNGTVVQRHPTHAVTFVDNHDSQPEEALESFVEEWFKPLAYALTLTRDQGYPSVFYGDYYGIPTHGVPAMKSKIDPILEARQKYAYGKQNDYLDHHNMIGWTREGNTAHPNSGLATIMSDGPGGNKWMYVGRNKAGQVWRDITGNRSGTVTINADGWGNFSVNGGSVSIWV

SEQ ID NO: 21197 - protein, 483 aa, Synthetic construct
HHNGTNGTMMQYFEWYLPNDGNHWNRLRSDASNLKDKGITAVWIPPAWKGASQNDVGYGAYDLYDLGEFNQKGTVRTKYGTRNQLQAAVTALKSNGIQVYGDVVMNHKGGADATEWVRAVEVNPSNRNQEVSGDYTIEAWTKFDFPGRGNTHSNFKWRWYHFDGVDWDQSRQLQNRIYKTRGDGKGWDWEVDTENGNYDYLMYADIDMDHPEVVNELRNWGVWYTNTLGLDGFRIDAVKHIKYSFTRDWLTHVRNTTGKNMFAVAEFWKNDIGAIENYLSKTNWNHSVFDVPLHYNLYNASRSGGNYDMRQIFNGTVVQRHPTHAVTFVDNHDSQPEEALESFVEEWFKPLAYALTLTRDQGYPSVFYGDYYGIPTHGVPAMKSKIDPILEARQKYAYGKQNDYLDHHNMIGWTREGNTAHPNSGLATIMSDGPGGNKWMYVGRNKAGQVWRDITGNRSGTVTINADGWGNFSVNGGSVSIWV

SEQ ID NO: 21198 - protein, 483 aa, Synthetic construct
HHNGTNGTMMQYFEWYLPNDGNHWNRLRSDASNLKDKGITAVWIPPAWKGASQNDVGYGAYDLYDLGEFNQKGTVRTKYGTRNQLQAAVTALKSNGIQVYGDVVMNHKGGADATEWVRAVEVNPSNRNQEVSGDYTIEAWTKFDFPGRGNTHSNFKWRWYHFDGVDWDQSRQLQNRIYKFRGDGKEWDWEVDTENGNYDYLMYADYDMDHPEVVNELRNWGVWYTNTLGLDGFRIDAVKHIKYSFTRDWLEHVRNTTGKNMFAVAEFWKNDIGAIENYLSKTNWNHSVFDVPLHYNLYNASRSGGNYDMRQIFNGTVVQRHPGHAVTFVDNHDSQPEEALESFVEEWFKPLAYALTLTRDQGYPSVFYGDYYGIPTHGVPAMKSKIDPILEARQKYAYGKQNDYMDHHNMIGWTREGNTAHPNSGLATIMSDGPGGNKWMYVGRNKAGQVWRDITGNRSGTVTINADGWGNFSVNGGSVSIWV

SEQ ID NO: 21199 - protein, 483 aa, Synthetic construct
HHNGTNGTMMQYFEWYLPNDGNHWNRLRSDASNLKDKGITAVWIPPAWKGASQNDVGYGAYDLYDLGEFNQKGTVRTKYGTRNQLQAAVTALKSNGIQVYGDVVMNHKGGADATEWVRAVEVNPSNRNQEVSGDYTIEAWTKFDFPGRGNTHSNFKWRWYHFDGVDWDQSRQLQNRIYKFRGDGKGWDWEVDTENGNYDYLMYADIDMDHPEVVNELRNWGVWYTNTLGLDGFRIDAVKHIKYSFTRDWLTHVRNTTGKNMFAVAEFWKNDIGAIENYLSKTNWNHSVFDVPLHYNLYNASRSGGNYDMRQIFNGTVVQRHPTHAVTFVDNHDSQPEEALESWVEEWFKPLAYALTLTRDQGYPSVFYGDYYGIPTHGVPAMKSKIDPILEARQKYAYGKQNDYLDHHNMIGWTREGNTAHPNSGLATIMSDGPGGNKWMYVGRNKAGQVWRDITGNRSGTVTINADGWGNFSVNGGSVSIWV

SEQ ID NO: 21200 - protein, 483 aa, Synthetic construct
HHNGTNGTMMQYFEWYLPNDGNHWNRLRSDASNLKDKGITAVWIPPAWKGASQNDVGYGAYDLYDLGEFNQKGTVRTKYGTRNQLQAAVTALKSNGIQVYGDVVMNHKGGADATEWVRAVEVNPSNRNQEVSGDYTIEAWTKFDFPGRGNTHSNFKWRWYHFDGVDWDQSRQLQNRIYKFRGDGKGWDWEVDTENGNYDYLMYADIDMDHPEVVNELRNWGVWFTNTLGLDGFRIDAVKHIKYSFTRDWLTHVRNTTGKNMFAVAEFWKNDIGAIENYLSKTNWNHSVFDVPLHYNLYNASRSGGNYDMRQIFNGTVVQRHPTHAVTFVDNHDSQPEEALESFVEEWFKPLAYALTLTRDQGYPSVFYGDYYGIPTHGVPAMKSKIDPILEARQKYAYGKQNDYLDHHNMIGWTREGNTAHPNSGLATIMSDGPGGNKWMYVGRNKAGQVWRDITGNRSGTVTINADGWGNFSVNGGSVSIWV

SEQ ID NO: 21201 - protein, 483 aa, Synthetic construct
HHNGTNGTMMQYFEWYLPNDGNHWNRLRSDASNLKDKGITAVWIPPAWKGASQNDVGYGAYDLYDLGEFNQKGTVRTKYGTRNQLQAAVTALKSNGIQVYGDVVMNHKGGADATEWVRAVEVNPSNRNQEVSGDYTIEAWTKFDFPGRGNTHSNFKWRWYHFDGVDWDQSRQLQNRIYKFRGDGKGWDWEVDTENGNYDYLMYADIDMDHPEVVNELRNWGVWYTNTLGLDGFRIDAVKHIKYSFTRDWLTHVRNTTGKNMFAVAEFWKNDIGAIENYLSHTNWNHSVFDVPLHYNLYNASRSGGNYDMRQIFNGTVVQRHPTHAVTFVDNHDSQPEEALESFVEEWFKPLAYALTLTRDQGYPSVFYGDYYGIPTHGVPAMKSKIDPILEARQKYAYGKQNDYLDHHNMIGWTREGNTAHPNSGLATIMSDGPGGNKWMYVGRNKAGQVWRDITGNRSGTVTINADGWGNFSVNGGSVSIWV

SEQ ID NO: 21202 - protein, 483 aa, Synthetic construct
HHNGTNGTMMQYFEWYLPNDGNHWNRLRSDASNLKDKGITAVWIPPAWKGASQNDVGYGAYDLYDLGEFNQKGTVRTKYGTRNQLQAAVTALKSNGIQVYGDVVMNHKGGADATEWVRAVEVNPSNRNQEVSGDYTIEAWTKFDFPGRGNTHSNFKWRWYHFDGVDWDQSRQLQNRIYKFRGDGKGWDWEVDTENGNYDYLMYADIDMDHPEVVNELRNWGVWYTNTLGLDGFRIDAVKHIKYSFTRDWLTHVRNTTGKNMFAVAEFWKNDIGAIENYLSKTNWNHSVFDVPLHYNLYSASRSGGNYDMRQIFNGTVVQRHPTHAVTFVDNHDSQPEEALESFVEEWFKPLAYALTLTRDQGYPSVFYGDYYGIPTHGVPAMKSKIDPILEARQKYAYGSQNDYLDHHNMIGWTREGNTAHPNSGLATIMSDGPGGNKWMYVGRNKAGQVWRDITGNRSGTVTINADGWGNFSVNGGSVSIWV

SEQ ID NO: 21203 - protein, 483 aa, Synthetic construct
HHNGTNGTMMQYFEWYLPNDGNHWNRLRSDASNLKDKGITAVWIPPAWKGASQNDVGYGAYDLYDLGEFNQKGTVRTKYGTRNQLQAAVTALKSNGIQVYGDVVMNHKGGADATEWVRAVEVNPRNRNQEVSGDYTIEAWTKFDFPGRGNTHSNFKWRWYHFDGVDWDQSRQLQNRIYKFRGDGKGWDWEVDTENGNYDYLMYADIDMDHPEVVNELRNWGVWYTNTLGLDGFRIDAVKHIKYSFTRDWLTHVRNTTGKNMFAVAEFWKNDIGAIENYLSKTNWNHSVFDVPLHYNLYNASRSGGNYDMRQIFNGTVVQRHPTHAVTFVDNHDSQPEEALESFVEEWFKPLAYALTLTRDQGYPSVFYGDYYGIPTHGVPAQKSKIDPILEARQKYAYGKQNDYLDHHNMIGWTREGNTAHPNSGLATIMSDGPGGNKWMYVGRNKAGQVWRDITGNRSGTVTINADGWGNFSVNGGSVSIWV

SEQ ID NO: 21204 - protein, 483 aa, Synthetic construct
HHNGTNGTMMQYFEWYLPNDGNHWNRLRSDASNLKDKGITAVWIPPAWKGASQNDVGYGAYDLYDLGEFNQKGTVRTKYGTRNQLQAAVTALKSNGIQVYGDVVMNHKGGADATEWVRAVEVNPSNRNQEVSGDYTIEAWTKFDFPGRGNTHSNFKWRWYHFDGVDWDQSRQLQNRIYKFRGDGKGWDWEVDTENGNYDYLMYADIDMDHPEVVNELRNWGVWYTNTLGLDGFRIDAVKHIKYSFTRDWLTHVRNTTGKNMFAVAEFWKNDIGAIENYLSKTNWNHSVFDVPLHYNLYNASRSGGNYDMRQIFNGTVVQRHPTHAVTFVDNHDSQPEEALESFVEEWFKPLAYALTLTRDQGYPSVFYGDYYGIPTHGVPAMKSKISPILEARQKYAYGKQNDYLDHHNMIGWTREGNTAHPNSGLATIMSDGPGGNKWMYVGRNKAGQVWRDITGNRSGTVTINADGWGNFSVNGGSVSIWV

SEQ ID NO: 21205 - protein, 483 aa, Synthetic construct
HHNGTNGTMMQYFEWYLPNDGNHWNRLRSDASNLKDKGITAVWIPPAWKGASQNDVGYGAYDLYDLGEFNQKGTVRTKYGTRNQLQAAVTALKSNGIQVYGDVVMNHKGGADATEWVRAVEVNPSNRNQEVSGDYTIEAWTKFDFPGRGNTHSNFKWRWWHFDGVDWDQSRQLQNRIYKFRGDGKEWDWEVDTENGNYDYLMYADYDMDHPEVVNELRNWGVWYTNTLGLDGFRIDAVKHIKYSFTRDWLTHVRNTTGKNMFAVAEFWKNDIGAIENYLSKTNWNHSVFDVPLHYNLYNASRSGGNYDMRQIFNGTVVQRHPTHAVTFVDNHDSQPEEALESFVEEWFKPLAYALTLTRDQGYPSVFYGDYYGIPTHGVPAMKSKIDPILEARQKYAYGKQNDYMDHHNMIGWTREGNTAHPNSGLATIMSDGPGGNKWMYVGRNKAGQVWRDITGNRSGTVTINADGWGNFSVNGGSVSIWV

SEQ ID NO: 21206 - protein, 483 aa, Synthetic construct
HHNGTNGTMMQYFEWYLPNDGNHWNRLRSDASNLKDKGITAVWIPPAWKGASQNDVGYGAYDLYDLGEFNQKGTVRTKYGTRNQLQAAVTALKSNGIQVYGDVVMNHKGGADATEWVRAVEVNPSNRNQEVSGDYTIEAWTKFDFPGRGNTHSNFKWRWWHFDGVDWDQSRQLQNRIYKFRGDGKEWDWEVDTENGNYDYLMYADIDMDHPEVVNELRNWGVWYTNTLGLDGFRIDAVKHIKYSFTRDWLTHVRNTTGKNMFAVAEFWKNDIGAIENYLSKTNWNHSVFDVPLHYNLYNASRSGGNYDMRQIFNGTVVQRHPTHAVTFVDNHDSQPEEALESFVEEWFKPLAYALTLTRDQGYPSVFYGDYYGIPTHGVPAMKSKIDPILEARQKYAYGKQNDYMDHHNMIGWTREGNTAHPNSGLATIMSDGPGGNKWMYVGRNKAGQVWRDITGNRSGTVTINADGWGNFSVNGGSVSIWV

SEQ ID NO: 21207 - protein, 483 aa, Synthetic construct
HHNGTNGTMMQYFEWYLPNDGNHWNRLRSDASNLKDKGITAVWIPPAWKGASQNDVGYGAYDLYDLGEFNQKGTVRTKYGTRNQLQAAVTALKSNGIQVYGDVVMNHKGGADATEWVRAVEVNPSNRNQEVSGDYTIEAWTKFDFPGRGNTHSNFKWRWYHFDGVDWDQSRQLQNRIYKFRGDGKGWDWEVDTENGNYDYLMYADIDMDHPEVVNELRNWGVWYTNTLGLDGFRIDAVKHIKYSFTRDWLTHVRNTTGKNMFAVAEFWKNDIGAIENYLSKTNWNHSVFDVPLHYNLYNASRSGGNYDMRQIFNGTVVQRHKTHAVTFVDNHDSQPEEALESFVEEWFKPLAYALTLTRDQGYPSVFYGDYYGIPTHGVPAMKSKIDPILEARQKYAYGKQNDYLDHHNMIGWTREGNTAHPNSGLATIMSDGPGGNKWMYVGRNKAGQVWRDITGNRSGTVTINADGWGNFSVNGGSVSIWV

SEQ ID NO: 21208 - protein, 483 aa, Synthetic construct
HHNGTNGTMMQYFEWYLPNDGNHWNRLRSDASNLKDKGITAVWIPPAWKGASQNDVGYGAYDLYDLGEFNQKGTVRTKYGTRNQLQAAVTALKSNGIQVYGDVVMNHKGGADATEWVRAVEVNPSNRNQEVSGDYTIEAWTKFDFPGRGNTHSNFKWRWYHFDGVDWDQSRQLQNRIYKFRGDGKGWDWEVDTENGNYDYLMYADIDMDHPEVVNELRNWGVWYTNTLGLDGFRIDAVKHIKYSFTRDWLTHCRNTTGKNMFAVAEFWKNDIGAIENYLSKTNWNHSVFDVPLHYNLYNASRSGGNYDMRQIFNGTVVQRHPTHAVTFVDNHDSQPEEALESFVEEWFKPLAYALTLTRDQGYPSVFYGDYYGIPTHGVPAMKSKIDPILEARQKYAYGKQNDYLDHHNMIGWTREGNTAHPNSGLATIMSDGPGGNKWMYVGRNKAGQVWRDITGNRSGTVTINADGWGNFSVNGGSVSIWV

SEQ ID NO: 21209 - protein, 483 aa, Bacillus sp.
HHNGTNGTMMQYFEWYLPNDGNHWNRLRSDASNLKDKGITAVWIPPAWKGASQNDVGYGAYDLYDLGEFNQKGTVRTKYGTRNQLQAAVTALKNNGIQVYGDVVMNHKGGADATEMVRAVEVNPSNRNQEVSGDYTIEAWTRFDFPGRGNTHSNFKWRWYHFDGVDWDQSRQLQNRIYKFRGDGKAWDWEVDTENGNYDYLMYADIDMDHPEVVNELRNWGVWYTNTLGLDGFRIGAVKHIKYSFTRDWLTHVRNTTGKNMFAVAEFWKNDIGAIENYLSKTNWNHSVFDVPLHYNLYNASRSGGNYDMRQIFNGTVVQRHPTHAVTFVDNHDSQPEEALESFVEEWFKPLACALTLTRDQGYPSVFYGDYYGIPTHGVPAMKSKIDPILEARQKYAYGKQNDYLDHHNMIGWTREGNTAHPNSGLATIMSDGPGGNKWMYVGRNKAGQVWRDITGNRSGTVTINADGWGNFSVNGGSVSIWV

SEQ ID NO: 21210 - protein, 483 aa, Synthetic construct
HHNGTNGTMMQYFEWYLPNDGNHWNRLRSDASNLKDKGITAVWIPPAWKGASQNDVGYGAYDLYDLGEFNQKGTVRTKYGTRNQLQAAVTALKSNGIQVYGDVVMNHKGGADATEWVRAVEVNPSNRNQEVSGDYTIEAWTKFDFPGRGNTHSNFKWRWYHFDGVDWDQSRQLQNRIYKFRGDGKGWDWEVDTENGNYDYLMYADIDMDHPEVVNELRNWGVWYTNTLGLDGFRIDAVKHIKDSFTRDWLTHVRNTTGKNMFAVAEFWKNDIGAIENYLSKTNWNHSVFDVPLHYNLYNASRSGGNYDMRQIFNGTVVQRHPTHAVTFVDNHDSQPEEALESFVEEWFKPLAYALTLTRDQGYPSVFYGDYYGIPTHGVPAMKSKIDPILEARQKYAYGKQNDYLDHHNMIGWTREGNTAHPNSGLATIMSDGPGGNKWMYVGRNKAGQVWRDITGNRSGTVTINADGWGNFSVNGGSVSIWV

SEQ ID NO: 21211 - protein, 483 aa, Synthetic construct
HHNGTNGTMMQYFEWYLPNDGNHWNRLRSDASNLKDKGITAVWIPPAWKGASQNDVGYGAYDLYDLGEFNQKGTVRTKYGTRNQLQAAVTALKSNGIQVYGDVVMNHKGGADATEWVRAVEVNPSDRNQEVSGDYTIEAWTKFDFPGRGNTHSNFKWRWYHFDGVDWDQSRQLQNRIYKFRGDGKGWDWEVDTENGNYDYLMYADIDMDHPEVVNELRNWGVWYTNTLGLDGFRIDAVKHIKYSFTRDWLTHVRNTTGKNMFAVAEFWKNDIGAIENYLSKTNWNHSVFDVPLHYNLYNASRSGGNYDMRQIFNGTVVQRHPTHAVTFVDNHDSQPEEALESFVEEWFKPLAYALTLTRDQGYPSVFYGDYYGIPTHGVPAMKSKIDPILEARQKYAYGKQNDYLDHHNMIGWTREGNTAHPNSGLATIMSDGPGGNKWMYVGRNKAGQVWRDITGNRSGTVTINADGWGNFSVNGGSVSIWV

SEQ ID NO: 21212 - protein, 483 aa, Synthetic construct
HHNGTNGTMMQYFEWYLPNDGNHWNRLRSDASNLKDKGITAVWIPPAWKGASQNDVGYGAYDLYDLGEFNQKGTVRTKYGTRNQLQAAVTALKSNGIQVYGDVVMNHKGGADATEWVRAVEVNPSNRNQEVSGDYTIEAWTKFDFPGRGNTHSNFKWRWYHFDGVDWDQSRQLQNRIYKFRGDGKGWDWEVDTENGNYDYLMYADIDMDHPEVVNELRNWGVWYTNTLGLDGFRIDAVKHIKYSFTRDWLTHVRNTTGKNMFAVAEFWKNDIGAIENYLSKTNWNHSVFDVPLHYNLYNASRSGGNYDMRQIFNGTVVQRHPTHAVTFVDNHDSQPEEALESFVEEWFKPLAYALTLTRDQGYPSVFYGDYYGIPTHGVPAMKSKIDPILKARQKYAYGKQNDYLDHHNMIGWTREGNTAHPNSGLATIMSDGPGGNKWMYVGRNKAGQVWRDITGNRSGTVTINADGWGNFSVNGGSVSIWV

SEQ ID NO: 21213 - protein, 483 aa, Synthetic construct
HHNGTNGTMMQYFEWYLPNDGNHWNRLRSDASNLKDKGITAVWIPPAWKGASQNDVGYGAYDLYDLGEFNQKGTVRTKYGTRNQLQAAVTALKSNGIQVYGDVVMNHKGGADATEWVRAVEVNPSNRNQEVSGDYTIEAWTKFDFPGRGNTHSNFKWRWYHFDGVDWDQSRQLQNKIYKFRGDGKGWDWEVDTENGNYDYLMYADYDMDHPEVVNELRNWGVWYTNTLGLDGFRIDAVKHIKYSFTRDWLTHVRNTTGKNMFAVAEFWKNDIGAIENYLSKTNWNHSVFDVPLHYNLYNASRSGGNYDMRQIFNGTVVQRHPTHAVTFVDNHDSQPEEALESFVEEWFKPLAYALTLTRDQGYPSVFYGDYYGIPTHGVPAMKSKIDPILEARQKYAYGKQNDYLDHHNMIGWTREGNTAHPNSGLATIMSDGPGGNKWMYVGRNKAGQVWRDITGNRSGTVTINADGWGNFSVNGGSVSIWV

SEQ ID NO: 21214 - protein, 483 aa, Synthetic construct
HHNGTNGTMMQYFEWYLPNDGNHWNRLRSDASNLKDKGITAVWIPPAWKGASQNDVGYGAYDLYDLGEFNQKGTVRTKYGTRNQLQAAVTALKSNGIQVYGDVVMNHKGGADATEWVRAVEVNPSNRNQEVSGDYTIEAWTKFDFPGRGNTHSNFKWRWYHFDGVDWDQSRQLQNRIYKFRGDGKGWDWEVDTENGNYDYLMYADIDMDHPEVVNELRNWGVWYTNTLGLDGFRIDAVKHIKYSFTRDWLTHVRNTTGKNMFAVAEFWKNDIGAIENYLSKTNWNHSVFDVPLHYNLYNASRSGGNYDMRQIFNGTVVQRHPTHAVTFVDNHDSQPEEALESFVEEWFKPLAYALTLTRDQGYPSVFYGDYYGIPTHGVPAMKSKIDPILEARQKYAYGKQNDYLDHHNMIGWTREGNTAHPNSGLATIMSDGPGGNKWMYVGRNKAGQVWRDITGNRSGAVTINADGWGNFSVNGGSVSIWV

SEQ ID NO: 21215 - protein, 483 aa, Synthetic construct
HHNGTNGTMMQYFEWYLPNDGNHWNRLRSDASNLKDKGITAVWIPPAWKGASQNDVGYGAYDLYDLGEFNQKGTVRTKYGTRNQLQAAVTALKSNGIQVYGDVVMNHKGGADATEWVRAVEVNPSNRNQEVSGDYTIEAWTKFDFPGRGNTHSNFKWRWYHFDGVDWDQSRQLQNRIYKFRGDGKGWDWEVDTENGNYDYLMYADIDMDHPEVVNELRNWGVWYTNTLGLDGFRIDAVKHIKYSFTRDWLTHVRNTTGKNMFAVAEFWKNDIGAIENYLSSTNWNHSVFDVPLHYNLYNASRSGGNYDMRQIFNGTVVQRHPTHAVTFVDNHDSQPEEALESFVEEWFKPLAYALTLTRDQGYPSVFYGDYYGIPTHGVPAMKSKIDPILEARQKYAYGKQNDYLDHHNMIGWTREGNTAHPNSGLATIMSDGPGGNKWMYVGRNKAGQVWRDITGNRSGTVTINADGWGNFSVNGGSVSIWV

SEQ ID NO: 21216 - protein, 483 aa, Synthetic construct
HHNGTNGTMMQYFEWYLPNDGNHWNRLRSDASNLKDKGITAVWIPPAWKGASQNDVGYGAYDLYDLGEFNQKGTLRTKYGTRNQLQAAVTALKSNGIQVYGDVVMNHKGGADATEWVRAVEVNPSNRNQEVSGDYTIEAWTKFDFPGRGNTHSNFKWRWYHFDGVDWDQSRQLQNRIYKFRGDGKGWDWEVDTENGNYDYLMYADIDMDHPEVVNELRNWGVWYTNTLGLDGFRIDAVKHIKYSFTRDWLTHVRNTTGKNMFAVAEFWKNDIGAIENYLSKTNWNHSVFDVPLHYNLYNASRSGGNYDMRQIFNGTVVQRHPTHAVTFVDNHDSQPEEALESFVEEWFKPLAYALTLTRDQGYPSVFYGDYYGIPTHGVPAMKSKIDPILEARQKYAYGKQNDYLDHHNMIGWTREGNTAHPNSGLATIMSDGPGGNKWMYVGRNKAGQVWRDITGNRSGTVTINADGWGNFSVNGGSVSIWV

SEQ ID NO: 21217 - protein, 483 aa, Synthetic construct
HHNGTNGTMMQYFEWYLPNDGNHWNRLRSDASNLKDKGITAVWIPPAWKGASQNDVGYGAYDLYDLGEFNQKGTVRTKYGTRNQLQAAVTALKSNGIQVYGDVVMNHKGGADATEWVRAVEVNPSNRNQEVSGDYTIEAWTKFDFPGRGNTHSNFEWRWYHFDGVDWDQSRQLQNRIYKFRGDGKGWDWEVDTENGNYDYLMYADIDMDHPEVVNELRNWGVWYTNTLGLDGFRIDAVKHIKYSFTRDWLTHVRNTTGKNMFAVAEFWKNDIGAIENYLSKTNWNHSVFDVPLHYNLYNASRSGGNYDMRQIFNGTVVQRHPTHAVTFVDNHDSQPEEALESFVEEWFKPLAYALTLTRDQGYPSVFYGDYYGIPTHGVPAMKSKIDPILEARQKYAYGKQNDYLDHHNMIGWTREGNTAHPNSGLATIMSDGPGGNKWMYVGRNKAGQVWRDITGNRSGTVTINADGWGNFSVNGGSVSIWV

SEQ ID NO: 21218 - protein, 483 aa, Synthetic construct
HHNGTNGTMMQYFEWYLPNDGNHWNRLRSDASNLKDKGITAVWIPPAWKGASQNDVGYGAYDLYDLGEFNQKGTVRTKYGTRNQLQRAVTALKSNGIQVYGDVVMNHKGGADATEWVRAVEVNPSNRNQEVSGDYTIEAWTKFDFPGRGNTHSNFKWRWYHFDGVDWDQSRQLQNRIYKFRGDGKEWDWEVDTENGNYDYLMYADIDMDHPEVVNELRNWGVWYTNTLGLDGFRIDAVKHIKYSFTRDWLTHVRNTTGKNMFAVAEFWKNDIGAIENYLSKTNWNHSVFDVPLHYNLYNASRSGGNYDMRQIFNGTVVQRHPTHAVTFVDNHDSQPEEALESFVEEWFKPLAYALTLTRDQGYPSVFYGDYYGIPTHGVPAMKSKIDPILEARQKYAYGKQNDYLDHHNMIGWTREGNTAHPNSGLATIMSDGPGGNKWMYVGRNKAGQRWRDITGNRSGTVTINADGWGNFSVNGGSVSIWV

SEQ ID NO: 21219 - protein, 483 aa, Synthetic construct
HHNGTNGTMMQYFEWYLPNDGNHWNRLRSDASNLKDKGITAVWIPPAWKGASQNDVGYGAYDLYDLGEFNQKGTVRTKYGTRNQLQAAVTALKSNGIQVYGDVVMNHKGGADATEWVRAVEVNPSNRNQEVSGDYTIEAWTKFDFPGRGNTHSNFKWRWYHFDGVDWDQSRQLQNRIYKFRGDGKEWDWEVDTENGNYDYLMYADIDMDHPEVVNELRNWGVWYTNTLGLDGFRIDAVKHIKYSFTRDWLEHVRNTTGKNMFAVAEFWKNDIGAIENYLSKTNWNHSVFDVPLHYNLYNASRSGGNYDMRQIFNGTVVQRHPTHAVTFVDNHDSQPEEALESFVEEWFKPLAYALTLTRDQGYPSVFYGDYYGIPTHGVPAMKSKIDPILEARQKYAYGKQNDYLDHHNMIGWTREGNTAHPNSGLATIMSDGPGGNKWMYVGRNKAGQVWRDITGNRSGTVTINADGWGNFSVNGGSVSIWV

SEQ ID NO: 21220 - protein, 483 aa, Synthetic construct
HHNGTNGTMMQYFEWYLPNDGNHWNRLRSDASNLKDKGITAVWIPPAWKGASQNDVGYGAYDLYDLGEFNQKGTVRTKYGTRNQLQAAVTALKSNGIQVYGDVVMNHKGGADATEWVRAVEVNPSNRNQEVSGDYTIEAWTKFDFPGRGNTHSNFKWRWYHFDGVDWDQSRQLQNRIYKFRGDGKGDDWEVDTENGNYDYLMYADIDMDHPEVVNELRNWGVWYTNTLGLDGFRIDAVKHIKYSFTRDWLTHVRNTTGKNMFAVAEFWKNDIGAIENYLSKTNWNHSVFDVPLHYNLYNASRSGGNYDMRQIFNGTVVQRHPTHAVTFVDNHDSQPEEALESFVEEWFKPLAYALTLTRDQGYPSVFYGDYYGIPTHGVPAMKSKIDPILEARQKYAYGKQNDYLDHHNMIGWTREGNTAHPNSGLATIMSDGPGGNKWMYVGRNKAGQVWRDITGNRSGTVTINADGWGNFSVNGGSVSIWV

SEQ ID NO: 21221 - protein, 483 aa, Synthetic construct
HHNGTNGTMMQYFEWYLPNDGNHWHRLRSDASNLKDKGITAVWIPPAWKGASQNDVGYGAYDLYDLGEFNQKGTVRTKYGTRNQLQAAVTALKSNGIQVYGDVVMNHKGGADATEWVRAVEVNPSNRNQEVSGDYTIEAWTKFDFPGRGNTHSNFKWRWYHFDGVDWDQSRQLQNRIYKFRGDGKEWDWEVDTENGNYDYLMYADIDMDHPEVVNELRNWGVWYTNTLGLDGFRIDAVKHIKYSFTRDWLTHVRNTTGKNMFAVAEFWKNDIGAIENYLSKTNWNHSVFDVPLHYNLYNASRSGGNYDMRQIFNGTVVQRHPTHAVTFVDNHDSQPEEALESFVEEWFKPLAYALTLTRDQGYPSVFYGDYYGIPTHGVPAMKSKIDPILEARQKYAYGKQNDYMDHHNMIGWTREGNTAHPNSGLATIMSDGPGGNKWMYVGRNKAGQVWRDITGNRSGTVTINADGWGNFSVNGGSVSIWV

SEQ ID NO: 21222 - protein, 483 aa, Synthetic construct
HHNGTNGTMMQYFEWYLPNDGNHWNRLRSDASNLKDKGITAVWIPPAWKGASQNDVGYGAYDLYDLGEFNQKGTVRTKYGTREQLQAAVTALKSNGIQVYGDVVMNHKGGADATEWVRAVEVNPSNRNQEVSGDYTIEAWTKFDFPGRGNTHSNFKWRWYHFDGVDWDQSRQLQNRIYKFRGDGKEWDWEVDTENGNYDYLMYADIDMDHPEVVNELRRWGVWYTDTLGLDGFRIDAVKHIKYSFTRDWLTHVRNTTGKNMFAVAEFWKNDIGAIENYLSKTNWNHSVFDVPLHYNLYNASRSGGNYDMRQIFEGTVVQRHPTHAVTFVDNHDSQPEEALESFVEEWFKPLAYALTLTRDQGYPSVFYGDYYGIPTHGVPAMKSKIDPILEARQKYAYGKQNDYLDHHNMIGWTREGNTAHPNSGLATIMSDGPGGNKWMYVGRNKAGQVWRDITGNRSGTVTINADGWGNFSVNGGSVSIWV

SEQ ID NO: 21223 - protein, 483 aa, Synthetic construct
HHNGTNGTMMQYFEWYLPNDGNHWNRLRSDASNLKDKGITAVWIPPAWKGVSQNDVGYGAYDLYDLGEFNQKGTVRTKYGTRNQLQAAVTALKSNGIQVYGDVVMNHKGGADATEWVRAVEVNPSNRNQEVSGDYTIEAWTKFDFPGRGNTHSNFKWRWYHFDGVDWDQSRQLQNRIYKFRGDGKGWDWEVDTENGNYDYLMYADIDMDHPEVVNELKNWGVWYTNTLGLDGFRIDAVKHIKYSFTRDWLTHVRNTTGKNMFAVAEFWKNDIGAIENYLSKTNWNHSVFDVPLHYNLYNASRSGGNYDMRQIFNGTVVQRHPTHAVTFVDNHDSQPEEALESFVEEWFKPLAYALTLTRDQGYPSVFYGDYYGIPTHGVPAMKSKIDPILEARQKYAYGKQNDYLDHHNMIGWTREGNTAHPNSGLATIMSDGPGGNKWMYVGRNKAGQVWRDITGNRSGTVTINADGWGNFSVNGGSVSIWV

SEQ ID NO: 21224 - protein, 483 aa, Synthetic construct
HHNGTNGTMMQYFEWYLPNDGNHWNRLRSDASNLKDKGITAVWIPPAWKGASQNDVGYGAYDLYDLGEFNQKGTVRTKYGTRNQLQAAVTALKSNGIQVYGDVVMNHKGGADATEWVRAVEVNPSNRNQEVSGDYTIEAWTKFDFPGRGNTHSNFKWRWYHFDGVDWDQSRQLQNRIYKFRGDGEGWDWEVDTENGNYDYLMYADIDMDHPEVVNELRNWGVWYTNTLGLDGFRIDAVKHIKYSFTRDWLTHVRNTTGKNMFAVAEFWKNDIGAIENYLSKTNWNHSVFDVPLHYNLYNASRSGGNYDMRQIFNGTVVQRHPTHAVTFVDNHDSQPEEALESFVEEWFKPLAYALTLTRDQGYPSVFYGDYYGIPTHGVPAMKSKIDPILEARQKYAYGKQNDYLDHHNMIGWTREGNTAHPNSGLATIMSDGPGGNKWMYVGRNKAGQVWRDITGNRSGTVTINADGWGNFSVNGGSVSIWV

SEQ ID NO: 21225 - protein, 483 aa, Synthetic construct
HHNGTNGTMMQYFEWYLPNDGNHWNRLRSDASNLKDKGITAVWIPPAWKGASQNDVGYGAYDLYDLGEFNQKGTVRTKYGTRNQLQAAVTALKSNGIQVYGDVVMNHKGGADATEWVRAVEVNPSNRNQEVSGDYTIEAWTKFDFPGRGNTHSNFKWRWYHFDGVDWDQSRQLQNRIYKFRGDGKGWDWEVDTENGNYDYLMYADIDMDHPEVVNELRNWGVWYTNTLGLDGFRIDAVKHIKYSFTRDWLTHVRNTTGKNMFAVAEFWKNDIGAIENYLSKTNWNHSVFDVPLHYNLYNASRSGGNYDMRQIFNGTVVQRHPTKAVTFVDNHDSQPEEALESFVEEWFKPLAYALTLTRDQGYPSVFYGDYYGIPTHGVPAMKSKIDPILEARQKYAYGKQNDYLDHHNMIGWTREGNTAHPNSGLATIMSDGPGGNKWMYVGRNKAGQVWRDITGNRSGTVTINADGWGNFSVNGGSVSIWV

SEQ ID NO: 21226 - protein, 483 aa, Synthetic construct
HHNGTNGTMMQYFEWYLPNDGNHWNRLRSDASNLKDKGITAVWIPPAWKGASQNDVGYGAYDLYDLGEFNQKGTVRTKYGTRNQLQAAVTALKSNGIQVYGDVVMNHKGGADATEWVRAVEVNPSNRNQEVSGDYTIEAWTKFDFPGRGNTHSNFKWRWYHFDGVDWDQSRQLQNRIYKFRGDGNGWDWEVDTENGNYDYLMYADIDMDHPEVVNELRNWGVWYTNTLGLDGFRIDAVKHIKYSFTRDWLTHVRNTTGKNMFAVAEFWKNDIGAIENYLSKTNWNHSVFDVPLHYNLYNASRSGGNYDMRQIFNGTVVQRHPTHAVTFVDNHDSQPEEALESFVEEWFKPLAYALTLTRDQGYPSVFYGDYYGIPTHGVPAMKSKIDPILEARQKYAYGKQNDYLDHHNMIGWTREGNTAHPNSGLATIMSDGPGGNKWMYVGRNKAGQVWRDITGNRSGTVTINADGWGNFSVNGGSVSIWV

SEQ ID NO: 21227 - protein, 483 aa, Synthetic construct
HHNGTNGTMMQYFEWYLPNDGNHWNRLRSDASNLKDKGITAVWIPPAWKGASQNDVGYGAYDLYDLGEFNQKGTVRTKYGTRNQLQAAVTALKSNGIQVYGDVVMNHKGGADATEWVRAVEVNPSNRNQEVSGDYTIEAWTKFDFPGRGNTHSNFKWRWYHFDGVDWDSSRQLQNRIYKFRGDGKGWDWEVDTENGNYDYLMYADIDMDHPEVVNELRNWGVWYTNTLGLDGFRIDAVKHIKYSFTRDWLTHVRNTTGKNMFAVAEFWKNDIGAIENYLSKTNWNHSVFDVPLHYNLYNASRSGGNYDMRQIFNGTVVQRHPTHAVTFVDNHDSQPEEALESFVEEWFKPLAYALTLTRDQGYPSVFYGDYYGIPTHGVPAMKSKIDPILEARQKYAYGKQNDYLDHHNMIGWTREGNTAHPNSGLATIMSDGPGGNKWMYVGRNKAGQVWRDITGNRSGTVTINADGWGNFSVNGGSVSIWV

SEQ ID NO: 21228 - protein, 483 aa, Synthetic construct
HHNGTNGTMMQYFEWYLPNDGNHWNRLRSDASNLKDKGITAVWIPPAWKGASQNDVGYGAYDLYDLGEFNQKGTVRTKYGTRNQLQAAVTALKSNGIQVYGDVVMNHKGGADATEWVRAVEVNPSNRNQEVSGDYTIEAWTKFDFPGRGNTHSNFKWRWYHFDGTDWDQSRQLQNRIYKFRGDGKGWDWEVDTENGNYDYLMYADIDMDHPEVVNELRNWGVWYTNTLGLDGFRIDAVKHIKYSFTRDWLTHVRNTTGKNMFAVAEFWKNDIGAIENYLSKTNWNHSVFDVPLHYNLYNASRSGGNYDMRQIFNGTVVQRHPTHAVTFVDNHDSQPEEALESFVEEWFKPLAYALTLTRDQGYPSVFYGDYYGIPTHGVPAMKSKIDPILEARQKYAYGKQNDYLDHHNMIGWTREGNTAHPNSGLATIMSDGPGGNKWMYVGRNKAGQVWRDITGNRSGTVTINADGWGNFSVNGGSVSIWV

SEQ ID NO: 21229 - protein, 483 aa, Synthetic construct
HHNGTNGTMMQYFEWYLPNDGNHWNRLRSDASNLKDKGITAVWIPPAWKGASQNDVGYGAYDLYDLGEFNQKGTVRTKYGTRNQLQAAVTALKSNGIQVYGDVVMNHKGGADATEWVRAVEVNPSNRNQEVSGDYTIEAWTKFDFPGRGNTHSNFKWRWYHFDGVDWDQSRQLQNRIYKFRGDGKGWDWEVDTENGNYDYLMYADIDMDHPEVVNELRNWGVWYTNTLGLDGFRIDAVKHIKYSFTRDWLTHVRNTTGKNMFAVAEFWKNDIGAIENYLSKTNWNHSVFDVCLHYNLYNASRSGGNYDMRQIFNGTVVQRHPTHAVTFVDNHDSQPEEALESFVEEWFKPLAYALTLTRDQGYPSVFYGDYYGIPTHGVPAMKSKIDPILEARQKYAYGKQNDYMDHHNMIGWTREGNTAHPNSGLATIMSDGPGGNKWMYVGRNKAGQVWRDITGNRSGTVTINADGWGNFSVNGGSVSIWV

SEQ ID NO: 21230 - protein, 483 aa, Synthetic construct
HHNGTNGTMMQYFEWYLPNDGNHWNRLRSDASMLKDKGITAVWIPPAWKGASQNDVGYGAYDLYDLGEFNQKGTVRTKYGTRNQLQAAVTALKSNGIQVYGDVVMNHKGGADATEWVRAVEVNPSNRNQEVSGDYTIEAWTKFDFPGRGNTHSNFKWRWYHFDGVDWDQSRQLQNRIYKFRGDGKGWDWEVDTENGNYDYLMYADIDMDHPEVVNELRNWGVWYTNTLGLDGFRIDAVKHIKYSFTRDWLTHVRNTTGKNMFAVAEFWKNDIGAIENYLSKTNWNHSVFDVPLHYNLYNASRSGGNYDMRQIFNGTVVQRHPTHAVTFVDNHDSQPEEALESFVEEWFKPLAYALTLTRDQGYPSVFYGDYYGIPTHEVPAMKSKIDPILEARQKYAYGKQNDYLDHHNMIGWTREGNTAHPNSGLATIMSDGPGGNKWMYVGRNKAGQVWRDITGNRSGTVTINADGWGNFSVNGGSVSIWV

SEQ ID NO: 21231 - protein, 483 aa, Synthetic construct
HHNGTNGTMMQYFEWYLPNDGNHWNRLRSDASNLKDKGITAVWIPPAWKGASQNDVGYGAYDLYDLGEFNQKGTVRTKYGTRNQLQAAVTALKSNGIQVYGDVVMNHKGGADATEWVRAVEVNPSNRNQEVSGDYTIEAWTKFDFPGRGNTHSNFKWRWYHFDGVDWDQSRQLQNRIYKFRGDGKGWDWEVDTENGNYDYLMYADIDMDHPEVVNELRNWGVWYTNTLGLDGFRIDAVKHIKYSFTRDWLTHVRNTTGKNMFAVAEFWKNDIGAIENYLSKTNWNHSVFDVPLHYNLYNASRSGGNYDMRQIFNGTVVQRHPTHAVTFVDNHDSQPEEALESFVEEWFKPLAYALTLTRDQGYPSVFYGDYYGIPTHGVPAMKSKIDPILEAQQKYAYGKQNDYLDHHNMIGWTREGNTAHPNSGLATIMSDGPGGNKWMYVGRNKAGQVWRDITGNRSGTVTINADGWGNFSVNGGSVSIWV

SEQ ID NO: 21232 - protein, 483 aa, Synthetic construct
HHNGTNGTMMQYFEWYLPNDGNHWNRLRSDASNLKDKGITAVWIPPAWKGASQNDVGYGAYDLYDLGEFNQKNTVRTKYGTRNQLQAAVTALKSNGIQVYGDVVMNHKGGADATEWVRAVEVNPSNRNQEVSGDYTIEAWTKFDFPGRGNTHSNFKWRWYHFDGVDWDQSRQLQNRIYKFRGDGKGWDWEVDTENGNYDYLMYADIDMDHPEVVNELRNWGVWYTNTLGLDGFRIDAVKHIKYSFTRDWLTHVRNTTGKNMFAVAEFWKNDIGAIENYLSKTNWNHSVFDVPLHYNLYNASRSGGNYDMRQIFNGTVVQRHPTHAVTFVDNHDSQPEEALESFVEEWFKPLAYALTLTRDQGYPSVFYGDYYGIPTHGVPAMKSKIDPILEARQKYAYGKQNDYLDHHNMIGWTREGNTAHPNSGLATIMSDGPGGNKWMYVGRNKAGQVWRDITGNRSGTVTINADGWGNFSVNGGSVSIWV

SEQ ID NO: 21233 - protein, 483 aa, Synthetic construct
HHNGTNGTMMQYFEWYLPNDGNHWNRLRSDASNLKDKGITAVWIPPAWKGASQNDVGYGAYDLYDLGEFNQKGTVRTKYGTRNQLQAAVTALKSNGIQVYGDVVMNHKGGADATEWVRAVEVNPSNRNQEVSGDYTIEAWTKFDFPGRGNTHSNFKWRWYHFDGVDWDQSRQLQNKIYKFRGDGKEWDWEVDTENGNYDYLMYADYDMDHPEVVNELRNWGVWYTNTLGLDGFRIDAVKHIKYSFTRDWLTHVRNTTGKNMFAVAEFWKNDIGAIENYLSKTNWNHSVFDVPLHYNLYNASRSGGNYDMRQIFNGTVVQRHPTHAVTFVDNHDSQPEEALESFVEEWFKPLAYALTLTRDQGYPSVFYGDYYGIPTHGVPAMKSKIDPILEARQKYAYGKQNDYMDHHNMIGWTREGNTAHPNSGLATIMSDGPGGNKWMYVGRNKAGQVWRDITGNRSGTVTINADGWGNFSVNGGSVSIWV

SEQ ID NO: 21234 - protein, 483 aa, Synthetic construct
HHNGTNGTMMQYFEWYLPNDGNHWYRLRSDASNLKDKGITAVWIPPAWKGASQNDVGYGAYDLYDLGEFNQKGTVRTKYGTRNQLQAAVTALKSNGIQVYGDVVMNHKGGADATEWVRAVEVNPSNRNQEVSGDYTIEAWTKFDFPGRGNTHSNFKWRWYHFDGVDWDQSRQLQNRIYKFRGDGKGWDWEVDTENGNYDYLMYADIDMDHPEVVNELRNWGVWYTNTLGLDGFRIDAVKHIKYSFTRDWLTHVRNTTGKNMFAVAEFWKNDIGAIENYLSKTNWNHSVFDVPLHYNLYNASRSGGNYDMRQIFNGTVVQRHPTHAVTFVDNHDSQPEEALESFVEEWFKPLAYALTLTRDQGYPSVFYGDYYGIPTHGVPAMKSKIDPILEARQKYAYGKQNDYLDHHNMIGWTREGNTAHPNSGLATIMSDGPGGNKWMYVGRNKAGQVWRDITGNRSGTVTINADGWGNFSVNGGSVSIWV

SEQ ID NO: 21235 - protein, 483 aa, Synthetic construct
HHNGTNGTMMQYFEWYLPNDGNHWNRLRSDASNLKDKGITAVWIPPAWKGASQNDVGYGAYDLYDLGEFNQKGTVRTKYGTRNQLQAAVTALKSNGIQVYGDVVMNHKGGADATEWVRAVEVNPSNRNQEVSGDYTIEAWTKFDFPGRGNTHSNFKWRWYHFDGVDWDQSRQLQNRAYKFRGDGKGWDWEVDTENGNYDYLMYADIDMDHPEVVNELRNWGVWYTNTLGLDGFRIDAVKHIKYSFTRDWLTHVRNTTGKNMFAVAEFWKNDIGAIENYLSKTNWNHSVFDVPLHYNLYNASRSGGNYDMRQIFNGTVVQRHPTHAVTFVDNHDSQPEEALESFVEEWFKPLAYALTLTRDQGYPSVFYGDYYGIPTHGVPAMKSKIDPILEARQKYAYGKQNDYLDHHNMIGWTREGNTAHPNSGLATIMSDGPGGNKWMYVGRNKAGQVWRDITGNRSGTVTINADGWGNFSVNGGSVSIWV

SEQ ID NO: 21236 - protein, 483 aa, Synthetic construct
HHNGTNGTMMQYFEWYLPNDGNHWNRLRSDASNLKDKGITAVWIPPAWKGASQNDVGYGAYDLYDLGEFNQKGTVRTKYGTRNQLQAAVTALKSNGIQVYGDVVMNHKGGADATEWVRAVEVNPSNRNQEVSGDYTIEAWTKFDFPGRGNTHSNFKWRWWHFDGVDWDQSRQLQNRIYKFRGDGKEWDWEVDTENGNYDYLMYADIDMDHPEVVNELRNWGVWYTNTLGLDGFRIDAVKHIKYSFTRDWLTHVRNTTGKNMFAVAEFWKNDIGAIENYLSKTNWNHSVFDVPLHYNLYNASRSGGNYDMRQIFNGTVVQRHPGHAVTFVDNHDSQPEEALESFVEEWFKPLAYALTLTRDQGYPSVFYGDYYGIPTHGVPAMKSKIDPILEARQKYAYGKQNDYMDHHNMIGWTREGNTAHPNSGLATIMSDGPGGNKWMYVGRNKAGQVWRDITGNRSGTVTINADGWGNFSVNGGSVSIWV

SEQ ID NO: 21237 - protein, 483 aa, Synthetic construct
HHNGTNGTMMQYFEWYLPNDGNHWNRLRSDASNLKDKGITAVWIPPAWKGASQNDVGYGAYDLYDLGEFNQKGTVRTKYGTRNQLQAAVTALKSNGIQVYGDVVMNHKGGADATEWVRAVEVNPSNRNQEVSGDYTIESWTKFDFPGRGNTHSNFKWRWYHFDGVDWDQSRQLQNRIYKFRGDGKGWDWEVDTENGNYDYLMYADIDMDHPEVVNELRNWGVWYTNTLGLDGFRIDAVKHIKYSFTRDWLTHVRNTTGKNMFAVAEFWKNDIGAIENYLSKTNWNHSVFDVPLHYNLYNASRSGGNYDMRQIFNGTVVQRHPTHAVTFVDNHDSQPEEALESFVEEWFKPLAYALTLTRDQGYPSVFYGDYYGIPTHGVPAMKSKIDPILEARQKYAYGKQNDYLDHHNMIGWTREGNTAHPNSGLATIMSDGPGGNKWMYVGRNKAGQVWRDITGNRSGTVTINADGWGNFSVNGGSVSIWV

SEQ ID NO: 21238 - protein, 483 aa, Synthetic construct
HHNGTNGTMMQYFEWYLPNDGNHWHRLRSDASNLKDKGITAVWIPPAWKGASQNDVGYGAYDLYDLGEFNQKGTVRTKYGTRNQLQAAVTALKSNGIQVYGDVVMNHKGGADATEWVRAVEVNPSNRNQEVSGDYTIEAWTKFDFPGRGNTHSNFKWRWYHFDGVDWDQSRQLQNRIYKFRGDGKEWDWEVDTENGNYDYLMYADIDMDHPEVVNELRNWGVWYTNTLGLDGFRIDAVKHIKYSFTRDWLTHVRNTTGKNMFAVAEFWKNDIGAIENYLSKTNWNHSVFDVPLHYNLYNASRSGGNYDMRQIFNGTVVQRHPTHAVTFVDNHDSQPEEALESFVEEWFKPLAYALTLTRDQGYPSVFYGDYYGIPTHGVPAMKSKIDPILEARQKYAYGKQNDYLDHHNMIGWTREGNTAHPNSGLATIMSDGPGGNKWMYVGRNKAGQVWRDITGNRSGTVTINADGWGNFSVNGGSVSIWV

SEQ ID NO: 21239 - protein, 483 aa, Synthetic construct
HHNGTNGTMMQYFEWYLPNDGNHWNRLRSDASNLKDKGITAVWIPPAWKGASQNDVGYGAYDLYDLGEFNQKGTVRTKYGTRNQLQAAVTALKSNGIQVYGDVVMNHKGGADATEWVRAVEVNPSNRNQEVSGDYTIEAWTKFDFPGRGNTHSNFKWRWYHFDGVDWDQSRQLQNSIYKFRGDGKGWDWEVDTENGNYDYLMYADIDMDHPEVVNELRNWGVWYTNTLGLDGFRIDAVKHIKYSFTRDWLTHVRNTTGKNMFAVAEFWKNDIGAIENYLSKTNWNHSVFDVPLHYNLYNASRSGGNYDMRQIFNGTVVQRHPTHAVTFVDNHDSQPEEALESFVEEWFKPLAYALTLTRDQGYPSVFYGDYYGIPTHGVPAMKSKIDPILEARQKYAYGKQNDYLDHHNMIGWTREGNTAHPNSGLATIMSDGPGGNKWMYVGRNKAGQVWRDITGNRSGTVTINADGWGNFSVNGGSVSIWV

SEQ ID NO: 21240 - protein, 483 aa, Synthetic construct
HHNGTNGTMMQYFEWYLPNDGNHWNRLRSDASNLKDKGITAVWIPPAWKGASQNDVGYGAYDLYDLGEFNQKGTVRTKYGTRNQLQAAVTALKSNGIQVYGDVVMNHKGGADATEWVRAVEVNPSNRNQEVSGDYTIEAWTKFDFPGRGNTHSNFKWRWYHFDGVDWDQSRQLQNRIYKFRGDGKGWDWEVDTENGNYDYLMYADIDMDHPEVVNELRNWGVWYTNTLGLDGFRIDAVKHIKYSFTRDWLTHVRNTTGKNMFAVAEFWKNDIGAIENYLSKTNWNHSVFDVPLHYNLYNASRSGGNYDMRQIFNGTVVQRHPTHAVTFVDNHDSQPEEALESFVEEWFKPLAYALTLTRDQGYPSVFYGSYYGIPTHGVPAMKSKIDPILEARQKYAYGKQNDYLDHHNMIGWTREGNTAHPNSGLATIMSDGPGGNKWMYVGRNKAGQVWRDITGNRSGTVTINADGWGNFSVNGGSVSIWV

SEQ ID NO: 21241 - protein, 483 aa, Synthetic construct
HHNGTNGTMMQYFEWYLPNDGNHWNRLRSDASNLKDKGITAVWIPPAWKGASQNDVGYGAYDLYDLGEFNQKGTVRTKYGTRNQLQAAVTALKSNGIQVYGDVVMNHKGGADATEWVRAVEVNPSNRNQEVSGDYTIEAWTKFDFPGRGNTHSNFKWRWYHFDGVDWDQSRQLQNRIYKFRGDGKGWDWEVDTENGNYDYLMYADIDMDHPEVVNELRNWGVWYTNTLGLDGFRIDAVKHIKYSFTRDWLTHVRNTTGKNMFAVAEFWKNDIGAIENYLSKTNWNHSVFDVPLHYNLYNASRSGGNYDMRQIFNGTMVQRHPTHAVTFVDNHDSQPEEALESFVEEWFKPLAYALTLTRDQGYPSVFYGDYYGIPTHGVPAMKSKIDPILEARQKYAYGKQNDYLDHHNMIGWTREGNTAHPNSGLATIMSDGPGGNKWMYVGRNKAGQVWRDITGNRSGTVTINADGWGNFSVNGGSVSIWV

SEQ ID NO: 21242 - protein, 483 aa, Synthetic construct
HHNGTNGTMMQYFEWYLPNDGNHWNRLRSDASNLKDKGITAVWIPPAWKGASQNDVGYGAYDLYDLGEFNQKGTVRTKYGTRNQLQAAVTALKSNGIQVYGDVVMNHKGGADATEWVRAVEVNPSNRNQEVSGDPTIEAWTKFDFPGRGNTHSNFKWRWYHFDGVDWDQSRQLQNRIYKFRGDGKGWDWEVDTENGNYDYLMYADIDMDHPEVVNELRNWGVWYTNTLGLDGFRIDAVKHIKYSFTRDWLTHVRNTTGKNMFAVAEFWKNDIGAIENYLSKTNWNHSVFDVPLHYNLYNASRSGGNYDMRQIFNGTVVQRHPTHAVTFVDNHDSQPEEALESFVEEWFKPLAYALTLTRDQGYPSVFYGDYYGIPTHGVPAMKSKIDPILEARQKYAYGKQNDYLDHHNMIGWTREGNTAHPNSGLATIMSDGPGGNKWMYVGRNKAGQVWRDITGNRSGTVTINADGWGNFSVNGGSVSIWV

SEQ ID NO: 21243 - protein, 483 aa, Synthetic construct
HHNGTNGTMMQYFEWYLPNDGNHWNRLRSDASNLKDKGITAVWIPPAWKGASQNDVGYGAYDLYDLGEFNQKGTVRTKYGTRNQLQAAVTALKSNGIQVYGDVVMNHKGGADATEWVRAVEVNPSNRNQEVSGDYTIEAWTKFDFPGRGNTHSNFKWRWYHFDGVDWDQSRQLQNRIYKFRGDGKEWDWEVDTENGNYDYLMYADYDMDHPEVVNELRNWGVWYTNTLGLDGFRIDAVKHIKYSFTRDWLEHVRNTTGKNMFAVAEFWKNDIGAIENYLSKTNWNHSVFDVPLHYNLYNASRSGGNYDMRQIFNGTVVQRHPTHAVTFVDNHDSQPEEALESFVEEWFKPLAYALTLTRDQGYPSVFYGDYYGIPTHGVPAMKSKIDPILEARQKYAYGKQNDYMDHHNMIGWTREGNTAHPNSGLATIMSDGPGGNKWMYVGRNKAGQVWRDITGNRSGTVTINADGWGNFSVNGGSVSIWV

SEQ ID NO: 21244 - protein, 483 aa, Synthetic construct
HHNGTNGTMMQYFEWYLPNDGNHWNRLRSDASNLKDKGITAVWIPPAWKGASQNDVGYGAYDLYDLGEFNQKGTVRTKYGTRNQLQAAVTALKMNGIQVYGDVVMNHKGGADATEWVRAVEVNPSNRNQEVSGDYTIEAWTKFDFPGRGNTHSNFKWRWYHFDGVDWDQSRQLQNRIYKFRGDGKGWDWEVDTENGNYDYLMYADIDMDHPEVVNELRNWGVWYTNTLGLDGFRIDAVKHIKYSFTRDWLTHVRNTTGKNMFAVAEFWKNDIGAIENYLSKTNWNHSVFDVPLHYNLYNASRSGGNYDMRQIFNGTVVQRHPTHAVTFVDNHDSQPEEALESFVEEWFKPLAYALTLTRDQGYPSVFYGDYYGIPTHGAPAMKSKIDPILEARQKYAYGKQNDYLDHHNMIGWTREGNTAHPNSGLATIMSDGPGGNKWMYVGRNKAGQVWRDITGNRSGTVTINADGWGNFSVNGGSVSIWV

SEQ ID NO: 21245 - protein, 483 aa, Synthetic construct
HHNGTNGTMMQYFEWYLPNDGNHWNRLRSDASNLKDKGITAVWIPPAWKGASQNDVGYGAYDLYDLGEFNQKGTVRTKYGTRNQLQAAVTALKSNGIQVYGDVVMNHKGGADATEWVRAVEVNPSNRNQEVSGDYTIEAWTKFDFPGRGNTHSNFKWRWYHFDGVDWDQSRQLQNRIYKFRGDGKGWDWEVDTENGNYDYLMYADIDMDHPEVVNELRNWGVWYTNTLGLDGFRIDAVKHIKYSFTRDWLTHVRNTTRKNMFAVAEFWKNDIGAIENYLSKTNWNHSVFDVPLHYNLYNASRSGGNYDMRQIFNGTVVQRHPTHAVTFVDNHDSQPEEALESFVEEWFKPLAYALTLTRDQGYPSVFYGDYYGIPTHGVPAMKSKIDPILEARQKYAYGKQNDYLDHHNMIGWTREGNTAHPNSGLATIMSDGPGGNKWMYVGRNKAGQVWRDITGNRSGTVTINADGWGNFSVNGGSVSIWV

SEQ ID NO: 21246 - protein, 483 aa, Synthetic construct
HHNGTNGTMMQYFEWYLPNDGNHWHRLRSDASNLKDKGITAVWIPPAWKGASQNDVGYGAYDLYDLGEFNQKGTVRTKYGTRNQLQAAVTALKSNGIQVYGDVVMNHKGGADATEWVRAVEVNPSNRNQEVSGDYTIEAWTKFDFPGRGNTHSNFKWRWYHFDGVDWDQSRQLQNRIYKFRGDGKGWDWEVDTENGNYDYLMYADIDMDHPEVVNELRNWGVWYTNTLGLDGFRIDAVKHIKYSFTRDWLTHVRNTTGKNMFAVAEFWKNDIGAIENYLSKTNWNHSVFDVPLHYNLYNASRSGGNYDMRQIFNGTVVQRHPTHAVTFVDNHDSQPEEALESFVEEWFKPLAYALTLTRDQGYPSVFYGDYYGIPTHGVPAMKSKIDPILEARQKYAYGKQNDYLDHHNMIGWTREGNTAHPNSGLATIMSDGPGGNKWMYVGRNKAGQVWRDITGNRSGTVTINADGWGNFSVNGGSVSIWV

SEQ ID NO: 21247 - protein, 483 aa, Synthetic construct
HHNGTNGTMMQYFEWYLPNDGNHWNRLRSDASNLKDKGITAVWIPPAWKGASQNDVGYGAYDLYDLGEFNQKGTVRTKYGTRNQLQAAVTALKSNGIQVYGDVVMNHKGGADATEWVRAVEVNPSNRNQEVSGDWTIEAWTKFDFPGRGNTHSNFKWRWYHFDGVDWDQSRQLQNRIYKFRGDGKGWDWEVDTENGNYDYLMYADIDMDHPEVVNELRNWGVWYTNTLGLDGFRIDAVKHIKYSFTRDWLTHVRNTTGKNMFAVAEFWKNDIGAIENYLSKTNWNHSVFDVPLHYNLYNASRSGGNYDMRQIFNGTVVQRHPTHAVTFVDNHDSQPEEALESFVEEWFKPLAYALTLTRDQGYPSVFYGDYYGIPTHGVPAMKSKIDPILEARQKYAYGKQNDYLDHHNMIGWTREGNTAHPNSGLATIMSDGPGGNKWMYVGRNKAGQVWRDITGNRSGTVTINADGWGNFSVNGGSVSIWV

SEQ ID NO: 21248 - protein, 483 aa, Synthetic construct
HHNGTNGTMMQYFEWYLPNDGNHWNRLRSDASNLKDKGITAVWIPPAWKGASQNDVGYGAYDLYDLGEFNQKGTVRTKYGTRNQLQAAVTALKSNGIQVYGDVVMNHKGGADATEWVRAVEVNPSNRNQEVSGDYTIEAWTKFDFPGRGNTHSNFKWRWYHFDGVDWDQSRQLQNRIYKFRGDGKGWDWEVDTENGNYDYLMYADIDMDHPEVVNELRNWGVWYTNTLGLDGFRIDAVKHIKYSFTRDWLTHVRNTTGKNMFAVAEFWKNDIGAIENYLSKTNWNHSVFDVPLHYNMYNASRSGGNYDMRQIFNGTVVQRHPTHAVTFVDNHDSQPEEALESFVEEWFKPLAYALTLTRDQGYPSVFYGDYYGIPTHGVPAMKSKIDPILEARQKYAYGKQNDYLDHHNMIGWTREGNTAHPNSGLATIMSDGPGGNKWMYVGRNKAGQVWRDITGNRSGTVTINADGWGNFSVNGGSVSIWV

SEQ ID NO: 21249 - protein, 483 aa, Synthetic construct
HHNGTNGTMMQYFEWYLPNDGNHWNRLRSDASNLKDKGITAVWIPPAWKGASQNDVGYGAYDLYDLGEFNQKGTVRTKYGTRNQLQAAVTALKSNGIQVYGDVVMNHKGGADATEWVRAVEVNPSNRNQEVSGDYTIEAWTKFDFPGRGNTHSNFKWRWYHFDGVDWDQSRQLQNRIYKFRGDGKGWDWEVDTENGNYDYLMYADIDMDHPEVVNELRNWGVWYTNTLGLDGFRIDAVKHIKYSFTRDWLTHVRNTTGKNMFAVAEFWKNDIGAIENYLSKTNWNHSVFDVPLHYNLYNASRSGGNYDMRQIFNGTVVQRHPTHAVTFVDNHDSQPEEALESFVEEWFKPLAYALTLTRDQGYPSVFYGDYMGIPTHGVPAMKSKIDPILEARQKYAYGKQNDYLDHHNMIGWTREGNTAHPNSGLATIMSDGPGGNKWMYVGRNKAGQVWRDITGNRSGTVTINADGWGNFSVNGGSVSIWV

SEQ ID NO: 21250 - protein, 483 aa, Synthetic construct
HHNGTNGTMMQYFEWYLPNDGNHWNRLRSDASNLKDKGITAVWIPPAWKGASQNDVGYGAYDLYDLGEFNQKGTVRTKYGTRNQLQAAVTALKSNGIQVYGDVVMNHKGGADATEWVRAVEVNPSNRNQEVSGDYTIEAWTKFDFPGRGNTHSNFKWRWYHFDGVDWDQSRQLQNRIYKFRGDGKEWDWEVDEENGNYDYLMYADYDMDHPEVVNELRNWGVWYTNTLGLDGFRIDAVKHIKYSFTRDWLEHVRNTTGKNMFAVAEFWKNDIGAIENYLSKTNWNHSVFDVPLHYNLYNASRSGGNYDMRQIFNGTVVQRHPTHAVTFVDNHDSQPEEALESFVEEWFKPLAYALTLTRDQGYPSVFYGDYYGIPTHGVPAMKSKIDPILEARQKYAYGKQNDYLDHHNMIGWTREGNTAHPNSGLATIMSDGPGGNKWMYVGRNKAGQVWRDITGNRSGTVTINADGWGNFSVNGGSVSIWV

SEQ ID NO: 21251 - protein, 483 aa, Synthetic construct
HHNGTNGTMMQYFEWYLPNDGNHWNRLRSDASNLKDKGITAVWIPPAWKGASQNDVGYGAYDLYDLGEFNQKGTVRTKYGTRNQLQAAVTALKSNGIQVYGDVVMNHKGGADATEWVRAVEVNPSNRNQEVSGDYTIEAWTKFDFPGRGNTHSNFKWRWYHFDGVDWDQSRQLQNRPYKFRGDGKGWDWEVDTENGNYDYLMYADIDMDHPEVVNELRNWGVWYTNTLGLDGFRIDAVKHIKYSFTRDWLTHVRNTTGKNMFAVAEFWKNDIGAIENYLSKTNWNHSVFDVPLHYNLYNASRSGGNYDMRQIFNGTVVQRHPTHAVTFVDNHDSQPEEALESFVEEWFKPLAYALTLTRDQGYPSVFYGDYYGIPTHGVPAMKSKIDPILEARQKYAYGKQNDYLDHHNMIGWTREGNTAHPNSGLATIMSDGPGGNKWMYVGRNKAGQVWRDITGNRSGTVTINADGWGNFSVNGGSVSIWV

SEQ ID NO: 21252 - protein, 483 aa, Synthetic construct
HHNGTNGTMMQYFEWYLPNDGNHWNRLRSDASNLKDKGITAVWIPPAWKGASQNDVGYGAYDLYDLGEFNQKGTVRTKYGTRNQLQAAVTALKSNGIQVYGDVVMNHKGGADATEWVRAEEVNPSNRNQEVSGDYTIEAWTKFDFPGRGNTHSNFKWRWYHFDGVDWDQSRQLQNRIYKFRGDGKGWDWEVDTENGNYDYLMYADIDMDHPEVVNELRNWGVWYTNTLGLDGFRIDAVKHIKYSFTRDWLTHVRNTTGKNMFAVAEFWKNDIGAIENYLSKTNWNHSVFDVPLHYNLYNASRSGGNYDMRQIFNGTVVQRHPTHAVTFVDNHDSQPEEALESFVEEWFKPLAYALTLTRDQGYPSVFYGDYYGIPTHGVPAMKSKIDPILEARQKYAYGKQNDYLDHHNMIGWTREGNTAHPNSGLATIMSDGPGGNKWMYVGRNKAGQVWRDITGNRSGTVTINADGWGNFSVNGGSVSIWV

SEQ ID NO: 21253 - protein, 483 aa, Synthetic construct
HHNGTNGTMMQYFEWYLPNNGNHWNRLRSDASNLKDKGITAVWIPPAWKGASQNDVGYGAYDLYDLGEFNQKGTVRTKYGTRNQLQAAVTALKSNGIQVYGDVVMNHKGGADATEWVRAVEVNPSNRNQEVSGDYTIEAWTKFDFPGRGNTHSNFKWRWYHFDGVDWDQSRQLQNRIYKFRGDGKGWDWEVDTENGNYDYLMYADIDMDHPEVVNELRNWGVWYTNTLGLDGFRIDAVKHIKYSFTRDWLTHVRNTTGKNMFAVAEFWKNDIGAIENYLSKTNWNHSVFDVPLHYNLYNASRSGGNYDMRQIFNGTVVQRHPTHAVTFVDNHDSQPEEALESFVEEWFKPLAYALTLTRDQGYPSVFYGDYYGIPTHGVPAMKSKIDPILEARQKYAYGKQNDYLDHHNMIGWTREGNTAHPNSGLATIMSDGPGGNKWMYVGRNKAGQVWRDITGNRSGTVTINADGWGNFSVNGGSVSIWV

SEQ ID NO: 21254 - protein, 483 aa, Synthetic construct
HHNGTNGTMMQYFEWYLPNDGNHWNRLRSDASNLKDKGITAVWIPPAWKGASQNDVGYGAYDLYDLGEFNQKGTVRTKYGTRNQLQAAVTALKSNGIQVYGDVVMNHKGGADATEWVRAVEVNPSNRNQEVSGDYTIEAWTKFDFPGRGNTHSNFKWRWYHFDGVDWDQSRQLQNRIYKFRGDGKGWDWEVDTENGNYDYLMYADIDMDHPEVVNELRNWGVWYTNTLGLDGFRIDAVKHIKYSFTRDWLTHVRNTTGKNMFAVAEFWKNDIGAIENYLSKTNWNHSVFDVPLHYNLYNASRSGGNYDMRQIFNGTVVQRHPTHAVTFVDNHDSQPEEALESFVEEWFKPLAYALTFTRDQGYPSVFYGDYYGIPTHGVPAMKSKIDPILEARQKYAYGKQNDYLDHHNMIGWTREGNTAHPNSGLATIMSDGPGGNKWMYVGRNKAGQVWRDITGNRSGTVTINADGWGNFSVNGGSVSIWV

SEQ ID NO: 21255 - protein, 483 aa, Synthetic construct
HHNGTNGTMMQYFEWYLPNDGNHWNRLRSDASNLKDKGITAVWIPPAWKGASQNDVGYGAYDLYDLGEFNQKGTVRTKYGTRNQLQAAVTALKSNGIQVYGDVVMNHKGGADATEWVRAVEVNPSNRNQEVSGDYTIEAWTKFDFPGRGNTHSNFKWRWYHFDGVDWDQSRQLQNRIYKFRGDGKGWDWEVDTENGNYDYLMYADIDMDHPEVVNELRNWGVWYTNTLGLDGFRIDAVKHIKYSFTRDWLTHVRNTTGKNMFAVAEFWKNDIGAIENYLSKTNWNHSVFDVPLHYNLYNASRSGGNYDMRQIFNGTVVQRHPTHAVTFVDNHDSQPEEALESFVEEWFKPLAYALTLTRDQGYPSVFYGDYTGIPTHGVPAMKSKIDPILEARQKYAYGKQNDYLDHHNMIGWTREGNTAHPNSGLATIMSDGPGGNKWMYVGRNKAGQVWRDITGNRSGTVTINADGWGNFSVNGGSVSIWV

SEQ ID NO: 21256 - protein, 483 aa, Synthetic construct
HHNGTNGTMMQYFEWYLPNDGNHWNRLRSDASNLKDKGITAVWIPPAWKGASQNDVGYGAYDLYDLGEFNQKGTVRTKYGTRNQLQAAVTALKSNGIQVYGDVVMNHKGGADATEWVRAVEVNPSNRNQEVSGDYTIEAWTKFDFPGRGNTHSNFKWRWYHFDGVDWDQSRQLQNTIYKFRGDGKGWDWEVDTENGNYDYLMYADIDMDHPEVVNELRNWGVWYTNTLGLDGFRIDAVKHIKYSFTRDWLTHVRNTTGKNMFAVAEFWKNDIGAIENYLSKTNWNHSVFDVPLHYNLYNASRSGGNYDMRQIFNGTVVQRHPTHAVTFVDNHDSQPEEALESFVEEWFKPLAYALTLTRDQGYPSVFYGDYYGIPTHGVPAMKSKIDPILEARQKYAYGKQNDYLDHHNMIGWTREGNTAHPNSGLATIMSDGPGGNKWMYVGRNKAGQVWRDITGNRSGTVTINADGWGNFSVNGGSVSIWV

SEQ ID NO: 21257 - protein, 483 aa, Synthetic construct
HHNGTNGTMMQYFEWYLPNDGNHWNRLRSDASNLKDKGITAVWIPPAWKGASQNDVGYGAYDLYDLGEFNQKGTVRTKYGTRNQLQAAVTALKSNGIQVYGDVVMNHKGGADATEWVRAVEVNPSNRNQEVSGDYTIEAWTKFDFPGRGNTHSNFKWRWYHFDGVDWDQSRQLQNRIYKFRGDGKGWDWEVDTENGNYDYLMYADIDMDHPEVVNELRNWGVWYTNTLGLDGFRIDAVKHIKYSFTRDWLTHVRNTTGKNMFAVAEFWKNDIGAIENYLSKTNWNHSVFDVPLHYNLYNASRSGGNYDMRQIFNGTVVQRHPTHAVTFVDNHDSQPEEALESFVEEWFKPLAYALTLTRDQGYPSVFYGDYYGIPTHGVPAMKSKIDPILEARQKYAYGKQNDYLDHHNMIGWTREGNTAHPNSGLATIMSDGRGGNKWMYVGRNKAGQVWRDITGNRSGTVTINADGWGNFSVNGGSVSIWV

SEQ ID NO: 21258 - protein, 483 aa, Synthetic construct
HHNGTNGTMMQYFEWYLPNDGNHWNRLRSDASNLKDKGITAVWIPPAWKGASQNDVGYGAYDLYDLGEFNQKGTVRTKYGTRNQLQAAVTALKSNGIQVYGDVVMNHKGGADATEWVRAVEVNPSNRNQEVSGDYTIEAWTKFDFPGRGNTHSNFKWRWYHFDGVDWDQSRQLQNRIYKFRGDGMGWDWEVDTENGNYDYLMYADIDMDHPEVVNELRNWGVWYTNTLGLDGFRIDAVKHIKYSFTRDWLTHVRNTTGKNMFAVAEFWKNDIGAIENYLSKTNWNHSVFDVPLHYNLYNASRSGGNYDMRQIFNGTVVQRHPTHAVTFVDNHDSQPEEALESFVEEWFKPLAYALTLTRDQGYPSVFYGDYYGIPTHGVPAMKSKIDPILEARQKYAYGKQNDYLDHHNMIGWTREGNTAHPNSGLATIMSDGPGGNKWMYVGRNKAGQVWRDITGNRSGTVTINADGWGNFSVNGGSVSIWV

SEQ ID NO: 21259 - protein, 483 aa, Synthetic construct
HHNGTNGTMMQYFEWYLPNDGNHWNRLRSDASNLKDKGITAVWIPPAWKGASQNDVGYGAYDLYDLGEFNQKGTVRTKYGTRNQLQAAVTALKSNGIQVYGDVVMNHKGGADATEWVRAVEVNPSNRNQEVSGDYTIEAWTKFDFPGRGNTHSNFKWRWYHFDGVDWDQSRQLQNRIYKFRGDGKGWDWEVDTENGNYDYLMYADIDMDHPEVVNELRNWGVWYTNTLGLDGFRIDAVKHIKYSFTRDWLTHVRNTTGKNMFAVAEFWKNDIGAIEEYLSKTNWNHSVFDVPLHYNLYNASRSGGNYDMRQIFNGTVVQRHPTHAVTFVDNHDSQPEEALESFVEEWFKPLAYALTLTRDQGYPSVFYGDYYGIPTHGVPAMKSKIDPILEARQKYAYGKQNDYLDHHNMIGWTREGNTAHPNSGLATIMSDGPGGNKWMYVGRNKAGQVWRDITGNRSGTVTINADGWGNFSVNGGSVSIWV

SEQ ID NO: 21260 - protein, 483 aa, Synthetic construct
HHNGTNGTMMQYFEWYLPNDGNHWNRLRSDASNLKDKGITAVWIPPAWKGASQNDVGYGAYDLYDLGEFNQKGTVRTKYGTRNQLQAAVTALKSNGIQVYGDVVMNHKGGADATEWVRAVEVNPSNRNQEVSGDYTIEAWTKFDFPGRGNTHSNFKWRWYHFDGVDWDQSRQLQNRIYKFRGDGKGWDWEVDTENGNYDYLMYADIDMDHPEVVNELRNWGVWYTNTLGLDGFRIDAVKHIKYSFTRDWLTHVRNTTGKNMFAVAEFWKNDIGAIENYLSKTNWNHSVFDVPLHYNLYNASRSGGNYDMRQIFNGTVVQRHPTHAVTFVDNHDSQPEEALESFVEEWFKPLAYALTLTRDQGYPYVFYGDYYGIPTHGVPAMKSKIDPILEARQKYAYGKQNDYLDHHNMIGWTREGNTAHPNSGLATIMSDGPGGNKWMYVGRNKAGQVWRDITGNRSGTVTINADGWGNFSVNGGSVSIWV

SEQ ID NO: 21261 - protein, 483 aa, Synthetic construct
HHNGTNGTMMQYFEWYLPNDGNHWNRLRSDASNLKDKGITAVWIPPAWKGASQNDVGYGAYDLYDLGEFNQKGTVRTKYGTRNQLQAAVTALKSNGIVVYGDVVMNHKGGADATEWVRAVEVNPSNRNQEVSGDYTIEAWTKFDFPGRGNTHSNFKWRWYHFDGVDWDQSRQLQNRIYKFRGDGKGWDWEVDTENGNYDYLMYADIDMDHPEVVNELRNWGVWYTNTLGLDGFRIDAVKHIKYSFTRDWLTHVRNTTGKNMFAVAEFWKNDIGAIENYLSKTNWNHSVFDVPLHYNLYNASRSGGNYDMRQIFNGTVVQRHPTHAVTFVDNHDSQPEEALESFVEEWFKPLAYALTLTRDQGYPSVFYGDYYGIPTHGVPAMKSKIDPILEARQKYAYGKQNDYLDHHNMIGWTREGNTAHPNSGLATIMSDGPGGNKWMYVGRNKAGQVWRDITGNRSGTVTINADGWGNFSVNGGSVSIWV

SEQ ID NO: 21262 - protein, 483 aa, Synthetic construct
HHNGTNGTMMQYFEWYLPNDGNHWNRLRSDASNLKDKGITAVWIPPAWKGASQNDVGYGAYDLYDLGEFNQKGTVRTKYGTRNQLQAAVTALKSNGIQVYGDVVMNHKGGADATEWVRAVEVNPSNRNQEVSGDYTIEAWTKFDFPGRGNTHSNFKWRWYHFDGVDWDQSRQLQNRIYKFRGDGKGWDWEVDTENGNYDYLMYADIDMDHPEVVNELRNWGVWYTNTLGLDGFRIDAVKHIKYSFTRDWLTHVRNTTGKNMFAVAEFWKNDIGAIENYLSKTNWNHSVFDVPLHYNLYNASRSGGNYDMRQIFNGTVVQRHPTHAVTFVDNHDSQPEEALESFVEEWFKPLAYALTLTRDQGYPQVFYGDYYGIPTHGVPAMKSKIDPILEARQKYAYGKQNDYLDHHNMIGWTREGNTAHPNSGLATIMSDGPGGNKWMYVGRNKAGQVWRDITGNRSGTVTINADGWGNFSVNGGSVSIWV

SEQ ID NO: 21263 - protein, 483 aa, Synthetic construct
HHNGTNGTMMQYFEWYLPNDGNHWNRLRSDASNLKDKGITAVWIPPAWKGASQNDVGYGAYDLYDLGEFNQKGTVRTKYGTRNQLQAAVTALKSNQIQVYGDVVMNHKGGADATEWVRAVEVNPSNRNQEVSGDYTIEAWTKFDFPGRGNTHSNFKWRWYHFDGVDWDQSRQLQNRIYKFRGDGKGWDWEVDTENGNYDYLMYADIDMDHPEVVNELRNWGVWYTNTLGLDGFRIDAVKHIKYSFTRDWLTHVRNTTGKNMFAVAEFWKNDIGAIENYLSKTNWNHSVFDVPLHYNLYNASRSGGNYDMRQIFNGTVVQRHPTHAVTFVDNHDSQPEEALESFVEEWFKPLAYALTLTRDQGYPSVFYGDYYGIPTHGVPAMKSKIDPILEARQKYAYGKQNDYLDHHNMIGWTREGNTAHPNSGLATIMSDGPGGNKWMYVGRNKAGQVWRDITGNRSGTVTINADGWGNFSVNGGSVSIWV

SEQ ID NO: 21264 - protein, 483 aa, Synthetic construct
HHNGTNGTMMQYFEWYLPNDGNHWNRLRSDASNLKDKGITAVWIPPAWKGASQNDVGYGAYDLYDLGEFNQKGTVRTKYGTRNQLQAAVTALKSNGIQVYGDVVMNHKGGADATEWVRAVEVNPSNRNQEVSGDYTIEAWTKFDFPGRGNTHSNFKWRWYHFDGVDWDQSRQLQNRIYKFRGDGKGWDWEVDTENGNYDYLMYADIDMDHPEVVNELRNWGVWYTNTLGLDGFRIDAVKHIKYSFTRDWLTHVRNTTGKNMFAVAEFWKNDIGAIENYLSKTNWNHSVFDVPLHYNLYNASRSGGNYDMRQIFNGTVVQRHPTHAVTFVDNHDSQPEEALESFVEEWFKPLAYALTLTRDQGYTSVFYGDYYGIPTHGVPAMKSKIDPILEARQKYAYGKQNDYLDHHNMIGWTREGNTAHPNSGLATIMSDGPGGNKWMYVGRNKAGQVWRDITGNRSGTVTINADGWGNFSVNGGSVSIWV

SEQ ID NO: 21265 - protein, 483 aa, Synthetic construct
HHNGTNGTMMQYFEWYLPNDGNHWNRLRSDASNLKDKGITAVWIPPAWKGASQNDVGYGAYDLYDLGEFNQKGTVRTKYGTRNQLQAAVTALKSNGIQVYGDVVMNHKGGADATEWVRAVEVNPSNRNQEVSGDYTIEAWTKFDFPGRGNTHSNFKWRWYHFDGVDWDQSRQLQNRIYKFRGDGKGWDWEVDTENGNYDYLMYADIDMDHPEVVNELRNWGVWYTNTLGLDGFRIDAVKHIKYSFTRDWLTHVRNTTGKNMFAVAEFWKNDIGAIENYLSKTNWNHSVFDVPLHYNLYSASRSGGNYDMRQIFNGTVVQRHPTHAVTFVDNHDSQPEEALESFVEEWFKPLAYALTLTRDQGYPSVFYGDYYGIPTHGVPAMKSKIDPILEARQKYAYGKQNDYLDHHNMIGWTREGNTAHPNSGLATIMSDGPGGNKWMYVGRNKAGQVWRDITGNRSGTVTINADGWGNFSVNGGSVSIWV

SEQ ID NO: 21266 - protein, 483 aa, Synthetic construct
HHNGTNGTMMQYFEWYLPNDGNHWNRLRSDASNLKDKGITAVWIPPAWKGASQNDVGYGAYDLYDLGEFNQKGTVRTKYGTRNQLQAAVTALKSNGIQVYGDVVMNHKGGADATEWVRAVEVNPSNRNQEVSGDYTIEAWTKFDFPGRGNTHSNFKWRWYHFDGVDWDQSRQLQNRIYKFRGDGKEWDWEVDTENGNYDYLMYADYDMDHPEVVNELRNWGVWYTNTLGLDGFRIDAVKHIKYSFTRDWLEHVRNTTGKNMFAVAEFWKNDIGAIENYLSKTNWNHSVFDVPLHYNLYNASRSGGNYDMRQIFNGTVVQRHPTHAVTFVDNHDSQPEEALESFVEEWFKPLAYALTLTRDQGYPSVFYGDYYGIPTHGVPAMKSKIDPILEARQKYAYGKQNDYLDHHNMIGWTREGNTAHPNSGLATIMSDGPGGNKWMYVGRNKAGQVWRDITGNRSGTVTINADGWGNFSVNGGSVSIWV

SEQ ID NO: 21267 - protein, 483 aa, Synthetic construct
HHNGTNGTMMQYFEWYLPNDGNHWNRLRSDASNLKDKGITAVWIPPAWKGASQNDVGYGAYDLYDLGEFNQKGTVRTKYGTRNQLQAAVTALKSNGIQVYGDVVMNHKGGADATEWVRAVEVNPSNRNQEVSGDYTIEAWTKFDFPGRGNTHSNFKWRWYHFDGVDWDQSRQLQNRIYKFRGDGKGWDWEVDTENGNYDYLMYADIDMDHPEVVNELRNWGVWYTNTLGLDGFRIDAVKHIKYSFTRDWLTHVRNTTGKNMFAVAEFWKNDIGAIEDYLSKTNWNHSVFDVPLHYNLYNASRSGGNYDMRQIFNGTVVQRHPTHAVTFVDNHDSQPEEALESFVEEWFKPLAYALTLTRDQGYPSVFYGDYYGIPTHGVPAMKSKIDPILEARQKYAYGKQNDYLDHHNMIGWTREGNTAHPNSGLATIMSDGPGGNKWMYVGRNKAGQVWRDITGNRSGTVTINADGWGNFSVNGGSVSIWV

SEQ ID NO: 21268 - protein, 483 aa, Synthetic construct
HHNGTNGTMMQYFEWYLPNDGNHWNRLRSDASNLKDKGITAVWIPPAWKGASQNDVGYGAYDLYDLGEFNQKGTVRTKYGTRNQLQAAVTALKSNGIQVYGDVVMNHKGGADATEWVRAVEVNPSNRNQEVSGDYTIEAWTKFDFPGRGNTHSNFKWRWYHFDGVDWDQSRQLGNRIYKFRGDGKGWDWEVDTENGNYDYLMYADIDMDHPEVVNELRNWGVWYTNTLGLDGFRIDAVKHIKYSFTRDWLTHVRNTTGKNMFAVAEFWKNDIGAIENYLSKTNWNHSVFDVPLHYNLYNASRSGGNYDMRQIFNGTVVQRHPTHAVTFVDNHDSQPEEALESFVEEWFKPLAYALTLTRDQGYPSVFYGDYYGIPTHGVPAMKSKIDPILEARQKYAYGKQNDYLDHHNMIGWTREGNTAHPNSGLATIMSDGPGGNKWMYVGRNKAGQVWRDITGNRSGTVTINADGWGNFSVNGGSVSIWV

SEQ ID NO: 21269 - protein, 483 aa, Synthetic construct
HHNGTPGTMMQYFEWYLPNDGNHWNRLRSDASNLKDKGITAVWIPPAWKGASQNDVGYGAYDLYDLGEFNQKGTVRTKYGTRNQLQAAVTALKSNGIQVYGDVVMNHKGGADATEWVRAVEVNPSNRNQEVSGDYTIEAWTKFDFPGRGNTHSNFKWRWYHFDGVDWDQSRQLQNRIYKFRGDGKGWDWEVDTENGNYDYLMYADIDMDHPEVVNELRNWGVWYTNTLGLDGFRIDAVKHIKYSFTRDWLTHVRNTTGKNMFAVAEFWKNDIGAIENYLSKTNWNHSVFDVPLHYNLYNASRSGGNYDMRQIFNGTVVQRHPTHAVTFVDNHDSQPEEALESFVEEWFKPLAYALTLTRDQGYPSVFYGDYYGIPTHGVPAMKSKIDPILEARQKYAYGKQNDYLDHHNMIGWTREGNTAHPNSGLATIMSDGPGGNKWMYVGRNKAGQVWRDITGNRSGTVTINADGWGNFSVNGGSVSIWV

SEQ ID NO: 21270 - protein, 483 aa, Synthetic construct
HHNGTNGTMMQYFEWYLPNDGNHWNRLRSDASNLKDKGITAVWIPPAWKGASQNDVGYGAYDLYDLGEFNQKGTVRTKYGTRNQLQAAVTALKSNGIQVYGDVVMNHKGGADATEWVRAVEVNPSNRNQEVSGDYTIEAWTKFDFPGRGNTHSNFKWRWYHFDGVDWDQSRQLQNRIYKFRGDGKGWDWEVDTENGNYDYLMYADIDMDHPEVVNELRNWGVWYTNTLGLDGFRIDAVKHIKYSFTRDWLTHVRNTTGKNMFAVAEFWKNDIGAIENYLSKTNWNHSVFDVPLHYNLYNASRSGGNYDMRQIFNGTVVQRHPTHAYTFVDNHDSQPEEALESFVEEWFKPLAYALTLTRDQGYPSVFYGDYYGIPTHGVPAMKSKIDPILEARQKYAYGKQNDYLDHHNMIGWTREGNTAHPNSGLATIMSDGPGGNKWMYVGRNKAGQVWRDITGNRSGTVTINADGWGNFSVNGGSVSIWV

SEQ ID NO: 21271 - protein, 483 aa, Synthetic construct
HHNGTNGTMMQYFEWYLPNDGNHWNRLRSDASNLKDKGITAVWIPPAWKGASQNDVGYGAYDLYDLGEFNQKGTVRTKYGTRNQLQAAVTALKSNGIQVYGDVVMNHKGGADATEWVRAVEVNPSNRNQEVSGDYTIEAWTKFDFPGRGNTHSNFKWRWYHFDGVDWDQSRQLQNRIYKFRGDGKGWDWEVDTENGNYDYLMYADIDMDHPEVVNELRNWGVWYTNTLGLDGFRIDAVKHIKYSFTRDWLTHVRNTTGKNMFAVAEFWKNDIGAIENYLSKTNWNHSVFDVPLHYNLYNASRSGGNYDMRQIFNGTVVQRHPTHAVTFVDNHDSQPEEALESFVEEWFKPLAYALTLTRDQGYPLVFYGDYYGIPTHGVPAMKSKIDPILEARQKYAYGKQNDYLDHHNMIGWTREGNTAHPNSGLATIMSDGPGGNKWMYVGRNKAGQVWRDITGNRSGTVTINADGWGNFSVNGGSVSIWV

SEQ ID NO: 21272 - protein, 483 aa, Synthetic construct
HHNGTNGTMMQYFEWYLPNDGNHWNRLRSDASNLKDKGITAVWIPPAWKGASQNDVGYGAYDLYDLGEFNQKGTVRTKYGTRNQLQAAVTALKSNGIQVYGDVVMNHKGGADATEWVRAVEVNPSNRNQEVSGDYTIEAWTKFDFPGRGNTHSNFKWRWYHFDGVDWDQSRQLQNRIYKFRGDGKGWDWEVDTENGNYDYLMYADIDMDHPEVVNELRNWGVWYTNTLGLDGFRIDAVKHIKYSFTRDWLTHVRNTTGKNMFAVAEFWKNDIGAIENYLSKTNWNHSVFDVPLHYNLYNASRSGGNYDMRQIFNGTVVQRHPTHAVTFVDNHDSQPEEALESFVEEWFKPLAYALTLTRDQGEPSVFYGDYYGIPTHGVPAMKSKIDPILEARQKYAYGKQNDYLDHHNMIGWTREGNTAHPNSGLATIMSDGPGGNKWMYVGRNKAGQVWRDITGNRSGTVTINADGWGNFSVNGGSVSIWV

SEQ ID NO: 21273 - protein, 483 aa, Synthetic construct
HHNGTNGTMMQYFEWYLPNDGNHWNRLRSDASNLKDKGITAVWIPPAWKGASQNDVGYGAYDLYDLGEFNQKGTVRTKYGTRNQLQAAVTALKSNGIQVYGDVVMNHKGGADATEWVRAVEVNPSNRNQEVSGDYTIEAWTKFDFPGRGNTHSNFKWRWYHFDGVDWDQSRQLQNRIYKFRGDGKGWDWEVDTENGNYDYLMYADIDMDHPEVVNELRNWGVWYTNTLGLDGFRIDAVKHIKYSFTRDWLTHVRNTTGKNMFAVAEFWKNDIGAIENYLSKTNWNHSVFDVPLHYNLYNASRSGGNYDMRQIFNGTVVQRHPTHAVTFVDNHDSQPEEALESFVEEWFKPLAYALTLTWDQGYPSVFYGDYYGIPTHGVPAMKSKIDPILEARQKYAYGKQNDYLDHHNMIGWTREGNTAHPNSGLATIMSDGPGGNKWMYVGRNKAGQVWRDITGNRSGTVTINADGWGNFSVNGGSVSIWV

SEQ ID NO: 21274 - protein, 483 aa, Synthetic construct
HHNQTNGTMMQYFEWYLPNDGNHWNRLRSDASNLKDKGITAVWIPPAWKGASQNDVGYGAYDLYDLGEFNQKGTVRTKYGTRNQLQAAVTALKSNGIQVYGDVVMNHKGGADATEWVRAVEVNPSNRNQEVSGDYTIEAWTKFDFPGRGNTHSNFKWRWYHFDGVDWDQSRQLQNRIYKFRGDGKEWDWEVDTENGNYDYLMYADYDMDHPEVVNELRNWGVWYTNTLGLDGFRIDAVKHIKYSFTRDWLTHVRNTTGKNMFAVAEFWKNDIGAIENYLSKTNWNHSVFDVPLHYNLYNASRSGGNYDMRQIFNGTVVQRHPTHAVTFVDNHDSQPEEALESFVEEWFKPLAYALTLTRDQGYPSVFYGDYYGIPTHGVPAMKSKIDPILEARQKYAYGKQNDYLDHHNMIGWTREGNTAHPNSGLATIMSDGPGGNKWMYVGRNKAGQVWRDITGNRSGTVTINADGWGNFSVNGGSVSIWV

SEQ ID NO: 21275 - protein, 483 aa, Synthetic construct
HHNGTNGTMMQYFEWYLPNDGNHWNRLRSDASNLKDKGITAVWIPPAWKGASQNDVGYGAYDLYDLGEFNQKGTVRTKYGTRNQLQAAVTALKSNGIQVYGDVVMNHKGGADATEWVRAVEVNPSNRNQEVSGDYTIEAWTKFDFPGRGNTHSNFKWRWYHFDGVDWDQSRQLQNRIYKFRGDGKGWDWEVDTENGNYDYLMYADIDMDHPEVVNELRNWGVWYTNTLGLDGFRIDAVKHIKYSFTRDWLTHVRNTTGKNMFAVAEFWKNDIGAINNYLSKTNWNHSVFDVPLHYNLYNASRSGGNYDMRQIFNGTVVQRHPTHAVTFVDNHDSQPEEALESFVEEWFKPLAYALTLTRDQGYPSVFYGDYYGIPTHGVPAMKSKIDPILEARQKYAYGKQNDYLDHHNMIGWTREGNTAHPNSGLATIMSDGPGGNKWMYVGRNKAGQVWRDITGNRSGTVTINADGWGNFSVNGGSVSIWV

SEQ ID NO: 21276 - protein, 483 aa, Synthetic construct
HHNGTNGTMMQYFEWYLPNDGNHWNRLRSDASNLKDKGITAVWIPPAWKGASQNDVGYGAYDLYDLGEFNQKGTVRTKYGTRNQLQAAVTALKSNGIQVYGDVVMNHKGGADATEWVRAVEVNPSNRNQEVSGDYTIEAWTKFDFPGRGNTHSNFKWRWYHFDGVDWDQSRQLQNRNYKFRGDGKGWDWEVDTENGNYDYLMYADIDMDHPEVVNELRNWGVWYTNTLGLDGFRIDAVKHIKYSFTRDWLTHVRNTTGKNMFAVAEFWKNDIGAIENYLSKTNWNHSVFDVPLHYNLYNASRSGGNYDMRQIFNGTVVQRHPTHAVTFVDNHDSQPEEALESFVEEWFKPLAYALTLTRDQGYPSVFYGDYYGIPTHGVPAMKSKIDPILEARQKYAYGKQNDYLDHHNMIGWTREGNTAHPNSGLATIMSDGPGGNKWMYVGRNKAGQVWRDITGNRSGTVTINADGWGNFSVNGGSVSIWV

SEQ ID NO: 21277 - protein, 483 aa, Synthetic construct
HHNGTNGTMMQYFEWYLPNDGNHWNRLRSDASNLKDKGITAVWIPPAWKGASQNDVGYGAYDLYDLGEFNQKGTVRTKYGTRNQLQAAVTALKSNGIQVYGDVVMNHKGGADATEWVRAVEVNPSNRNQEVSGDYTIEAWTKFDFPGRGNTHSNFKWRWYHFDGVDWDQSRQLQNRIYKFRGDGKGWDWEVDTENGNYDYLMYADIDMDHPEVVNELRNWGVWYTNTLGLDGFRIDAVKHIKYSFTRDWLTHVRNTTGKNMFAVAEFWKNDIGAIENYLSKTNWNHSVFDVPLHYNLYNASRSGGNYDMRQIFNGTVVQRHPTHAVTFVDNHDSQPEEALESFVEEWFKPLAYALTLTRDQGNPSVFYGDYYGIPTHGVPAMKSKIDPILEARQKYAYGKQNDYLDHHNMIGWTREGNTAHPNSGLATIMSDGPGGNKWMYVGRNKAGQVWRDITGNRSGTVTINADGWGNFSVNGGSVSIWV

SEQ ID NO: 21278 - protein, 483 aa, Synthetic construct
HHNGTNGTMMQYFEWYLPNDGNHWNRLRSDASNLKDKGITAVWIPPAWKGASQNDVGYGAYDLYDLGEFNQKGTVRTKYGTRNQLQAAVTALKSNGIQVYGDVVMNHKGGADATEWVRAVEVNPSNRNQEVSGDYTIEAWTKFDFPGRGNTHSNFKWRWYHFDGVDWDQSRQLQNKIYKFRGDGKGWDWEVDTENGNYDYLMYADYDMDHPEVVNELRNWGVWYTNTLGLDGFRIDAVKHIKYSFTRDWLTHVRNTTGKNMFAVAEFWKNDIGAIENYLSKTNWNHSVFDVPLHYNLYNASRSGGNYDMRQIFNGTVVQRHPTHAVTFVDNHDSQPEEALESFVEEWFKPLAYALTLTRDQGYPSVFYGDYYGIPTHGVPAMKSKIDPILEARQKYAYGKQNDYMDHHNMIGWTREGNTAHPNSGLATIMSDGPGGNKWMYVGRNKAGQVWRDITGNRSGTVTINADGWGNFSVNGGSVSIWV

SEQ ID NO: 21279 - protein, 483 aa, Synthetic construct
HHNGTNGTMMQYFEWYLPNDGNHWNRLRSDASNLKDKGITAVWIPPAWKGASQNDVGYGAYDLYDLGEFNQKGTVRTKYGTRNQLQAAVTALKSNGIQVYGDVVMNHKGGADATEWVRAVEVNPSNRNQEVSGDYTIEAWTKFDFPGRGNTHSNFKWRWWHFDGVDWDQSRQLQNRIYKFRGDGKQWDWEVDTENGNYDYLMYADIDMDHPEVVNELRNWGVWYTNTLGLDGFRIDAVKHIKYSFTRDWLTHVRNTTGKNMFAVAEFWKNDIGAIENYLSKTNWNHSVFDVPLHYNLYNASRSGGNYDMRQIFNGTVVQRHPTHAVTFVDNHDSQPEEALESFVEEWFKPLAYALTLTRDQGYPSVFYGDYYGIPTHGVPAMKSKIDPILEARQKYAYGKQNDYLDHHNMIGWTREGNTAHPNSGLATIMSDGPGGNKWMYVGRNKAGQVWRDITGNRSGTVTINADGWGNFSVNGGSVSIWV

SEQ ID NO: 21280 - protein, 483 aa, Synthetic construct
HHNGTNGTMMQYFEWYLPNDGNHWNRLRSDASNLKDKGITAVWIPPAWKGASQNDVGYGAYDLYDLGEFNQKGTVRTKYGTRNQLQAAVTALKSNGIQVYGDVVMNHKGGADATEWVRAVEVNPSNRNQEVSGDNTIEAWTKFDFPGRGNTHSNFKWRWYHFDGVDWDQSRQLQNRIYKFRGDGKGWDWEVDTENGNYDYLMYADIDMDHPEVVNELRNWGVWYTNTLGLDGFRIDAVKHIKYSFTRDWLTHVRNTTGKNMFAVAEFWKNDIGAIENYLSKTNWNHSVFDVPLHYNLYNASRSGGNYDMRQIFNGTVVQRHPTHAVTFVDNHDSQPEEALESFVEEWFKPLAYALTLTRDQGYPSVFYGDYYGIPTHGVPAMKSKIDPILEARQKYAYGKQNDYLDHHNMIGWTREGNTAHPNSGLATIMSDGPGGNKWMYVGRNKAGQVWRDITGNRSGTVTINADGWGNFSVNGGSVSIWV

SEQ ID NO: 21281 - protein, 483 aa, Synthetic construct
HHNGTNGTMMQYFEWYLPNDGNHWHRLRSDASNLKDKGITAVWIPPAWKGASQNDVGYGAYDLYDLGEFNQKGTVRTKYGTRNQLQAAVTALKSNGIQVYGDVVMNHKGGADATEWVRAVEVNPSNRNQEVSGDYTIEAWTKFDFPGRGNTHSNFKWRWYHFDGVDWDQSRQLQNRIYKFRGDGKEWDWEVDTENGNYDYLMYADYDMDHPEVVNELRNWGVWYTNTLGLDGFRIDAVKHIKYSFTRDWLTHVRNTTGKNMFAVAEFWKNDIGAIENYLSKTNWNHSVFDVPLHYNLYNASRSGGNYDMRQIFNGTVVQRHPTHAVTFVDNHDSQPEEALESFVEEWFKPLAYALTLTRDQGYPSVFYGDYYGIPTHGVPAMKSKIDPILEARQKYAYGKQNDYMDHHNMIGWTREGNTAHPNSGLATIMSDGPGGNKWMYVGRNKAGQVWRDITGNRSGTVTINADGWGNFSVNGGSVSIWV

SEQ ID NO: 21282 - protein, 483 aa, Synthetic construct
HHNGTNGTMMQYFEWYLPNDGNHWNRLRSDASNLKDKGITAVWIPPAWKGASQNDVGYGAYDLYDLGEFNQKGTVRTKYGTRNQLQAAVTALKSNGIQVYGDVVMNHKGGADATEWVRAVEVNPSNRNQEVSGDYTIEAWTKFDFPGRGNTHSNFKWRWYHFDGVDWDQSRQLQNKIYKFRGDGKEWDWEVDTENGNYDYLMYADIDMDHPEVVNELRNWGVWYTNTLGLDGFRIDAVKHIKYSFTRDWLTHVRNTTGKNMFAVAEFWKNDIGAIENYLSKTNWNHSVFDVPLHYNLYNASRSGGNYDMRQIFNGTVVQRHPTHAVTFVDNHDSQPEEALESFVEEWFKPLAYALTLTRDQGYPSVFYGDYYGIPTHGVPAMKSKIDPILEARQKYAYGKQNDYMDHHNMIGWTREGNTAHPNSGLATIMSDGPGGNKWMYVGRNKAGQVWRDITGNRSGTVTINADGWGNFSVNGGSVSIWV

SEQ ID NO: 21283 - protein, 483 aa, Synthetic construct
HHNGTNGTMMQYFEWYLPNDGNHWNRLRSDASNLKDKGITAVWIPPAWKGASQNDVGYGAYDLYDLGEFNQKGTVRTKYGTRNQLQAAVTALKSNGIQVYGDVVMNHKGGADATEWVRAVEVNPSNRNQEVSGDYTIEAWTKFDFPGRGNTHSNFKWRWYHFDGVDWDQSRQLQNRIYKFRGDGKGVDWEVDTENGNYDYLMYADIDMDHPEVVNELRNWGVWYTNTLGLDGFRIDAVKHIKYSFTRDWLTHVRNTTGKNMFAVAEFWKNDIGAIENYLSKTNWNHSVFDVPLHYNLYNASRSGGNYDMRQIFNGTVVQRHPTHAVTFVDNHDSQPEEALESFVEEWFKPLAYALTLTRDQGYPSVFYGDYYGIPTHGVPAMKSKIDPILEARQKYAYGKQNDYLDHHNMIGWTREGNTAHPNSGLATIMSDGPGGNKWMYVGRNKAGQVWRDITGNRSGTVTINADGWGNFSVNGGSVSIWV

SEQ ID NO: 21284 - protein, 483 aa, Synthetic construct
HHNGTNGTMMQYFEWYLPNDGNHWNRLRSDASNLKDKGITAVWIPPAWKGASQNDVGYGAYDLYDLGEFNQKGTVRTKYGTRNQLQAAVTALKSNGIQVYGDVVMNHKGGADATEWVRAVEVNPSNRNQEVSGDYTIEAWTKFDFPGRGNTHSNFKWRWYHFDGVDWDQSRQLQNKIYKFRGDGKEWDWEVDTENGNYDYLMYADYDMDHPEVVNELRNWGVWYTNTLGLDGFRIDAVKHIKYSFTRDWLTHVRNTTGKNMFAVAEFWKNDIGAIENYLSKTNWNHSVFDVPLHYNLYNASRSGGNYDMRQIFNGTVVQRHPTHAVTFVDNHDSQPEEALESFVEEWFKPLAYALTLTRDQGYPSVFYGDYYGIPTHGVPAMKSKIDPILEARQKYAYGKQNDYLDHHNMIGWTREGNTAHPNSGLATIMSDGPGGNKWMYVGRNKAGQVWRDITGNRSGTVTINADGWGNFSVNGGSVSIWV

SEQ ID NO: 21285 - protein, 483 aa, Synthetic construct
HHNGTNGTMMQYFEWYLPNDGNHWNRLRSDASNLKDKGITAVWIPPAWKGASQNDVGYGAYDLYDLGEFNQKGTVRTKYGTRNQLQAAVTALKSNGIQVYGDVVMNHKGGADATEWVRAVEVNPSNRNQEVSGDYTIEAWTKFDFPGRGNTHSNFKWRWYHFDGVDWDQSRQLQNRSYKFRGDGKGWDWEVDTENGNYDYLMYADIDMDHPEVVNELRNWGVWYTNTLGLDGFRIDAVKHIKYSFTRDWLTHVRNTTGKNMFAVAEFWKNDIGAIENYLSKTNWNHSVFDVPLHYNLYNASRSGGNYDMRQIFNGTVVQRHPTHAVTFVDNHDSQPEEALESFVEEWFKPLAYALTLTRDQGYPSVFYGDYYGIPTHGVPAMKSKIDPILEARQKYAYGKQNDYLDHHNMIGWTREGNTAHPNSGLATIMSDGPGGNKWMYVGRNKAGQVWRDITGNRSGTVTINADGWGNFSVNGGSVSIWV

SEQ ID NO: 21286 - protein, 483 aa, Synthetic construct
HHNGTNGTMMQYFEWYLPNDGNHWNRLRSDASNLKDKGITAVWIPPAWKGASQNDVGYGAYDLYDLGEFNQKGTVRTKYGTRNQLQAAVTALKSNGIQVYGDVVMNHKGGADATEWVRAVEVNPSNRNQEVSGDYTIEAWTKFDFPGRGNTHSNFKWRWYHFDGVDWDQSRQLQNRIYKFRGDGKGWDWEVDTENGNYDYLMYADIDMDHPEVVNELRNWGVWYTNTLGLDGFRIDAVKHIKYSFTRDWLTHVRNTTGKNMFAVAEFWKNDIGAIENYLSKTNWNHSVFDVPLHYNLYNASRSGGNYDMRQIFNGTVVQRHPTHAVTFVDNHDSQPEEALESFVEEWFKPLAYALTLTRDQGYPSVFYGDYYGIPTHGVPAMKSKIDPILEARQKYAYGKQNDYLDHHNMIGWTREGNTAHPNSGLATIMSDGPGGNKKMYVGRNKAGQVWRDITGNRSGTVTINADGWGNFSVNGGSVSIWV

SEQ ID NO: 21287 - protein, 483 aa, Synthetic construct
HHNGTNGTMMQYFEWYLPNDGNHWNRLRSDASNLKDKGITAVWIPPAWKGASQNDVGYGAYDLYDLGEFNQKGTVRTKYGTRNQLQAAVTALKSNGIQVYGDVVMNHKGGADATEWVRAVEVNPSNRNQEVSGDYTIEAWTKFDFPGRGNTHSNFKWRWYHFDGVDWDQSRQLQNRIYKFRGDGKGWDWEVDTENGNYDYLMYADIDMDHPEVVNELRNWGVWYTNTLGLDGFRIDAVKHIKYSFTRDWLTHVRNTTFKNMFAVAEFWKNDIGAIENYLSKTNWNHSVFDVPLHYNLYNASRSGGNYDMRQIFNGTVVQRHPTHAVTFVDNHDSQPEEALESFVEEWFKPLAYALTLTRDQGYPSVFYGDYYGIPTHGVPAMKSKIDPILEARQKYAYGKQNDYLDHHNMIGWTREGNTAHPNSGLATIMSDGPGGNKWMYVGRNKAGQVWRDITGNRSGTVTINADGWGNFSVNGGSVSIWV

SEQ ID NO: 21288 - protein, 483 aa, Synthetic construct
HHNGTNGTMMQYFEWYLPNDGNHWNRLRSDASNLKDKGITAVWIPPAWKGASQNDVGYGAYDLYDLGEFNQKGTVRTKYGTRNQLQAAVTALKSNGIQVYGDVVMNHKGGADATEWVRAVEVNPSNRNQEVSGDYTIEAWTKFDFPGRGNTHSNFKWRWYHFDGVDWDQSRQLQNRIYKMRGDGKGWDWEVDTENGNYDYLMYADIDMDHPEVVNELRNWGVWYTNTLGLDGFRIDAVKHIKYSFTRDWLTHVRNTTGKNMFAVAEFWKNDIGAIENYLSKTNWNHSVFDVPLHYNLYNASRSGGNYDMRQIFNGTVVQRHPTHAVTFVDNHDSQPEEALESFVEEWFKPLAYALTLTRDQGYPSVFYGDYYGIPTHGVPAMKSKIDPILEARQKYAYGKQNDYLDHHNMIGWTREGNTAHPNSGLATIMSDGPGGNKWMYVGRNKAGQVWRDITGNRSGTVTINADGWGNFSVNGGSVSIWV

SEQ ID NO: 21289 - protein, 483 aa, Synthetic construct
HHNGTNGTMMQYFEWYLPNDGNHWNRLRSDASNLKDKGITAVWIPPAWKGASQNDVGYGAYDLYDLGEFNQKGTVRTKYGTRNQLQAAVTALKSNGINVYGDVVMNHKGGADATEWVRAVEVNPSNRNQEVSGDYTIEAWTKFDFPGRGNTHSNFKWRWYHFDGVDWDQSRQLQNRIYKFRGDGKGWDWEVDTENGNYDYLMYADIDMDHPEVVNELRNWGVWYTNTLGLDGFRIDAVKHIKYSFTRDWLTHVRNTTGKNMFAVAEFWKNDIGAIENYLSKTNWNHSVFDVPLHYNLYNASRSGGNYDMRQIFNGTVVQRHPTHAVTFVDNHDSQPEEALESFVEEWFKPLAYALTLTRDQGYPSVFYGDYYGIPTHGVPAMKSKIDPILEARQKYAYGKQNDYLDHHNMIGWTREGNTAHPNSGLATIMSDGPGGNKWMYVGRNKAGQVWRDITGNRSGTVTINADGWGNFSVNGGSVSIWV

SEQ ID NO: 21290 - protein, 483 aa, Synthetic construct
HHNGTNGTMMQYFEWYLPNDGNHWNRLRSDASNLKDKGITAVWIPPAWKGASQNDVGYGAYDLYDLGEFNQKGTVRTKYGTRNQLQAAVTALKSNGIQVYGDVVMNHKGGADATEWVRAVEVNPSNRNQEVSGDYTIEAWTKFDFPGRGNTHSNFKWRWYHFDGVDWDQSRQLQNRIYKFRGDGKGWDWEVDTENGNYDYLMYADIDMDHPEVVNELRNWGVWYTNTLGLDGFRIDAVKHIKYSFTRDWLTHVRNTTGKNMFAVAEFWKNDIGAIENYLSKTNWNHSVFDVPLHYNLYNASRSGGNYDMRQIFNGTVVQRHPTHAVTFVDNHDSQPEEALESFVEEWFKPLAYALTLTRDQGYPSVFYGDYYGIPTHGVPAMKSKIDPILEARQKYAYGKQNDYLDHHNMIGWTREGNTAHPNSGLATIMSDGPGGNKWMYVGRNKAGQVWRDITGNRSGRVTINADGWGNFSVNGGSVSIWV

SEQ ID NO: 21291 - protein, 483 aa, Synthetic construct
HHNGTNGTMMQYFEWYLPNDGNHWNRLRSDASNLKDKGITAVWIPPAWKGASQNDVGYGAYDLYDLGEFNQKGTVRTKYGTRNQLQAAVTALKSNGIQVYGDVVMNHKGGADATEWVRAVEVNPSNRNQEVSGDGTIEAWTKFDFPGRGNTHSNFKWRWYHFDGVDWDQSRQLQNRIYKFRGDGKGWDWEVDTENGNYDYLMYADIDMDHPEVVNELRNWGVWYTNTLGLDGFRIDAVKHIKYSFTRDWLTHVRNTTGKNMFAVAEFWKNDIGAIENYLSKTNWNHSVFDVPLHYNLYNASRSGGNYDMRQIFNGTVVQRHPTHAVTFVDNHDSQPEEALESFVEEWFKPLAYALTLTRDQGYPSVFYGDYYGIPTHGVPAMKSKIDPILEARQKYAYGKQNDYLDHHNMIGWTREGNTAHPNSGLATIMSDGPGGNKWMYVGRNKAGQVWRDITGNRSGTVTINADGWGNFSVNGGSVSIWV

SEQ ID NO: 21292 - protein, 483 aa, Synthetic construct
HHNGTNGTMMQYFEWYLPNDGNHWNRLRSDASNLKDKGITAVWIPPAWKGASQNDVGYGAYDLYDLGEFNQKGTVRTKYGTRNQLQAAVTALKSNGIQVYGDVVMNHKGGADATEWVRAVEVNPSNRNQEVSGDYTIEAWTKFDFPGRGNTHSNFKWRWYHFDGVDWDQSRQLQNRIYKFRGDGKGWDWEVDTENGNYDYLMYADIDMDHPEVVNELRNWGVWYTNTLGLDGFRIDAVKHIKYSFTRDWLTHVRNTTGKNMFAVAEFWKNDIGAIENYLSKTNWNHSVFDVPLHYNLYNASRSGGNYDMRQIFQGTVVQRHPTHAVTFVDNHDSQPEEALESFVEEWFKPLAYALTLTRDQGYPSVFYGDYYGIPTHGVPAMKSKIDPILEARQKYAYGKQNDYLDHHNMIGWTREGNTAHPNSGLATIMSDGPGGNKWMYVGRNKAGQVWRDITGNRSGTVTINADGWGNFSVNGGSVSIWV

SEQ ID NO: 21293 - protein, 483 aa, Synthetic construct
HHNGTNGTMMQYFEWYLPNDGNHWNRLRSDASNLKDKGITAVWIPPAWKGASQNDVGYGAYDLYDLGEFNQKGTVRTKYGTRNQLQAAVTALKSNGIQVYGDVVMNHKGGADATEWVRAVEVNPSNRNQEVSGDDTIEAWTKFDFPGRGNTHSNFKWRWYHFDGVDWDQSRQLQNRIYKFRGDGKGWDWEVDTENGNYDYLMYADIDMDHPEVVNELRNWGVWYTNTLGLDGFRIDAVKHIKYSFTRDWLTHVRNTTGKNMFAVAEFWKNDIGAIENYLSKTNWNHSVFDVPLHYNLYNASRSGGNYDMRQIFNGTVVQRHPTHAVTFVDNHDSQPEEALESFVEEWFKPLAYALTLTRDQGYPSVFYGDYYGIPTHGVPAMKSKIDPILEARQKYAYGKQNDYLDHHNMIGWTREGNTAHPNSGLATIMSDGPGGNKWMYVGRNKAGQVWRDITGNRSGTVTINADGWGNFSVNGGSVSIWV

SEQ ID NO: 21294 - protein, 483 aa, Synthetic construct
HHNGTNGTMMQYFEWYLPNDGNHWNRLRSDASNLKDKGITAVWIPPAWKGASQNDVGYGAYDLYDLGEFNQKGTVRTKYGTRNQLQAAVTALKSNGIQVWGDVVMNHKGGADATEWVRAVEVNPSNRNQEVSGDYTIEAWTKFDFPGRGNTHSNFKWRWYHFDGVDWDQSRQLQNRIYKFRGDGKGWDWEVDTENGNYDYLMYADIDMDHPEVVNELRNWGVWYTNTLGLDGFRIDAVKHIKYSFTRDWLTHVRNTTGKNMFAVAEFWKNDIGAIENYLSKTNWNHSVFDVPLHYNLYNASRSGGNYDMRQIFNGTVVQRHPTHAVTFVDNHDSQPEEALESFVEEWFKPLAYALTLTRDQGYPSVFYGDYYGIPTHGVPAMKSKIDPILEARQKYAYGKQNDYLDHHNMIGWTREGNTAHPNSGLATIMSDGPGGNKWMYVGRNKAGQVWRDITGNRSGTVTINADGWGNFSVNGGSVSIWV

SEQ ID NO: 21295 - protein, 483 aa, Synthetic construct
HHNGTNGTMMQYFEWYLPNDGNHWNRLRSDASNLKDKGITAVWIPPAWKGASQNDVGYGAYDLYDLGEFNQKGTVRTKYGTRNQLQAAVTALKSNGIQVYGDVVMNHKGGADATEWVRAVEVNPSNRNQEVSGDYTIEAWTKFDFPGRGNTHSNFKWRWYHFDGVDWDQSRQLQNRIYKFRGDGKGWDWEVDTENGNYDYLMYADIDMDHPEVVNELRNWGVWYTNTLGLDGFRIDAVKHIKYSFTRDWLTHVRNTTGKNMFAVAEFWKNDIGAIENYLSKTNWNHSVFDVPLHYNLYNASRSGGNYDMRQIFNGTVVQRHPTHAVTFVDNHDSQPEEALESFVEEWFKPLAYALTLTRDQGYPSVFYGDYYGIPTHGVPAMKSKIDPILEARQKYSYGKQNDYLDHHNMIGWTREGNTAHPNSGLATIMSDGPGGNKWMYVGRNKAGQVWRDITGNRSGTVTINADGWGNFSVNGGSVSIWV

SEQ ID NO: 21296 - protein, 483 aa, Synthetic construct
HHNGTNGTMMQYFEWYLPNDGNHWNRLRSDASNLKDKGITAVWIPPAWKGASQNDVGYGAYDLYDLGEFNQKGTVRTKYGTRNQLQAAVTALKSNGIQVYGDVVMNHKGGADATEWVRAVEVNPSNRCQEVSGDYTIEAWTKFDFPGRGNTHSNFKWRWYHFDGVDWDQSRQLQNRIYKFRGDGKGWDWEVDTENGNYDYLMYADIDMDHPEVVNELRNWGVWYTNTLGLDGFRIDAVKHIKYSFTRDWLTHVRNTTGKNMFAVAEFWKNDIGAIENYLSKTNWNHSVFDVPLHYNLYNASRSGGNYDMRQIFNGTVVQRHPTHAVTFVDNHDSQPEEALESFVEEWFKPLAYALTLTRDQGYPSVFYGDYYGIPTHGVPAMKSKIDPILEARQKSAYGKQNDYLDHHNMIGWTREGNTAHPNSGLATIMSDGPGGNKWMYVGRNKAGQVWRDITGNRSGTVTINADGWGNFSVNGGSVSIWV

SEQ ID NO: 21297 - protein, 483 aa, Synthetic construct
HHNGTNGTMMQYFEWYLPNDGNHWNRLRSDASNLKDKGITAVWIPPAWKGASQNDVGYGAYDLYDLGEFNQKGTVRTKYGTRNQLQAAVTALKSNGIQVYGDVVMNHKGGADATEWVRAVEVNPSNRNQEVSGDYTIEAWTKFDFPGRGNTHSNFKWRWYHFDGVDWDQSRQLNNRIYKFRGDGKGWDWEVDTENGNYDYLMYADIDMDHPEVVNELRNWGVWYTNTLGLDGFRIDAVKHIKYSFTRDWLTHVRNTTGKNMFAVAEFWKNDIGAIENYLSKTNWNHSVFDVPLHYNLYNASRSGGNYDMRQIFNGTVVQRHPTHAVTFVDNHDSQPEEALESFVEEWFKPLAYALTLTRDQGYPSVFYGDYYGIPTHGVPAMKSKIDPILEARQKYAYGKQNDYLDHHNMIGWTREGNTAHPNSGLATIMSDGPGGNKWMYVGRNKAGQVWRDITGNRSGTVTINADGWGNFSVNGGSVSIWV

SEQ ID NO: 21298 - protein, 483 aa, Synthetic construct
HHNGTNGTMMQYFEWYLPNDGNHWNRLRSDASNLKDKGITAVWIPPAWKGASQNDVGYGAYDLYDLGEFNQKGTVRTKYGTRNQLQAAVTALKSNGIQVYGDVVMNHKGGADATEWVRAVEVNPSNRNQEVSGDYTIEAWTKFDFPGRGNTHSNFKWRWYHFDGVDWDQSRQLQNRIYKFRGDGKGWDWEVDTENGNYDYLMYADIDMDHPEVVNELRNWGVWYTNTLGLDGFRIDAVKHIKYSFTRDWLTHVRNTTGKNMFAVAEFWKNDIGAIENYLSKTNWNHSVFDVPLHYNLYNASRSGGNYDMRQIFNGTVVQRHPTHAVTFVDNHDSQPEEALESFVEEWFKPLAYALTLTRDQGYPSVFYGDYYGIPTHGVPAMKSKIDPILEARQKYAYGKQNDYLDHHNMIGWTREGNTAHPNSGLATPMSDGPGGNKWMYVGRNKAGQVWRDITGNRSGTVTINADGWGNFSVNGGSVSIWV

SEQ ID NO: 21299 - protein, 483 aa, Synthetic construct
HHNGTNGTMMQYFEWYLPNDGNHWNRLRSDASNLKDKGITAVWIPPAWKGASQNDVGYGAYDLYDLGEFNQKGTVRTKYGTRNQLQAAVTALKSNGIQVYGDVVMNHKGGADATEWVRAVEVNPSNRNQEVSGDYTIEAWTKFDFPGRGNTHSNFKWRWYHFDGVDWDQSRQLQNRIYKFRGDGKGWDWEVDTENGNYDYLMYADIDMDHPEVVNELRNWGVWYTNTLGLDGFRIDAVKHIKYSFTRDWLTHVRNTTGKNMFAVAEFWKNDIGAIENYLSKTNWNHSVFDVPLHYNLYNASRSGGNYDMRQIFNGTVVQRHPTHAYTFVDNHDSQPEEALESFVEEWFKPLAYALTLTRDQGYPSVFYGDYYGIPTHGVPAMKSKIDPILEARQKYAYGKQNDYLDHHNMIGWTREGNTAHPNSGLATIMSDGPGGNKWMYVGRNKAGQVWRDITGNRNGTVTINADGWGNFSVNGGSVSIWV

SEQ ID NO: 21300 - protein, 483 aa, Synthetic construct
HHNGDNGTMMQYFEWYLPNDGNHWNRLRSDASNLKDKGITAVWIPPAWKGASQNDVGYGAYDLYDLGEFNQKGTVRTKYGTRNQLQAAVTALKSNGIQVYGDVVMNHKGGADATEWVRAVEVNPSNRNQEVSGDYTIEAWTKFDFPGRGNTHSNFKWRWYHFDGVDWDQSRQLQNRIYKFRGDGKGWDWEVDTENGNYDYLMYADIDMDHPEVVNELRNWGVWYTNTLGLDGFRIDAVKHIKYSFTRDWLTHVRNTTGKNMFAVAEFWKNDIGAIENYLSKTNWNHSVFDVPLHYNLYNASRSGGNYDMRQIFNGTVVQRHPTHAVTFVDNHDSQPEEALESFVEEWFKPLAYALTLTRDQGYPSVFYGDYYGIPTHGVPAMKSKIDPILEARQKYAYGKQNDYLDHHNMIGWTREGNTAHPNSGLATIMSDGPGGNKWMYVGRNKAGQVWRDITGNRSGTVTINADGWGNFSVNGGSVSIWV

SEQ ID NO: 21301 - protein, 483 aa, Synthetic construct
HHNGTNGTMMQYFEWYLPNDGNHWNRLRSDASNLKDKGITAVWIPPAWKGASQNDVGYGAYDLYDLGEFNQKGTVRTKYGTRNQLQAAVTALKSNGIQVYGDVVMNHKGGADATEWVRAVEVNPSNRNQEVSGDYTIEAWTKFDFPGRGNTHSNFKWRWYHFDGVDWDQSRQLQNRIYKFRGDGKEWDWEVDTENGNYDYLMYADYDMDHPEVVNELRNWGVWYTNTLGLDGFRIDAVKHIKYSFTRDWLTHVRNTTGKNMFAVAEFWKNDIGAIRNYLSKTNWNHSVFDVPLHYNLYNASRSGGNYDMRQIFNGTVVQRHPTHAVTFVDNHDSQPEEALESFVEEWFKPLAYALTLTRDQGYPSVFYGDYYGIPTHGVPAMKSKIDPILEARQKYAYGKQNDYMDHHNMIGWTREGNTAHPNSGLATIMSDGPGGNKWMYVGRNKAGQVWRDITGNRSGTVTINADGWGNFSVNGGSVSIWV

SEQ ID NO: 21302 - protein, 483 aa, Synthetic construct
HHNGTNGTMMQYFEWYLPNDGNHWHRLRSDASNLKDKGITAVWIPPAWKGASQNDVGYGAYDLYDLGEFNQKGTVRTKYGTRNQLQAAVTALKSNGIQVYGDVVMNHKGGADATEWVRAVEVNPSNRNQEVSGDYTIEAWTKFDFPGRGNTHSNFKWRWYHFDGVDWDQSRQLQNRIYKFRGDGKEWDWEVDTENGNYDYLMYADYDMDHPEVVNELRNWGVWYTNTLGLDGFRIDAVKHIKYSFTRDWLTHVRNTTGKNMFAVAEFWKNDIGAIENYLSKTNWNHSVFDVPLHYNLYNASRSGGNYDMRQIFNGTVVQRHPTHAVTFVDNHDSQPEEALESFVEEWFKPLAYALTLTRDQGYPSVFYGDYYGIPTHGVPAMKSKIDPILEARQKYAYGKQNDYLDHHNMIGWTREGNTAHPNSGLATIMSDGPGGNKWMYVGRNKAGQVWRDITGNRSGTVTINADGWGNFSVNGGSVSIWV

SEQ ID NO: 21303 - protein, 483 aa, Synthetic construct
HHNGTNGTMMQYFEWYLPNDGNHWNRLRSDASNLKDKGITAVWIPPAWKGASQNDVGYGAYDLYDLGEFNQKGTVRTKYGTRNQLQAAVTALKSNGIQVYGDVVMNHKGGADATEWVRAVEVNPSNRNQEVSGDYTIEAWTKFDFPGRGNTHSNFKWRWYHFDGVDWDQSRQLQNRIYKFRGDGKGWDWEVDTENGNYDYLMYADIDMDHPEVVNELRNWGVWYTNTLGLDGFRIDAVKHIKYSFTRDWLTHVRNTTGKNMFAVAEFWKNDIGAIENYLSKTNWNHSVFDVPLHYNLYNASRSGGNYDMRQIFNGTVVQRHPTHAVTFVDNHDSQPEEALESFVEEWFKPLCYALTLTRDQGYPSVFYGDYYGIPTHGVPAMKSKIDPILEARQKYAYGKQNDYLDHHNMIGWTREGNTAHPNSGLATIMSDGPGGNKWMYVGRNKAGQVWRDITGNRSGTVTINADGWGNFSVNGGSVSIWV

SEQ ID NO: 21304 - protein, 483 aa, Synthetic construct
HHNGTNGTMMQYFEWYLPNDGNHWNRLRSDASNLKDKGITAVWIPPAWKGASQNDVGYGAYDLYDLGEFNQKGTVRTKYGTRNQLQDAVTALKSNGIQVYGDVVMNHKGGADATEWVRAVEVNPSNRNQEVSGDYTIEAWTKFDFPGRGNTHSNFKWRWYHFDGVDWDQSRQLQNRIYKFRGDGKEWDWEVDTENGNYDYLMYADIDMDHPEVVNELRNWGVWYTDTLGLDGFRIDAVKHIKYSFTRDWLTHVRNTTGKNMFAVAEFWKNDIGAIENYLSKTNWNHSVFDVPLHYNLYNASRSGGNYDMRQIFNGTVVQRHPTHAVTFVDNHDSQPEEALESFVEEWFKPLAYALTLTRDQGYPSVFYGDYYGIPTHGVPAMKSKIDPILEARQKYAYGKQNDYLDHHNMIGWTREGNTEHPNSGLATIMSDGPGGNKWMYVGRNKAGQVWRDITGNRSGTVTINADGWGNFSVNGGSVSIWV

SEQ ID NO: 21305 - protein, 483 aa, Synthetic construct
HHNGTNGTMMQYFEWYLPNDGNHWNRLRSDASNLKDKGITAVWIPPAWKGASQNDVGYGAYDLYDLGEFNQKGTVRTKYGTRNQLQAAVTALKSNGIQVYGDVVMNHKGGADATEWVRAVEVNPSNRNQEVSGDYTIEAWTKFDFPGRGNTHSNFKWRWYHFDGVDWDQSRQLQNRIYKFRGDGKGWDWEVDTENGNYDYLMYADIDMDHPEVVNELRNWGVWYTNTLGLDGFRIDAVKHIKYSFTRDWLTHVRNTTGKNMFAVAEFWKNDIGAIENYLSKTNWNHSVFDVPLHYNLYNASRSGGNYDMRQIFNGTVVQRHPTHAVTFVDNHDSQPEEALESFVEEWFKPLAYALTCTRDQGYPSVFYGDYYGIPTHGVPAMKSKIDPILEARQKYAYGKQNDYLDHHNMIGWTREGNTAHPNSGLATIMSDGPGGNKWMYVGRNKAGQVWRDITGNRSGTVTINADGWGNFSVNGGSVSIWV

SEQ ID NO: 21306 - protein, 483 aa, Synthetic construct
HHNGTHGTMMQYFEWYLPNDGNHWNRLRSDASNLKDKGITAVWIPPAWKGASQNDVGYGAYDLYDLGEFNQKGTVRTKYGTRNQLQAAVTALKSNGIQVYGDVVMNHKGGADATEWVRAVEVNPSNRNQEVSGDYTIEAWTKFDFPGRGNTHSNFKWRWYHFDGVDWDQSRQLQNRIYKFRGDGKGWDWEVDTENGNYDYLMYADIDMDHPEVVNELRNWGVWYTNTLGLDGFRIDAVKHIKYSFTRDWLTHVRNTTGKNMFAVAEFWKNDIGAIENYLSKTNWNHSVFDVPLHYNLYNASRSGGNYDMRQIFNGTVVQRHPTHAVTFVDNHDSQPEEALESFVEEWFKPLAYALTLTRDQGYPSVFYGDYYGIPTHGVPAMKSKIDPILEARQKYAYGKQNDYLDHHNMIGWTREGNTAHPNSGLATIMSDGPGGNKWMYVGRNKAGQVWRDITGNRSGTVTINADGWGNFSVNGGSVSIWV

SEQ ID NO: 21307 - protein, 483 aa, Synthetic construct
HHNGTNGTMMQYFEWYLPNDGNHWNRLRSDASNLKDKGITAVWIPPAWKGASQNDVGYGAYDLYDLGEFNQKGTVRTKYGTRNQLQAAVTALKSNGIQVYGDVVMNHKGGADATEWVRAVEVNPSNRNQEVSGDYTIEAWTKFDFPGRGNTHSNFKWRWYHFDGVDWDQSRQLQNRIYKFRGDGKGWDWEVDTENGNYDYLMYADIDMDHPEVVNELRNWGVWYTNTLGLDGFRIDAVKHIKYSFTRDWLTSVRNTTGKNMFAVAEFWKNDIGAIENYLSKTNWNHSVFDVPLHYNLYNASRSGGNYDMRQIFNGTVVQRHPTHAVTFVDNHDSQPEEALESFVEEWFKPLAYALTLTRDQGYPSVFYGDYYGIPTHGVPAMKSKIDPILEARQKYAYGKQNDYLDHHNMIGWTREGNTAHPNSGLATIMSDGPGGNKWMYVGRNKAGQVWRDITGNRSGTVTINADGWGNFSVNGGSVSIWV

SEQ ID NO: 21308 - protein, 483 aa, Synthetic construct
HHNGTNGTMMQYFEWYLPNDGNHWNRLRSDASNLKDKGITAVWIPPAWKGASQNDVGYGAYDLYDLGEFNQKGTVRTKYGTRNQLQAAVTALKSNGIQVYGDVVMNHKGGADATEWVRAVEVNPSNRNQEVSGDYTIEAWTKFDFPGRGNTHSNFKWRWYHFDGVDWDQSRQLQNRIYKFRGDGKEWDWEVDTENGNYDYLMYADIDMDHPEVVNELRNWGVWYTNTLGLDGFRIDAVKHIKYSFTRDWLTHVRNTTGKNMFAVAEFWKNDIGAIENYLSKTNWNHSVFDVPLHYNLYNASRSGGNYDMRQIFNKTVVQRHPTHAVTFVDNHDSQPEEALESFVEEWFKPLAYALTLTRDQGYPSVFYGDYYGIPTHGVPAMKSKIDPILEARQKYAYGKQNDYLDHHNMIGWTREGNTEHPNSGLATIMSDGPGGNKWMYVGRNKAGQVWRDITGNRSGTVTINADGWGNFSVNGGSVSIWV

SEQ ID NO: 21309 - protein, 483 aa, Synthetic construct
HHNGTNGTMMQYFEWYLPNDGNHWNRLRSDASNLKDKGITAVWIPPAWKGASQNDVGYGAYDLYDLGEFNQKGTVRTKYGTRNQLQAAVTALKSNGIQVYGDVVMNHKGGADATEWVRAVEVNPSNRNQEVSGDYTIEAWTKFDFPGRGNTHSNFKWRWYHFDGVDWDQSRQLQNRIYKFRGDGKGWDWEVDTENGNYDYLMYADIDMDHPEVVNELRNWGVWYTNTLGLDGFRIDAVKHIKYSFTRDWLTHVRNTTGKNMFAVAEFWKNDIGAIENYLSKTNWNHSVFDVPLHYNLYNASRSGGNYDMRQIFNGTVVQRHPTHAVTFVDNHDSQPEEALESFVEEWFKPLAYALTLTRDQGYPSVFYGDYYGIPTHGVPAQKSKIDPILEARQKYAYGKQNDYLDHHNMIGWTREGNTAHPNSGLATIMSDGPGGNKWMYVGRNKAGQVWRDITGNRSGTVTINADGWGNFSVNGGSVSIWV

SEQ ID NO: 21310 - protein, 483 aa, Synthetic construct
HHNQTNGTMMQYFEWYLPNDGNHWNRLRSDASNLKDKGITAVWIPPAWKGASQNDVGYGAYDLYDLGEFNQKGTVRTKYGTRNQLQAAVTALKSNGIQVYGDVVMNHKGGADATEWVRAVEVNPSNRNQEVSGDYTIEAWTKFDFPGRGNTHSNFKWRWYHFDGVDWDQSRQLQNRIYKFRGDGKEWDWEVDTENGNYDYLMYADIDMDHPEVVNELRNWGVWYTNTLGLDGFRIDAVKHIKYSFTRDWLTHVRNTTGKNMFAVAEFWKNDIGAIENYLSKTNWNHSVFDVPLHYNLYNASRSGGNYDMRQIFNGTVVQRHPTHAVTFVDNHDSQPEEALESFVEEWFKPLAYALTLTRDQGYPSVFYGDYYGIPTHGVPAMKSKIDPILEARQKYAYGKQNDYMDHHNMIGWTREGNTAHPNSGLATIMSDGPGGNKWMYVGRNKAGQVWRDITGNRSGTVTINADGWGNFSVNGGSVSIWV

SEQ ID NO: 21311 - protein, 483 aa, Synthetic construct
HHNGTNGTMMQYFEWYLPNDGNHWNRLRSDASNLKDKGITAVWIPPAWKGASQNDVGYGAYDLYDLGEFNQKGTVRTKYGTRNQLQAAVTALKSNGIQVYGDVVMNHKGGADATEWVRAVEVNPSNRNQEVSGDSTIEAWTKFDFPGRGNTHSNFKWRWYHFDGVDWDQSRQLQNRIYKFRGDGKGWDWEVDTENGNYDYLMYADIDMDHPEVVNELRNWGVWYTNTLGLDGFRIDAVKHIKYSFTRDWLTHVRNTTGKNMFAVAEFWKNDIGAIENYLSKTNWNHSVFDVPLHYNLYNASRSGGNYDMRQIFNGTVVQRHPTHAVTFVDNHDSQPEEALESFVEEWFKPLAYALTLTRDQGYPSVFYGDYYGIPTHGVPAMKSKIDPILEARQKYAYGKQNDYLDHHNMIGWTREGNTAHPNSGLATIMSDGPGGNKWMYVGRNKAGQVWRDITGNRSGTVTINADGWGNFSVNGGSVSIWV

SEQ ID NO: 21312 - protein, 483 aa, Synthetic construct
HHNGTNGTMMQYFEWYLPNDGNHWNRLRSDASNLKDKGITAVWIPPAWKGASQNDVGYGAYDLYDLGEFNQKGTVRTKYGTRNQLQAAVTALKSNGIQVYGDVVMNHKGGADATEWVRAVEVNPSNRNQEVSGDYTIEAWTKFDFPGRGNTHSNFKWRWYHFDGVDWDQSRQLQNRIYKFRGDGKEWDWEVDTENGNYDYLMYADIDMDHPEVVNELRNWGVWYTNTLGLDGFRIDAVKHIKYSFTRDWLTHVRNTTGKNMFAVAEFWKNDIGAIRNYLSKTNWNHSVFDVPLHYNLYNASRSGGNYDMRQIFNGTVVQRHPTHAVTFVDNHDSQPEEALESFVEEWFKPLAYALTLTRDQGYPSVFYGDYYGIPTHGVPAMKSKIDPILEARQKYAYGKQNDYLDHHNMIGWTREGNTAHPNSGLATIMSDGPGGNKWMYVGRNKAGQVWRDITGNRSGTVTINADGWGNFSVNGGSVSIWV

SEQ ID NO: 21313 - protein, 483 aa, Synthetic construct
HHNGTNGTMMQYFEWYLPNDGNHWDRLRSDASNLKDKGITAVWIPPAWKGASQNDVGYGAYDLYDLGEFNQKGTVRTKYGTRNQLQAAVTALKSNGIQVYGDVVMNHKGGADATEWVRAVEVNPSNRNQEVSGDYTIEAWTKFDFPGRGNTHSNFKWRWYHFDGVDWDQSRQLQNRIYKFRGDGKGWDWEVDTENGNYDYLMYADIDMDHPEVVNELRNWGVWYTNTLGLDGFRIDAVKHIKYSFTRDWLTHVRNTTGKNMFAVAEFWKNDIGAIENYLSKTNWNHSVFDVPLHYNLYNASRSGGNYDMRQIFNGTVVQRHPTHAVTFVDNHDSQPEEALESFVEEWFKPLAYALTLTRDQGYPSVFYGDYYGIPTHGVPAMKSKIDPILEARQKYAYGKQNDYLDHHNMIGWTREGNTAHPNSGLATIMSDGPGGNKWMYVGRNKAGQVWRDITGNRSGTVTINADGWGNFSVNGGSVSIWV

SEQ ID NO: 21314 - protein, 483 aa, Synthetic construct
HHNGTNGTMMQYFEWYLPNDGNHWNRLRSDASNLKDKGITAVWIPPAWKGASQNDVGYGAYDLYDLGEFNQKGTVRTKYGTRNQLQAAVTALKSNGIQVYGDVVMNHKGGADATEWVRAVEVNPSNRNQEVSGDYTIEAWTKFDFPGRGNTHSNFKWRWYHFDGVDWDQSRQLQNRIYKFRGDGKEWDWEVDTENGNYDYLMYADIDMDHPEVVNELRNWGVWYTNTLGLDGFRIDAVKHIKYSFTRDWLEHVRNTTGKNMFAVAEFWKNDIGAIENYLSKTNWNHSVFDVPLHYNLYNASRSGGNYDMRQIFNGTVVQRHPTHAVTFVDNHDSQPEEALESFVEEWFKPLAYALTLTRDQGYPSVFYGDYYGIPTHGVPAMKSKIDPILEARQKYAYGKQNDYMDHHNMIGWTREGNTAHPNSGLATIMSDGPGGNKWMYVGRNKAGQVWRDITGNRSGTVTINADGWGNFSVNGGSVSIWV

SEQ ID NO: 21315 - protein, 483 aa, Synthetic construct
HHNGTNGTMMQYFEWYLPNDGNHWNRLRSDASNLKDKGITAVWIPPAWKGASQNDVGYGAYDLYDLGEFNQKGTVRTKYGTRNQLQAAVTALKSNGIQVYGDVVMNHKGGADATEWVRAVEVNPSNRNQEVSGDYTIEAWTKFDFPGRGNTHSNFKWRWYHFTGVDWDQSRQLQNRIYKFRGDGKGWDWEVDTENGNYDYLMYADIDMDHPEVVNELRNWGVWYTNTLGLDGFRIDAVKHIKYSFTRDWLTHVRNTTGKNMFAVAEFWKNDIGAIENYLSKTNWNHSVFDVPLHYNLYNASRSGGNYDMRQIFNGTVVQRHPTHAVTFVDNHDSQPEEALESFVEEWFKPLAYALTLTRDQGYPSVFYGDYYGIPTHGVPAMKSKIDPILEARQKYAYGKQNDYLDHHNMIGWTREGNTAHPNSGLATIMSDGPGGNKWMYVGRNKAGQVWRDITGNRSGTVTINADGWGNFSVNGGSVSIWV

SEQ ID NO: 21316 - protein, 483 aa, Synthetic construct
HHNGTNGTMMQYFEWYLPNDGNHWNRLRSDASNLKDKGITAVWIPPAWKGASQNDVGYGAYDLYDLGEFNQKGTVRTKYGTRNQLQAAVTALKSNGIQVYGDVVMNHKGGADATEWVRAVEVNPSNRNQEVSGDYTIEAWTKFDFPGRGNTHSNFKWRWYHFDGVDWDQSRQLQNRIYKFRGDGKGWDWEVDTENGNYDYLMYADIDMDHPEVVNELRNWGVWYTNTLGLDGFRIDAVKHIKYSFTRDWLTHVRNTTGKNMFAVAEFWKNDIGAIENYLSDTNWNHSVFDVPLHYNLYNASRSGGNYDMRQIFNGTVVQRHPTHAVTFVDNHDSQPEEALESFVEEWFKPLAYALTLTRDQGYPSVFYGDYYGIPTHGVPAMKSKIDPILEARQKYAYGKQNDYLDHHNMIGWTREGNTAHPNSGLATIMSDGPGGNKWMYVGRNKAGQVWRDITGNRSGTVTINADGWGNFSVNGGSVSIWV

SEQ ID NO: 21317 - protein, 482 aa, Synthetic construct
HHGTNGTMMQYFEWYLPNDGNHWNRLRSDASNLKDKGITAVWIPPAWKGASQNDVGYGAYDLYDLGEFNQKGTVRTKYGTRNQLQAAVTALKSNGIQVYGDVVMNHKGGADATEWVRAVEVNPSNRNQEVSGDYTIEAWTKFDFPGRGNTHSNFKWRWYHFDGVDWDQSRQLQNRIYKFRGDGKGWDWEVDTENGNYDYLMYADIDMDHPEVVNELRNWGVWYTNTLGLDGFRIDAVKHIKYSFTRDWLTHVRNTTGKNMFAVAEFWKNDIGAIENYLSKTNWNHSVFDVPLHYNLYNASRSGGNYDMRQIFNGTVVQRHPTHAVTFVDNHDSQPEEALESFVEEWFKPLAYALVLTRDQGYPSVFYGDYYGIPTHGVPAMKSKIDPILEARQKYAYGKQNDYLDHHNMIGWTREGNTAHPNSGLATIMSDGPGGNKWMYVGRNKAGQVWRDITGNRSGTVTINADGWGNFSVNGGSVSIWV

SEQ ID NO: 21318 - protein, 487 aa, Bacillus sp. TS-23
APINETMMQYFEWDLPNDGTLWTKVKNEAANLSSLGITALWLPPAYKGTSQSDVGYGVYDLYDLGEFNQKGTIRTKYGTKTQYIQAIQAAKAAGMQVYADVVFNHKAGADGTEFVDAVEVDPSNRNQETSGTYQIQAWTKFDFPGRGNTYSSFKWRWYHFDGTDWDESRKLNRIYKFRSTGKAWDWEVDTENGNYDYLMFADLDMDHPEVVTELKNWGTWYVNTTNIDGFRLDAVKHIKYSFFPDWLTYVRNQTGKNLFAVGEFWSYDVNKLHNYITKTNGSMSLFDAPLHNNFYTASKSSGYFDMRYLLNNTLMKDQPSLAVTLVDNHDTQPGQSLQSWVEPWFKPLAYAFILTRQEGYPCYFYGDYYGIPKYNIPGLKSKIDPLLIARRDYAYGTQRDYIDHQDIIGWTREGIDTKPNSGLAALITDGPGGSKWMYVGKKHAGKVFYDLTGNRSDTVTINADGWGEFKVNGGSVSIWVAKTSNVT

SEQ ID NO: 21319 - protein, 487 aa, Synthetic construct
APVNGTMMQYFEWDLPNDGTLWTKVKNEATNLSSLGITALWLPPAYKGTSQSDVGYGVYDLYDLGEFNQKGTIRTKYGTKTQYIQAIQTAQAAGMQVYADVVFNHKAGADSTEFVDAVEVNPSNRNQETSGTYQIQAWTKFDFPGRGNTYSSFKWRWYHFDGTDWDESRKLNRIYKFRGTGKAWDWEVDTENGNYDYLMFADLDMDHPEVVTELKNWGTWYVNTTNIDGFRLDAVKHIKYSFFPDWLTYVRNQTGKNLFAVGEFWSYDVNKLHNYITKTNGSMSLFDAPLHNNFYTASKSSGYFDMRYLLNNTLMKDQPSLAVTLVDNHDTQPGQSLQSWVEPWFKQLAYAFILTRQEGYPCVFYGDYYGIPKYNIPGLKSKIDPLLIARRDYAYGTQRDYIDHQDIIGWTREGIDAKPNSGLAALITDGPGGSKWMYVGKKHAGKVFYDLTGNRSDTVTINADGWGEFKVNGGSVSIWVAKTSNVT

SEQ ID NO: 21320 - protein, 487 aa, Synthetic construct
APVNGTMMQYFEWDLPNDGTLWTKVKNEASSLSSLGITALWLPPAYKGTSQGDVGYGVYDLYDLGEFNQKGTIRTKYGTKTQYLQAIQAAKSAGMQVYADVVFNHKAGADSTEWVDAVEVNPSNRNQETSGTYQIQAWTKFDFPDRGNTYSSFKWRWYHFDGTDWDESRKLNRIYKFRGTGKAWDWEVDTENGNYDYLMFADLDMDHPEVVTELKNWGTWYVNTTNVDGFRLDAVKHIKYSFFPDWLTYVRSQTQKNLFAVGEFWSYDVNKLHNYITKTSGTMSLFDAPLHNNFYTASKSSGYFDMRYLLNNTLMKDQPSLAVTLVDNHDTQPGQSLQSWVEPWFKPLAYAFILTRQEGYPCVFYGDYYGIPKYNIPGLKSKIDPLLIARRDYAYGTQRDYIDHQDIIGWTREGIDSKPNSGLAALITDGPGGSKWMYVGKKHAGKVFYDLTGNRSDTVTINADGWGEFKVNGGSVSIWVAKTSQVT

SEQ ID NO: 21321 - protein, 397 aa, unidentified
HHNGTNGTMMQYFEWYLPNDGNHWNRLRDDAANLKSKGITAVWIPPAWKGTSQNDVGYGAYDLYDLGEFNQKGTVRTKYGTRNQLQAAVTSLKNNGIQVYGDVVMNHKGGADGTEIVNAVEVNRSNRNQETSGEYAIEAWTKFDFPGRGNNHSSFKWRWYHFDGTDWDQSRQLQNKIYKFRGKAWDWEVDTENGNYDYLMYADVDMDHPEVIHELRNWGVWYTNTLNLDGFRIDAVKHIKYSFTRDWLTHVRNTTGKPMFAVAEFWKNDLGAIENYLNKTSWNHSVFDVPLHYNLYNASNSGGYYDMRNILNGSVVQKHPTHAVTFVDNHDSQPGEALESFVQQWFKPLAYALVLTREQGYPSVFYGDYYGIPTHGVPAMKSKIDPLLQARQTFAYG

SEQ ID NO: 21322 - protein, 397 aa, Synthetic construct
HHNGTNGTMMQYFEWYLPNDGNHWNRLRSDASNLKDKGISAVWIPPAWKGASQNDVGYGAYDLYDLGEFNQKGTIRTKYGTRNQLQAAVNALKSNGIQVYGDVVMNHKGGADATEMVKAVEVNPNNRNQEVSGEYTIEAWTKFDFPGRGNTHSNFKWRWYHFDGVDWDQSRKLNNRIYKFRGKGWDWEVDTEFGNYDYLMYADIDMDHPEVVNELRNWGVWYTNTLGLDGFRIDAVKHIKYSFTRDWINHVRSATGKNMFAVAEFWKNDLGAIENYLNKTNWNHSVFDVPLHYNLYNASKSGGNYDMRQIFNGTVVQKHPMHAVTFVDNHDSQPEEALESFVEEWFKPLAYALTLTREQGYPSVFYGDYYGIPTHGVPAMKSKIDPILEARQKYAYG

SEQ ID NO: 21323 - protein, 399 aa, Bacillus sp. 707
HHNGTNGTMMQYFEWYLPNDGNHWNRLRSDASNLKDKGISAVWIPPAWKGASQNDVGYGAYDLYDLGEFNQKGTIRTKYGTRNQLQAAVNALKSNGIQVYGDVVMNHKGGADATEMVKAVEVNPNNRNQEVSGEYTIEAWTKFDFPGRGNTHSNFKWRWYHFDGVDWDQSRKLNNRIYKFRGDGKGWDWEVDTEFGNYDYLMYADIDMDHPEVVNELRNWGVWYTNTLGLDGFRIDAVKHIKYSFTRDWINHVRSATGKNMFAVAEFWKNDLGAIENYLNKTNWNHSVFDVPLHYNLYNASKSGGNYDMRQIFNGTVVQKHPMHAVTFVDNHDSQPEEALESFVEEWFKPLAYALTLTREQGYPSVFYGDYYGIPTHGVPAMKSKIDPILEARQKYAYG

SEQ ID NO: 21324 - protein, 491 aa, Unidentified
AAPFNGTMMQYFEWYLPDDGTLWTKVANEANNLSSLGITALWLPPAYKGTSRSDVGYGVYDLYDLGEFNQKGTVRTKYGTKAQYLQAIQAAHAAGMQVYADVVFDHKAGADETEVFKVIEVDPNDRTKEISEPFEIEGWTKFTFPGRGDQYSSFKWNSEHFNGTDFDAKGERTGVFRIAGKAWNWEVDTEFGNYDYLMFANIDYNHPDVVTELKNWGKWYVNTTNIDGFRLDAVKHIKFSFFADWLSYVRSQTGKPLFTVGEYWSYDINKLHNYITKTDGTMSLFDAPLHNKFYTASKSGGAFDMRTLMTNTLMKDQPTLAVTFVDNHDTEPGQALQSWVDPWFKPLAYAFILTRQEGYPCVFYGDYYGIPQYNIPSLKSKIDPLLIARRDYAYGTQHDYLDHSNIIGWTREGGTEKPGSGLAALITNGDGGSKWMYVGKQHAGKVFYDLTGNRSDTVTINSDGWGEFKVNGGSVSVWVPRKTTVSTIARP

SEQ ID NO: 21325 - protein, 491 aa, Geobacillus stearothermophilus
AAPFNGTMMQYFEWYLPDDGTLWTKVANEANNLSSLGITALWLPPAYKGTSRSDVGYGVYDLYDLGEFNQKGTVRTKYGTKAQYLQAIQAAHAAGMQVYADVVFDHKAGADETEVFKVIEVDPNDRTKEISEPFEIEGWTKFTFPGRGDQYSSFKWNSEHFNGTDFDAKGERTGVFRIAGKAWNWEVDTEFGNYDYLMFANIDYNHPDVVTELKNWGKWYVNTTNIDGFRLDAVKHIKFSFFPDWLSYVRSQTGKPLFTVGEYWSYDINKLHNYITKTDGTMSLFDAPLHNKFYTASKSGGAFDMRTLMTNTLMKDQPTLAVTFVDNHDTEPGQALQSWVDPWFKPLAYAFILTRQEGYPCVFYGDYYGIPQYNIPSLKSKIDPLVIARRDYAYGTQHDYLDHSNIIGWTREGGTEKPGSGLAALITNGDGGSKWMYVGKQHAGKVFYDLTGNRSDTVTINSDGWGEFKVNGGSVSVWVPRKTTVSTIARP

SEQ ID NO: 21326 - protein, 491 aa, Geobacillus stearothermophilus
AAPFNGTMMQYFEWYLPDDGTLWTKVANEANNLSSLGITALWLPPAYKGTSRSDVGYGVYDLYDLGEFNQKGTVRTKYGTKAQYLQAIQAAHAAGMQVYADVVFDHKAGADETEVFKVIEVDPNDRTKEISEPFEIEGWTKFTFPGRGDQYSSFKWNSEHFNGVDFDAKGERTGVFRIAGKAWNWEVDTEFGNYDYLMFANIDYNHPDVVTELKNWGKWVVNTTNIDGFRLDAVKHIKFSFFPDWLSYVRSQTGKPLFTVGEYWSYDINKLHNYITKTDGTMSLFDAPLHNKFYTASKSGGAFDLRTLMTNTLMKDQPTLAVTFVDNHDTEPGQALQSWVDPWFKPLAYAFILTRQEGYPCVFYGDYYGIPQYNIPSLKSKIDPLLIARRDYAYGTQHDYLDHSNIIGWTREGGTEKPGSGLAALITNGDGGSKWMYVGKQHAGKVFYDLTGNRSDTVTINSDGWGEFKVNGGSVSVWVPRKTTVSTIARP

SEQ ID NO: 21327 - protein, 491 aa, Unidentified
AAPFNGTMMQYFEWYLPDDGTLWTKVANEANNLSSLGITALWLPPAYKGTSRSDVGYGVYDLYDLGEFNQKGTVRTKYGTKAQYLQAIQAAHAAGMQVYADVVFDHKAGADETEVFKVIEVDPNDRTKEISEPFEIEGWTKFTFPGRGDQYSSFKWNSEYFNGTDFDAKGERTGVFRIAGKAWNWEVDTEFGNYDYLMFANIDYNHPDVVTELKNWGKWYVNTTNIDGFRLDAVKHIKFSFFPDWLSYVRSQTGKPLFTVGEYWSYDINKLHNYITKTDGTMSLFDAPLHNKFYTASKSGGAFDMRTLMTNTLMKDQPTLAVTFVDNHDTEPGQALQSWVDPWFKPLAYAFILTRQEGYPCVFYGDYYGIPQYNIPSLKSKIDPLLIARRDYAYGTQHDYLDHSNIIGWTREGGTEKPGSGLAALITNGDGGSKWMYVGKQHAGKVFYDLTGNRSDTVTINSDGWGEFKVNGGSVSVWVPRKTTVSTIARP

SEQ ID NO: 21328 - protein, 491 aa, Unidentified
AAPFNGTMMQYFEWYLPDDGTLWTKVANEANNLSSLGITALWLPPAYKGTSRSDVGYGVYDLYDLGEFNQKGTVRTKYGDKAQYLQAIQAAHAAGMQVYADVVFDHKAGADETEVFKVIEVDPNDRTKEISEPFEIEGWTKFTFPGRGDQYSSFKWNSEHFNGVDFDAKGERTGVFRIAGKAWNWEVDTEFGNYDYLMFANIDYNHPDVVTELKNWGKWYVNTTNIDGFRLDAVKHIKFSFFPDWLSYVRSQTGKPLFTVGEYWSYDINKLHNYITKTDGTMSLFDAPLHNKFYTASKSGGAFDLRTLMTNTLMKDQPTLAVTFVDNHDTEPGQALQSWVDPWFKPLAYAFILTRQEGYPCVFYGDYYGIPQYNIPSLKSKIDPLLIARRDYAYGTQHDYLDHSNIIGWTREGGTEKPGSGLAALITNGDGGSKWMYVGKQHAGKVFYDLTGNRSDTVTINSDGWGEFKVNGGSVSVWVPRKTTVSTIARP

SEQ ID NO: 21329 - protein, 491 aa, Unidentified
AAPFNGTMMQYFEWYLPDDGTLWTKVANEANNLSSLGITALWLPPAYKGTSRSDVGYGVYDLYDLGEFNQKGTVRTKYGTKAQYLQAIQAAHAAGMQVYADVVFNHKAGADETEVFKVIEVDPNDRTKEISEPFEIEGWTKFTFPGRGDQYSSFKWNSEHFNGTDFDAKGERTGVFRIAGKAWNWEVDTEFGNYDYLMFANIDYNHPDVVTELKNWGKWYVNTTNIDGFRLDAVKHIKFSFFPDWLSYVRSQTGKPLFTVGEYWSYDINKLHNYITKTDGTMSLFDAPLHNKFYTASKSGGAFDMRTLMTNTLMKDQPTLAVTFVDNHDTEPGQALQSWVDPWFKPLAYAFILTRQEGYPCVFYGDYYGIPQYNIPSLKSKIDPLLIARRDYAYGTQHDYLDHSNIIGWTREGGTEKPGSGLAALITNGDGGSKWMYVGKQHAGKVFYDLTGNRSDTVTINSDGWGEFKVNGGSVSVWVPRKTTVSTIARP

SEQ ID NO: 21330 - protein, 491 aa, Unidentified
AAPFNGTMMQYFEWYLPDDGTLWTKVANEANNLSSLGITALWLPPAYKGTSRSDVGYGVYDLYDLGEFNQKGTVRTKYGTKAQYLQAIQAAHAAGMQVYADVVFDHKAGADETEVFKVIEVDPNDRTKEISEPFEIEGWTKFTFPGRGDQYSSFKWNSEHFNGTDFDAKGERTGVFRIAGKAWNWEVDTEFGNYDYLMFANIDYNHPDVVTELKNWGKWYVNTTNIDGFRLDAVKHIKFSFFPDWLSYVRSQTGKPLFTVGEYWSYDINKLHNYITKTDGTMSLFDAPLHNKFYTASKSGGAFDMRTLMTNTLMKDQPTLAVTFVDNHDTEPGQALQSWVDPWFKPLAYAFILTRQEGYPCVFYGDYYGIPQYNIPSLKSKIDTLLIARRDYAYGTQHDYLDHSNIIGWTREGGTEKPGSGLAALITNGDGGSKWMYVGKQHAGKVFYDLTGNRSDTVTINSDGWGEFKVNGGSVSVWVPRKTTVSTIARP

SEQ ID NO: 21331 - protein, 491 aa, Geobacillus stearothermophilus
AAPFNGTMMQYFEWYLPDDGTLWTKVANEANNLSSLGITALWLPPAYKGTSRSDVGYGVYDLYDLGEFNQKGTVRTKYGTKAQYLQAIQAAHAAGMQVYADVVFDHKAGADETEVFKVIEVDPNDRTKEISEPFEIEGWTKFTFPGRGDQYSSFKWNSEHFNGTDFDAKGERTGVFRIAGKAWNWEVDTEFGNYDYLMFANIDYNHPDVVTELKNWGKWYVNTTNIDGFRLDAVKHIKFSFFPDWLSYVRSQTGKPLFTVGEYWSYDINKLHNYITKTDGTMSLFDAPLHNKFYTASKSGGAFDMRTLMTNTLMKDQPTLAVTFVDNHDTEPGQALQSWVDPWFKPLAYAFILTRQEGYPCVFYGDYYGIPQYNIPSLKSKIDPLLIARRDYAYGTQHDYLDHSNIIGWTREGGTEKPGSGLAALITNGDGGSKWMYVGKQHAGKVFYDLTGNRSDPVTINSDGWGEFKVNGGSVSVWVPRKTTVSTIARP

SEQ ID NO: 21332 - protein, 491 aa, Geobacillus stearothermophilus
AAPFNGTMMQYFEWYLPDDGTLWTKVANEANNLSSLGITALWLPPAYKGTSRSDVGYGVYDLYDLGEFNQKGTVRTKYGTKAQYLQAIQAAHAAGMQVYADVVFNHKAGADETEVFKVIEVDPNDRTKEISEPFEIEGWTKFTFPGRGDQYSSFKWNSEHFNGTDFDAKGERTGVFRIAGKKWNWEVDTEFGNYDYLMFANIDYNHPDVVTELKNWGKWYVNTTNIDGFRLDAVKHIKFEFFPDWLSYVRSQTGKPLFTVGEYWSYDINKLHNYITKTDGTMSLFDAPLHNKFYTASKSGGAFDMRTLMTNTLMKDQPTLAVTFVDNHDTEPGQALQSWVDPWFKPLAYAFILTRQEGYPCVFYGDYYGIPQYNIPSLKSKIDPLLIARRDYAYGTQHDYLDHSNIIGWTREGGTEKPGSGLAALITNGDGGSKWMYVGKQHAGKVFYDLTGNRSDTVTINSDGWGEFKVNGGSVSVWVPRKTTVSTIARP

SEQ ID NO: 21333 - protein, 491 aa, Geobacillus stearothermophilus
AAPFNGTLMQYFEWYLPDDGTLWTKVANEANNLSSLGITALWLPPAYKGTSRSDVGYGVYDLYDLGEFNQKGTVRTKYGTKAQYLQAIQAAHAAGMQVYADVVFDHKAGADETEVFKVIEVDPNDRTKEISEPFEIEGWTKFTFPGRGDQYSSFKWNSEHFNGTDFDAKGERTGVFRIAGKAWNWEVDTEFGNYDYLMFANIDYNHPDVVTELKNWGKWYVNTTNIDGFRLDAVKHIKFSFFPDWLSYVRSQTGKPLFTVGEYWSYDINKLHNYITKTDGTMSLFDAPLHNKFYTASKSGGAFDMRTLMTNTLMKDQPTLAVTFVDNHDTEPGQALQSWVDPWFKPLAYAFILTRQEGYPCVFYGDYYGIPQYNIPSLKSKIDPLLIARRDYAYGTQHDYLDHSNIIGWTREGGTEKPGSGLAALITNGDGGSKWMYVGKQHAGKVFYDLTGNRSDTVTINSDGWGEFKVNGGSVSVWVPRKTTVSTIARP

SEQ ID NO: 21334 - protein, 491 aa, Geobacillus stearothermophilus
AAPFNGTMMQYFEWYLPDDGTLWTKVANEANNLSSLGITALWLPPAYKGTSRSDVGYGVYDLYDLGEFNQKGTVRTKYGTKAQYLQAIQAAHAAGMQVYADVVFDHKAGADETEVFKVIEVDPNDRTKEISEPFEIEGWTKFTFPGRGDQYSSFKWNSEHFNGTDFDAKGERTGVFRIAGKAWNWEVDTEFGNYDYLMFANIDYNHPDVVTELKNWGKWYVNTTNIDGFRLDAVKHIKFSFFPDWLSYVRSQTGKPLFTVGEYWSYDINKLHNYITKTDGTMSLFDAPLHNKFYTASKSGGAFDMRTLMTNTLMKDQPTLAVTFVDNHDTEPGQALQSWVDPWFKPLAYAFILTRQEGYPCVFYGDYYGIPQYNIPSLKSKIDELLIARRDYAYGTQHDYLDHSNIIGWTREGGTEKPGSGLAALITNGDGGSKWMYVGKQHAGKVFYDLTGNRSDTVTINSDGWGEFKVNGGSVSVWVPRKTTVSTIARP

SEQ ID NO: 21335 - protein, 491 aa, Geobacillus stearothermophilus
AAPFNGTMMQYFEWYLPDDGTLWTKVANEANNLSSLGITALWLPPAYKGTSRSDVGYGVYDLYDLGEFNQKGTVRTKYGTKAQYLQAIQAAHAAGMQVYADVVFDHKAGADETEVFKVIEVDPNDRTKEISEPFEIEGWTKFTFPGRGDQYSSFKWYSYYFNGTDFDAKGERTGVFRIAGKAWNWEVDTEFGNYDYLMFANIDYNYPYVVTELKNWGKWYVNTTNIDGFRLDAVKHIKFSFFPDWLSYVRSQTGKPLFTVGEYWSYDINKLHNYITKTDGTMSLFDAPLHNKFYTASKSGGAFDMRTLMTNTLMKDQPTLAVTFVDNHDTEPGQALQSWVDPWFKPLAYAFILTRQEGYPCVFYGDYYGIPQYNIPSLKSKIDPLLIARRDYAYGTQHDYLDHSNIIGWTREGGTEKPGSGLAALITNGDGGSKWMYVGKQHAGKVFYDLTGNRSDTVTINSDGWGEFKVNGGSVSVWVPRKTTVSTIARP

SEQ ID NO: 21336 - protein, 491 aa, Unidentified
AAPFNGTMMQYFEWYLPDDGTLWTKVANEANNLSSLGITALWLPPAYKGTSRSDVGYGVYDLYDLGEFNQKGTVRTKYGTKAQYLQAIQAAHAAGMQVYADVVFDHKAGADETEVFKVIEVDPNDRTKEISEPFEIEGWTKFTFPGRGDQYSSFKWNSEHFNGTDFDAKGERTGVFRIAGKAWNWEVDTEFGNYDYLMFANIDYNHPDVVTELKNWGKWYVNTTNIDGFRLDAVKHIKFSFFPDWLSYVRSQTGKPLFTVGEYWSYDINKLHNYITKTDGTMSLFDAPLHNKFYTASKSGGAFDMRTLMTNTLMKDQPTLAVTFVDNHDTEPGQALQSWVDPWFKTLAYAFILTRQEGYPCVFYGDYYGIPQYNIPSLKSKIDPLLIARRDYAYGTQHDYLDHSNIIGWTREGGTEKPGSGLAALITNGDGGSKWMYVGKQHAGKVFYDLTGNRSDTVTINSDGWGEFKVNGGSVSVWVPRKTTVSTIARP

SEQ ID NO: 21337 - protein, 491 aa, Geobacillus stearothermophilus
AAPFNGTMMQYFEWYLPDDGTLWTKVANEANNLSSLGITALWLPPAYKGTSRSDVGYGVYDLYDLGEFNQKGTVRTKYGTKAQYLQAIQAAHAAGMQVYADVVFDHKAGADETEVFKVIEVDPNDRTKEISEPFEIEGWTKFTFPGRGDQYSSFKWNSEHFNGTDFDAKGERTGVFRIAGKAWNWEVDTEFGNYDYLMFANIDYNHPDVVTELKNWGKWYVNTTNIDGFRLDAVKHIKFSFFPDWLSYVRSQTGKPLFTVGEYWSYDINKLHNYITKTDGTMSLFDAPLHNKFYTASKSGGAFDMRTLMTNTLMKDQPTLAVTFVDNHDTEPGQALQSWVDPWFKPLAYAFILTRQEGYPCVFYGDYYGIPQYNIPSLKSKIDQLLIARRDYAYGTQHDYLDHSNIIGWTREGGTEKPGSGLAALITNGDGGSKWMYVGKQHAGKVFYDLTGNRSDTVTINSDGWGEFKVNGGSVSVWVPRKTTVSTIARP

SEQ ID NO: 21338 - protein, 491 aa, Unidentified
AAPFNGTMMQYFEWYLPDDGTLWTKVANEANNLSSLGITALWLPPAYKGTSRSDVGYGVYDLYDLGEFNQKGTVRTKYGTKAQYLQAIQAAHAAGMQVYADVVFNHKAGADETEVFKVIEVDPNDRTKEISEPFEIEGWTKFTFPGRGDQYSSFKWNSEHFNGTDFDAKGERTGVFRIAGKKWNWEVDTEFGNYDYLMFANIDYNHPDVVTELKNWGKWYVNTTNIDGFRLDAVKHIKFSFFPDWLSYVRSQTGKPLFTVGEYWSYDINKLHNYITKTDGTMSLFDAPLHNKFYTASKSGGAFDMRTLMTNTLMKDQPTLAVTFVDNHDTEPGQALQSWVDPWFKPLAYAFILTRQEGYPCVFYGDYYGIPQYNIPSLKSKIDPLLIARRDYAYGTQHDYLDHSNIIGWTREGGTEKPGSGLAALITNGDGGSKWMYVGKQHAGKVFYDLTGNRSDTVTINSDGWGEFKVNGGSVSVWVPRKTTVSTIARP

SEQ ID NO: 21339 - protein, 491 aa, Unidentified
AAPFNGTMMQYFEWYLPDDGTLWTKVANEANNLSSLGITALWLPPAYKGTSRSDVGYGVYDLYDLGEFNQKGTVRTKYGTKAQYLQAIQALHAAGMQVYADVVFDHKAGADETEVFKVIEVDPNDRTKEISEPFEIEGWTKFTFPGRGDQYSSFKWNSEHFNGTDFDAKGERTGVFRIAGKAWNWEVDTEFGNYDYLMFANIDYNHPDVVTELKNWGKWYVNTTNIDGFRLDAVKHIKFSFFPDWLSYVRSQTGKPLFTVGEYWSYDINKLHNYITKTDGTMSLFDAPLHNKFYTASKSGGAFDMRTLMTNTLMKDQPTLAVTFVDNHDTEPGQALQSWVDPWFKPLAYAFILTRQEGYPCVFYGDYYGIPQYNIPSLKSKIDPLLIARRDYAYGTQHDYLDHSNIIGWTREGGTEKPGSGLAALITNGDGGSKWMYVGKQHAGKVFYDLTGNRSDTVTINSDGWGEFKVNGGSVSVWVPRKTTVSTIARP

SEQ ID NO: 21340 - protein, 491 aa, Unidentified
AAPFNGTMMQYFEWYLPDDGTLWTKVANEANNLSSLGITALWLPPAYKGTSRSDVGYGVYDLYDLGEFNQKGTVRTKYGTKAQYLQAIQAAHAAGMQVYADVVFDHKAGADETEVFKVIEVDPNDRTKEISEPFEIEGWTKFTFPGRGDQYSSFKWNSEHFNGTDFDAKGERTGVFRIAGKAWNWEVDTEFGNYDYLMFANIDYNHPDVVTELKNWGKWYVNTTNIDGFRLDAVKHIKFSFFPDWLSYVRSQTGKPLFTVGEYWSYDINKLHNYITKTDGTMSLFDAPLHNKFYTASKSGGAFDMRTLMTNTLMKDQPTLAVTFVDNHDTEPGQALQSWVDPWFKPLAYAFILTRQEGYPCVFYGDYYGIPQYNIPSLKSKIDPLIIARRDYAYGTQHDYLDHSNIIGWTREGGTEKPGSGLAALITNGDGGSKWMYVGKQHAGKVFYDLTGNRSDTVTINSDGWGEFKVNGGSVSVWVPRKTTVSTIARP

SEQ ID NO: 21341 - protein, 491 aa, Geobacillus stearothermophilus
AAPFNGTMMQYFEWYLPDDGTLWTKVANEANNLSSLGITALWLPPAYKGTSRSDVGYGVYDLYDLGEFNQKGTVRTKYGTKAQYLQAIQAAHAAGMQVYADVVFNHKAGADETEVFKVIEVDPNDRTKEISEPFEIEGWTKFTFPGRGDQYSSFKWNSEHFNGTDFDAKGERTGVFRIAGKVWNWEVDTEFGNYDYLMFANIDYNHPDVVTELKNWGKWYVNTTNIDGFRLDAVKHIKFSFFPDWLSYVRSQTGKPLFTVGEYWSYDINKLHNYITKTDGTMSLFDAPLHNKFYTASKSGGAFDMRTLMTNTLMKDQPTLAVTFVDNHDTEPGQALQSWVDPWFKPLAYAFILTRQEGYPCVFYGDYYGIPQYNIPSLKSKIDPLLIARRDYAYGTQHDYLDHSNIIGWTREGGTEKPGSGLAALITNGDGGSKWMYVGKQHAGKVFYDLTGNRSDTVTINSDGWGEFKVNGGSVSVWVPRKTTVSTIARP

SEQ ID NO: 21342 - protein, 491 aa, Geobacillus stearothermophilus
AAPFNGTMMQYFEWYLPDDGTLWTKVANEANNLSSLGITALWLPPAYKGTSRSDVGYGVYDLYDLGEFNQKGTVRTKYGTKAQYLQAIQAAHAAGMQVYADVVFDHKAGADETEVFDVIEVDPNDRTKEISEPFEIEGWTKFTFPGRGDTYSSFKWNSEHFNGTDFDAKGERTGVFRIAGKAWNWEVDTEFGNYDYLMFANIDYNHPDVVTELKNWGKWYVNTTNIDGFRLDAVKHIKFSFFPDWLSYVRSQTGKPLFTVGEYWSYDINKLHNYITKTDGTMSLFDAPLHNKFYTASKKGRDFDMRTLMTNTLMKDQPTLAVTFVDNHDTEPGQALQSWVDPWFKPLAYAFILTRQEGYPCVFYGDYYGIPQYNIPSLKSKIDPLLIARRDYAYGTQHDYLDHSNIIGWTREGGTEKPGSGLAALITNGDGGSKWMYVGKQHAGKVFYDLTGNRSDTVTINSDGWGEFKVNGGSVSVWVPRKTTVSTIARP

SEQ ID NO: 21343 - protein, 491 aa, Unidentified
AAPFNGTMMQYFEWYLPDDGTLWTKVANEANNLSSLGITALWLPPAYKGTSRSDVGYGVYDLYDLGEFNQKGTVRTKYGTKAQYLQAIQAAHAAGMQVYADVVFDHKAGADETEVFKVIEVDPNDRTKEISEPFEIEGWTKFTFPGRGDQYSSFKWNSEHFNGVDFDAKGERTGVFRIAGKAWNWEVDTEFGNYDYLMFANIDYNHPDVVTELKNWGKWYVQTTNIDGFRLDAVKHIKFQFFPDWLSYVRSQTGKPLFTVGEYWSYDINKLHNYITKTDGTTSLFDAPLHNKFYTASKSGGAFDLRTLMTNTLMKDQPTLAVTFVDNHDTEPGQALQSWVDPWFKPLAYAFILTRQEGYPCVFYGDYYGIPQYNIPSLKSKIDPLLIARRDYAYGTQHDYLDHSNIIGWTREGGTEKPGSGLAALITNGDGGSKWMYVGKQHAGKVFYDLTGNRSDTVTINSDGWGEFKVNGGSVSVWVPRKTTVSTIARP

SEQ ID NO: 21344 - protein, 491 aa, Unidentified
AAPFNGTMMQYFEWYLPDDGTLWTKVANEANNLSSLGITALWLPPAYKGTSRSDVGYGVYDLYDLGEFNQKGTVRTKYGTKAQYLQAIQAAHAAGMQVYADVVFDHKAGADETEVFKVIEVDPNDRTKEISEPFEIEGWTKFTFPGRGDQYSSFKWNSEHFNGVDFDAKGERTGVFRIAGKAWNWEVDTEFGNYDYLMFANIDYNHPDVVTELKNWGKWYVNTTNIDGFRLDAVKHIKFSFYPDWLSYVRSQTGKPLFTVGEYWSYDINKLHNYITKTDGTQSLFDAPLHNKFYTASKSGGAFDLRTLMTNTLMKDQPTLAVTFVDNHDTEPGQALQSWVDPWFKPLAYAFILTRQEGYPCVFYGDYYGIPQYNIPSLKSKIDPLLIARRDYAYGTQHDYLDHSNIIGWTREGGTEKPGSGLAALITNGDGGSKWMYVGKQHAGKVFYDLTGNRSDTVTINSDGWGEFKVNGGSVSVWVPRKTTVSTIARP

SEQ ID NO: 21345 - protein, 491 aa, Unidentified
AAPFNGTMMQYFEWYLPDDGTLWTKVANEANNLSSLGITALWLPPAYKGTSRSDVGYGVYDLYDLGEFNQKGTVRTKYGTKAQYLQAIQAAHAAGMQVYADVVFDHKAGADETEVFKVIEVDPNDRTKEISEPFEIEGWTKFTFPGRGDQYSSFKWNSEHFNGTDFDAKGERTGVFRIAGKAWNWEVDTEFGNYDYLMFANIDYNHPDVVTELKNWGKWYVNTTNIDGFRLDAVKHIKFQFFPDWLSYVRSQTGKPLFTVGEYWSYDINKLHNYITKTDWTMSLFDAPLHNKFYTASKSGGAFDMRTLMTNTLMKDQPTLAVTFVDNHDTEPGQALQSWVDPWFKPLAYAFILTRQEGYPCVFYGDYYGIPQYNIPSLKSKIDPLLIARRDYAYGTQHDYLDHSNIIGWTREGGTEKPGSGLAALITNGDGGSKWMYVGKQHAGKVFYDLTGNRSDTVTINSDGWGEFKVNGGSVSVWVPRKTTVSTIARP

SEQ ID NO: 21346 - protein, 491 aa, Unidentified
AAPFNGTMMQYFEWYLPDDGTLWTKVANEANNLSSLGITALWLPPAYKGTSRSDVGYGVYDLYDLGEFNQKGTVRTKYGTKAQYLQAIQAAHAAGMQVYADVVFDHKAGADETEVFKVIEVDPNDRTKEISEPFEIEGWTKFTFPGRGDQYSSFKWNSEHFNGTDFDAKGERTGVFRIAGKAWNWEVDTEFGNYDYLMFANIDYNHPDVVTELKNWGKWYVNTTNIDGFRLDWVKHIKFQFFPDWLSYVRSQTGKPLFTVGEYWSYDINKLHNYITKTDGTMSLFDAPLHNKFYTASKSGGAFDMRTLMTNTLMKDQPTLAVTFVDNHDTEPGQALQSWVDPWFKPLAYAFILTRQEGYPCVFYGDYYGIPQYNIPSLKSKIDPLLIARRDYAYGTQHDYLDHSNIIGWTREGGTEKPGSGLAALITNGDGGSKWMYVGKQHAGKVFYDLTGNRSDTVTINSDGWGEFKVNGGSVSVWVPRKTTVSTIARP

SEQ ID NO: 21347 - protein, 491 aa, Geobacillus stearothermophilus
AAPFNGTMMQYFEWYLPDDGTLWTKVANEANNLKSLGITALWLPPAYKGTSRSDVGYGVYDLYDLGEFNQKGTVRTKYGTKAQYLQAIQAAHAAGMQVYADVVFDHKAGADETEVFKVIEVDPNDRTKEISEPFEIEGWTKFTFPGRGDQYSSFKWNSEHFNGTDFDAKGERTGVFRIAGKAWNWEVDTEFGNYDYLMFANIDYNHPDVVTELKNWGKWYVNTTNIDGFRLDAVKHIKFQFFPDWLSYVRSQTGKPLFTVGEYWSYDINKLHNYITKTDGTMSLFDAPLHNKFYTASKSGGAFDMRTLMTNTLMKDQPTLAVTFVDNHDTEPGQALQSWVDPWFKPLAYAFILTRQEGYPCVFYGDYYGIPQYNIPSLKSKIDPLLIARRDYAYGTQHDYLDHSNIIGWTREGGTEKPGSGLAALITNGDGGSKWMYVGKQHAGKVFYDLTGNRSDTVTINSDGWGEFKVNGGSVSVWVPRKTTVSTIARP

SEQ ID NO: 21348 - protein, 491 aa, Unidentified
AAPFNGTMMQYFEWYLPDDGTLWTKVANEANNLSSLGITALWLPPAYKGTSRSDVGYGVYDLYDLGEFNQKGTVRTKYGTKAQYLQAIQAAHAAGMQVYADVVFDHKAGADETEVFKVIEVDPNDRTKEISEPFEIEGWTKFTFPGRGDQYSSFKWNSEHFNGTDFDAKGERTGVFRIAGKAWNWEVDTEFGNYDYLMFANIDYNHPDVVTELKNWGKWYVNTTNIDGFRLDAVKHIKFSFFPDWLSYVRSQTGKPLFTVGEYWSYDINKLHNYITKTDGTMSLFDAPLHNKFYTASKSGGAFDMRTLMTNTLMKDQPTLAVTFVDNHDTEPGQALQSWVDPWFKPLAYAFILTRQEGYPCVFYGDYYGIPQYNIPSLKSKIDVLLIARRDYAYGTQHDYLDHSNIIGWTREGGTEKPGSGLAALITNGDGGSKWMYVGKQHAGKVFYDLTGNRSDTVTINSDGWGEFKVNGGSVSVWVPRKTTVSTIARP

SEQ ID NO: 21349 - protein, 491 aa, Unidentified
AAPFNGTMMQYFEWYLPDDGTLWTKVANEANNLSSLGITALWLPPAYKGTSRSDVGYGVYDLYDLGEFNQKGTVRTKYGTKAQYLQAIQAAHAAGMQVYADVVFDHKAGADETEVFKVIEVDPNDRTKEISEPFEIEGWTKFTFPGRGDQYSSFKWNSEHFNGTDFDAKGERTGVFRIAGKAWNWEVDTEFGNYDYLMFANIDYNHPDVVTELKNWGKWYVNTTNIDGFRLDTVKHIKFSFFPDWLSYVRSQTGKPLFTVGEYWSYDINKLHNYITKTDGTMSLFDAPLHNKFYTASKSGGAFDMRTLMTNTLMKDQPTLAVTFVDNHDTEPGQALQSWVDPWFKPLAYAFILTRQEGYPCVFYGDYYGIPQYNIPSLKSKIDPLLIARRDYAYGTQHDYLDHSNIIGWTREGGTEKPGSGLAALITNGDGGSKWMYVGKQHAGKVFYDLTGNRSDTVTINSDGWGEFKVNGGSVSVWVPRKTTVSTIARP

SEQ ID NO: 21350 - protein, 491 aa, Unidentified
AAPFNGTMMQYFEWYLPDDGTLWTKVANEANNLSSLGITALWLPPAYKGTSRSDVGYGVYDLYDLGEFNQKGTVRTKYGTKAQYLQAIQAAHAAGMQVYADVVFDHKAGADETEVFKVIEVDPNDRTKEISEPFEIEGWTKFTFPGRGDQYSSFKWNSEHFNGVDFDAKGERTGVFRIAGKAWNWEVDTEFGNYDYLMFANIDYNHPDVVTELKNWGKWYVNTTNIDGFRLDAVKHIKFSFYPDWLSYVRSQTGKPLFTVGEYWSYDINKLHNYITKTDGTTSLFDAPLHNKFYTASKSGGAFDLRTLMTNTLMKDQPTLAVTFVDNHDTEPGQALQSWVDPWFKPLAYAFILTRQEGYPCVFYGDYYGIPQYNIPSLKSKIDPLLIARRDYAYGTQHDYLDHSNIIGWTREGGTEKPGSGLAALITNGDGGSKWMYVGKQHAGKVFYDLTGNRSDTVTINSDGWGEFKVNGGSVSVWVPRKTTVSTIARP

SEQ ID NO: 21351 - protein, 491 aa, Unidentified
AAPFNGTMMQYFEWYLPDDGTLWTKVANEANNLSSLGITALWLPPAYKGTSRSDVGYGVYDLYDLGEFNQKGTVRTKYGTKAQYLQAIQAAHAAGMQVYADVVFDHKAGADETEVFKVIEVDPNDRTKEISEPFEIEGWTKFTFPGRGDQYSSFKWNSEHFNGTDFDAKGERTGVFRIAGKAWNWEVDTEFGNYDYLMFANIDYNHPDVVTELKNWGKWYVNTTNIDGFRLDAVKHIKFSFFKDWLSYVRSQTGKPLFTVGEYWSYDINKLHNYITKTDGTMSLFDAPLHNKFYTASKSGGAFDMRTLMTNTLMKDQPTLAVTFVDNHDTEPGQALQSWVDPWFKPLAYAFILTRQEGYPCVFYGDYYGIPQYNIPSLKSKIDPLLIARRDYAYGTQHDYLDHSNIIGWTREGGTEKPGSGLAALITNGDGGSKWMYVGKQHAGKVFYDLTGNRSDTVTINSDGWGEFKVNGGSVSVWVPRKTTVSTIARP

SEQ ID NO: 21352 - protein, 493 aa, Unidentified
AAPFNGTMMQYFEWYLPDDGTLWTKVANEANNLSSLGITALWLPPAYKGTSRSDVGYGVYDLYDLGEFNQKGTVRTKYGTKAQYLQAIQAAHAAGMQVYADVVFNHKAGADETEVFKVIEVDPNDRTKEISEPFEIEGWTKFTFPGRGDQYSSFKWNSEHFNGTDFDAKGERTGVFRIAGENKKWNENVDDEFGNYDYLMFANIDYNHPDVVTELKNWGKWYVNTTNIDGFRLDAVKHIKFSFFPDWLSYVRSQTGKPLFTVGEYWSYDINKLHNYITKTNGTMSLFDAPLHNKFYTASKSGGAFDMRTLMTNTLMKDQPTLAVTFVDNHDTEPGQALQSWVDPWFKPLAYAFILTRQEGYPCVFYGDYYGIPQYNIPSLKSKIDPLLIARRDYAYGTQHDYLDHSDIIGWTREGVTEKPGSGLAALITDGPGGSKWMYVGKQHAGKVFYDLTGNRSDTVTINSDGWGEFKVNGGSVSVWVPRKTTVSTIARP

SEQ ID NO: 21353 - protein, 486 aa, Bacillus sp.
HHNGTNGTMMQYFEWHLPNDGQHWNRLRNDAANLKNLGITAVWIPPAWKGTSQNDVGYGAYDLYDLGEFNQKGTIRTKYGTRSQLQSAIASLQNNGIQVYGDVVMNHKGGADGTEWVQAVEVNPSNRNQEVTGEYTIEAWTKFDFPGRGNTHSSFKWRWYHFDGTDWDQSRQLNNRIYKFRGTGKAWDWEVDTENGNYDYLMYADVDMDHPEVINELRRWGVWYTNTLNLDGFRIDAVKHIKYLFTRDWLNHVRSTTGKNNMFAVAEFWKNDLGAIENYLHKTNWNHSVFDVPLHYNLYNASKSGGNYDMRQILNGTVVSKHPIHAVTFVDNHDSQPAEALESFVEAWFKPLAYALILTREQGYPSVFYGDYYGIPTHGVAAMKGKIDPILEARQKYAYGTQHDYLDHHNIIGWTREGNSAHPNSGLATIMSDGPGGSKWMYVGRHKAGQVWRDITGNRTGTVTINADGWGNFSVNGGSVSIWVNK

SEQ ID NO: 21354 - protein, 486 aa, Bacillus sp.
HHNGTNGTMMQYFEWHLPNDGQHWNRLRNDAANLKNLGITAVWIPPAWKGTSQNDVGYGAYDLYDLGEFNQKGTIRTKYGTRSQLQSAIASLQNNGIQVYGDVVMNHKGGADGTEWVQAVEVNPSNRNQEVTGEYTIEAWTKFDFPGRGNTHSSFKWRWYHFDGTDWDQSRQLNNRIYKFRGTGKAWDWEVDTENGNYDYLMYADVDMDQPEVINELRRWGVWYTNTLNLDGFRIDAVKHIKYSFTRDWLNHVRSTTGKNNMFAVAEFWKNDLGAIENYLHKTNWNHSVFDVPLHYNLYNASKSGGNYDMRQILNGTVVSKHPIHAVTFVDNHDSQPAEALESFVEAWFKPLAYALILTREQGYPSVFYGDYYGIPTHGVAAMKGKIDPILEARQKYAYGTQHDYLDHHNIIGWTREGNSAHPNSGLATIMSDGPGGSKWMYVGRHKAGQVWRDITGNRTGTVTINADGWGNFSVNGGSVSIWVNK

SEQ ID NO: 21355 - protein, 486 aa, Bacillus sp. (in: firmicutes)
HHNGTNGTMMQYFEWHLPNDGQHWNRLRNDAANLKNLGIEAVWIPPAWKGTSQNDVGYGAYDLYDLGEFNQKGTIRTKYGTRSQLQSAIASLQNNGIQVYGDVVMNHKGGADGTEWVQAVEVNPSNRNQEVTGEYTIEAWTKFDFPGRGNTHSSFKWRWYHFDGTDWDQSRQLNNRIYKFRGTGKAWDWEVDTENGNYDYLMYADVDMDHPEVINELRRWGVWYTNTLNLDGFRIDAVKHIKYSFTRDWLNHVRSTTGKNNMFAVAEFWKNDLGAIENYLHKTNWNHSVFDVPLHYNLYNASKSGGNYDMRQILNGTVVSKHPIHAVTFVDNHDSQPAEALESFVEAWFKPLAYALILTREQGYPSVFYGDYYGIPTHGVAAMKGKIDPILEARQKYAYGTQHDYLDHHNIIGWTREGNSAHPNSGLATIMSDGPGGSKWMYVGRHKAGQVWRDITGNRTGTVTINADGWGNFSVNGGSVSIWVNK

SEQ ID NO: 21356 - protein, 486 aa, Bacillus sp.
HHNGTNGTMMQYFEWHLPNDGQHWNRLRNDAANLKNLGITAVWIPPAWKGTSQNDVGYGAYDLYDLGEFNQKGTIRTKYGTRSQLQSAIASLQNNGIQVYGDVVMNHKGGADGTEWVQAVEVNPSNRNQEVTGEYTIEAWTKFDFPGRGNTHSSFKWRWYHFDGTDWDQSRQLNNRIYKFRGTGKAWDWEVDTENGNYDYLMYADVDMDHPEVINELRRWGVWYTNTLNLDGFRIDAVKHIKYEFTRDWLNHVRSTTGKNNMFAVAEFWKNDLGAIENYLHKTNWNHSVFDVPLHYNLYNASKSGGNYDMRQILNGTVVSKHPIHAVTFVDNHDSQPAEALESFVEAWFKPLAYALILTREQGYPSVFYGDYYGIPTHGVAAMKGKIDPILEARQKYAYGTQHDYLDHHNIIGWTREGNSAHPNSGLATIMSDGPGGSKWMYVGRHKAGQVWRDITGNRTGTVTINADGWGNFSVNGGSVSIWVNK

SEQ ID NO: 21357 - protein, 486 aa, Bacillus sp.
HHNGTNGTMMQYFEWHLPNDGQHWNRLRNDAANLKNLGITAVWIPPAWKGTSQNDVGYGAYDLYDLGEFNQKGTIRTKYGTRSQLQSAIASLQNNGIQVYGDVVMNHKGGADGTEWVQAVEVNPSNRNQEVTGEYTIEAWTKFDFPGRGNTHSSFKWRWYHFDGTDWDQSRQLNNRIYKFRGTGKAWDWEVDTENGNYDYLMYADTDMDHPEVINELRRWGVWYTNTLNLDGFRIDAVKHIKYSFTRDWLNHVRSTTGKNNMFAVAEFWKNDLGAIENYLHKTNWNHSVFDVPLHYNLYNASKSGGNYDMRQILNGTVVSKHPIHAVTFVDNHDSQPAEALESFVEAWFKPLAYALILTREQGYPSVFYGDYYGIPTHGVAAMKGKIDPILEARQKYAYGTQHDYLDHHNIIGWTREGNSAHPNSGLATIMSDGPGGSKWMYVGRHKAGQVWRDITGNRTGTVTINADGWGNFSVNGGSVSIWVNK

SEQ ID NO: 21358 - protein, 486 aa, Bacillus sp.
HHNGTNGTMMQYFEWHLPNDGQHWNRLRNDAANLKNLGINAVWIPPAWKGTSQNDVGYGAYDLYDLGEFNQKGTIRTKYGTRSQLQSAIARLQNNGIQVYGDVVMNHKGGADGTEWVQAVEVNPSNRNQEVTGEYTIEAWTKFDFPGRGNTHSSFKWRWYHFDGTDWDHSRQLNNRIYKFRGMGKAWDWEVDTENGNYDYLMYADVDMDHPEVINELRRWGVWYTNTLNLDGFRIDAVKHIKYSFTRDWLNHVRSTTGKNNMFAVAEFWKNDLGAIENYLNKTNWNHSVFDVPLHYNLYNASKSGGNYDMRQILNGTVVSKHPIHAVTFVDNHDSQPAEALESFVEAWFKPLAYALILTREQGYPSVFYGDYYGIPTHGVAAMKGKIDPILEARQKYAYGTQHDYLDHHNIIGWTREGNSAHPNSGLATIMSDGPGGSKWMYVGRHKAGQVWRDITGNRTGTVTINADGWGNFSVNGGSVSIWVNK

SEQ ID NO: 21359 - protein, 486 aa, Bacillus sp.
HHNGTNGTMMQYFEWHLPNDGQHWNRLRNDAANLKNLGITAVWIPPAWKGTSQNDVGYGAYDLYDLGEFNQKGTIRTKYGTRSQLQSAIASLQNNGIQVYGDVVMNHKGGADGTEWVQAVEVNPSNRNQEVTGEYTIEAWTKFDFPGRGNTHSSFKWRWYHFDGTDWDQSRQLNNRIYKFRGTGKAWDWEVDTENGNYDYLMYADVDMDHPEVINELRRWGVWYTNTLNLDGFRIDAVKHIKYNFTRDWLNHVRSTTGKNNMFAVAEFWKNDLGAIENYLHKTNWNHSVFDVPLHYNLYNASKSGGNYDMRQILNGTVVSKHPIHAVTFVDNHDSQPAEALESFVEAWFKPLAYALILTREQGYPSVFYGDYYGIPTHGVAAMKGKIDPILEARQKYAYGTQHDYLDHHNIIGWTREGNSAHPNSGLATIMSDGPGGSKWMYVGRHKAGQVWRDITGNRTGTVTINADGWGNFSVNGGSVSIWVNK

SEQ ID NO: 21360 - protein, 486 aa, Bacillus sp. (in: firmicutes)
HHNGTNGTMMQYFEWHLPNDGQHWNRLRNDAANLKNLGIDAVWIPPAWKGTSQNDVGYGAYDLYDLGEFNQKGTIRTKYGTRSQLQSAIASLQNNGIQVYGDVVMNHKGGADGTEWVQAVEVNPSNRNQEVTGEYTIEAWTKFDFPGRGNTHSSFKWRWYHFDGTDWDQSRQLNNRIYKFRGTGKAWDWEVDTENGNYDYLMYADVDMDHPEVINELRRWGVWYTNTLNLDGFRIDAVKHIKYSFTRDWLNHVRSTTGKNNMFAVAEFWKNDLGAIENYLHKTNWNHSVFDVPLHYNLYNASKSGGNYDMRQILNGTVVSKHPIHAVTFVDNHDSQPAEALESFVEAWFKPLAYALILTREQGYPSVFYGDYYGIPTHGVAAMKGKIDPILEARQKYAYGTQHDYLDHHNIIGWTREGNSAHPNSGLATIMSDGPGGSKWMYVGRHKAGQVWRDITGNRTGTVTINADGWGNFSVNGGSVSIWVNK

SEQ ID NO: 21361 - protein, 486 aa, Bacillus sp.
HHNGTNGTMMQYFEWHLPNDGQHWNRLRNDAANLKNLGITAVWIPPAWKGTSQNDVGYGAYDLYDLGEFNQKGTIRTKYGTRSQLQSAIASLQNNGIQVYGDVVMNHKGGADGTEWVQAVEVNPSNRNQEVTGEYTIEAWTKFDFPGRGNTHSSFKWRWYHFDGTDWDQSRQLNNRIYKFRGTGKAWDWEVDTENGNYDYLMYADVDMDHPEVINELRRWGVWYTNTLNLDGFRIDAVKHIKYHFTRDWLNHVRSTTGKNNMFAVAEFWKNDLGAIENYLHKTNWNHSVFDVPLHYNLYNASKSGGNYDMRQILNGTVVSKHPIHAVTFVDNHDSQPAEALESFVEAWFKPLAYALILTREQGYPSVFYGDYYGIPTHGVAAMKGKIDPILEARQKYAYGTQHDYLDHHNIIGWTREGNSAHPNSGLATIMSDGPGGSKWMYVGRHKAGQVWRDITGNRTGTVTINADGWGNFSVNGGSVSIWVNK

SEQ ID NO: 21362 - protein, 483 aa, Bacillus sp. LAMA 690
HHNGTNGTMMQYFEWYLPNDGNHWNRLRDDAANLKSKGITAVWIPPAWKGTSQNDVGYGAYDLYDLGEFNQKGTVRTKYGTRNQLQAAVTSLKNNGIQVYGDVVMNHKGGADGTEIVNAVEVNRSNRNQETSGEYAIEAWTKFDFPGRGNNHSSFKWRWYHFDGTDWDQSRQLQNKIYKFRGKAWDWEVDTENGNYDYLMYADVDMDHPEVIHELRNWGVWYTNTLNLDGFRIDAVKHIKYSFTRDWLTHVRNTTGKPMFAVAEFWKNDLGAIENYLNKTSWNHSVFDVPLHYNLYNASNSGGYYDMRNILNGSVVQKHPTHAVTFVDNHDSQPGEALESFVQQWFKPLAYALVLTREQGYPSVFYGDYYGIPTHGVPAMKSKIDPLLQARQTFAYGTQHDYFDHHDIIGWTREGNSSHPNSGLATIMSDGPGGNKWMYVGKNKAGQVWRDITGNRTGTVTINADGWGNFSVNGGSVSVWVKQ

SEQ ID NO: 21363 - protein, 485 aa, Bacillus sp.
HHNGTNGTMMQYFEWYLPNDGNHWNRLRDDAANLKSKGITAVWIPPAWKGTSQNDVGYGAYDLYDLGEFNQKGTVRTKYGTRNQLQAAVTSLKNNGIQVYGDVVMNHKGGADGTEIVNAVEVNRSNRNQETSGEYAIEAWTKFDFPGRGNNHSSFKWRWYHFDGTDWDQSRQLQNKIYKFRGTGKAWDWEVDTENGNYDYLMYADVDMDHPEVIHELRNWGVWYTNTLNLDGFRIDAVKHIKYSFTRDWLTHVRNTTGKPMFAVAEFWKNDLGAIENYLNKTSWNHSVFDVPLHYNLYNASNSGGYYDMRNILNGSVVQKHPTHAVTFVDNHDSQPGEALESFVQQWFKPLAYALVLTREQGYPSVFYGDYYGIPTHGVPAMKSKIDPLLQARQTFAYGTQHDYFDHHDIIGWTREGNSSHPNSGLATIMSDGPGGNKWMYVGKNKAGQVWRDITGNRTGTVTINADGWGNFSVNGGSVSVWVKQ

SEQ ID NO: 21364 - protein, 486 aa, Bacillus sp. (in: firmicutes)
HHNGTNGTMMQYFEWHLPNDGQHWNRLRNDAANLKNLGITAVWIPPAWKGTSQNDVGYGAYDLYDLGEFNQKGTIRTKYGTRSQLQSAIASLQNNGIQVYGDVVMNHKGGADGTEWVQAVEVNPSNRNQEVTGEYTIEAWTKFDFPGRGNTHSSFKWRWYHFDGTDWDQSRQLNNRIYKFRGTGKAWDWEVDTENGNYDYLMYADVDMDHPEVINELRRWGVWYTNTLNLDGFRIDAVKHIKYSFTRDWLNHVRSTTGKNNMFAVAEFWKNDLGAIENYLHKTNWNHKVFDVPLHYNLYNASKSGGNYDMRQILNGTVVSKHPIHAVTFVDNHDSQPAEALESFVEAWFKPLAYALILTREQGYPSVFYGDYYGIPTHGVAAMKGKIDPILEARQKYAYGTQHDYLDHHNIIGWTREGNSAHPNSGLATIMSDGPGGSKWMYVGRHKAGQVWRDITGNRTGTVTINADGWGNFSVNGGSVSIWVNK

SEQ ID NO: 21365 - protein, 486 aa, Bacillus sp. (in: firmicutes)
HHNGTNGTMMQYFEWHLPNDGQHWNRLRNDAANLKNLGITAVWIPPAWKGTSQNDVGYGAYDLYDLGEFNQKGTIRTKYGTRSQLQSAIASLQNNGIQVYGDVVMNHKGGADGTEWVQAVEVNPSNRNQEVTGEYTIEAWTKFDFPGRGNTHSSFKWRWYHFDGTDWDQSRQLNNRIYKFRGTGKAWDWEVDTENGNYDYLMYADVDMDHPEVINELRRWGVWYTNTLNLDGFRIDAVKHIKYSFTRDWLNHVRSTTGKNNMFAVAEFWKNDLGAIENYLHKTNWNHSVFDVPLHYNLYNASKSGGNYDMRQILNGTVVSKHPIHAVTFVDNHDSQPAEALESFVEAWFKPLAYALILTREQGMPSVFYGDYYGIPTHGVAAMKGKIDPILEARQKYAYGTQHDYLDHHNIIGWTREGNSAHPNSGLATIMSDGPGGSKWMYVGRHKAGQVWRDITGNRTGTVTINADGWGNFSVNGGSVSIWVNK

SEQ ID NO: 21366 - protein, 486 aa, Bacillus sp.
HHNGTNGTMMQYFEWHLPNDGQHWNRLRNDAANLKNLGITAVWIPPAWKGTSQNDVGYGAYDLYDLGEFNQKGTIRTKYGTRSQLQSAIASLQNNGIQVYGDVVMNHKGGADGTEWVQAVEVNPSNRNQEVTGEYTIEAWTKFDFPGRGNTHSSFKWRWYHFDGTDWDQSRQLNNRIYKFRGTGKAWDWEVDTENGNYDYLMYADVDMDHPEVINELRRWGVWYTNTLNLDGFRIDAVKHIKYQFTRDWLNHVRSTTGKNNMFAVAEFWKNDLGAIENYLHKTNWNHSVFDVPLHYNLYNASKSGGNYDMRQILNGTVVSKHPIHAVTFVDNHDSQPAEALESFVEAWFKPLAYALILTREQGYPSVFYGDYYGIPTHGVAAMKGKIDPILEARQKYAYGTQHDYLDHHNIIGWTREGNSAHPNSGLATIMSDGPGGSKWMYVGRHKAGQVWRDITGNRTGTVTINADGWGNFSVNGGSVSIWVNK

SEQ ID NO: 21367 - protein, 486 aa, Bacillus sp.
HHNGTNGTMMQYFEWHLPNDGQHWNRLRNDAANLKNLGITAVWIPPAWKGTSQNDVGYGAYDLYDLGEFNQKGTIRTKYGTRSQLQSAIASLQNNGIQVYGDVVMNHKGGADGTEWVQAVEVNPSNRNQEVTGEYTIEAWTKFDFPGRGNTHSSFKWRWYHFDGTDWDQSRRLNNRIYKFRGTGKGWDWEVDTENGNYDYLMYADVDMDHPEVINELRRWGVWYTNTLNLDGFRIDAVKHIKYSFTRDWLNHVRSTTGKNNMFAVAEFWKNDLGAIENYLHKTNWNHSVFDVPLHYNLYNASKSGGNYDMRQILNGTVVSKHPMHAVTFVDNHDSQPAEALESFVEAWFKPLAYALILTREQGYPSVFYGDYYGIPTHGVAAMKGKIDPILEARQKYAYGTQHDYLDHHNIIGWTREGNSAHPNSGLATIMSDGPGGSKWMYVGRHKAGQVWRDITGNRTGTVTINADGWGNFSVNGGSVSIWVNK

SEQ ID NO: 21368 - protein, 486 aa, Bacillus sp.
HHNGTNGTMMQYFEWHLPNDGQHWNRLRNDAANLKNLGITAVWIPPAWKGTSQNDVGYGAYDLYDLGEFNQKGTIRTKYGTRSQLQSAIASLQNNGIQVYGDVVMNHKGGADGTEWVQAVEVNPSNRNQEVTGEYTIEAWTKFDFPGRGNTHSSFKWRWYHFDGTDWDQSRQLNNRIYKFRGDGKAWDWEVDTENGNYDYLLYADVDMDHPEVINELRRWGVWYTNTLNLDGFRIDAVKHIKYSFTRDWLNHVRSTTGKNNMFAVAEFWKNDLGAIENYLHKTNWNHSVFDVPLHYNLYNASKSGGNYDMRQILNGTVVSKHPIHAVTFVDNHDSQPAEALESFVEAWFKPLAYALILTREQGYPSVFYGDYYGIPTHGVAAMKGKIDPILEARQKYAYGTQHDYLDHHNIIGWTREGNSAHPNSGLATIMSDGPGGSKWMYVGRHKAGQVWRDITGNRTGTVTINADGWGNFSVNGGSVSIWVNK

SEQ ID NO: 21369 - protein, 486 aa, Bacillus sp. (in: firmicutes)
HHNGTNGTMMQYFEWHLPNDGQHWNRLRNDAANLKNLGITAVWIPPAWKGTSQNDVGYGAYDLYDLGEFNQKGTIRTKYGTRSQLQSAIASLQNNGIQVYGDVVMNHKGGADGTEWVQAVEVNPSNRNQEVTGEYTIEAWTKFDFPGRGNTHSSFKWRWYHFDGTDWDQSRQLNNRIYKFRGTGKAWDWEVDTENGNYDYLMYADVDMDHPEVINELRRWGVWYTNTLNLDGFRIDAVKHIKYSFTRDWLNHVRSTTGKNNMPAVAEFWKNDLGAIENYLHKTNWNHSVFDVPLHYNLYNASKSGGNYDMRQILNGTVVSKHPIHAVTFVDNHDSQPAEALESFVEAWFKPLAYALILTREQGYPSVFYGDYYGIPTHGVAAMKGKIDPILEARQKYAYGTQHDYLDHHNIIGWTREGNSAHPNSGLATIMSDGPGGSKWMYVGRHKAGQVWRDITGNRTGTVTINADGWGNFSVNGGSVSIWVNK

SEQ ID NO: 21370 - protein, 486 aa, Bacillus sp.
HHNGTNGTMMQYFEWHLPNDGQHWNRLRNDAANLKNLGITAVWIPPAWKGTSQNDVGYGAYDLYDLGEFNQKGTIRTKYGTRSQLQSAIASLQNNGIQVYGDVVMNHKGGADGTEWVQAVEVNPSNRNQEVTGEYTIEAWTKFDFPGRGNTHSSFKWRWYHFDGTDWDQSRQLNNRIYKFRGTGKAWDWEVDTENGNYDYLMYADVDMDHPEVINELRRWGVWYTNTLNLDGFRIDAVKHIKYDFTRDWLNHVRSTTGKNNMFAVAEFWKNDLGAIENYLHKTNWNHSVFDVPLHYNLYNASKSGGNYDMRQILNGTVVSKHPIHAVTFVDNHDSQPAEALESFVEAWFKPLAYALILTREQGYPSVFYGDYYGIPTHGVAAMKGKIDPILEARQKYAYGTQHDYLDHHNIIGWTREGNSAHPNSGLATIMSDGPGGSKWMYVGRHKAGQVWRDITGNRTGTVTINADGWGNFSVNGGSVSIWVNK

SEQ ID NO: 21371 - protein, 486 aa, Bacillus sp.
HHNGTNGTMMQYFEWHLPNDGQHWNRLRNDAANLKNLGITAVWIPPAWKGTSQNDVGYGAYDLYDLGEFNQKGTIRTKYGTRSQLQSAIASLQNNGIQVYGDVVMNHKGGADGTEWVQAVEVNPSNRNQEVTGEYTIEAWTKFDFPGRGNTHSSFKWRWYHFDGTDWDQSRQLNNRIYKFRGTGKAWDWEVDTENGNYDYLMYADVDMDHPEVINELRRWGVWYTNTLNLDGFRIDAVKHIKYVFTRDWLNHVRSTTGKNNMFAVAEFWKNDLGAIENYLHKTNWNHSVFDVPLHYNLYNASKSGGNYDMRQILNGTVVSKHPIHAVTFVDNHDSQPAEALESFVEAWFKPLAYALILTREQGYPSVFYGDYYGIPTHGVAAMKGKIDPILEARQKYAYGTQHDYLDHHNIIGWTREGNSAHPNSGLATIMSDGPGGSKWMYVGRHKAGQVWRDITGNRTGTVTINADGWGNFSVNGGSVSIWVNK

SEQ ID NO: 21372 - protein, 485 aa, Synthetic construct
HHNGTNGTMMQYFEWYLPNDGNHWNRLRSDASNLKDKGITAVWIPPAWKGASQNDVGYGAYDLYDLGEFNQKGTVRTKYGTRNQLQAAVTALKSNGIQVYGDVVMNHKGGADATEWVRAVEVNPSNRNQEVSGDYTIEAWTKFDFPGRGNTHSNFKWRWYHFDGVDWDQSRQLQNRIYKFRGDGKEWDWEVDTENGNYDYLMYADIDMDHPEVVNELRNWGVWYTNTLGLDGFRIDAVKHIKYSFTRDWLTHVRNTTGKNMFAVAEFWKNDIGAIENYLSKTNWNHSVFDVPLHYNLYNASRSGGNYDMRQIFNGTVVQRHPTHAVTFVDNHDSQPEEALESFVEEWFKPLAYALTLTRDQGYPSVFYGDYYGIPTHGVPAMKSKIDPILEARQKYAYGKQNDYLDHHNMIGWTREGNTKHPNSGLATIMSDGPGGNKWMYVGRNKAGQRWRDITGNRSGTVTINADGWGNFSVNGGSVSIWVNR

SEQ ID NO: 21373 - protein, 486 aa, Bacillus sp.
HHNGTNGTMMQYFEWHLPNDGQHWNRLRNDAANLKNLGITAVWIPPAWKGTSQNDVGYGAYDLYDLGEFNQKGTIRTKYGTRSQLQSAIASLQNNGIQVYGDVVMNHKGGADGTEWVQAVEVNPSNRNQEVTGEYTIEAWTKFDFPGRGNTHSSFKWRWYHFDGTDWDQSRQLNNRIYKFRGTGKAWDWPVDTENGNYDYLMYADVDMDHPEVINELRRWGVWYTNTLNLDGFRIDAVKHIKYSFTRDWLNHVRSTTGKNNMFAVAEFWKNDLGAIENYLHKTNWNHSVFDVPLHYNLYNASKSGGNYDMRQILNGTVVSKHPIHAVTFVDNHDSQPAEALESFVEAWFKPLAYALILTREQGYPSVFYGDYYGIPTHGVAAMKGKIDPILEARQKYAYGTQHDYLDHHNIIGWTREGNSAHPNSGLATIMSDGPGGSKWMYVGRHKAGQVWRDITGNRTGTVTINADGWGNFSVNGGSVSIWVNK

SEQ ID NO: 21374 - protein, 486 aa, Bacillus sp. (in: firmicutes)
HHNGTNGTMMQYFEWHLPNDGQHWNRLRNDAANLKNLGITAVWIPPAWKGTSQNDVGYGAYDLYDLGEFNQKGTIRTKYGTRSQLQSAIASLQNNGIQVYGDVVMNHKGGADGTEWVQAVEVNPSNRNQEVTGEYTIEAWTKFDFPGRGNTHSSFKWRWYHFDGTDWDQSRQLNNRIYKFRGTGKAWDWEVDTENGNYDYLMYADVDMDHPEVINELRRWGVWYTNTLNLDGFRIDAVKHIKYSFTRDWLNHVRSTTGKNNMFAVAEFWKNDLGAIENYLHKTNWNHSVFDVPLHYNLYNASKSGGNYDMRQILNGTVVSKHPIHAVTFVDNHDSQPAEALESFVEAWFKPLAYALILTREQGEPSVFYGDYYGIPTHGVAAMKGKIDPILEARQKYAYGTQHDYLDHHNIIGWTREGNSAHPNSGLATIMSDGPGGSKWMYVGRHKAGQVWRDITGNRTGTVTINADGWGNFSVNGGSVSIWVNK

SEQ ID NO: 21375 - protein, 484 aa, Bacillus sp.
HHNGTNGTMMQYFEWHLPNDGQHWNRLRNDAANLKNLGITAVWIPPAWKGTSQNDVGYGAYDLYDLGEFNQKGTIRTKYGTRSQLQSAIASLQNNGIQVYGDVVMNHKGGADGTEWVQAVEVNPSNRNQEVTGEYTIEAWTKFDFPGRGNTHSSFKWRWYHFDGTDWDQSRQLNNRIYKFTGKAWDWEVDTENGNYDYLMYADVDMDHPEVINELRRWGVWYTNTLNLDGFRIDAVKHIKYSFTRDWLNHVRSTTGKNNMFAVAEFWKNDLGAIENYLHKTNWNHSVFDVPLHYNLYNASKSGGNYDMRQILNGTVVSKHPIHAVTFVDNHDSQPAEALESFVEAWFKPLAYALILTREQGYPSVFYGDYYGIPTHGVAAMKGKIDPILEARQKYAYGTQHDYLDHHNIIGWTREGNSAHPNSGLATIMSDGPGGSKWMYVGRHKAGQVWRDITGNRTGTVTINADGWGNFSVNGGSVSIWVNK

SEQ ID NO: 21376 - protein, 486 aa, Bacillus sp.
HHNGTNGTMMQYFEWHLPNDGQHWNRLRNDAANLKNLGITAVWIPPAWKGTSQNDVGYGAYDLYDLGEFNQKGTIRTKYGTRSQLQSAIASLQNNGIQVYGDVVMNHKGGADGTEWVQAVEVNPSNRNQEVTGEYTIEAWTKFDFPGRGNTHSSFKWRWYHFDGTDWDQSRRLNNRIYKFRGTGKAWDWEVDTENGNYDYLLYADVDMDHPEVINELRRWGVWYTNTLNLDGFRIDAVKHIKYSFTRDWLNHVRSTTGKNNMFAVAEFWKNDLGAIENYLHKTNWNHSVFDVPLHYNLYNASKSGGNYDMRQILNGTVVSKHPMHAVTFVDNHDSQPAEALESFVEAWFKPLAYALILTREQGYPSVFYGDYYGIPTHGVAAMKGKIDPILEARQKYAYGTQHDYLDHHNIIGWTREGNSAHPNSGLATIMSDGPGGSKWMYVGRHKAGQVWRDITGNRTGTVTINADGWGNFSVNGGSVSIWVNK

SEQ ID NO: 21377 - protein, 486 aa, Bacillus sp.
HHNGTNGTMMQYFEWHLPNDGQHWNRLRNDAANLKNLGITAVWIPPAWKGTSQNDVGYGAYDLYDLGEFNQKGTIRTKYGTRSQLQSAIASLQNNGIQVYGDVVMNHKGGADGTEWVQAVEVNPSNRNQEVTGEYTIEAWTKFDFPGRGNTHSSFKWRWYHFDGTDWDQSRQLNNRIYKFRGTGKAWDWEVDTENGNYDYLMYADVDMDHPEVINELRRWGVWYTNTLNLDGFRIDAVKHIKYSETRDWLNHVRSTTGKNNMFAVAEFWKNDLGAIENYLHKTNWNHSVFDVPLHYNLYNASKSGGNYDMRQILNGTVVSKHPIHAVTFVDNHDSQPAEALESFVEAWFKPLAYALILTREQGYPSVFYGDYYGIPTHGVAAMKGKIDPILEARQKYAYGTQHDYLDHHNIIGWTREGNSAHPNSGLATIMSDGPGGSKWMYVGRHKAGQVWRDITGNRTGTVTINADGWGNFSVNGGSVSIWVNK

SEQ ID NO: 21378 - protein, 486 aa, Bacillus sp.
HHNGTNGTMMQYFEWHLPNDGQHWNRLRNDAANLKNLGITAVWIPPAWKGTSQNDVGYGAYDLYDLGEFNQKGTIRTKYGTRSQLQSAIASLQNNGIQVYGDVVMNHKGGADGTEWVQAVEVNPSNRNQEVTGEYTIEAWTKFDFPGRGNTHSSFKWRWYHFDGTDWDQSRQLNNRIYKFRGTGKAWDWEVDTENGNYDYLMYADVDMDHPEVINELRRWGVWYTNTLNLDGFRIDAVKHIKYCFTRDWLNHVRSTTGKNNMFAVAEFWKNDLGAIENYLHKTNWNHSVFDVPLHYNLYNASKSGGNYDMRQILNGTVVSKHPIHAVTFVDNHDSQPAEALESFVEAWFKPLAYALILTREQGYPSVFYGDYYGIPTHGVAAMKGKIDPILEARQKYAYGTQHDYLDHHNIIGWTREGNSAHPNSGLATIMSDGPGGSKWMYVGRHKAGQVWRDITGNRTGTVTINADGWGNFSVNGGSVSIWVNK

SEQ ID NO: 21379 - protein, 486 aa, Bacillus sp.
HHNGTNGTMMQYFEWHLPNDGQHWNRLRNDAANLKNLGITAVWIPPAWKGTSQNDVGYGAYDLYDLGEFNQKGTIRTKYGTRSQLQSAIASLQNNGIQVYGDVVMNHKGGADGTEWVQAVEVNPSNRNQEVTGEYTIEAWTKFDFPGRGNTHSSFKWRWYHFDGTDWDQSRQLNNRIYKFRGTGKGWDWEVDTENGNYDYLLYADVDMDHPEVINELRRWGVWYTNTLNLDGFRIDAVKHIKYSFTRDWLNHVRSTTGKNNMFAVAEFWKNDLGAIENYLHKTNWNHSVFDVPLHYNLYNASKSGGNYDMRQILNGTVVSKHPMHAVTFVDNHDSQPAEALESFVEAWFKPLAYALILTREQGYPSVFYGDYYGIPTHGVAAMKGKIDPILEARQKYAYGTQHDYLDHHNIIGWTREGNSAHPNSGLATIMSDGPGGSKWMYVGRHKAGQVWRDITGNRTGTVTINADGWGNFSVNGGSVSIWVNK

SEQ ID NO: 21380 - protein, 486 aa, Bacillus sp. (in: firmicutes)
HHNGTNGTMMQYFEWHLPNDGQHWNRLRNDAANLKNLGITAVWIPPAWKGTSQNDVGYGAYDLYDLGEFNQKGTIRTKYGTRSQLQSAIASLQNNGIQVYGDVVMNHKGGADGTEWVQAVEVNPSNRNQEVTGEYTIEAWTKFDFPGRGNTHSSFKWRWYHFDGTDWDQSRQLNNRIYKFRGTGKAWDWEVDTENGNYDYLMYADVDMDHPEVINELRRWGVWYTNTLNLDGFRIDAVKHIKYSFTRDWLNHVRSTTGKNNMYAVAEFWKNDLGAIENYLHKTNWNHSVFDVPLHYNLYNASKSGGNYDMRQILNGTVVSKHPIHAVTFVDNHDSQPAEALESFVEAWFKPLAYALILTREQGYPSVFYGDYYGIPTHGVAAMKGKIDPILEARQKYAYGTQHDYLDHHNIIGWTREGNSAHPNSGLATIMSDGPGGSKWMYVGRHKAGQVWRDITGNRTGTVTINADGWGNFSVNGGSVSIWVNK

SEQ ID NO: 21381 - protein, 485 aa, Bacillus sp.
HHNGTNGTMMQYFEWYLPNDGNHWNRLRDDAANLKSKGITAVWIPPAWKGTSQNDVGYGAYDLYDLGEFNQKGTVRTKYGTRNQLQAAVTSLKNNGIQVYGDVVMNHKGGADGTEIVNAVEVNRSNRNQETSGEYAIEAWTKFDFPGRGNNHSSFKWRWYHFDGTDWDQSRQLQNKIYKFRGTGKAWDWEVDTENGNYDYLMYADVDMDHPEVIHELRNWGVWYTNTLNLDGFRIDAVKHIKYSFTRDWLTHVRNTTGKPMFAVAEFWKNDLGAIENYLNKTSWNHSVFDVPLHYNLYNASNSGGYYDMRNILNGSVVQKHPTHAVTFVDNHDSQPGEALESFVQQWFKPLAYALALTREQGYPSVFYGDYYGIPTHGVPAMKSKIDPLLQARQTFAYGTQHDYFDHHDIIGWTREGNSSHPNSGLATIMSDGPGGNKWMYVGKNKAGQVWRDITGNRTGTVTINADGWGNFSVNGGSVSVWVKQ

SEQ ID NO: 21382 - protein, 486 aa, Bacillus sp.
HHNGTNGTMMQYFEWHLPNDGQHWNRLRNDAANLKNLGITAVWIPPAWKGTSQNDVGYGAYDLYDLGEFNQKGTIRTKYGTRSQLQSAIASLQNNGIQVYGDVVMNHKGGADGTEWVQAVEVNPSNRNQEVTGEYTIEAWTKFDFPGRGNTHSSFKWRWYHFDGTDWDQSRQLNNRIYKFRGDGKAWDWPVDTENGNYDYLMYADVDMDHPEVINELRRWGVWYTNTLNLDGFRIDAVKHIKYSFTRDWLNHVRSTTGKNNMFAVAEFWKNDLGAIENYLHKTNWNHSVFDVPLHYNLYNASKSGGNYDMRQILNGTVVSKHPIHAVTFVDNHDSQPAEALESFVEAWFKPLAYALILTREQGYPSVFYGDYYGIPTHGVAAMKGKIDPILEARQKYAYGTQHDYLDHHNIIGWTREGNSAHPNSGLATIMSDGPGGSKWMYVGRHKAGQVWRDITGNRTGTVTINADGWGNFSVNGGSVSIWVNK

SEQ ID NO: 21383 - protein, 486 aa, Bacillus sp.
HHNGTNGTMMQYFEWHLPNDGQHWNRLRNDAANLKNLGITAVWIPPAWKGTSQNDVGYGAYDLYDLGEFNQKGTIRTKYGTRSQLQSAIASLQNNGIQVYGDVVMNHKGGADGTEWVQAVEVNPSNRNQEVTGEYTIEAWTKFDFPGRGNTHSSFKWRWYHFDGTDWDQSRQLNNRIYKFRGTGKAWDWEVDTENGNYDYLMYADYDMDHPEVINELRRWGVWYTNTLNLDGFRIDAVKHIKYSFTRDWLNHVRSTTGKNNMFAVAEFWKNDLGAIENYLHKTNWNHSVFDVPLHYNLYNASKSGGNYDMRQILNGTVVSKHPIHAVTFVDNHDSQPAEALESFVEAWFKPLAYALILTREQGYPSVFYGDYYGIPTHGVAAMKGKIDPILEARQKYAYGTQHDYLDHHNIIGWTREGNSAHPNSGLATIMSDGPGGSKWMYVGRHKAGQVWRDITGNRTGTVTINADGWGNFSVNGGSVSIWVNK

SEQ ID NO: 21384 - protein, 486 aa, Bacillus sp. (in: firmicutes)
HHNGTNGTMMQYFEWHLPNDGQHWNRLRNDAANLKNLGINAVWIPPAWKGTSQNDVGYGAYDLYDLGEFNQKGTIRTKYGTRSQLQSAIASLQNNGIQVYGDVVMNHKGGADGTEWVQAVEVNPSNRNQEVTGEYTIEAWTKFDFPGRGNTHSSFKWRWYHFDGTDWDQSRQLNNRIYKFRGTGKAWDWEVDTENGNYDYLMYADVDMDHPEVINELRRWGVWYTNTLNLDGFRIDAVKHIKYSFTRDWLNHVRSTTGKNNMFAVAEFWKNDLGAIENYLHKTNWNHSVFDVPLHYNLYNASKSGGNYDMRQILNGTVVSKHPIHAVTFVDNHDSQPAEALESFVEAWFKPLAYALILTREQGYPSVFYGDYYGIPTHGVAAMKGKIDPILEARQKYAYGTQHDYLDHHNIIGWTREGNSAHPNSGLATIMSDGPGGSKWMYVGRHKAGQVWRDITGNRTGTVTINADGWGNFSVNGGSVSIWVNK

SEQ ID NO: 21385 - protein, 486 aa, Bacillus sp.
HHNGTNGTMMQYFEWHLPNDGQHWNRLRNDAANLKNLGITAVWIPPAWKGTSQNDVGYGAYDLYDLGEFNQKGTIRTKYGTRSQLQSAIASLQNNGIQVYGDVVMNHKGGADGTEWVQAVEVNPSNRNQEVTGEYTIEAWTKFDFPGRGNTHSSFKWRWYHFDGTDWDQSRQLNNRIYKFRGTGKAWDWEVDTENGNYDYLMYADVDMDHPEVINELRRWGVWYTNTLNLDGFRIDAVKHIKYFFTRDWLNHVRSTTGKNNMFAVAEFWKNDLGAIENYLHKTNWNHSVFDVPLHYNLYNASKSGGNYDMRQILNGTVVSKHPIHAVTFVDNHDSQPAEALESFVEAWFKPLAYALILTREQGYPSVFYGDYYGIPTHGVAAMKGKIDPILEARQKYAYGTQHDYLDHHNIIGWTREGNSAHPNSGLATIMSDGPGGSKWMYVGRHKAGQVWRDITGNRTGTVTINADGWGNFSVNGGSVSIWVNK

SEQ ID NO: 21386 - protein, 486 aa, Bacillus sp.
HHNGTNGTMMQYFEWHLPNDGQHWNRLRNDAANLKNLGITAVWIPPAWKGTSQNDVGYGAYDLYDLGEFNQKGTIRTKYGTRSQLQSAIASLQNNGIQVYGDVVMNHKGGADGTEWVQAVEVNPSNRNQEVTGEYTIEAWTKFDFPGRGNTHSSFKWRWYHFDGTDWDQSRQLNNRIYKFRGTGKAWDWEVDTENGNYDYLMYADVDMDHPEVINELRRWGVWYTNTLNLDGFRIDAVKHIKYSFTRDWLNHVRSTTGKNNMFAVAEFWKNDLGAIENYLHKTNWNHSVFDVPLHYNLYNASKSGGNYDMRQILNGTVVSKHPIHAVTFVDNHDSQPAEALESFVEAWFKPLAYALILTREQGLPSVFYGDYYGIPTHGVAAMKGKIDPILEARQKYAYGTQHDYLDHHNIIGWTREGNSAHPNSGLATIMSDGPGGSKWMYVGRHKAGQVWRDITGNRTGTVTINADGWGNFSVNGGSVSIWVNK

SEQ ID NO: 21387 - protein, 486 aa, Bacillus sp. (in: firmicutes)
HHNGTNGTMMQYFEWHLPNDGQHWNRLRNDAANLKNLGICAVWIPPAWKGTSQNDVGYGAYDLYDLGEFNQKGTIRTKYGTRSQLQSAIASLQNNGIQVYGDVVMNHKGGADGTEWVQAVEVNPSNRNQEVTGEYTIEAWTKFDFPGRGNTHSSFKWRWYHFDGTDWDQSRQLNNRIYKFRGTGKAWDWEVDTENGNYDYLMYADVDMDHPEVINELRRWGVWYTNTLNLDGFRIDAVKHIKYSFTRDWLNHVRSTTGKNNMFAVAEFWKNDLGAIENYLHKTNWNHSVFDVPLHYNLYNASKSGGNYDMRQILNGTVVSKHPIHAVTFVDNHDSQPAEALESFVEAWFKPLAYALILTREQGYPSVFYGDYYGIPTHGVAAMKGKIDPILEARQKYAYGTQHDYLDHHNIIGWTREGNSAHPNSGLATIMSDGPGGSKWMYVGRHKAGQVWRDITGNRTGTVTINADGWGNFSVNGGSVSIWVNK

SEQ ID NO: 21388 - protein, 486 aa, Bacillus sp. (in: firmicutes)
HHNGTNGTMMQYFEWHLPNDGQHWNRLRNDAANLKNLGITAVWIPPAWKGTSQNDVGYGAYDLYDLGEFNQKGTIRTKYGTRSQLQSAIASLQNNGIQVYGDVVMNHKGGADGTEWVQAVEVNPSNRNQEVTGEYTIEAWTKFDFPGRGNTHSSFKWRWYHFDGTDWDQSRQLNNRIYKFRGTGKAWDWEVDTENGNYDYLMYADVDMDHPEVINELRRWGVWYTNTLNLDGFRIDAVKHIKYSFTRDWLNHVRSTTGKNNMFAVAEFWKNDLGAIENYLHKTNWNHDVFDVPLHYNLYNASKSGGNYDMRQILNGTVVSKHPIHAVTFVDNHDSQPAEALESFVEAWFKPLAYALILTREQGYPSVFYGDYYGIPTHGVAAMKGKIDPILEARQKYAYGTQHDYLDHHNIIGWTREGNSAHPNSGLATIMSDGPGGSKWMYVGRHKAGQVWRDITGNRTGTVTINADGWGNFSVNGGSVSIWVNK

SEQ ID NO: 21389 - protein, 486 aa, Bacillus sp.
HHNGTNGTMMQYFEWHLPNDGQHWNRLRNDAANLKNLGITAVWIPPAWKGTSQNDVGYGAYDLYDLGEFNQKGTIRTKYGTRSQLQSAIARLQNNGIQVYGDVVMNHKGGADGTEWVQAVEVNPSNRNQEVTGEYTIEAWTKFDFPGRGNTHSSFKWRWYHFDGTDWDQSRRLNNRIYKFRGTGKAWDWPVDTENGNYDYLMYADVDMDHPEVINELRRWGVWYTNTLNLDGFRIDAVKHIKYSFTRDWLNHVRSTTGKNNMFAVAEFWKNDLGAIENYLHKTNWNHSVFDVPLHYNLYNASKSGGNYDMRQILNGTVVSKHPMHAVTFVDNHDSQPAEALESFVEAWFKPLAYALILTREQGYPSVFYGDYYGIPTHGVAAMKGKIDPILEARQKYAYGTQHDYLDHHNIIGWTREGNSAHPNSGLATIMSDGPGGSKWMYVGRHKAGQVWRDITGNRTGTVTINADGWGNFSVNGGSVSIWVNK

SEQ ID NO: 21390 - protein, 501 aa, Bacillus sp. TS-23
SVPVNGTMMQYFEWYLPDDGTLWTKVANNAQSLANLGITALWLPPAYKGTSSSDVGYGVYDLYDLGEFNQKGTVRTKYGTKTQYIQAIQAAHTAGMQVYADVVFNHKAGADGTELVDAVEVNPSDRNQEISGTYQIQAWTKFDFPGRGNTYSSFKWRWYHFDGTDWDESRKLNRIYKFRGTGKAWDWEVDTENGNYDYLMYADLDMDHPEVVSELKNWGKWYVITTNIDGFRLDAVKHIKYSFFPDWLSYLRTQTQKPLFAVGEFWSYDINKLHNYITKTNGSMSLFDAPLHNNFYIASKSGGYFDMRTLLNNTLMKEQPTLSVTLVDNHDTEPGQSLQSWVEPWFKPLAYAFILTRQEGYPCVFYGDYYGIPKYNIPALKSKLDPLLIARRDYAYGTQHDYIDNADIIGWTREGVAEKANSGLAALITDGPGGSKWMYVGKQHAGKTFYDLTGNRSDTVTINADGWGEFKVNGGSVSIWVPKTSTTSQITFTVNNATTVW

SEQ ID NO: 21391 - protein, 483 aa, Synthetic construct
HHNGTNGTMMQYFEWYLPNDGNHWNRLRSDASNLKDKGITAVWIPPAWKGASQNDVGYGAYDLYDLGEFNQKGTVRTKYGTRNQLQAAVTALKSNGIQVYGDVVMNHKGGADATEWVRAVEVNPSNRNQEVSGDYTIEAWTKFDFPGRGNTHSNFKWRWYHFDGVDWDQSRQLQNRIYKFRGDGKGWDWEVDTENGNYDYLMYADIDMDHPEVVNELRNWGVWYTNTLGLDGFRIDAVKHIKYSFTRDWLEHVRNTTGKNMFAVAEFWKNDIGAIENYLSKTNWNHSVFDVPLHYNLYNASRSGGNYDMRQIFNGTVVQRHPTHAVTFVDNHDSQPEEALESFVEEWFKPLAYALTLTRDQGYPSVFYGDYYGIPTHGVPAMKSKIDPILEARQKYAYGKQNDYLDHHNMIGWTREGNTAHPNSGLATIMSDGRGGNKWMYVGRNKAGQVWRDITGNRSGTVTINADGWGNFSVNGGSVSIWV

SEQ ID NO: 21392 - protein, 483 aa, Synthetic construct
HHNGTEGTMMQYFEWYLPNDGNHWNRLRSDASNLKDKGITAVWIPPAWKGASQNDVGYGAYDLYDLGEFNQKGTVRTKYGTRNQLQAAVTALKSNGIQVYGDVVMNHKGGADATEWVRAVEVNPSNRNQEVSGDYTIEAWTKFDFPGRGNTHSNFKWRWYHFDGVDWDQSRQLQNRIYKFRGDGKGWDWEVDTENGNYDYLMYADIDMDHPEVVNELRNWGVWYTNTLGLDGFRIDAVKHIKYSFTRDWLTHVRNTTGKNMFAVAEFWKNDIGAIENYLSKTNWNHSVFDVPLHYNLYNASRSGGNYDMRQIFNGTVVQRHPTHAVTFVDNHDSQPETALESFVEEWFKPLAYALTLTRDQGYPSVFYGDYYGIPTHGVPAMKSKIDPILEARQKYAYGKQNDYLDHHNMIGWTREGNTAHPNSGLATIMSDGPGGNKWMYVGRNKAGQVWRDITGNRSGTVTINADGWGNFSVNGGSVSIWV

SEQ ID NO: 21393 - protein, 483 aa, Synthetic construct
HHNGTNGTMMQYFEWYLPNDGNHWYRLRSDASNLKDKGITAVWIPPAWKGASQNDVGYGAYDLYDLGEFNQKGTVRTKYGTRNQLQAAVTALKSNGIQVYGDVVMNHKGGADATEWVRAVEVNPSNRNQEVSGDYTIEAWTKFDFPGRGNTHSNFKWRWYHFDGVDWDQSRQLQNKIYKFRGDGKEWDWEVDTENGNYDYLMYADYDMDHPEVVNELRNWGVWYTNTLGLDGFRIDAVKHIKYSFTRDWLTHVRNTTGKNMFAVAEFWKNDIGAIENYLSKTNWNHSVFDVPLHYNLYNASRSGGNYDMRQIFNGTVVQRHPTHAVTFVDNHDSQPEEALESFVEEWFKPLAYALTLTRDQGYPSVFYGDYYGIPTHGVPAMKSKIDPILEARQKYAYGKQNDYLDHHNMIGWTREGNTAHPNSGLATIMSDGPGGNKWMYVGRNKAGQVWRDITGNRSGTVTINADGWGNFSVNGGSVSIWV

SEQ ID NO: 21394 - protein, 483 aa, Bacillus sp. 7-7
HHEGTNGTMMQYFEWYLPNDGNHWNRLRSDASNLKDKGITAVWIPPAWKGASQNDVGYGAYDLYDLGEFNQKGTVRTKYGTRNQLQAAVTALKSNGIQVYGDVVMNHKGGADATEWVRAVEVNPSNRNQEVSGDYTIEAWTKFDFPGRGNTHSNFKWRWYHFDGVDWDQSRQLQNRIYKFRGDGKGWDWEVDTENGNYDYLMYADIDMDHPEVVNELRNWGVWYTNTLGLDGFRIDAVKHIKYSFTRDWLTHVRNTTGKNMFAVAEFWKNDIGAIENYLSKTNWNHSVFDVPLHYNLYNASRSGGNYDMRQIFNGTVVQRHPTHAVTFVDNHDSQPEEALESFVEEWFKPLAYALTLTRDQGYPSVFYGDYYGIPTHGVPAMKSKIDPILEARQKYAYGKQNDYLDHHNMIGWTREGNTAHPNSGLATIMSDGPGGNKWMYVGRNKAGQVWRDITGNRSGTVTINADGWGNFSVXGGSVSIWV

SEQ ID NO: 21395 - protein, 483 aa, Synthetic construct
HHNGTNGTMMQYFEWYLPNDGNHWNRLRSDASNLKDKGITAVWIPPAWKGASQNDVGYGAYDLYDLGEFNQKGTVRTKYGTRNQLQAAVTALKSNGIQVYGDVVMNHKGGADATEWVRAVEVNPSNRNQEVSGDYTIEAWTKFDFPGRGNTHSNFKWRWYHFDGVDWDQSRQLQNKIYKFRGDGKGWDWEVDTENGNYDYLMYADYDMDHPEVVNELRNWGVWYTNTLGLDGFRIDAVKHIKYSFTRDWLEHVRNTTGKNMFAVAEFWKNDIGAIENYLSKTNWNHSVFDVPLHYNLYNASRSGGNYDMRQIFNGTVVQRHPTHAVTFVDNHDSQPEEALESFVEEWFKPLAYALTLTRDQGYPSVFYGDYYGIPTHGVPAMKSKIDPILEARQKYAYGKQNDYMDHHNMIGWTREGNTAHPNSGLATIMSDGPGGNKWMYVGRNKAGQVWRDITGNRSGTVTINADGWGNFSVNGGSVSIWV

SEQ ID NO: 21396 - protein, 483 aa, Synthetic construct
HHNGTNGTMMQYFEWYLPNDGNHWHRLRSDASNLKDKGITAVWIPPAWKGASQNDVGYGAYDLYDLGEFNQKGTVRTKYGTRNQLQAAVTALKSNGIQVYGDVVMNHKGGADATEWVRAVEVNPSNRNQEVSGDYTIEAWTKFDFPGRGNTHSNFKWRWYHFDGVDWDQSRQLQNRIYKFRGDGKEWDWEVDTENGNYDYLMYADIDMDHPEVVNELRNWGVWYTNTLGLDGFRIDAVKHIKYSFTRDWLEHVRNTTGKNMFAVAEFWKNDIGAIENYLSKTNWNHSVFDVPLHYNLYNASRSGGNYDMRQIFNGTVVQRHPTHAVTFVDNHDSQPEEALESFVEEWFKPLAYALTLTRDQGYPSVFYGDYYGIPTHGVPAMKSKIDPILEARQKYAYGKQNDYLDHHNMIGWTREGNTAHPNSGLATIMSDGPGGNKWMYVGRNKAGQVWRDITGNRSGTVTINADGWGNFSVNGGSVSIWV

SEQ ID NO: 21397 - protein, 483 aa, Synthetic construct
HHNQTNGTMMQYFEWYLPNDGNHWNRLRSDASNLKDKGITAVWIPPAWKGASQNDVGYGAYDLYDLGEFNQKGTVRTKYGTRNQLQAAVTALKSNGIQVYGDVVMNHKGGADATEWVRAVEVNPSNRNQEVSGDYTIEAWTKFDFPGRGNTHSNFKWRWWHFDGVDWDQSRQLQNRIYKFRGDGKEWDWEVDTENGNYDYLMYADIDMDHPEVVNELRNWGVWYTNTLGLDGFRIDAVKHIKYSFTRDWLTHVRNTTGKNMFAVAEFWKNDIGAIENYLSKTNWNHSVFDVPLHYNLYNASRSGGNYDMRQIFNGTVVQRHPTHAVTFVDNHDSQPEEALESFVEEWFKPLAYALTLTRDQGYPSVFYGDYYGIPTHGVPAMKSKIDPILEARQKYAYGKQNDYMDHHNMIGWTREGNTAHPNSGLATIMSDGPGGNKWMYVGRNKAGQVWRDITGNRSGTVTINADGWGNFSVNGGSVSIWV

SEQ ID NO: 21398 - protein, 483 aa, Synthetic construct
HHNGTNGTMMQYFEWYLPNDGNHWNRLRSDASNLKDKGITAVWIPPAWKGASQNDVGYGAYDLYDLGEFNQKGTVRTKYGTRNQLQAAVTALKSNGIQVYGDVVMNHKGGADATEWVRAVEVNPSNRNQEVSGDYTIEAWTKFDFPGRGNTHSNFKWRWYHFDGVDWDQSRQLQNRIYKFRGDGKGWDWEVDTENGNYDYLMYADIDMDHPEVVNELRNWGVWYTNTLGLDGFRIDAVKHIKYSFTRDWLTHVRNTTGKNMFAVAEFWKNDIGAIENYLSKTNWNHSVFDVCLHYNLYNASRSGGNYDMRQIFNGTVVQRHPTHAVTFVDNHDSQPEEALESFVEEWFKPLAYALTLTRDQGYPSVFFGDYYGIPTHGVPAMKSKIDPILEARQKYAYGKQNDYLDHHNMIGWTREGNTAHPNSGLATIMSDGPGGNKWMYVGRNKAGQVWRDITGNRSGTVTINADGWGNFSVNGGSVSIWV

SEQ ID NO: 21399 - protein, 483 aa, Synthetic construct
HHNGTNGTMMQYFEWYLPNDGNHWNRLVSDASNLKDKGITAVWIPPAWKGASQNDVGYGAYDLYDLGEFNQKGTVRTKYGTRNQLQAAVTALKSNGIQVYGDVVMNHKGGADATEWVRAVEVNPSNRNQEVSGDYTIEAWTKFDFPGRGNTHSNFKWRWYHFDGVDWDQSRQLQNRIYKFRGDGKGWDWEVDTENGNYDYLMYADIDMDHPEVVNELRNWGVWYTNTLGLDGFRIDAVKHIKYSFTRDWLTHVRNTTGKNMFAVAEFWKNDIGAIENYLSKTNWNHSVFDVPLHYNLYNASRSGGNYDMRQIFNGTVLQRHPTHAVTFVDNHDSQPEEALESFVEEWFKPLAYALTLTRDQGYPSVFYGDYYGIPTHGVPAMKSKIDPILEARQKYAYGKQNDYLDHHNMIGWTREGNTAHPNSGLATIMSDGPGGNKWMYVGRNKAGQVWRDITGNRSGTVTINADGWGNFSVNGGSVSIWV

SEQ ID NO: 21400 - protein, 483 aa, Synthetic construct
HHNQTNGTMMQYFEWYLPNDGNHWNRLRSDASNLKDKGITAVWIPPAWKGASQNDVGYGAYDLYDLGEFNQKGTVRTKYGTRNQLQAAVTALKSNGIQVYGDVVMNHKGGADATEWVRAVEVNPSNRNQEVSGDYTIEAWTKFDFPGRGNTHSNFKWRWYHFDGVDWDQSRQLQNRIYKFRGDGKEWDWEVDEENGNYDYLMYADYDMDHPEVVNELRNWGVWYTNTLGLDGFRIDAVKHIKYSFTRDWLEHVRNTTGKNMFAVAEFWKNDIGAIENYLSKTNWNHSVFDVPLHYNLYNASRSGGNYDMRQIFNGTVVQRHPTHAVTFVDNHDSQPEEALESFVEEWFKPLAYALTLTRDQGYPSVFYGDYYGIPTHGVPAMKSKIDPILEARQKYAYGKQNDYMDHHNMIGWTREGNTAHPNSGLATIMSDGPGGNKWMYVGRNKAGQVWRDITGNRSGTVTINADGWGNFSVNGGSVSIWV

SEQ ID NO: 21401 - protein, 483 aa, Synthetic construct
HHNQTNGTMMQYFEWYLPNDGNHWNRLRSDASNLKDKGITAVWIPPAWKGASQNDVGYGAYDLYDLGEFNQKGTVRTKYGTRNQLQAAVTALKSNGIQVYGDVVMNHKGGADATEWVRAVEVNPSNRNQEVSGDYTIEAWTKFDFPGRGNTHSNFKWRWWHFDGVDWDQSRQLQNRIYKFRGDGKEWDWEVDTENGNYDYLMYADYDMDHPEVVNELRNWGVWYTNTLGLDGFRIDAVKHIKYSFTRDWLTHVRNTTGKNMFAVAEFWKNDIGAIENYLSKTNWNHSVFDVPLHYNLYNASRSGGNYDMRQIFNGTVVQRHPTHAVTFVDNHDSQPEEALESFVEEWFKPLAYALTLTRDQGYPSVFYGDYYGIPTHGVPAMKSKIDPILEARQKYAYGKQNDYMDHHNMIGWTREGNTAHPNSGLATIMSDGPGGNKWMYVGRNKAGQVWRDITGNRSGTVTINADGWGNFSVNGGSVSIWV

SEQ ID NO: 21402 - protein, 483 aa, Synthetic construct
HHNGTNGTMMQYFEWYLPNDGNHWNRLRSDASNLKDKGITAVWIPPAWKGASQNDVGYGAYDLYDLGEFNQKGTVRTKYGTRNQLQAAVTALKSNGIQVYGDVVMNHKGGADATEWVRAVEVNPSNRNQEVSGDYTIEAWTKFDFPGRGNTHSNFKWRWYHFDGVDWDQSRQLQNRIYKFRGDGKEWDWEVDTENGNYDYLMYADYDMDHPEVVNELRNWGVWYTNTLGLDGFRIDAVKHIKYSFTRDWLEHVRNTTGKNMFAVAEFWKNDIGAIRNYLSKTNWNHSVFDVPLHYNLYNASRSGGNYDMRQIFNGTVVQRHPTHAVTFVDNHDSQPEEALESFVEEWFKPLAYALTLTRDQGYPSVFYGDYYGIPTHGVPAMKSKIDPILEARQKYAYGKQNDYMDHHNMIGWTREGNTAHPNSGLATIMSDGPGGNKWMYVGRNKAGQVWRDITGNRSGTVTINADGWGNFSVNGGSVSIWV

SEQ ID NO: 21403 - protein, 483 aa, Synthetic construct
HHNGTNGTMMQYFEWYLPNDGNHWHRLRSDASNLKDKGITAVWIPPAWKGASQNDVGYGAYDLYDLGEFNQKGTVRTKYGTRNQLQAAVTALKSNGIQVYGDVVMNHKGGADATEWVRAVEVNPSNRNQEVSGDYTIEAWTKFDFPGRGNTHSNFKWRWYHFDGVDWDQSRQLQNKIYKFRGDGKEWDWEVDTENGNYDYLMYADIDMDHPEVVNELRNWGVWYTNTLGLDGFRIDAVKHIKYSFTRDWLTHVRNTTGKNMFAVAEFWKNDIGAIENYLSKTNWNHSVFDVPLHYNLYNASRSGGNYDMRQIFNGTVVQRHPTHAVTFVDNHDSQPEEALESFVEEWFKPLAYALTLTRDQGYPSVFYGDYYGIPTHGVPAMKSKIDPILEARQKYAYGKQNDYLDHHNMIGWTREGNTAHPNSGLATIMSDGPGGNKWMYVGRNKAGQVWRDITGNRSGTVTINADGWGNFSVNGGSVSIWV

SEQ ID NO: 21404 - protein, 483 aa, Synthetic construct
HHNGTNGTMMQYFEWYLPNDGNHWYRLRSDASNLKDKGITAVWIPPAWKGASQNDVGYGAYDLYDLGEFNQKGTVRTKYGTRNQLQAAVTALKSNGIQVYGDVVMNHKGGADATEWVRAVEVNPSNRNQEVSGDYTIEAWTKFDFPGRGNTHSNFKWRWYHFDGVDWDQSRQLQNRIYKFRGDGKGWDWEVDTENGNYDYLMYADIDMDHPECVNELRNWGVWYTNTLGLDGFRIDAVKHIKYSFTRDWLTHVRNTTGKNMFAVAEFWKNDIGAIENYLSKTNWNHSVFDVPLHYNLYNASRSGGNYDMRQIFNGTVVQRHPTHAVTFVDNHDSQPEEALESFVEEWFKPLAYALTLTRDQGYPSVFYGDYYGIPTHGVPAMKSKIDPILEARQKYAYGKQNDYLDHHNMIGWTREGNTAHPNSGLATIMSDGPGGNKWMYVGRNKAGQVWRDITGNRSGTVTINADGWGNFSVNGGSVSIWV

SEQ ID NO: 21405 - protein, 483 aa, Synthetic construct
HHNGTNGTMMQYFEWYLPNDGNHWDRLRSDASNLKDKGITAVWIPPAWKGASQNDVGYGAYDLYDLGEFNQKGTVRTKYGTRNQLQAAVTALKSNGIQVYGDVVMNHKGGADATEWVRAVEVNPSNRNQEVSGDYTIEAWTKFDFPGRGNTHSNFKWRWYHFDGVDWDQSRQLQNKIYKFRGDGKEWDWEVDTENGNYDYLMYADYDMDHPEVVNELRNWGVWYTNTLGLDGFRIDAVKHIKYSFTRDWLTHVRNTTGKNMFAVAEFWKNDIGAIENYLSKTNWNHSVFDVPLHYNLYNASRSGGNYDMRQIFNGTVVQRHPTHAVTFVDNHDSQPEEALESFVEEWFKPLAYALTLTRDQGYPSVFYGDYYGIPTHGVPAMKSKIDPILEARQKYAYGKQNDYLDHHNMIGWTREGNTAHPNSGLATIMSDGPGGNKWMYVGRNKAGQVWRDITGNRSGTVTINADGWGNFSVNGGSVSIWV

SEQ ID NO: 21406 - protein, 483 aa, Bacillus sp. 7-7
HHYGTNGTMMQYFEWYLPNDGNHWNRLRSDASNLKDKGITAVWIPPAWKGASQNDVGYGAYDLYDLGEFNQKGTVRTKYGTRNQLQAAVTALKSNGIQVYGDVVMNHKGGADATEWVRAVEVNPSNRNQEVSGDYTIEAWTKFDFPGRGNTHSNFKWRWYHFDGVDWDQSRQLQNRIYKFRGDGKGWDWEVDTENGNYDYLMYADIDMDHPEVVNELRNWGVWYTNTLGLDGFRIDAVKHIKYSFTRDWLTHVRNTTGKNMFAVAEFWKNDIGAIENYLSKTNWNHSVFDVPLHYNLYNASRSGGNYDMRQIFNGTVVQRHPTHAVTFVDNHDSQPEEALESFVEEWFKPLAYALTLTRDQGYPSVFYGDYYGIPTHGVPAMKSKIDPILEARQKYAYGKQNDYLDHHNMIGWTREGNTAHPNSGLATIMSDGPGGNKWMYVGRNKAGQVWRDITGNRSGTVTINADGWGNFSVXGGSVSIWV

SEQ ID NO: 21407 - protein, 483 aa, Synthetic construct
HHNGTNGTMMQYFEWYLPNDGNHWHRLRSDASNLKDKGITAVWIPPAWKGASQNDVGYGAYDLYDLGEFNQKGTVRTKYGTRNQLQAAVTALKSNGIQVYGDVVMNHKGGADATEWVRAVEVNPSNRNQEVSGDYTIEAWTKFDFPGRGNTHSNFKWRWWHFDGVDWDQSRQLQNRIYKFRGDGKEWDWEVDTENGNYDYLMYADYDMDHPEVVNELRNWGVWYTNTLGLDGFRIDAVKHIKYSFTRDWLTHVRNTTGKNMFAVAEFWKNDIGAIENYLSKTNWNHSVFDVPLHYNLYNASRSGGNYDMRQIFNGTVVQRHPGHAVTFVDNHDSQPEEALESFVEEWFKPLAYALTLTRDQGYPSVFYGDYYGIPTHGVPAMKSKIDPILEARQKYAYGKQNDYMDHHNMIGWTREGNTAHPNSGLATIMSDGPGGNKWMYVGRNKAGQVWRDITGNRSGTVTINADGWGNFSVNGGSVSIWV

SEQ ID NO: 21408 - protein, 483 aa, Synthetic construct
HHNGTNGTMMQYFEWYLPNDGNHWHRLRSDASNLKDKGITAVWIPPAWKGASQNDVGYGAYDLYDLGEFNQKGTVRTKYGTRNQLQAAVTALKSNGIQVYGDVVMNHKGGADATEWVRAVEVNPSNRNQEVSGDYTIEAWTKFDFPGRGNTHSNFKWRWYHFDGVDWDQSRQLQNKIYKFRGDGKGWDWEVDTENGNYDYLMYADYDMDHPEVVNELRNWGVWYTNTLGLDGFRIDAVKHIKYSFTRDWLTHVRNTTGKNMFAVAEFWKNDIGAIENYLSKTNWNHSVFDVPLHYNLYNASRSGGNYDMRQIFNGTVVQRHPTHAVTFVDNHDSQPEEALESFVEEWFKPLAYALTLTRDQGYPSVFYGDYYGIPTHGVPAMKSKIDPILEARQKYAYGKQNDYMDHHNMIGWTREGNTAHPNSGLATIMSDGPGGNKWMYVGRNKAGQVWRDITGNRSGTVTINADGWGNFSVNGGSVSIWV

SEQ ID NO: 21409 - protein, 483 aa, Synthetic construct
HHNGTNGTMMQYFEWYLPNDGNHWHRLRSDASNLKDKGITAVWIPPAWKGASQNDVGYGAYDLYDLGEFNQKGTVRTKYGTRNQLQAAVTALKSNGIQVYGDVVMNHKGGADATEWVRAVEVNPSNRNQEVSGDYTIEAWTKFDFPGRGNTHSNFKWRWYHFDGVDWDQSRQLQNKIYKFRGDGKEWDWEVDTENGNYDYLMYADYDMDHPEVVNELRNWGVWYTNTLGLDGFRIDAVKHIKYSFTRDWLTHVRNTTGKNMFAVAEFWKNDIGAIENYLSKTNWNHSVFDVPLHYNLYNASRSGGNYDMRQIFNGTVVQRHPTHAVTFVDNHDSQPEEALESFVEEWFKPLAYALTLTRDQGYPSVFYGDYYGIPTHGVPAMKSKIDPILEARQKYAYGKQNDYLDHHNMIGWTREGNTAHPNSGLATIMSDGPGGNKWMYVGRNKAGQVWRDITGNRSGTVTINADGWGNFSVNGGSVSIWV

SEQ ID NO: 21410 - protein, 483 aa, Synthetic construct
HHNQTNGTMMQYFEWYLPNDGNHWHRLRSDASNLKDKGITAVWIPPAWKGASQNDVGYGAYDLYDLGEFNQKGTVRTKYGTRNQLQAAVTALKSNGIQVYGDVVMNHKGGADATEWVRAVEVNPSNRNQEVSGDYTIEAWTKFDFPGRGNTHSNFKWRWYHFDGVDWDQSRQLQNRIYKFRGDGKEWDWEVDTENGNYDYLMYADYDMDHPEVVNELRNWGVWYTNTLGLDGFRIDAVKHIKYSFTRDWLTHVRNTTGKNMFAVAEFWKNDIGAIENYLSKTNWNHSVFDVPLHYNLYNASRSGGNYDMRQIFNGTVVQRHPTHAVTFVDNHDSQPEEALESFVEEWFKPLAYALTLTRDQGYPSVFYGDYYGIPTHGVPAMKSKIDPILEARQKYAYGKQNDYMDHHNMIGWTREGNTAHPNSGLATIMSDGPGGNKWMYVGRNKAGQVWRDITGNRSGTVTINADGWGNFSVNGGSVSIWV

SEQ ID NO: 21411 - protein, 483 aa, Bacillus sp.
HHNGTNGTMMQYFEWYLPNDGNHWNRLRSDASNLKDKGITAVWIPPAWKGASQNDVGYGAYDLYDLGEFNQKGTVRTKYGTRNQLQAAVTALKSNGIQVYGDVVMNHKGGADATEWVRAVEVNPSNRNQEVSGDYTIEAWTKFDFPGRGNTHSNFKWRWYHFDGVDWDQSRQLQNRIYKFRGDGKGWDWEVDTENGNYDYLMYADIDMDHPEVVNELRNWGVWYTNTLGLDGFRIGAVKHIKYSFTRDWLTHVRNTTGKNMFAVAEFWKNDIGAIENYLSKTNWNHSVFDVPLHYNLYNASRSGGNYDMRQIFNGTVVQRHPTHAVTFVDNHDSQPEEALESFVEEWFKPLACALTLTRDQGYPSVFYGDYYGIPTHGVPAMKSKIDPILEARQKYAYGKQNDYLDHHNMIGWTREGNTAHPNSGLATIMSDGPGGNKWMYVGRNKAGQVWRDITGNRSGTVTINADGWGNFSVNGGSVSIWV

SEQ ID NO: 21412 - protein, 483 aa, Synthetic construct
HHNQTNGTMMQYFEWYLPNDGNHWNRLRSDASNLKDKGITAVWIPPAWKGASQNDVGYGAYDLYDLGEFNQKGTVRTKYGTRNQLQAAVTALKSNGIQVYGDVVMNHKGGADATEWVRAVEVNPSNRNQEVSGDYTIEAWTKFDFPGRGNTHSNFKWRWYHFDGVDWDQSRQLQNRIYKFRGDGKEWDWEVDTENGNYDYLMYADYDMDHPEVVNELRNWGVWYTNTLGLDGFRIDAVKHIKYSFTRDWLEHVRNTTGKNMFAVAEFWKNDIGAIENYLSKTNWNHSVFDVPLHYNLYNASRSGGNYDMRQIFNGTVVQRHPGHAVTFVDNHDSQPEEALESFVEEWFKPLAYALTLTRDQGYPSVFYGDYYGIPTHGVPAMKSKIDPILEARQKYAYGKQNDYMDHHNMIGWTREGNTAHPNSGLATIMSDGPGGNKWMYVGRNKAGQVWRDITGNRSGTVTINADGWGNFSVNGGSVSIWV

SEQ ID NO: 21413 - protein, 483 aa, Synthetic construct
HHNQTNGTMMQYFEWYLPNDGNHWNRLRSDASNLKDKGITAVWIPPAWKGASQNDVGYGAYDLYDLGEFNQKGTVRTKYGTRNQLQAAVTALKSNGIQVYGDVVMNHKGGADATEWVRAVEVNPSNRNQEVSGDYTIEAWTKFDFPGRGNTHSNFKWRWWHFDGVDWDQSRQLQNRIYKFRGDGKEWDWEVDTENGNYDYLMYADYDMDHPEVVNELRNWGVWYTNTLGLDGFRIDAVKHIKYSFTRDWLTHVRNTTGKNMFAVAEFWKNDIGAIENYLSKTNWNHSVFDVPLHYNLYNASRSGGNYDMRQIFNGTVVQRHPTHAVTFVDNHDSQPEEALESFVEEWFKPLAYALTLTRDQGYPSVFYGDYYGIPTHGVPAMKSKIDPILEARQKYAYGKQNDYLDHHNMIGWTREGNTAHPNSGLATIMSDGPGGNKWMYVGRNKAGQVWRDITGNRSGTVTINADGWGNFSVNGGSVSIWV

SEQ ID NO: 21414 - protein, 483 aa, Synthetic construct
HHNGTNGTMMQYFEWYLPNDGNHWNRLRSDASNLKDKGITAVWIPPAWKGASQNDVGYGAYDLYDLGEFNQKGTVRTKYGTRNQLQAAVTALKSNGIQVYGDVVMNHKGGADATEWVRAVEVNPSNRNQEVSGYYTIEAWTKFDFPGRGNTHSNFKWRWYHFDGVDWDQSRQLQNRIYKFRGDGKGWDWEVDTENGNYDYLMYADIDMDHPEVVNELRNWGVWYTNTLGLDGFRIDAVKHIKYSFTRDWLTHVRNTTGKNMFAVAEFWKNDIGAIENYLSKTNWNHSVFDVPLHYNLYNASRSGGNYDMRQIFNGTVVQRHPTHAVTFVDNHDSQPEEALESFVEEWFKPLAYALTLTRDQGYPSVFYGDYYGIPTHGVPAMKSKIEPILEARQKYAYGKQNDYLDHHNMIGWTREGNTAHPNSGLATIMSDGPGGNKWMYVGRNKAGQVWRDITGNRSGTVTINADGWGNFSVNGGSVSIWV

SEQ ID NO: 21415 - protein, 483 aa, Synthetic construct
HHNGTNGTMMQYFEWYLPNDGNHWNRLRSDASNLKDKGITAVWIPPAWKGASQNDVGYGAYDLYDLGEFNQKGTVRTKYGTRNQLQAAVTALKSNGIQVYGDVVMNHKGGADATEWVRAVEVNPSNRNQEVSGDYTIEAWTKFDFPGRGNTHSNFKWRWWHFDGVDWDQSRQLQNKIYKFRGDGKEWDWEVDTENGNYDYLMYADYDMDHPEVVNELRNWGVWYTNTLGLDGFRIDAVKHIKYSFTRDWLTHVRNTTGKNMFAVAEFWKNDIGAIENYLSKTNWNHSVFDVPLHYNLYNASRSGGNYDMRQIFNGTVVQRHPTHAVTFVDNHDSQPEEALESFVEEWFKPLAYALTLTRDQGYPSVFYGDYYGIPTHGVPAMKSKIDPILEARQKYAYGKQNDYLDHHNMIGWTREGNTAHPNSGLATIMSDGPGGNKWMYVGRNKAGQVWRDITGNRSGTVTINADGWGNFSVNGGSVSIWV

SEQ ID NO: 21416 - protein, 483 aa, Synthetic construct
HHNGTNGTMMQYFEWYLPNDGNHWNRLRSDASNLKDKGITAVWIPPAWKGASQNDVGYGAYDLYDLGEFNQKGTVRTKYGTRNQLQAAVTALKSNGIQVYGDVVMNHKGGADATEWVRAVEVNPSNRNQEVSGDYTIEAWTKFDFPGRGNTHSNFKWRWYHFDGVDWDQSRQLQNRIYKFRGDGKEWDWEVDTENGNYDYLMYADYDMDHPEVVNELRNWGVWYTNTLGLDGFRIDAVKHIKYSFTRDWLEHVRNTTGKNMFAVAEFWKNDIGAIRNYLSKTNWNHSVFDVPLHYNLYNASRSGGNYDMRQIFNGTVVQRHPTHAVTFVDNHDSQPEEALESFVEEWFKPLAYALTLTRDQGYPSVFYGDYYGIPTHGVPAMKSKIDPILEARQKYAYGKQNDYLDHHNMIGWTREGNTAHPNSGLATIMSDGPGGNKWMYVGRNKAGQVWRDITGNRSGTVTINADGWGNFSVNGGSVSIWV

SEQ ID NO: 21417 - protein, 483 aa, Synthetic construct
HHNGTNGTMMQYFEWYLPNDGNHWHRLRSDASNLKDKGITAVWIPPAWKGASQNDVGYGAYDLYDLGEFNQKGTVRTKYGTRNQLQAAVTALKSNGIQVYGDVVMNHKGGADATEWVRAVEVNPSNRNQEVSGDYTIEAWTKFDFPGRGNTHSNFKWRWYHFDGVDWDQSRQLQNKIYKFRGDGKGWDWEVDTENGNYDYLMYADIDMDHPEVVNELRNWGVWYTNTLGLDGFRIDAVKHIKYSFTRDWLTHVRNTTGKNMFAVAEFWKNDIGAIENYLSKTNWNHSVFDVPLHYNLYNASRSGGNYDMRQIFNGTVVQRHPTHAVTFVDNHDSQPEEALESFVEEWFKPLAYALTLTRDQGYPSVFYGDYYGIPTHGVPAMKSKIDPILEARQKYAYGKQNDYLDHHNMIGWTREGNTAHPNSGLATIMSDGPGGNKWMYVGRNKAGQVWRDITGNRSGTVTINADGWGNFSVNGGSVSIWV

SEQ ID NO: 21418 - protein, 483 aa, Synthetic construct
HHNQTNGTMMQYFEWYLPNDGNHWHRLRSDASNLKDKGITAVWIPPAWKGASQNDVGYGAYDLYDLGEFNQKGTVRTKYGTRNQLQAAVTALKSNGIQVYGDVVMNHKGGADATEWVRAVEVNPSNRNQEVSGDYTIEAWTKFDFPGRGNTHSNFKWRWYHFDGVDWDQSRQLQNRIYKFRGDGKEWDWEVDTENGNYDYLMYADYDMDHPEVVNELRNWGVWYTNTLGLDGFRIDAVKHIKYSFTRDWLTHVRNTTGKNMFAVAEFWKNDIGAIENYLSKTNWNHSVFDVPLHYNLYNASRSGGNYDMRQIFNGTVVQRHPTHAVTFVDNHDSQPEEALESFVEEWFKPLAYALTLTRDQGYPSVFYGDYYGIPTHGVPAMKSKIDPILEARQKYAYGKQNDYLDHHNMIGWTREGNTAHPNSGLATIMSDGPGGNKWMYVGRNKAGQVWRDITGNRSGTVTINADGWGNFSVNGGSVSIWV

SEQ ID NO: 21419 - protein, 483 aa, Synthetic construct
HHNGTNGTMMQYFEWYLPNDGNHWNRLRSDASNLKDKGITAVWIPPAWKGASQNDVGYGAYDLYDLGEFNQKGTVRTKYGTRNQLQAAVTALKSNGIQVYGDVVMNHKGGADATEWVRAVEVNPSNRNQEVSGDYTIEAWTKFDFPGRGNTHSNFKWRWYHFDGVDWDQSRQLQNRIYKFRGDGKEWDWEVDTENGNYDYLMYADIDMDHPEVVNELRNWGVWYTDTLGLDGFRIDAVKHIKYSFTRDWLTHVRNTTGKNMFAVAEFWKNDIGAIENYLSKTNWNHSVFDVPLHYNLYNASRSGGNYDMRQIFEGTVVQRHPTHAVTFVDNHDSQPEEALESFVEEWFKPLAYALTLTRDQGYPSVFYGDYYGIPTHGVPAMKSKIDPILEARQKYAYGKQNDYLDHHNMIGWTREGNTAHPNSGLATIMSDGPGGNKWMYVGRNKAGQVWRDITGNRSGTVTINADGWGNFSVNGGSVSIWV

SEQ ID NO: 21420 - protein, 483 aa, Synthetic construct
HHNGTNGTMMQYFEWYLPNDGNHWNRLRSDASNLKDKGITAVWIPPAWKGASQNDVGYGAYDLYDLGEFNQKGTVRTKYGTRNQLQAAVTALKSNGIQVYGDVVMNHKGGADATEWVRAVEVNPSNRNQEVSGDYTIEAWTKFDFPGRGNTHSNFKWRWYHFDGVDWDQSRQLQNKIYKFRGDGKEWDWEVDEENGNYDYLMYADYDMDHPEVVNELRNWGVWYTNTLGLDGFRIDAVKHIKYSFTRDWLEHVRNTTGKNMFAVAEFWKNDIGAIENYLSKTNWNHSVFDVPLHYNLYNASRSGGNYDMRQIFNGTVVQRHPTHAVTFVDNHDSQPEEALESFVEEWFKPLAYALTLTRDQGYPSVFYGDYYGIPTHGVPAMKSKIDPILEARQKYAYGKQNDYMDHHNMIGWTREGNTAHPNSGLATIMSDGPGGNKWMYVGRNKAGQVWRDITGNRSGTVTINADGWGNFSVNGGSVSIWV

SEQ ID NO: 21421 - protein, 483 aa, Synthetic construct
HHNGTNGTMMQYFEWYLPNDGNHWNRLRSDASNLKDKGITAVWIPPAWKGASQNDVGYGAYDLYDLGEFNQKGTVRTKYGTRNQLQAAVTALKSNGIQVYGDVVMNHKGGADATEWVRAVEVNPSNRNQEVSGDYTIECWTKFDFPGRGNTHSNFKWRWYHFDGVDWDQSRQLQNRIYKFRGDGKGWDWEVDTENGNYDYLMYADIDMDHPEVVNELRNWGVWYTNTLGLDGFRIDAVKHIKYSFTRDWLTHVRNTTGKNMFAVAEFWKNDIGAIENYLSKTNWNHSVFDVPLHYNLYNASRSGGNYDMRQIFNGTVVQRHPTHAVTFVDNHDSQPEEALESFVEEWFKPLAYALTLTRDQGYPSVFYGDYCGIPTHGVPAMKSKIDPILEARQKYAYGKQNDYLDHHNMIGWTREGNTAHPNSGLATIMSDGPGGNKWMYVGRNKAGQVWRDITGNRSGTVTINADGWGNFSVNGGSVSIWV

SEQ ID NO: 21422 - protein, 483 aa, Bacillus sp. 7-7
HHTGTNGTMMQYFEWYLPNDGNHWNRLRSDASNLKDKGITAVWIPPAWKGASQNDVGYGAYDLYDLGEFNQKGTVRTKYGTRNQLQAAVTALKSNGIQVYGDVVMNHKGGADATEWVRAVEVNPSNRNQEVSGDYTIEAWTKFDFPGRGNTHSNFKWRWYHFDGVDWDQSRQLQNRIYKFRGDGKGWDWEVDTENGNYDYLMYADIDMDHPEVVNELRNWGVWYTNTLGLDGFRIDAVKHIKYSFTRDWLTHVRNTTGKNMFAVAEFWKNDIGAIENYLSKTNWNHSVFDVPLHYNLYNASRSGGNYDMRQIFNGTVVQRHPTHAVTFVDNHDSQPEEALESFVEEWFKPLAYALTLTRDQGYPSVFYGDYYGIPTHGVPAMKSKIDPILEARQKYAYGKQNDYLDHHNMIGWTREGNTAHPNSGLATIMSDGPGGNKWMYVGRNKAGQVWRDITGNRSGTVTINADGWGNFSVXGGSVSIWV

SEQ ID NO: 21423 - protein, 483 aa, Synthetic construct
HHNGTNGTMMQYFEWYLPNDGNHWNRLRSDASNLKDKGITAVWIPPAWKGASQNDVGYGAYDLYDLGEFNQKGTVRTKYGTRNQLQAAVTALKSNGIQVYGDVVMNHKGGADATEWVRAVEVNPSNRNQEVSGDYTIEAWTKFDFPGRGNTHSNFKWRWYHFDGVDWDQSRQLQNKIYKFRGDGKEWDWEVDTENGNYDYLMYADIDMDHPEVVNELRNWGVWYTNTLGLDGFRIDAVKHIKYSFTRDWLEHVRNTTGKNMFAVAEFWKNDIGAIENYLSKTNWNHSVFDVPLHYNLYNASRSGGNYDMRQIFNGTVVQRHPTHAVTFVDNHDSQPEEALESFVEEWFKPLAYALTLTRDQGYPSVFYGDYYGIPTHGVPAMKSKIDPILEARQKYAYGKQNDYMDHHNMIGWTREGNTAHPNSGLATIMSDGPGGNKWMYVGRNKAGQVWRDITGNRSGTVTINADGWGNFSVNGGSVSIWV

SEQ ID NO: 21424 - protein, 483 aa, Synthetic construct
HHNGTNGTMMQYFEWYLPNDGNHWNRLRSDASNLKDKGITAVWIPPAYKGASQNDVGYGAYDLYDLGEFNQKGTVRTKYGTRNQLQAAVTALKSNGIQVYGDVVMNHKGGADATEKVRAVEVNPSNRNQEVSGDYTIEAWTKFDFPGRGNTHSNFKWRWYHFDGVDWDQSRQLQNRIYKFRGDGKGWDWEVDTENGNYDYLMYADIDMDHPEVVNELKNWGVWYTNTLGLDGFRIDAVKHIKYSFTRDWLTHVRNTTGKNMFAVAEFWKNDIGAIENYLSKTNWNHSVFDVPLHYNLYNASRSGGNYDMRQIFNGTVVQRHPTHAVTFVDNHDSQPEEALESFVEEWFKPLAYALTLTRDQGYPSVFYGDYYGIPTHGVPAMKSKIDPILEARQKYAYGKQNDYLDHHNMIGWTREGNTAHPNSGLATIMSDGPGGNKWMYVGRNKAGQVWRDITGNRSGTVTINADGWGNFSVNGGSVSIWV

SEQ ID NO: 21425 - protein, 483 aa, Synthetic construct
HHNQTNGTMMQYFEWYLPNDGNHWNRLRSDASNLKDKGITAVWIPPAWKGASQNDVGYGAYDLYDLGEFNQKGTVRTKYGTRNQLQAAVTALKSNGIQVYGDVVMNHKGGADATEWVRAVEVNPSNRNQEVSGDYTIEAWTKFDFPGRGNTHSNFKWRWYHFDGVDWDQSRQLQNKIYKFRGDGKEWDWEVDTENGNYDYLMYADYDMDHPEVVNELRNWGVWYTNTLGLDGFRIDAVKHIKYSFTRDWLTHVRNTTGKNMFAVAEFWKNDIGAIENYLSKTNWNHSVFDVPLHYNLYNASRSGGNYDMRQIFNGTVVQRHPTHAVTFVDNHDSQPEEALESFVEEWFKPLAYALTLTRDQGYPSVFYGDYYGIPTHGVPAMKSKIDPILEARQKYAYGKQNDYMDHHNMIGWTREGNTAHPNSGLATIMSDGPGGNKWMYVGRNKAGQVWRDITGNRSGTVTINADGWGNFSVNGGSVSIWV

SEQ ID NO: 21426 - protein, 483 aa, Synthetic construct
HHNGTNGTMMQYFEWYLPNDGNHWNRLRSDASNLKDKGITAVWIPPAWKGASQNDVGYGAYDLYDLGEFNQKGTVRTKYGTRNQLQRAVTALKSNGIQVYGDVVMNHKGGADATEWVRAVEVNPSNRNQEVSGDYTIEAWTKFDFPGRGNTHSNFKWRWYHFDGVDWDQSRQLQNRIYKFRGDGKEWDWEVDTENGNYDYLMYADIDMDHPEVVNELRNWGVWYTDTLGLDGFRIDAVKHIKYSFTRDWLTHVRNTTGKNMFAVAEFWKNDIGAIENYLSKTNWNHSVFDVPLHYNLYNASRSGGNYDMRQIFNGTVVQRHPTHAVTFVDNHDSQPEEALESFVEEWFKPLAYALTLTRDQGYPSVFYGDYYGIPTHGVPAMKSKIDPILEARQKYAYGKQNDYLDHHNMIGWTREGNTAHPNSGLATIMSDGPGGNKWMYVGRNKAGQVWRDITGNRSGTVTINADGWGEFSVNGGSVSIWV

SEQ ID NO: 21427 - protein, 483 aa, Synthetic construct
HHNGTNGTMMQYFEWYLPNDGNHWNRLRSDASNLKDKGITAVWIPPAWKGASQNDVGYGAYDLYDLGEFNQKGTVRTKYGTRNQLQRAVTALKSNGIQVYGDVVMNHKGGADATEWVRAVEVNPSNRNQEVSGDYTIEAWTKFDFPGRGNTHSNFKWRWYHFDGVDWDQSRQLQNRIYKFRGDGKEWDWEVDTENGNYDYLMYADIDMDHPEVVNELRNWGVWYTNTLGLDGFRIDAVKHIKYSFTRDWLTHVRNTTGKNMFAVAEFWKNDIGAIENYLSKTNWNHSVFDVPLHYNLYNASRSGGNYDMRQIFNKTVVQRHPTHAVTFVDNHDSQPEEALESFVEEWFKPLAYALTLTRDQGYPSVFYGDYYGIPTHGVPAMKSKIDPILEARQKYAYGKQNDYLDHHNMIGWTREGNTAHPNSGLATIMSDGPGGNKWMYVGRNKAGQVWRDITGNRSGRVTINADGWGNFSVNGGSVSIWV

SEQ ID NO: 21428 - protein, 483 aa, Bacillus sp. 7-7
HHWGTNGTMMQYFEWYLPNDGNHWNRLRSDASNLKDKGITAVWIPPAWKGASQNDVGYGAYDLYDLGEFNQKGTVRTKYGTRNQLQAAVTALKSNGIQVYGDVVMNHKGGADATEWVRAVEVNPSNRNQEVSGDYTIEAWTKFDFPGRGNTHSNFKWRWYHFDGVDWDQSRQLQNRIYKFRGDGKGWDWEVDTENGNYDYLMYADIDMDHPEVVNELRNWGVWYTNTLGLDGFRIDAVKHIKYSFTRDWLTHVRNTTGKNMFAVAEFWKNDIGAIENYLSKTNWNHSVFDVPLHYNLYNASRSGGNYDMRQIFNGTVVQRHPTHAVTFVDNHDSQPEEALESFVEEWFKPLAYALTLTRDQGYPSVFYGDYYGIPTHGVPAMKSKIDPILEARQKYAYGKQNDYLDHHNMIGWTREGNTAHPNSGLATIMSDGPGGNKWMYVGRNKAGQVWRDITGNRSGTVTINADGWGNFSVXGGSVSIWV

SEQ ID NO: 21429 - protein, 483 aa, Synthetic construct
HHNGTNGTMMQYFEWYLPNDGNHWNRLRSDASNLKDKGITAVWIPPAWKGASQNDVGYGAYDLYDLGEFNQKGTVRTKYGTRNQLQDAVTALKSNGIQVYGDVVMNHKGGADATEWVRAVEVNPSNRNQEVSGDYTIEAWTKFDFPGRGNTHSNFKWRWYHFDGVDWDQSRQLQNRIYKFRGDGKEWDWEVDTENGNYDYLMYADIDMDHPEVVNELRNWGVWYTDTLGLDGFRIDAVKHIKYSFTRDWLTHVRNTTGKNMFAVAEFWKNDIGAIENYLSKTNWNHSVFDVPLHYNLYNASRSGGNYDMRQIFNGTVVQRHPTHAVTFVDNHDSQPEEALESFVEEWFKPLAYALTLTRDQGYPSVFYGDYYGIPTHGVPAMKSKIDPILEARQKYAYGKQNDYLDHHNMIGWTREGNTEHPNSGLATIMSDGPGGNKWMYVGRNKAGQVWRDITGNRSGEVTINADGWGNFSVNGGSVSIWV

SEQ ID NO: 21430 - protein, 483 aa, Synthetic construct
HHNQTNGTMMQYFEWYLPNDGNHWNRLRSDASNLKDKGITAVWIPPAWKGASQNDVGYGAYDLYDLGEFNQKGTVRTKYGTRNQLQAAVTALKSNGIQVYGDVVMNHKGGADATEWVRAVEVNPSNRNQEVSGDYTIEAWTKFDFPGRGNTHSNFKWRWYHFDGVDWDQSRQLQNRIYKFRGDGKEWDWEVDEENGNYDYLMYADYDMDHPEVVNELRNWGVWYTNTLGLDGFRIDAVKHIKYSFTRDWLTHVRNTTGKNMFAVAEFWKNDIGAIRNYLSKTNWNHSVFDVPLHYNLYNASRSGGNYDMRQIFNGTVVQRHPTHAVTFVDNHDSQPEEALESFVEEWFKPLAYALTLTRDQGYPSVFYGDYYGIPTHGVPAMKSKIDPILEARQKYAYGKQNDYLDHHNMIGWTREGNTAHPNSGLATIMSDGPGGNKWMYVGRNKAGQVWRDITGNRSGTVTINADGWGNFSVNGGSVSIWV

SEQ ID NO: 21431 - protein, 483 aa, Synthetic construct
HHNGTNGTMMQYFEWYLPNDGNHWNRLRSDASNLKDKGITAVWIPPAWKGASQNDVGYGAYDLYDLGEFNQKGTVRTKYGTRNQLQAAVTALKSNGIQVYGDVVMNHKGGADATEWVRAVEVNPSNRNQEVSGDYTIEAWTKFDFPGRGNTHSNFKWRWYHFDGVDWDQSRQLQNKIYKFRGDGKEWDWEVDTENGNYDYLMYADYDMDHPEVVNELRNWGVWYTNTLGLDGFRIDAVKHIKYSFTRDWLTHVRNTTGKNMFAVAEFWKNDIGAIRNYLSKTNWNHSVFDVPLHYNLYNASRSGGNYDMRQIFNGTVVQRHPTHAVTFVDNHDSQPEEALESFVEEWFKPLAYALTLTRDQGYPSVFYGDYYGIPTHGVPAMKSKIDPILEARQKYAYGKQNDYLDHHNMIGWTREGNTAHPNSGLATIMSDGPGGNKWMYVGRNKAGQVWRDITGNRSGTVTINADGWGNFSVNGGSVSIWV

SEQ ID NO: 21432 - protein, 483 aa, Synthetic construct
HHNGTNGTMMQYFEWYLPNDGNHWNRLRSDASNLKDKGITAVWIPPAWKGASQNDVGYGAYDLYDLGEFNQKGTVRTKYGTRNQLQAAVTALKSNGIQVYGDVVMNHKGGADATEWVRAVEVNPSNRNQEVSGDYTIEAWTKFDFPGRGNTHSNFKWRWWHFDGVDWDQSRQLQNRIYKFRGDGKEWDWEVDTENGNYDYLMYADYDMDHPEVVNELRNWGVWYTNTLGLDGFRIDAVKHIKYSFTRDWLEHVRNTTGKNMFAVAEFWKNDIGAIENYLSKTNWNHSVFDVPLHYNLYNASRSGGNYDMRQIFNGTVVQRHPTHAVTFVDNHDSQPEEALESFVEEWFKPLAYALTLTRDQGYPSVFYGDYYGIPTHGVPAMKSKIDPILEARQKYAYGKQNDYLDHHNMIGWTREGNTAHPNSGLATIMSDGPGGNKWMYVGRNKAGQVWRDITGNRSGTVTINADGWGNFSVNGGSVSIWV

SEQ ID NO: 21433 - protein, 483 aa, Synthetic construct
HHNGTNGTMMQYFEWYLPNDGNHWHRLRSDASNLKDKGITAVWIPPAWKGASQNDVGYGAYDLYDLGEFNQKGTVRTKYGTRNQLQAAVTALKSNGIQVYGDVVMNHKGGADATEWVRAVEVNPSNRNQEVSGDYTIEAWTKFDFPGRGNTHSNFKWRWYHFDGVDWDQSRQLQNRIYKFRGDGKEWDWEVDTENGNYDYLIYADYDMDHPEVVNELRNWGVWYTNTLGLDGFRIDAVKHIKYSFTRDWLTHVRNTTGKNMFAVAEFWKNDIGAIENYLSKTNWNHSVFDVPLHYNLYNASRSGGNYDMRQIFNGTVVQRHPTHAVTFVDNHDSQPEEALESFVEEWFKPLAYALTLTRDQGYPSVFYGDYYGIPTHGVPAMKSKIDPILEARQKYAYGKQNDYMDHHNMIGWTREGNTAHPNSGLATIMSDGPGGNKWMYVGRNKAGQVWRDITGNRSGTVTINADGWGNFSVNGGSVSIWV

SEQ ID NO: 21434 - protein, 483 aa, Synthetic construct
HHNGTNGTMMQYFEWYLPNDGNHWHRLRSDASNLKDKGITAVWIPPAWKGASQNDVGYGAYDLYDLGEFNQKGTVRTKYGTRNQLQAAVTALKSNGIQVYGDVVMNHKGGADATEWVRAVEVNPSNRNQEVSGDYTIEAWTKFDFPGRGNTHSNFKWRWYHFDGVDWDQSRQLQNRIYKFRGDGKEWDWEVDTENGNYDYLMYADYDMDHPEVVNELRNWGVWYTNTLGLDGFRIDAVKHIKYSFTRDWLEHVRNTTGKNMFAVAEFWKNDIGAIENYLSKTNWNHSVFDVPLHYNLYNASRSGGNYDMRQIFNGTVVQRHPTHAVTFVDNHDSQPEEALESFVEEWFKPLAYALTLTRDQGYPSVFYGDYYGIPTHGVPAMKSKIDPILEARQKYAYGKQNDYMDHHNMIGWTREGNTAHPNSGLATIMSDGPGGNKWMYVGRNKAGQVWRDITGNRSGTVTINADGWGNFSVNGGSVSIWV

SEQ ID NO: 21435 - protein, 483 aa, Bacillus sp. 7-7
HHPGTNGTMMQYFEWYLPNDGNHWNRLRSDASNLKDKGITAVWIPPAWKGASQNDVGYGAYDLYDLGEFNQKGTVRTKYGTRNQLQAAVTALKSNGIQVYGDVVMNHKGGADATEWVRAVEVNPSNRNQEVSGDYTIEAWTKFDFPGRGNTHSNFKWRWYHFDGVDWDQSRQLQNRIYKFRGDGKGWDWEVDTENGNYDYLMYADIDMDHPEVVNELRNWGVWYTNTLGLDGFRIDAVKHIKYSFTRDWLTHVRNTTGKNMFAVAEFWKNDIGAIENYLSKTNWNHSVFDVPLHYNLYNASRSGGNYDMRQIFNGTVVQRHPTHAVTFVDNHDSQPEEALESFVEEWFKPLAYALTLTRDQGYPSVFYGDYYGIPTHGVPAMKSKIDPILEARQKYAYGKQNDYLDHHNMIGWTREGNTAHPNSGLATIMSDGPGGNKWMYVGRNKAGQVWRDITGNRSGTVTINADGWGNFSVXGGSVSIWV

SEQ ID NO: 21436 - protein, 483 aa, Bacillus sp. 7-7
HHGGTNGTMMQYFEWYLPNDGNHWNRLRSDASNLKDKGITAVWIPPAWKGASQNDVGYGAYDLYDLGEFNQKGTVRTKYGTRNQLQAAVTALKSNGIQVYGDVVMNHKGGADATEWVRAVEVNPSNRNQEVSGDYTIEAWTKFDFPGRGNTHSNFKWRWYHFDGVDWDQSRQLQNRIYKFRGDGKGWDWEVDTENGNYDYLMYADIDMDHPEVVNELRNWGVWYTNTLGLDGFRIDAVKHIKYSFTRDWLTHVRNTTGKNMFAVAEFWKNDIGAIENYLSKTNWNHSVFDVPLHYNLYNASRSGGNYDMRQIFNGTVVQRHPTHAVTFVDNHDSQPEEALESFVEEWFKPLAYALTLTRDQGYPSVFYGDYYGIPTHGVPAMKSKIDPILEARQKYAYGKQNDYLDHHNMIGWTREGNTAHPNSGLATIMSDGPGGNKWMYVGRNKAGQVWRDITGNRSGTVTINADGWGNFSVXGGSVSIWV

SEQ ID NO: 21437 - protein, 483 aa, Synthetic construct
HHNGTNGTMMQYFEWYLPNDGNHWNRLRSDASNLKDKGITAVWIPPAWKGASQNDVGYGAYDLYDLGEFNQKGTVRTKYGTRNQLQAAVTALKSNGIQVYGDVVMNHKGGADATEWVRAVEVNPSNRNQEVSGDYTIEAWTKFDFPGRGNTHSNFKWRWYHFDGVDWDQSRQLQNKIYKFRGDGKEWDWEVDTENGNYDYLMYADYDMDHPEVVNELRNWGVWYTNTLGLDGFRIDAVKHIKYSFTRDWLEHVRNTTGKNMFAVAEFWKNDIGAIENYLSKTNWNHSVFDVPLHYNLYNASRSGGNYDMRQIFNGTVVQRHPTHAVTFVDNHDSQPEEALESFVEEWFKPLAYALTLTRDQGYPSVFYGDYYGIPTHGVPAMKSKIDPILEARQKYAYGKQNDYMDHHNMIGWTREGNTAHPNSGLATIMSDGPGGNKWMYVGRNKAGQVWRDITGNRSGTVTINADGWGNFSVNGGSVSIWV

SEQ ID NO: 21438 - protein, 483 aa, Synthetic construct
HHNGTNGTMMQYFEWYLPNDGNHWNRLRSDASNLKDKGITAVWIPPAWKGASQNDVGYGAYDLYDLGEFNQKGTVRTKYGTREQLQAAVTALKSNGIQVYGDVVMNHKGGADATERVRAVEVNPSNRNQEVSGDYTIEAWTKFDFPGRGNTHSNFKWYWYHFDGVDWDQSRQLQNRIYKFEGDGKGWDWEVDTENGNYDYLMYADIDMDHPEVVNELRNWGVWYTNTLGLDGFRIDAVKHIKYSFTRDWLTHVRNTTGKNMFAVAEFWKNDIGAIENYLSKTNWNHSVFDVPLHYNLYNASRSGGNYDMRQIFNGTVVQRHPTHAVTFVDNHDSQPEEALESFVEEWFKPLAYALTLTRDQGYPSVFYGDYYGIPTHGVPAMKSKIDPILEARQKYAYGKQNDYLDHHNMIGWTREGNTAHPNSGLATIMSDGPGGNKWMYVGRNKAGQVWRDITGNRSGTVTINADGWGNFSVNGGSVSIWV

SEQ ID NO: 21439 - protein, 483 aa, Synthetic construct
HHNGTNGTMMQYFEWYLPNDGNHWNRLRSDASNLKDKGITAVWIPPAWKGASQNDVGYGAYDLYDLGEFNQKGTVRTKYGTRNQLQAAVTALKSNGIQVYGDVVMNHKGGADATEWVRAVEVNPSNRNQEVSGDYTIEAWTKFDFPGRGNTHSNFKWRWWHFDGVDWDQSRQLQNRIYKFRGDGKEWDWEVDTENGNYDYLMYADIDMDHPEVVNELRNWGVWYTNTLGLDGFRIDAVKHIKYSFTRDWLTHVRNTTGKNMFAVAEFWKNDIGAIRNYLSKTNWNHSVFDVPLHYNLYNASRSGGNYDMRQIFNGTVVQRHPTHAVTFVDNHDSQPEEALESFVEEWFKPLAYALTLTRDQGYPSVFYGDYYGIPTHGVPAMKSKIDPILEARQKYAYGKQNDYMDHHNMIGWTREGNTAHPNSGLATIMSDGPGGNKWMYVGRNKAGQVWRDITGNRSGTVTINADGWGNFSVNGGSVSIWV

SEQ ID NO: 21440 - protein, 483 aa, Synthetic construct
HHNGTNGTMMQYFEWYLPNDGNHWNRLRSDASNLKDKGITAVWIPPAWKGASQNDVGYGAYDLYDLGEFNQKGTVRTKYGLRNQLQAAVTALKSNGIQVYGDVVMNHKGGADATEWVRAVEVNPSNRNQEVSGDYTIEAWTKFDFPGRGNTHSNFKWRWYHFDGVDWDQSRQLQNRIYKFRGDGKGWDWEVDTENGNYDYLMYADIDMDHPEVVNELRNWGVWYTNTLGLDGFRIDAVKHIKYSFTRDWLTHCRNTTGKNMFAVAEFWKNDIGAIENYLSKTNWNHSVFDVPLHYNLYNASRSGGNYDMRQIFNGTVVQRHPTHAVTFVDNHDSQPEEALESFVEEWFKPLAYALTLTRDQGYPSVFYGDYYGIPTHGVPAMKSKIDPILEARQKYAYGKQNDYLDHHNMIGWTREGNTAHPNSGLATIMSDGPGGNKWMYVGRNKAGQVWRDITGNRSGTVTINADGWGNFSVNGGSVSIWV

SEQ ID NO: 21441 - protein, 483 aa, Synthetic construct
HHNGTNGTMMQYFEWYLPNDGNHWNRLRSDASNLKDKGITAVWIPPAWKGASQNDVGYGAYDLYDLGEFNQKGTVRTKYGTRNQLQAAVTALKSNGIQVYGDVVMNHKGGADATEWVRAVEVNPSNRNQEVSGDYTIEAWTKFDFPGRGNTHSNFKWRWWHFDGVDWDQSRQLQNKIYKFRGDGKEWDWEVDTENGNYDYLMYADIDMDHPEVVNELRNWGVWYTNTLGLDGFRIDAVKHIKYSFTRDWLTHVRNTTGKNMFAVAEFWKNDIGAIENYLSKTNWNHSVFDVPLHYNLYNASRSGGNYDMRQIFNGTVVQRHPTHAVTFVDNHDSQPEEALESFVEEWFKPLAYALTLTRDQGYPSVFYGDYYGIPTHGVPAMKSKIDPILEARQKYAYGKQNDYMDHHNMIGWTREGNTAHPNSGLATIMSDGPGGNKWMYVGRNKAGQVWRDITGNRSGTVTINADGWGNFSVNGGSVSIWV

SEQ ID NO: 21442 - protein, 483 aa, Synthetic construct
HHNGTNGTMMQYFEWYLPNDGNHWHRLRSDASNLKDMGITAVWIPPAWKGASQNDVGYGAYDLYDLGEFNQKGTVRTKYGTRNQLQAAVTALKSNGIQVYGDVVMNHKGGADATEWVRAVEVNPSNRNQEVSGDYTIEAWTKFDFPGRGNTHSNFKWRWYHFDGVDWDQSRQLQNKIYKFRGDGKEWDWEVDTENGNYDYLMYADYDMDHPEVVNELRNWGVWYTNTLGLDGFRIDAVKHIKYSFTRDWLTHVRNTTGKNMFAVAEFWKNDIGAIENYLSKTNWNHSVFDVPLHYNLYNASRSGGNYDMRQIFNGTVVQRHPTHAVTFVDNHDSQPEEALESFVEEWFKPLAYALTLTRDQGYPSVFYGDYYGIPTHGVPAMKSKIDPILEARQKYAYGKQNDYLDHHNMIGWTREGNTAHPNSGLATIMSDGPGGNKWMYVGRNKAGQVWRDITGNRSGTVTINADGWGNFSVNGGSVSIWV

SEQ ID NO: 21443 - protein, 483 aa, Synthetic construct
HHNGTNGTMMQYFEWYLPNDGNHWNRLRSDASNLKDKGITAVWIPPAWKGASQNDVGYGAYDLYDLGEFNQKGTVRTKYGTRNQLQAAVTALKSNGIQVYGDVVMNHKGGADATEWVRAVEVNPSNRNQEVSGDYTIEAWTKFDFPGRGNTHSNFKWRWDHFDGVDWDQSRQLQNRIYKFRGDGKEWDWEVDTENGNYDYLMYADIDMDHPEVVNELRNWGVWYTNTLGLDGFRIDAVKHIKYSFTRDWLTHVRNTTGKNMFAVAEFWKNDIGAIENYLSKTNWNHSVFDVPLHYNLYNASRSGGNYDMRQIFNGTVVQRHPTHAVTFVDNHDSQPEEALESFVEEWFKPLAYALTLTRDQGYPSVFYGDYYGIPTHGVPAMKSKIDPILEARQKYAYGKQNDYLDHHNMIGWTREGNTKHPNSGLATIMSDGPGGNKWMYVGRNKAGQVWRDITGNRSDTVTINADGWGNFSVNGGSVSIWV

SEQ ID NO: 21444 - protein, 483 aa, Synthetic construct
HHNGTNGTMMQYFEWYLPNDGNHWNRLRSDASNLKDKGITAVWIPPAWKGASQNDVGYGAYDLYDLGEFNQKGTVRTKYGTRNQLQAAVTALKSNGIQVYGDVVMNHKGGADATEWVRAVEVNPSNRNQEVSGDYTIEAWTKFDFPGRGNTHSNFKWRWYHFDGVDWDQSRQLQNRIYKFRGDGKGWDWEVDTENGNYDYLMYADIDMDHPEVVNELRNWGVWYTNTLGLDGFRIDAVKHIKYSFTRDWLTHVRNTTGKNMFAVAEFWKNDIGAIENYLSKTNWNHSVFDVPLHYNLYNASRSGGNYDMRQIFNGTVVQRHPTHAVTFVDNHDSQPEEALESWVEEWFKPLAYALTLTWDQGYPSVFYGDYYGIPTHGVPAMKSKIDPILEARQKYAYGKQNDYLDHHNMIGWTREGNTAHPNSGLATIMSDGPGGNKWMYVGRNKAGQVWRDITGNRSGTVTINADGWGNFSVNGGSVSIWV

SEQ ID NO: 21445 - protein, 483 aa, Bacillus sp. 7-7
HHAGTNGTMMQYFEWYLPNDGNHWNRLRSDASNLKDKGITAVWIPPAWKGASQNDVGYGAYDLYDLGEFNQKGTVRTKYGTRNQLQAAVTALKSNGIQVYGDVVMNHKGGADATEWVRAVEVNPSNRNQEVSGDYTIEAWTKFDFPGRGNTHSNFKWRWYHFDGVDWDQSRQLQNRIYKFRGDGKGWDWEVDTENGNYDYLMYADIDMDHPEVVNELRNWGVWYTNTLGLDGFRIDAVKHIKYSFTRDWLTHVRNTTGKNMFAVAEFWKNDIGAIENYLSKTNWNHSVFDVPLHYNLYNASRSGGNYDMRQIFNGTVVQRHPTHAVTFVDNHDSQPEEALESFVEEWFKPLAYALTLTRDQGYPSVFYGDYYGIPTHGVPAMKSKIDPILEARQKYAYGKQNDYLDHHNMIGWTREGNTAHPNSGLATIMSDGPGGNKWMYVGRNKAGQVWRDITGNRSGTVTINADGWGNFSVXGGSVSIWV

SEQ ID NO: 21446 - protein, 483 aa, Synthetic construct
HHNQTNGTMMQYFEWYLPNDGNHWNRLRSDASNLKDKGITCVWIPPAWKGASQNDVGYGAYDLYDLGEFNQKGTVRTKYGTRNQLQAAVTALKSNGIQVYGDVVMNHKGGADATEWVRAVEVNPSNRNQEVSGDYTIEAWTKFDFPGRGNTHSNFKWRWYHFDGVDWDQSRQLQNRIYKFRGDGKGWDWEVDTENGNYDYLMYADIDMDHPEVVNELRNWGVWYTNTLGLDGFRIDAVKHIKYSFTRDWLTHVRNTTGKNMFAVAEFWKNDIGAIENYLSKTNWNHSVFDVPLHYNLYNASRSGGNYDMRQIFNGTVVQRHPTHAVTFVDNHDSQPEEALESFVEEWFKPLAYALTLTRDQGYPSVFYGDYYGIPTHGVPAMKSKIDPILEARQKYAYGKQNDYLDHHNMIGWTREGNTAHPNSGLATIMSDGPGGNKWMYVGRNKAGQVWRDITGNRSGTVTINADGWGNFSVNGGSVSIWV

SEQ ID NO: 21447 - protein, 483 aa, Synthetic construct
HHNGTNGTMMQYFEWYLPNDGNHWNRLRSDASNLKDKGITAVWIPPAWKGASQNDVGYGAYDLYDLGEFNQKGTVRTKYGTRNQLQAAVTALKSNGIQVYGDVVMNHKGGADATEWVRAVEVNPSNRCQEVSGDYTIEAWTKFDFPGRGNTHSNFKWRWYHFDGVDWDQSRQLQNRIYKFRGDGKGWDWEVDTENGNYDYLMYADIDMDHPEVVNELRNWGVWYTNTLGLDGFRIDAVKHIKYSFTRDWLTHVRNTTGKNMFAVAEFWKNDIGAIENYLSKTNWNHSVFDVPLHYNLYNASRSGGNYDMRQIFNGTVVQRHPTHAVTFVDNHDSQPEEALESFVEEWFKPLAYALTLTRDQGYPSVFYGDYYGIPTHGVPAMKSKIDPILEARQKYAYGKQNDYLDHHNMIGWTREGNTAHPNSGLATIMSDGPGGNKWMYVGRNKAGGVWRDITGNRSGTVTINADGWGNFSVNGGSVSIWV

SEQ ID NO: 21448 - protein, 483 aa, Synthetic construct
HHNGTNGTMMQYFEWYLPNDGNHWNRLRSDASNLKDKGITAVWIPPAWKGASQNDVGYGAYDLYDLGEFNQKGTLRTKYGTRNQLQAAVTALKSNGIQVYGDVVMNHKGGADATEWVRAVEVNPSNRNQEVSGDYTIEAWTKFDFPGRGNTHSNFKWRWYHFDGVDWDQSRQLQNRIYKFRGDGKGWDWEVDTENGNYDYLMYADIDMDHPEVVNELRNWGVWYTNTLGLDGFRIDAVKHIKYSFTRDWLTHVRNTTGKNMFAVAEFWKNDIGAIENYLSKTNWNHSVFDVPLHYNLYNASRSGGNYDMRQIFNGTVVQRHPTHAVTFVDNHDSQPEEALESFVEEWFKPLAYALTLTRDQGYPSVFYGDYYGIPTHGVPAMKSKIDPILEARQKYAYGKQNDYLDHHNMIGWTREGNTAHPNSGLATIMSDGPGGNKWMYVGRNKLGQVWRDITGNRSGTVTINADGWGNFSVNGGSVSIWV

SEQ ID NO: 21449 - protein, 483 aa, Synthetic construct
HHNGTNGTMMQYFEWYLPNDGNHWNRLRSDASNLKDKGITAVWIPPAWKGASQNDVGYGAYDLYDLGEFNQKGTVRTKYGTRNQLQAAVTALKSNGIQVYGDVVMNHKGGADATEWVRAVEVNPSNRNQEVSGDYTIEAWTKFDFPGRGNTHSNFKWRWYHFDGVDWDQSRQLQNKIYKFRGDGKGWDWEVDTENGNYDYLMYADIDMDHPEVVNELRNWGVWYTNTLGLDGFRIDAVKHIKYSFTRDWLTHVRNTTGKNMFAVAEFWKNDIGAIENYLSKTNWNHSVFDVPLHYNLYNASRSGGNYDMRQIFNGTVVQRHPTHAVTFVDNHDSQPEEALESFVEEWFKPLAYALTLTRDQGYTSVFYGDYYGIPTHGVPAMKSKIDPILEARQKYAYGKQNDYLDHHNMIGWTREGNTAHPNSGLATIMSDGPGGNKWMYVGRNKAGQVWRDITGNRSGTVTINADGWGNFSVNGGSVSIWV

SEQ ID NO: 21450 - protein, 483 aa, Synthetic construct
HHNGTNGTMMQYFEWYLPNDGNHWNRLRSDASNLKDKGITAVWIPPAWKGASQNDVGYGAYDLYDLGEFNQKGTVRTKYGTRNQLQRAVTALKSNGIQVYGDVVMNHKGGADATEWVRAVEVNPSNRNQEVSGDYTIEAWTKFDFPGRGNTHSNFKWRWYHFDGVDWDQSRQLQNRIYKFRGDGKEWDWEVDTENGNYDYLMYADIDMDHPEVVNELRNWGVWYTNTLGLDGFRIDAVKHIKYSFTRDWLTHVRNTTGKNMFAVAEFWKNDIGAIENYLSKTNWNHSVFDVPLHYNLYNASRSGGNYDMRQIFKKTVVQRHPTHAVTFVDNHDSQPEEALESFVEEWFKPLAYALTLTRDQGYPSVFYGDYYGIPTHGVPAMKSKIDPILEARQKYAYGKQNDYLDHHNMIGWTREGNTAHPNSGLATIMSDGPGGNKWMYVGRNKAGQVWRDITGNRSGTVTINADGWGNFSVNGGSVSIWV

SEQ ID NO: 21451 - protein, 483 aa, Synthetic construct
HHNGTNGTMMQYFEWYLPNDGNHWNRLRSDASNLKDKGITAVWIPPAWKGASQNDVGYGAYDLYDLGEFNQKGTVRTKYGTRNQLQAAVTALKSNGIQVYGDVVMNHKGGADATEWVRAVEVNPSNRNQEVSGDYTIEAWTKFDFPGRGNTHSNFKWRWYHFDGVDWDQSRQLQNRIYKFRGDGKGWDWEVDTENGNYDYLMYADIDMDHPEVVNELRNWGVWYTNTLGLDGFRIDAVKHIKYSFTRDWLTHVRNTTGKNMFAVAEFWKNDIGAIENYLSKTNWNHSVFDVPLHYNLYNASRSGGNYDMRQIFNGTVVQRHPTHAVTFVDNHDSQPEEALESFVEEWFKPLAYALTLTWDQGYPSVFYGDYYGIPTHGVPAMKSKIDYILEARQKYAYGKQNDYLDHHNMIGWTREGNTAHPNSGLATIMSDGPGGNKWMYVGRNKAGQVWRDITGNRSGTVTINADGWGNFSVNGGSVSIWV

SEQ ID NO: 21452 - protein, 483 aa, Bacillus sp. 7-7
HHIGTNGTMMQYFEWYLPNDGNHWNRLRSDASNLKDKGITAVWIPPAWKGASQNDVGYGAYDLYDLGEFNQKGTVRTKYGTRNQLQAAVTALKSNGIQVYGDVVMNHKGGADATEWVRAVEVNPSNRNQEVSGDYTIEAWTKFDFPGRGNTHSNFKWRWYHFDGVDWDQSRQLQNRIYKFRGDGKGWDWEVDTENGNYDYLMYADIDMDHPEVVNELRNWGVWYTNTLGLDGFRIDAVKHIKYSFTRDWLTHVRNTTGKNMFAVAEFWKNDIGAIENYLSKTNWNHSVFDVPLHYNLYNASRSGGNYDMRQIFNGTVVQRHPTHAVTFVDNHDSQPEEALESFVEEWFKPLAYALTLTRDQGYPSVFYGDYYGIPTHGVPAMKSKIDPILEARQKYAYGKQNDYLDHHNMIGWTREGNTAHPNSGLATIMSDGPGGNKWMYVGRNKAGQVWRDITGNRSGTVTINADGWGNFSVXGGSVSIWV

SEQ ID NO: 21453 - protein, 483 aa, Synthetic construct
HHNGTNGTMMQYFEWYLPNDGNHWNRLRSDASMLKDKGITAVWIPPAWKGASQNDVGYGAYDLYDLGEFNQKGTVRTKYGTRNQLQAAVTALKSNGIQVYGDVVMNHKGGADATEWVRAVEVNPSNRNQEVSGDYTIEAWTKFDFPGRGNTHSNFKWRWYHFDGVDWDQSRQLQNRIYKFRGDGKGWDWEVDTENGNYDYLMYADIDMDHPEVVNELRNWGVWYTNTLGLDGFRIDAVKHIKYSFTRDWLTHVRNTTGKNMFAVAEFWKNDIGAIENYLSKTNWNHSVFDVPLHYNLYNASRSGGNYDMRQIFNGTVVQRHPTHAYTFVDNHDSQPEEALESFVEEWFKPLAYALTLTRDQGYPSVFYGDYYGIPTHGVPAMKSKIDPILEARQKYAYGKQNDYLDHHNMIGWTREGNTAHPNSGLATIMSDGPGGNKWMYVGRNKAGQVWRDITGNRSGTVTINADGWGNFSVNGGSVSIWV

SEQ ID NO: 21454 - protein, 483 aa, Synthetic construct
HHNGTNGTMMQYFEWYLPNDGNHWNRLRSDASNLKDKGITAVWIPPAWKGASQNDVGYGAYDLYDLGEFNQKGTVRTKYGTRNQLQAAVTALKSNGIQVYGDVVMNHKGGADATEWVRAVEVNPSNRNQEVSGDYTIEAWTKFDFPGRGNTHSNFKWRWWHFDGVDWDQSRQLQNRIYKFRGDGKEWDWEVDTENGNYDYLMYADYDMDHPEVVNELRNWGVWYTNTLGLDGFRIDAVKHIKYSFTRDWLEHVRNTTGKNMFAVAEFWKNDIGAIENYLSKTNWNHSVFDVPLHYNLYNASRSGGNYDMRQIFNGTVVQRHPTHAVTFVDNHDSQPEEALESFVEEWFKPLAYALTLTRDQGYPSVFYGDYYGIPTHGVPAMKSKIDPILEARQKYAYGKQNDYMDHHNMIGWTREGNTAHPNSGLATIMSDGPGGNKWMYVGRNKAGQVWRDITGNRSGTVTINADGWGNFSVNGGSVSIWV

SEQ ID NO: 21455 - protein, 483 aa, Synthetic construct
HHNQTNGTMMQYFEWYLPNDGNHWHRLRSDASNLKDKGITAVWIPPAWKGASQNDVGYGAYDLYDLGEFNQKGTVRTKYGTRNQLQAAVTALKSNGIQVYGDVVMNHKGGADATEWVRAVEVNPSNRNQEVSGDYTIEAWTKFDFPGRGNTHSNFKWRWYHFDGVDWDQSRQLQNRIYKFRGDGKEWDWEVDTENGNYDYLMYADIDMDHPEVVNELRNWGVWYTNTLGLDGFRIDAVKHIKYSFTRDWLTHVRNTTGKNMFAVAEFWKNDIGAIENYLSKTNWNHSVFDVPLHYNLYNASRSGGNYDMRQIFNGTVVQRHPTHAVTFVDNHDSQPEEALESFVEEWFKPLAYALTLTRDQGYPSVFYGDYYGIPTHGVPAMKSKIDPILEARQKYAYGKQNDYMDHHNMIGWTREGNTAHPNSGLATIMSDGPGGNKWMYVGRNKAGQVWRDITGNRSGTVTINADGWGNFSVNGGSVSIWV

SEQ ID NO: 21456 - protein, 483 aa, Synthetic construct
HHNGTNGTMMQYFEWYLPNDGNHWNRLRSDASNLKDKGITAVWIPPAWKGASQNDVGYGAYDLYDLGEFNQKGTVRTKYGTRNQLQAAVTALKSNGIQVYGDVVMNHKGGADATEWVRAVEVNPSNRNQEVSGDYTIEAWTKFDFPGRGNTHSNFKWRWYHFDGVDWDQSRQLQNRIYKFRGDGKEWDWEVDTENGNYDYLMYADIDMDHPEVVNELRNWGVWYTNTLGLDGFRIDAVKHIKYSFTRDWLTHVRNTTGKNMFAVAEFWKNDIGAIENYLSKTNWNHSVFDVPLHYNLYNASRSGGNYDMRQIFNGTVVQRHPTHAVTFVDNHDSQPEEALESFVEEWFKPLAYALTLTRDQGYPSVFYGDYYGIPTHGVPAMKSKIDPILEARQKYAYGKQNDYLDHHNMIGWTREGNTAHPNSGLATIMSDGPGGNKWMYVGRNKAGQVWRDITGNRSGEVTINADGWGEFSVNGGSVSIWV

SEQ ID NO: 21457 - protein, 483 aa, Synthetic construct
HHNGTNGTMMQYFEWYLPNDGNHWHRLRSDASNLKDKGITAVWIPPAWKGASQNDVGYGAYDLYDLGEFNQKGTVRTKYGTRNQLQAAVTALKSNGIQVYGDVVMNHKGGADATEWVRAVEVNPSNRNQEVSGDYTIEAWTKFDFPGRGNTHSNFKWRWYHFDGVDWDQSRQLQNKIYKFRGDGKGWDWEVDTENGNYDYLMYADYDMDHPEVVNELRNWGVWYTNTLGLDGFRIDAVKHIKYSFTRDWLTHVRNTTGKNMFAVAEFWKNDIGAIENYLSKTNWNHSVFDVPLHYNLYNASRSGGNYDMRQIFNGTVVQRHPTHAVTFVDNHDSQPEEALESFVEEWFKPLAYALTLTRDQGYPSVFYGDYYGIPTHGVPAMKSKIDPILEARQKYAYGKQNDYLDHHNMIGWTREGNTAHPNSGLATIMSDGPGGNKWMYVGRNKAGQVWRDITGNRSGTVTINADGWGNFSVNGGSVSIWV

SEQ ID NO: 21458 - protein, 483 aa, Bacillus sp. 7-7
HHRGTNGTMMQYFEWYLPNDGNHWNRLRSDASNLKDKGITAVWIPPAWKGASQNDVGYGAYDLYDLGEFNQKGTVRTKYGTRNQLQAAVTALKSNGIQVYGDVVMNHKGGADATEWVRAVEVNPSNRNQEVSGDYTIEAWTKFDFPGRGNTHSNFKWRWYHFDGVDWDQSRQLQNRIYKFRGDGKGWDWEVDTENGNYDYLMYADIDMDHPEVVNELRNWGVWYTNTLGLDGFRIDAVKHIKYSFTRDWLTHVRNTTGKNMFAVAEFWKNDIGAIENYLSKTNWNHSVFDVPLHYNLYNASRSGGNYDMRQIFNGTVVQRHPTHAVTFVDNHDSQPEEALESFVEEWFKPLAYALTLTRDQGYPSVFYGDYYGIPTHGVPAMKSKIDPILEARQKYAYGKQNDYLDHHNMIGWTREGNTAHPNSGLATIMSDGPGGNKWMYVGRNKAGQVWRDITGNRSGTVTINADGWGNFSVXGGSVSIWV

SEQ ID NO: 21459 - protein, 483 aa, Synthetic construct
HHNGTEGTMMQYFEWYLPNDGNHWNRLRSDASNLKDKGITAVWIPPAWKGASQNDVGYGAYDLYDLGEFNQKGTVRTKYGTRNQLQAAVTALKSNGIQVYGDVVMNHKGGADATEWVRAVEVNPSNRNQEVSGDYTIEAWTKFDFPGRGNTHSNFKWRWYHFDGVDWDQSRQLQNRIYKFRGDGKGWDWEVDTENGNYDYLMYADIDMDHPEVVNELRNWGVWYTNTLGLDGFRIDAVKHIKYSFTRDWITHVRNTTGKNMFAVAEFWKNDIGAIENYLSKTNWNHSVFDVPLHYNLYNASRSGGNYDMRQIFNGTVVQRHPTHAVTFVDNHDSQPEEALESFVEEWFKPLAYALTLTRDQGYPSVFYGDYYGIPTHGVPAMKSKIDPILEARQKYAYGKQNDYLDHHNMIGWTREGNTAHPNSGLATIMSDGPGGNKWMYVGRNKAGQVWRDITGNRSGTVTINADGWGNFSVNGGSVSIWV

SEQ ID NO: 21460 - protein, 483 aa, Synthetic construct
HHNGTNGTMMQYFEWYLPNDGNHWNRLRSDASNLKDKGITAVWIPPAWKGASQNDVGYGAYDLYDLGEFNQKGTVRTKYGTRNQLQAAVTALKSNGIQVYGDVVMNHKGGADATEWVRAVEVNPSNRNQEVSGFYTIEAWTKFDFPGRGNTHSNFKWRWYHFDGVDWDQSRQLQNRIYKFRGDGKGWDWEVDTENGNYDYLMYADIDMDHPEVVNELRNWGVWYTNTLGLDGFRIDAVKHIKYSFTRDWLTHVRNTTGKNMFAVAEFWKNDIGAIENYLSKTNWNHSVFDVPLHYNLYNASRSGGNYDMRQIFNGTVVQRHPTHAVTFVDNHDSQPEEALESFVEEWFKPLAYALTLTRDQGYPSVFYGDYYGIPTHGVPAMKSKIDPILEARQKYAYGKQNDYLDHHNMIGWTREGNTAHPNSGLATIMSDGSGGNKWMYVGRNKAGQVWRDITGNRSGTVTINADGWGNFSVNGGSVSIWV

SEQ ID NO: 21461 - protein, 483 aa, Synthetic construct
HHNGTNGTMMQYFEWYLPNDGNHWNRLRSDASNLKDKGITAVWIPPAWKGASQNDVGYGAYDLYDLGEFNQKGTVRTKYGTRNQLQAAVTALKSNQIQVYGDVVMNHKGGADATEWVRAVEVNPSNRNQEVSGDYTIEAWTKFDFPGRGNTHSNFKWRWYHFDGVDWDQSRQLQNRIYKFRGDGKGWDWEVDTENGNYDYLMYADIDMDHPEVVNELRNWGVWYTNTLGLDGFRIDAVKHIKYSFTRDWLTHVRNTTGKNMFAVAEFWKNDIGAIENYLSKTNWNHSVFDVPLHYNLYNASRSGGNYDMRQIFNGTVVQRHPTHAVTFVDNHDSQPEEALESFVEEWFKPLAYALTLTRDQGYPSVFYGDYYGIPTHGVPAMKSKIDPILEARQKYAYGKQNDYLDHHNMIGWTREGNTAHPNSGLATIMSDGPGGNKWMYVGRNKAGQVWRDITGNRSGTVTIHADGWGNFSVNGGSVSIWV

SEQ ID NO: 21462 - protein, 483 aa, Bacillus sp. 7-7
HHLGTNGTMMQYFEWYLPNDGNHWNRLRSDASNLKDKGITAVWIPPAWKGASQNDVGYGAYDLYDLGEFNQKGTVRTKYGTRNQLQAAVTALKSNGIQVYGDVVMNHKGGADATEWVRAVEVNPSNRNQEVSGDYTIEAWTKFDFPGRGNTHSNFKWRWYHFDGVDWDQSRQLQNRIYKFRGDGKGWDWEVDTENGNYDYLMYADIDMDHPEVVNELRNWGVWYTNTLGLDGFRIDAVKHIKYSFTRDWLTHVRNTTGKNMFAVAEFWKNDIGAIENYLSKTNWNHSVFDVPLHYNLYNASRSGGNYDMRQIFNGTVVQRHPTHAVTFVDNHDSQPEEALESFVEEWFKPLAYALTLTRDQGYPSVFYGDYYGIPTHGVPAMKSKIDPILEARQKYAYGKQNDYLDHHNMIGWTREGNTAHPNSGLATIMSDGPGGNKWMYVGRNKAGQVWRDITGNRSGTVTINADGWGNFSVXGGSVSIWV

SEQ ID NO: 21463 - protein, 483 aa, Synthetic construct
HHNGTNGTMMQYFEWYLPNDGNHWHRLRSDASNLKDKGITAVWIPPAWKGASQNDVGYGAYDLYDLGEFNQKGTVRTKYGTRNQLQAAVTALKSNGIQVYGDVVMNHKGGADATEWVRAVEVNPSNRNQEVSGDYTIEAWTKFDFPGRGNTHSNFKWRWYHFDGVDWDQSRQLQNKIYKFRGDGKEWDWEVDTENGNYDYLMYADIDMDHPEVVNELRNWGVWYTNTLGLDGFRIDAVKHIKYSFTRDWLTHVRNTTGKNMFAVAEFWKNDIGAIENYLSKTNWNHSVFDVPLHYNLYNASRSGGNYDMRQIFNGTVVQRHPTHAVTFVDNHDSQPEEALESFVEEWFKPLAYALTLTRDQGYPSVFYGDYYGIPTHGVPAMKSKIDPILEARQKYAYGKQNDYMDHHNMIGWTREGNTAHPNSGLATIMSDGPGGNKWMYVGRNKAGQVWRDITGNRSGTVTINADGWGNFSVNGGSVSIWV

SEQ ID NO: 21464 - protein, 483 aa, Synthetic construct
HHNGTNGTMMQYFEWYLPNKGNHWNRIRSDASNLKDKGITAVWIPPAWKGASQNDVGYGAYDLYDLGEFNQKGTVRTKYGTRNQLQAAVTALKSNGIQVYGDVVMNHKGGADATEWVRAVEVNPSNRNQEVSGDYTIEAWTKFDFPGRGNTHSNFKWRWYHFDGVDWDQSRQLQNRIYKFRGDGKGWDWEVDTENGNYDYLMYADIDMDHPEVVNELRNWGVWYTNTLGLDGFRIDAVKHIKYSFTRDWLTHVRNTTGKNMFAVAEFWKNDIGAIENYLSKTNWNHSVFDVPLHYNLYNASRSGGNYDMRQIFNGTVVQRHPTHAVTFVDNHDSQPEEALESFVEEWFKPLAYALTLTRDQGYPSVFYGDYYGIPTHGVPAMKSKIDPILEARQKYAYGKQNDYLDHHNMIGWTREGNTAHPNSGLATIMSDGPGGNKWMYVGRNKAGQVWRDITGNRSGTVTINADGWGNFSVNGGSVSIWV

SEQ ID NO: 21465 - protein, 483 aa, Synthetic construct
HHNGTNGTMMQYFEWYLPNDGNHWNRLRSDASNLKDKGITAVWIPPAWKGASQNDVGYGAYDLYDLGEFNQKGTVRTKYGTRNQLQAAVTALKSNGIQVYGDVVMNHKGGADATEWVRAVEVNPSNRNQEVSGDYTIEAWTKFDFPGRGNTHSNFKWRWYHFDGVDWDQSRQLQNKIYKFRGDGKEWDWEVDTENGNYDYLMYADYDMDHPEVVNELRNWGVWYTNTLGLDGFRIDAVKHIKYSFTRDWLTHVRNTTGKNMFAVAEFWKNDIGAIRNYLSKTNWNHSVFDVPLHYNLYNASRSGGNYDMRQIFNGTVVQRHPTHAVTFVDNHDSQPEEALESFVEEWFKPLAYALTLTRDQGYPSVFYGDYYGIPTHGVPAMKSKIDPILEARQKYAYGKQNDYMDHHNMIGWTREGNTAHPNSGLATIMSDGPGGNKWMYVGRNKAGQVWRDITGNRSGTVTINADGWGNFSVNGGSVSIWV

SEQ ID NO: 21466 - protein, 483 aa, Synthetic construct
HHNGTNGTMMQYFEWYLPNDGNHWNRLRSDASNLKDKGITAVWIPPAWKGASQNDVGYGAYDLYDLGEFNQKGTVRTKYGTRNQLQAAVTALKSNGIQVYGDVVMNHKGGADATEWVRAVEVNPSNRNQEVSGDYTIEAWTKFDFPGRGNTHSNFKWRWYHFDGVDWDQSRQLQARIYKFRGDGKGWDWEVDTENGNYDYLMYADIDMDHPEVVNELRNWGVWYTNTLGLDGFRIDAVKHIKYSFTRDWLTHVRNTTGKNMFAVAEFWKNDIGAIENYLSKTNWNHSVFDVPLHYNLYNASRSGGNYDMRQIFNGTVVQRHPTHAVTFVDNHDSQPEEALESFVEEWFKPLAYALTLTRDQGYPSVFYGDYYGIPTHGRPAMKSKIDPILEARQKYAYGKQNDYLDHHNMIGWTREGNTAHPNSGLATIMSDGPGGNKWMYVGRNKAGQVWRDITGNRSGTVTINADGWGNFSVNGGSVSIWV

SEQ ID NO: 21467 - protein, 483 aa, Synthetic construct
HHNGTNGTMMQYFEWYLPNDGNHWHRLRSDASNLKDKGITAVWIPPAWKGASQNDVGYGAYDLYDLGEFNQKGTVRTKYGTRNQLQAAVTALKSNGIQVYGDVVMNHKGGADATEWVDAVEVNPSNRNQEVSGDYTIEAWTKFDFPGRGNTHSNFKWRWYHFDGVDWDQSRQLQNKIYKFRGDGKEWDWEVDTENGNYDYLMYADYDMDHPEVVNELRNWGVWYTNTLGLDGFRIDAVKHIKYSFTRDWLTHVRNTTGKNMFAVAEFWKNDIGAIENYLSKTNWNHSVFDVPLHYNLYNASRSGGNYDMRQIFNGTVVQRHPTHAVTFVDNHDSQPEEALESFVEEWFKPLAYALTLTRDQGYPSVFYGDYYGIPTHGVPAMKSKIDPILEARQKYAYGKQNDYLDHHNMIGWTREGNTAHPNSGLATIMSDGPGGNKWMYVGRNKAGQVWRDITGNRSGTVTINADGWGNFSVNGGSVSIWV

SEQ ID NO: 21468 - protein, 483 aa, Synthetic construct
HHNGTNGTMMQYFEWYLPNDGNHWNRLRSDASNLKDKGITAVWIPPAWKGASQNDVGYGAYDLYDLGEFNQKGTVRTKYGTRNQLQAAVTALKSNGIQVYGDVVMNHKGGADATEWVRAVEVNPSNRNQEVSGFYTIEAWTKFDFPGRGNTHSNFKWRWYHFDGVDWDQSRQLQNRIYKFRGDGKGWDWEVDTENGNYDYLMYADIDMDHPEVVNELRNWGVWYTNTLGLDGFRIDAVKHIKYSFTRDWLTHVRNTTGKNMFAVAEFWKNDIGAIENYLSKTNWNHSVFDVPLHYNLYNASRSGGNYDMRQIFNGTVVQRHPTHAVTFVDNHDSQPEEALESFVEEWFKPLAYALTLTRDQGYPSVFYGDYYGIPTHGVPAMKSKIDPILEARQKYAYGKQNDYLDHHNMIGWTREGNTAHPNSGLATIMSDGPGGNKWMYVGRNKAGQVWRDITGNRSGLVTINADGWGNFSVNGGSVSIWV

SEQ ID NO: 21469 - protein, 483 aa, Bacillus sp. 7-7
HHVGTNGTMMQYFEWYLPNDGNHWNRLRSDASNLKDKGITAVWIPPAWKGASQNDVGYGAYDLYDLGEFNQKGTVRTKYGTRNQLQAAVTALKSNGIQVYGDVVMNHKGGADATEWVRAVEVNPSNRNQEVSGDYTIEAWTKFDFPGRGNTHSNFKWRWYHFDGVDWDQSRQLQNRIYKFRGDGKGWDWEVDTENGNYDYLMYADIDMDHPEVVNELRNWGVWYTNTLGLDGFRIDAVKHIKYSFTRDWLTHVRNTTGKNMFAVAEFWKNDIGAIENYLSKTNWNHSVFDVPLHYNLYNASRSGGNYDMRQIFNGTVVQRHPTHAVTFVDNHDSQPEEALESFVEEWFKPLAYALTLTRDQGYPSVFYGDYYGIPTHGVPAMKSKIDPILEARQKYAYGKQNDYLDHHNMIGWTREGNTAHPNSGLATIMSDGPGGNKWMYVGRNKAGQVWRDITGNRSGTVTINADGWGNFSVXGGSVSIWV

SEQ ID NO: 21470 - protein, 483 aa, Synthetic construct
HHNQTNGTMMQYFEWYLPNDGNHWNRLRSDASNLKDKGITAVWIPPAWKGASQNDVGYGAYDLYDLGEFNQKGTVRTKYGTRNQLQAAVTALKSNGIQVYGDVVMNHKGGADATEWVRAVEVNPSNRNQEVSGDYTIEAWTKFDFPGRGNTHSNFKWRWYHFDGVDWDQSRQLQNRIYKFRGDGKEWDWEVDTENGNYDYLMYADYDMDHPEVVNELRNWGVWYTNTLGLDGFRIDAVKHIKYSFTRDWLTHVRNTTGKNMFAVAEFWKNDIGAIRNYLSKTNWNHSVFDVPLHYNLYNASRSGGNYDMRQIFNGTVVQRHPTHAVTFVDNHDSQPEEALESFVEEWFKPLAYALTLTRDQGYPSVFYGDYYGIPTHGVPAMKSKIDPILEARQKYAYGKQNDYMDHHNMIGWTREGNTAHPNSGLATIMSDGPGGNKWMYVGRNKAGQVWRDITGNRSGTVTINADGWGNFSVNGGSVSIWV

SEQ ID NO: 21471 - protein, 483 aa, Bacillus sp. 7-7
HHFGTNGTMMQYFEWYLPNDGNHWNRLRSDASNLKDKGITAVWIPPAWKGASQNDVGYGAYDLYDLGEFNQKGTVRTKYGTRNQLQAAVTALKSNGIQVYGDVVMNHKGGADATEWVRAVEVNPSNRNQEVSGDYTIEAWTKFDFPGRGNTHSNFKWRWYHFDGVDWDQSRQLQNRIYKFRGDGKGWDWEVDTENGNYDYLMYADIDMDHPEVVNELRNWGVWYTNTLGLDGFRIDAVKHIKYSFTRDWLTHVRNTTGKNMFAVAEFWKNDIGAIENYLSKTNWNHSVFDVPLHYNLYNASRSGGNYDMRQIFNGTVVQRHPTHAVTFVDNHDSQPEEALESFVEEWFKPLAYALTLTRDQGYPSVFYGDYYGIPTHGVPAMKSKIDPILEARQKYAYGKQNDYLDHHNMIGWTREGNTAHPNSGLATIMSDGPGGNKWMYVGRNKAGQVWRDITGNRSGTVTINADGWGNFSVXGGSVSIWV

SEQ ID NO: 21472 - protein, 483 aa, Synthetic construct
HHNGTNGTMMQYFEWYLPNDGNHWNRLRSDASNLKDKGITAVWIPPAWKGASQNDVGYGAYDLYDLGEFNQKGTVRTKYGTRNQLQAAVTALKSNQIQVYGDVVMNHKGGADATEWVRAVEVNPSNRNQEVSGDYTIEAWTKFDFPGRGNTHSNFKWRWYHFDGVDWDQSRQLQNRIYKFRGDGKGWDWEVDTENGNYDYLMYADIDMDHPEVVNELRNWGVWYTNTLGLDGFRIDAVKHIKYSFTRDWLTHVRNTTGKNMFAVAEFWKNDIGAIENYLSKTNWNHSVFDVPLHYNLYNASRSGGNYDMRQIFNGTVVQRHPTHAVTFVDNHDSQPEEALESFVEEWFKPLAYALTLTRDQGYPSVFYGDYYGIPTHGAPAMKSKIDPILEARQKYAYGKQNDYLDHHNMIGWTREGNTAHPNSGLATIMSDGPGGNKWMYVGRNKAGQVWRDITGNRSGTVTINADGWGNFSVNGGSVSIWV

SEQ ID NO: 21473 - protein, 483 aa, Synthetic construct
HHNQTNGTMMQYFEWYLPNDGNHWNRLRSDASNLKDKGITAVWIPPAWKGASQNDVGYGAYDLYDLGEFNQKGTVRTKYGTRNQLQAAVTALKSNGIQVYGDVVMNHKGGADATEWVRAVEVNPSNRNQEVSGDYTIEAWTKFDFPGRGNTHSNFKWRWYHFDGVDWDQSRQLQNKIYKFRGDGKGWDWEVDTENGNYDYLMYADYDMDHPEVVNELRNWGVWYTNTLGLDGFRIDAVKHIKYSFTRDWLTHVRNTTGKNMFAVAEFWKNDIGAIENYLSKTNWNHSVFDVPLHYNLYNASRSGGNYDMRQIFNGTVVQRHPTHAVTFVDNHDSQPEEALESFVEEWFKPLAYALTLTRDQGYPSVFYGDYYGIPTHGVPAMKSKIDPILEARQKYAYGKQNDYMDHHNMIGWTREGNTAHPNSGLATIMSDGPGGNKWMYVGRNKAGQVWRDITGNRSGTVTINADGWGNFSVNGGSVSIWV

SEQ ID NO: 21474 - protein, 483 aa, Synthetic construct
HHNGTNGTMMQYFEWYLPNDGNHWNRLRSDASNLKDKGITAVWIPPAWKGASQNDVGYGAYDLYDLGEFNQKGTVRTKYGTRNQLQAAVTALKSNGIQVYGDVVMNHKGGADATEWVRAVEVNPSNRNQEVSGDYTIEAWTKFDFPGRGNTHSNFKWRWYHFDGVDWDQSRQLQNRIYKFRGDGKGWDWEVDTENGNYDYLMYADIDMDHPEVVNELRNWGVWYTNTLGLDGFRIDAVKHIKYSFTRDWLTHVRNTTGKNMFAVAEFWKNDIGAIENYLSKTNWNHSVFDVPLHYNLYNASRSGGNYDMRQIFNGTVLQRHPTHAVTFVDNHDSQPEEALESFVEEWFKPLAYALTLTRDQGYPSVFYGDYYGIPTHGVPAQKSKIDPILEARQKYAYGKQNDYLDHHNMIGWTREGNTAHPNSGLATIMSDGPGGNKWMYVGRNKAGQVWRDITGNRSGTVTINADGWGNFSVNGGSVSIWV

SEQ ID NO: 21475 - protein, 483 aa, Synthetic construct
HHNGTNGTMMQYFEWYLPNDGNHWNRLRSDASNLKDKGITAVWIPPAWKGASQNDVGYGAYDLYDLGEFNQKGTVRTKYGLRNQLQAAVTALKSNGIQVYGDVVMNHKGGADATEWVRAVEVNPSNRNQEVSGDYTIEAWTKFDFPGRGNTHSNFKWRWYHFDGVDWDQSRQLQNRIYKFRGDGKGWDWEVDTENGNYDYLMYADIDMDHPEVVNELRNWGVWYTNTLGLDGFRIDAVKHIKYSFTRDWLTHVRNTTGKNMFAVAEFWKNDIGAIENYLSKTNWNHSVFDVPLHYNLYNASRSGGNYDMRQIFNGTVVQRHPTHAVTFVDNHDSQPEEALESFVEEWFKPLAYALTLTRDQGYPSVFYGDYYGIPTHGVPAMKSKIDEILEARQKYAYGKQNDYLDHHNMIGWTREGNTAHPNSGLATIMSDGPGGNKWMYVGRNKAGQVWRDITGNRSGTVTINADGWGNFSVNGGSVSIWV

SEQ ID NO: 21476 - protein, 483 aa, Synthetic construct
HHNGTNGTMMQYFEWYLPNDGNHWHRLRSDASNLKDKGITAVWIPPAWKGASQNDVGYGAYDLYDLGEFNQKGTVRTKYGTRNQLQAAVTALKSNGIQVYGDVVMNHKGGADATEWVRAVEVNPSNRNQEVSGDYTIEAWTKFDFPGRGNTHSNFKWRWYHFDGVDWDQSRQLQNRIYKFRGDGKEWDWEVDEENGNYDYLMYADYDMDHPEVVNELRNWGVWYTNTLGLDGFRIDAVKHIKYSFTRDWLTHVRNTTGKNMFAVAEFWKNDIGAIRNYLSKTNWNHSVFDVPLHYNLYNASRSGGNYDMRQIFNGTVVQRHPTHAVTFVDNHDSQPEEALESFVEEWFKPLAYALTLTRDQGYPSVFYGDYYGIPTHGVPAMKSKIDPILEARQKYAYGKQNDYMDHHNMIGWTREGNTAHPNSGLATIMSDGPGGNKWMYVGRNKAGQVWRDITGNRSGTVTINADGWGNFSVNGGSVSIWV

SEQ ID NO: 21477 - protein, 483 aa, Bacillus sp. 7-7
HHSGTNGTMMQYFEWYLPNDGNHWNRLRSDASNLKDKGITAVWIPPAWKGASQNDVGYGAYDLYDLGEFNQKGTVRTKYGTRNQLQAAVTALKSNGIQVYGDVVMNHKGGADATEWVRAVEVNPSNRNQEVSGDYTIEAWTKFDFPGRGNTHSNFKWRWYHFDGVDWDQSRQLQNRIYKFRGDGKGWDWEVDTENGNYDYLMYADIDMDHPEVVNELRNWGVWYTNTLGLDGFRIDAVKHIKYSFTRDWLTHVRNTTGKNMFAVAEFWKNDIGAIENYLSKTNWNHSVFDVPLHYNLYNASRSGGNYDMRQIFNGTVVQRHPTHAVTFVDNHDSQPEEALESFVEEWFKPLAYALTLTRDQGYPSVFYGDYYGIPTHGVPAMKSKIDPILEARQKYAYGKQNDYLDHHNMIGWTREGNTAHPNSGLATIMSDGPGGNKWMYVGRNKAGQVWRDITGNRSGTVTINADGWGNFSVXGGSVSIWV

SEQ ID NO: 21478 - protein, 483 aa, Synthetic construct
HHNGTNGTMMQYFEWYLPNDGNHWNRLRSDASNLKDKVITAVWIPPAWKGASQNDVGYGAYDLYDLGEFNQKGTVRTKYGTRNQLQAAVTALQSNGIQVYGDVVMNHKGGADATEWVRAVEVNPSNRNQEVSGDYTIEAWTKFDFPGRGNTHSNFKWRWYHFDGVDWDQSRQLQNRIYKFRGDGKGWDWEVDTENGNYDYLMYADIDMDHPEVVNELRNWGVWYTNTLGLDGFRIDAVKHIKYSFTRDWLTHVRNTTGKNMFAVAEFWKNDIGAIENYLSKTNWNHSVFDVPLHYNLYNASRSGGNYDMRQIFNGTVVQRHPTHAVTFVDNHDSQPEEALESFVEEWFKPLAYALTLTRDQGYPSVFYGDYYGIPTHGVPAMKSKIDPILEARQKYAYGKQNDYLDHHNMIGWTREGNTAHPNSGLATIMSDGPGGNKWMYVGRNKAGQVWRDITGNRSGTVTINADGWGNFSVNGGSVSIWV

SEQ ID NO: 21479 - protein, 483 aa, Synthetic construct
HHNGTNGTMMQYFEWYLPNDGNHWNRLRSDASNLKDKGITAVWIPPAWKGASQNDVGYGAYDLYDLGEFNQKGTVRTKYGTRNQLQAAVTALKSNGIQVYGDVVMNHKGGADATEWVRAVEVNPSNRNQEVSGDYTIEAWTKFDFPGRGNTHSNFKWRWYHFDGVDWDQSRQLQARIYKFRGDGKGWDWEVDTENGNYDYLMYADIDMDHPEVVNELRNWGVWYTNTLGLDGFRIDAVKHIKYSFTRDWLTHVRNTTGKNMFAVAEFWKNDIGAIENYLSKTNWNHSVFDVPLHYNLYNASRSGGNYDMRQIFNGTVVQRHPTHAVTFVDNHDSQPEEALESFVEEWFKPLAYALTLTRDQGYPSVFYGDYYGIPTHGVPAMKSWIDPILEARQKYAYGKQNDYLDHHNMIGWTREGNTAHPNSGLATIMSDGPGGNKWMYVGRNKAGQVWRDITGNRSGTVTINADGWGNFSVNGGSVSIWV

SEQ ID NO: 21480 - protein, 483 aa, Bacillus sp. 7-7
HHDGTNGTMMQYFEWYLPNDGNHWNRLRSDASNLKDKGITAVWIPPAWKGASQNDVGYGAYDLYDLGEFNQKGTVRTKYGTRNQLQAAVTALKSNGIQVYGDVVMNHKGGADATEWVRAVEVNPSNRNQEVSGDYTIEAWTKFDFPGRGNTHSNFKWRWYHFDGVDWDQSRQLQNRIYKFRGDGKGWDWEVDTENGNYDYLMYADIDMDHPEVVNELRNWGVWYTNTLGLDGFRIDAVKHIKYSFTRDWLTHVRNTTGKNMFAVAEFWKNDIGAIENYLSKTNWNHSVFDVPLHYNLYNASRSGGNYDMRQIFNGTVVQRHPTHAVTFVDNHDSQPEEALESFVEEWFKPLAYALTLTRDQGYPSVFYGDYYGIPTHGVPAMKSKIDPILEARQKYAYGKQNDYLDHHNMIGWTREGNTAHPNSGLATIMSDGPGGNKWMYVGRNKAGQVWRDITGNRSGTVTINADGWGNFSVXGGSVSIWV

SEQ ID NO: 21481 - protein, 483 aa, Bacillus sp. 7-7
HHHGTNGTMMQYFEWYLPNDGNHWNRLRSDASNLKDKGITAVWIPPAWKGASQNDVGYGAYDLYDLGEFNQKGTVRTKYGTRNQLQAAVTALKSNGIQVYGDVVMNHKGGADATEWVRAVEVNPSNRNQEVSGDYTIEAWTKFDFPGRGNTHSNFKWRWYHFDGVDWDQSRQLQNRIYKFRGDGKGWDWEVDTENGNYDYLMYADIDMDHPEVVNELRNWGVWYTNTLGLDGFRIDAVKHIKYSFTRDWLTHVRNTTGKNMFAVAEFWKNDIGAIENYLSKTNWNHSVFDVPLHYNLYNASRSGGNYDMRQIFNGTVVQRHPTHAVTFVDNHDSQPEEALESFVEEWFKPLAYALTLTRDQGYPSVFYGDYYGIPTHGVPAMKSKIDPILEARQKYAYGKQNDYLDHHNMIGWTREGNTAHPNSGLATIMSDGPGGNKWMYVGRNKAGQVWRDITGNRSGTVTINADGWGNFSVXGGSVSIWV

SEQ ID NO: 21482 - protein, 483 aa, Synthetic construct
HHNGTNGTMMQYFEWYLPNDGNHWNRLRSDASNLKDKGITAVWIPPAWKGASQNDVGYGAYDLYDLGEFNQKGTVRTKYGTRNQLQDAVTALKSNGIQVYGDVVMNHKGGADATEWVRAVEVNPSNRNQEVSGDYTIEAWTKFDFPGRGNTHSNFKWRWYHFDGVDWDQSRQLQNRIYKFRGDGKEWDWEVDTENGNYDYLMYADIDMDHPEVVNELRNWGVWYTNTLGLDGFRIDAVKHIKYSFTRDWLTHVRNTTGKNMFAVAEFWKNDIGAIENYLSKTNWNHSVFDVPLHYNLYNASRSGGNYDMRQIFEGTVVQRHPTHAVTFVDNHDSQPEEALESFVEEWFKPLAYALTLTRDQGYPSVFYGDYYGIPTHGVPAMKSKIDPILEARQKYAYGKQNDYLDHHNMIGWTREGNTAHPNSGLATIMSDGPGGNKWMYVGRNKAGQVWRDITGNRSGTVTINADGWGEFSVNGGSVSIWV

SEQ ID NO: 21483 - protein, 483 aa, Synthetic construct
HHNQTNGTMMQYFEWYLPNDGNHWNRLRSDASNLKDKGITAVWIPPAWKGASQNDVGYGAYDLYDLGEFNQKGTVRTKYGTRNQLQAAVTALKSNGIQVYGDVVMNHKGGADATEWVRAVEVNPSNRNQEVSGDYTIEAWTKFDFPGRGNTHSNFKWRWYHFDGVDWDQSRQLQNRIYKFRGDGKEWDWEVDTENGNYDYLMYADIDMDHPEVVNELRNWGVWYTNTLGLDGFRIDAVKHIKYSFTRDWLTHVRNTTGKNMFAVAEFWKNDIGAIRNYLSKTNWNHSVFDVPLHYNLYNASRSGGNYDMRQIFNGTVVQRHPTHAVTFVDNHDSQPEEALESFVEEWFKPLAYALTLTRDQGYPSVFYGDYYGIPTHGVPAMKSKIDPILEARQKYAYGKQNDYLDHHNMIGWTREGNTAHPNSGLATIMSDGPGGNKWMYVGRNKAGQVWRDITGNRSGTVTINADGWGNFSVNGGSVSIWV

SEQ ID NO: 21484 - protein, 483 aa, Synthetic construct
HHNGTNGTMMQYFEWYLPNDGNHWNRIRSDASNLKDKGITAVWIPPAWKGASQNDVGYGAYDLYDLGEFNQKGTVRTKYGTRNQLQAAVTALKSNGIQVYGDVVMNHKGGADATEWVRAVEVNPSNRNQEVSGDYTIEAWTKFDFPGRGNTHSNFKWRWYHFDGVDWDQSRQLQNRIYKFRGDGKGWDWEVDTENGNYDYLMYADIDMDHPEVVNELRNWGVWYTNTLGLDGFRIDAVKHIKYSFTRDWLTHVRNTTGKNMFAVAEFWKNDIGAIENYLSKTNWNHSVFDVPLHYNLYNASRSGGNYDMRQIFNGTVVQRHPTHAVTFVDNHDSQPEEALESFVEEWFKPLCYALTLTRDQGYPSVFYGDYYGIPTHGVPAMKSKIDPILEARQKYAYGKQNDYLDHHNMIGWTREGNTAHPNSGLATIMSDGPGGNKWMYVGRNKAGQVWRDITGNRSGTVTINADGWGNFSVNGGSVSIWV

SEQ ID NO: 21485 - protein, 483 aa, Synthetic construct
HHNGTNGTMMQYFEWYLPNDGNHWNRLRSDASNLKDKGITAVWIPPAWKGASQNDVGYGAYDLYDLGEFNQKGTVRTKYGTRNQLQAAVTALKSNGIQVYGDVVMNHKGGADATEWVRAVEVNPSNRNQEVSGDYTIEAWTKFDFPGRGNTHSNFKWRWWHFDGVDWDQSRQLQNRIYKFRGDGKEWDWEVDTENGNYDYLMYADYDMDHPEVVNELRNWGVWYTNTLGLDGFRIDAVKHIKYSFTRDWLTHVRNTTGKNMFAVAEFWKNDIGAIRNYLSKTNWNHSVFDVPLHYNLYNASRSGGNYDMRQIFNGTVVQRHPTHAVTFVDNHDSQPEEALESFVEEWFKPLAYALTLTRDQGYPSVFYGDYYGIPTHGVPAMKSKIDPILEARQKYAYGKQNDYMDHHNMIGWTREGNTAHPNSGLATIMSDGPGGNKWMYVGRNKAGQVWRDITGNRSGTVTINADGWGNFSVNGGSVSIWV

SEQ ID NO: 21486 - protein, 483 aa, Synthetic construct
HHNGTNGTMMQYFEWYLPNDGNHWNRLRSDASNLKDKGITAVWIPPAWKGASQNDVGYGAYDLYDLGEFNQKGTVRTKYGTREQLQAAVTALKSNGIQVYGDVVMNHKGGADATEWVRAVEVNPSNRNQEVSGDYTIEAWTKFDFPGRGNTHSNFKWRWDHFDGVDWDQSRQLQNRIYKFRGDGKEWDWEVDTENGNYDYLMYADIDMDHPEVVNELRDWGVWYTRTLGLDGFRIDAVKHIKYSFTRDWLTHVRNTTGKNMFAVAEFWKNDIGAIENYLSKTNWNHSVFDVPLHYNLYNASRSGGNYDMRQIFNGTVVQRHPTHAVTFVDNHDSQPEEALESFVEEWFKPLAYALTLTRDQGYPSVFYGDYYGIPTHGVPAMKSKIDPILEARQKYAYGKQNDYLDHHNMIGWTREGNTAHPNSGLATIMSDGPGGNKWMYVGRNKAGQVWRDITGNRSGTVTINADGWGNFSVNGGSVSIWV

SEQ ID NO: 21487 - protein, 483 aa, Synthetic construct
HHNQTNGTMMQYFEWYLPNDGNHWNRLRSDASNLKDKGITAVWIPPAWKGASQNDVGYGAYDLYDLGEFNQKGTVRTKYGTRNQLQAAVTALKSNGIQVYGDVVMNHKGGADATEWVRAVEVNPSNRNQEVSGDYTIEAWTKFDFPGRGNTHSNFKWRWYHFDGVDWDQSRQLQNRIYKFRGDGKEWDWEVDTENGNYDYLMYADYDMDHPEVVNELRNWGVWYTNTLGLDGFRIDAVKHIKYSFTRDWLEHVRNTTGKNMFAVAEFWKNDIGAIENYLSKTNWNHSVFDVPLHYNLYNASRSGGNYDMRQIFNGTVVQRHPTHAVTFVDNHDSQPEEALESFVEEWFKPLAYALTLTRDQGYPSVFYGDYYGIPTHGVPAMKSKIDPILEARQKYAYGKQNDYMDHHNMIGWTREGNTAHPNSGLATIMSDGPGGNKWMYVGRNKAGQVWRDITGNRSGTVTINADGWGNFSVNGGSVSIWV

SEQ ID NO: 21488 - protein, 483 aa, Synthetic construct
HHNGTNGTMMQYFEWYLPNDGNHWNRLRSDASNLKDKGITAVWIPPAWKGASQNDVGYGAYDLYDLGEFNQKGTVRTKYGTRNQLQAAVTALKSNGIQVYGDVVMNHKGGADATEWVRAVEVNPSNRNQEVSGDYTIEAWTKFDFPGRGNTHSNFKWRWWHFDGVDWDQSRQLQNRIYKFRGDGKEWDWEVDTENGNYDYLMYADYDMDHPEVVNELRNWGVWYTNTLGLDGFRIDAVKHIKYSFTRDWLTHVRNTTGKNMFAVAEFWKNDIGAIRNYLSKTNWNHSVFDVPLHYNLYNASRSGGNYDMRQIFNGTVVQRHPTHAVTFVDNHDSQPEEALESFVEEWFKPLAYALTLTRDQGYPSVFYGDYYGIPTHGVPAMKSKIDPILEARQKYAYGKQNDYLDHHNMIGWTREGNTAHPNSGLATIMSDGPGGNKWMYVGRNKAGQVWRDITGNRSGTVTINADGWGNFSVNGGSVSIWV

SEQ ID NO: 21489 - protein, 483 aa, Synthetic construct
HHNGTNGTMMQYFEWYLPNDGNHWNRLRSDASNLKDKGITAVWIPPAWKGASQNDVGYGAYDLYDLGEFNQKGTVRTKYGTRNQLQAAVTALKSNGIQVYGDVVMNHKGGADATEWVRAVEVNPSNRNQEVSGDYTIEAWTKFDFPGRGNTHSNFKWRWYHFDGVDWDQSRQLQNRIYKFRGDGKGWDWEVDTENGNYDYLMYADIDMDDPECVNELRNWGVWYTNTLGLDGFRIDAVKHIKYSFTRDWLTHVRNTTGKNMFAVAEFWKNDIGAIENYLSKTNWNHSVFDVPLHYNLYNASRSGGNYDMRQIFNGTVVQRHPTHAVTFVDNHDSQPEEALESFVEEWFKPLAYALTLTRDQGYPSVFYGDYYGIPTHGVPAMKSKIDPILEARQKYAYGKQNDYLDHHNMIGWTREGNTAHPNSGLATIMSDGPGGNKWMYVGRNKAGQVWRDITGNRSGTVTINADGWGNFSVNGGSVSIWV

SEQ ID NO: 21490 - protein, 483 aa, Synthetic construct
HHNQTNGTMMQYFEWYLPNDGNHWNRLRSDASNLKDKGITAVWIPPAWKGASQNDVGYGAYDLYDLGEFNQKGTVRTKYGTRNQLQAAVTALKSNGIQVYGDVVMNHKGGADATEWVRAVEVNPSNRNQEVSGDYTIEAWTKFDFPGRGNTHSNFKWRWYHFDGVDWDQSRQLQNRIYKFRGDGKGWDWEVDTENGNYDYLMYADIDMDHPEVVNELRNWGVWYTNTLGLDGFRIDAVKHIKYSFTRDWLTHVRNTTGKNMFAVAEFWKNDIGAIENYLSKTNWNHSVFDVPLHYNLYNASRSGGNYDMRQIFNGTVVQRHPTHAVTFVDNHDSQPESALESFVEEWFKPLAYALTLTRDQGYPSVFYGDYYGIPTHGVPAMKSKIDPILEARQKYAYGKQNDYLDHHNMIGWTREGNTAHPNSGLATIMSDGPGGNKWMYVGRNKAGQVWRDITGNRSGTVTINADGWGNFSVNGGSVSIWV

SEQ ID NO: 21491 - protein, 483 aa, Synthetic construct
HHNGTNGTMMQYFEWYLPNDGNHWNRLRSDASNLKDKGITAVWIPPAWKGASQNDVGYGAYDLYDLGEFNQKGTVRTKYGTRNQLQAAVTALKSNGIQVYGDVVMNHKGGADATEWVRAVEVNPSNRNQEVSGDYTIEAWTKFDFPGRGNTHSNFKWRWWHFDGVDWDQSRQLQNKIYKFRGDGKEWDWEVDEENGNYDYLMYADYDMDHPEVVNELRNWGVWYTNTLGLDGFRIDAVKHIKYSFTRDWLTHVRNTTGKNMFAVAEFWKNDIGAIENYLSKTNWNHSVFDVPLHYNLYNASRSGGNYDMRQIFNGTVVQRHPTHAVTFVDNHDSQPEEALESFVEEWFKPLAYALTLTRDQGYPSVFYGDYYGIPTHGVPAMKSKIDPILEARQKYAYGKQNDYMDHHNMIGWTREGNTAHPNSGLATIMSDGPGGNKWMYVGRNKAGQVWRDITGNRSGTVTINADGWGNFSVNGGSVSIWV

SEQ ID NO: 21492 - protein, 483 aa, Synthetic construct
HHNQTNGTMMQYFEWYLPNDGNHWNRLRSDASNLKDKGITAVWIPPAWKGASQNDVGYGAYDLYDLGEFNQKGTVRTKYGTRNQLQAAVTALKSNGIQVYGDVVMNHKGGADATEWVRAVEVNPSNRNQEVSGDYTIEAWTKFDFPGRGNTHSNFKWRWYHFDGVDWDQSRQLQNKIYKFRGDGKEWDWEVDTENGNYDYLMYADIDMDHPEVVNELRNWGVWYTNTLGLDGFRIDAVKHIKYSFTRDWLTHVRNTTGKNMFAVAEFWKNDIGAIENYLSKTNWNHSVFDVPLHYNLYNASRSGGNYDMRQIFNGTVVQRHPTHAVTFVDNHDSQPEEALESFVEEWFKPLAYALTLTRDQGYPSVFYGDYYGIPTHGVPAMKSKIDPILEARQKYAYGKQNDYMDHHNMIGWTREGNTAHPNSGLATIMSDGPGGNKWMYVGRNKAGQVWRDITGNRSGTVTINADGWGNFSVNGGSVSIWV

SEQ ID NO: 21493 - protein, 483 aa, Synthetic construct
HHNQTNGTMMQYFEWYLPNDGNHWHRLRSDASNLKDKGITAVWIPPAWKGASQNDVGYGAYDLYDLGEFNQKGTVRTKYGTRNQLQAAVTALKSNGIQVYGDVVMNHKGGADATEWVRAVEVNPSNRNQEVSGDYTIEAWTKFDFPGRGNTHSNFKWRWYHFDGVDWDQSRQLQNRIYKFRGDGKEWDWEVDTENGNYDYLMYADYDMDHPEVVNELRNWGVWYTNTLGLDGFRIDAVKHIKYSFTRDWLTHVRNTTGKNMFAVAEFWKNDIGAIENYLSKTNWNHSVFDVPLHYNLYNASRSGGNYDMRQIFNGTVVQRHPGHAVTFVDNHDSQPEEALESFVEEWFKPLAYALTLTRDQGYPSVFYGDYYGIPTHGVPAMKSKIDPILEARQKYAYGKQNDYMDHHNMIGWTREGNTAHPNSGLATIMSDGPGGNKWMYVGRNKAGQVWRDITGNRSGTVTINADGWGNFSVNGGSVSIWV

SEQ ID NO: 21494 - protein, 483 aa, Synthetic construct
HHNGTHGTMMQYFEWYLPNDGNHWNRLRSDASNLKDKGITAVWIPPAWKGASQNDVGYGAYDLYDLGEFNQKGTVRTKYGTRNQLQAAVTALKSNGIQVYGDVVMNHKGGADATTWVRAVEVNPSNRNQEVSGDYTIEAWTKFDFPGRGNTHSNFKWRWYHFDGVDWDQSRQLQNRIYKFRGDGKGWDWEVDTENGNYDYLMYADIDMDHPEVVNELRNWGVWYTNTLGLDGFRIDAVKHIKYSFTRDWLTHVRNTTGKNMFAVAEFWKNDIGAIENYLSKTNWNHSVFDVPLHYNLYNASRSGGNYDMRQIFNGTVVQRHPTHAVTFVDNHDSQPEEALESFVEEWFKPLAYALTLTRDQGYPSVFYGDYYGIPTHGVPAMKSKIDPILEARQKYAYGKQNDYLDHHNMIGWTREGNTAHPNSGLATIMSDGPGGNKWMYVGRNKAGQVWRDITGNRSGTVTINADGWGNFSVNGGSVSIWV

SEQ ID NO: 21495 - protein, 483 aa, Synthetic construct
HHNGTNGTMMQYFEWYLPNDGNHWNRLRSDASNLKDKGITAVWIPPAWKGASQNDVGYGAYDLYDLGEFNQKGTVRTKYGTRNQLQAAVTALKSNGIQVYGDVVMNHKGGADATEWVRAVEVNPSNRNQEVSGDYTIEAWTKFDFPGRGNTHSNFKWRWYHFDGVDWDQSRQLQNKIYKFRGDGKGWDWEVDTENGNYDYLMYADYDMDHPEVVNELRNWGVWYTNTLGLDGFRIDAVKHIKYSFTRDWLEHVRNTTGKNMFAVAEFWKNDIGAIENYLSKTNWNHSVFDVPLHYNLYNASRSGGNYDMRQIFNGTVVQRHPTHAVTFVDNHDSQPEEALESFVEEWFKPLAYALTLTRDQGYPSVFYGDYYGIPTHGVPAMKSKIDPILEARQKYAYGKQNDYLDHHNMIGWTREGNTAHPNSGLATIMSDGPGGNKWMYVGRNKAGQVWRDITGNRSGTVTINADGWGNFSVNGGSVSIWV

SEQ ID NO: 21496 - protein, 483 aa, Synthetic construct
HHNGTNGTMMQYFEWYLPNDGNHWNRLRSDASNLKDKGITAVWIPPAWKGASQNDVGYGAYDLYDLGEFNQKGTVRTKYGTRNQLQAAVTALKSNGIQVYGDVVMNHKGGADATEWVRAVEVNPSNRNQEVSGDYTIEAWTKFDFPGRGNTHSNFKWRWWHFDGVDWDQSRQLQNKIYKFRGDGKGWDWEVDTENGNYDYLMYADYDMDHPEVVNELRNWGVWYTNTLGLDGFRIDAVKHIKYSFTRDWLTHVRNTTGKNMFAVAEFWKNDIGAIENYLSKTNWNHSVFDVPLHYNLYNASRSGGNYDMRQIFNGTVVQRHPGHAVTFVDNHDSQPEEALESFVEEWFKPLAYALTLTRDQGYPSVFYGDYYGIPTHGVPAMKSKIDPILEARQKYAYGKQNDYMDHHNMIGWTREGNTAHPNSGLATIMSDGPGGNKWMYVGRNKAGQVWRDITGNRSGTVTINADGWGNFSVNGGSVSIWV

SEQ ID NO: 21497 - protein, 483 aa, Synthetic construct
HHNGTNGTMMQYFEWYLPNDGNHWNRLRSDASNLKDKGITAVWIPPAWKGASQNDVGYGAYDLYDLGEFNQKGTVRTKYGTRNQLQAAVTALKSNGIQVYGDVVMNHKGGADATEWVRAVEVNPSNRNQEVSGDYTIEAWTKFDFPGRGNTHSNFKWRWWHFDGVDWDQSRQLQNKIYKFRGDGKGWDWEVDTENGNYDYLMYADYDMDHPEVVNELRNWGVWYTNTLGLDGFRIDAVKHIKYSFTRDWLTHVRNTTGKNMFAVAEFWKNDIGAIENYLSKTNWNHSVFDVPLHYNLYNASRSGGNYDMRQIFNGTVVQRHPTHAVTFVDNHDSQPEEALESFVEEWFKPLAYALTLTRDQGYPSVFYGDYYGIPTHGVPAMKSKIDPILEARQKYAYGKQNDYLDHHNMIGWTREGNTAHPNSGLATIMSDGPGGNKWMYVGRNKAGQVWRDITGNRSGTVTINADGWGNFSVNGGSVSIWV

SEQ ID NO: 21498 - protein, 483 aa, Synthetic construct
HHNGTNGTMMQYFEWYLPNDGNHWHRLRSDASNLKDKGITAVWIPPAWKGASQNDVGYGAYDLYDLGEFNQKGTVRTKYGTRNQLQAAVTALKSNGIQVYGDVVMNHKGGADATEWVRAVEVNPSNRNQEVSGDYTIEAWTKFDFPGRGNTHSNFKWRWYHFDGVDWDQSRQLQNKIYKFRDDGKEWDWEVDTENGNYDYLMYADYDMDHPEVVNELRNWGVWYTNTLGLDGFRIDAVKHIKYSFTRDWLTHVRNTTGKNMFAVAEFWKNDIGAIENYLSKTNWNHSVFDVPLHYNLYNASRSGGNYDMRQIFNGTVVQRHPTHAVTFVDNHDSQPEEALESFVEEWFKPLAYALTLTRDQGYPSVFYGDYYGIPTHGVPAMKSKIDPILEARQKYAYGKQNDYLDHHNMIGWTREGNTAHPNSGLATIMSDGPGGNKWMYVGRNKAGQVWRDITGNRSGTVTINADGWGNFSVNGGSVSIWV

SEQ ID NO: 21499 - protein, 483 aa, Synthetic construct
HHNGTNGTMMQYFEWYLPNDGNHWNRLRSDASNLKDKGITAVWIPPAWKGASQNDVGYGAYDLYDLGEFNQKGTVRTKYGTRNQLQAAVTALKSNGIQVYGDVVMNHKGGADATEWVRAVEVNPSNRNQEVSGDYTIEAWTKFDFPGRGNTHSNFKWRWYHFDGVDWDQSRQLQNRIYKFRGDGKGWDWEVDTENGNYDYLMYADIDMDCPEVVNELRNWGVWYTNTLGLDGFRIDAVKHIKYSFTRDWLTHVRNTTGKNMFAVAEFWKNDIGAIENYLSKTNWNHSVFDVPLHYNLYNASRSGGNYDMRQIFNGTVVQRHPTHAVTFVDNHDSQPEEALESFVEEWFKPLAYALTLTRDQGMPSVFYGDYYGIPTHGVPAMKSKIDPILEARQKYAYGKQNDYLDHHNMIGWTREGNTAHPNSGLATIMSDGPGGNKWMYVGRNKAGQVWRDITGNRSGTVTINADGWGNFSVNGGSVSIWV

SEQ ID NO: 21500 - protein, 483 aa, Synthetic construct
HHNGTNGTMMQYFEWYLPNDGNHWNRLVSDASNLKDKGITAVWIPPAWKGASQNDVGYGAYDLYDLGEFNQKGTVRTKYGTRNQLQAAVTALKSNGIQVYGDVVMNHKGGADATEWVRAVEVNPSNRNQEVSGDYTIEAWTKFDFPGRGNTHSNFKWRWYHFDGVDWDQSRQLQNRIYKFRGDGKGWDWEVDTENGNYDYLMYADIDMDHPEVVNELRNWGVWYTNTLGLDGFRIDAVKHIKYSFTRDWLTHVRNTTGKNMFAVAEFWKNDIGAIENYLSKTNWNHSVFDVPLHYNLYNASRSGGNYDMRQIFNGTVVQRHPTHAVTFVDNHDSQPEEALESFVEEWFKPLAYALTLTRDQGYPSVFYGDYYGIPTHGVPAMKSKIDPILEAQQKYAYGKQNDYLDHHNMIGWTREGNTAHPNSGLATIMSDGPGGNKWMYVGRNKAGQVWRDITGNRSGTVTINADGWGNFSVNGGSVSIWV

SEQ ID NO: 21501 - protein, 483 aa, Synthetic construct
HHNGTNGTMMQYFEWYLPNDGNHWNRLRSDASNLKDKGITAVWIPPAWKGASQNDVGYGAYDLYDLGEFNQKGTVRTKYGTRNQLQAAVTALKSNGIQVYGDVVMNHKGGADATEWVRAVEVNPSNRNQEVSGDYTIEAWTKFDFPGRGNTHSNFKWRWYHFDGVDWDQSRQLQNRIYKFRGDGKGWDWEVDTENGNYDYLMYADIDMDHPEVVNELRNWGVWYTNTLGLDGFRIDAVKHIKYSFTRDWLTHVRNTTGKNMFAVAEFWKNDIGAIENYLSKTNWNHSVFDVPLHYNLYSASRSGGNYDMRQIFQGTVVQRHPTHAVTFVDNHDSQPEEALESFVEEWFKPLAYALTLTRDQGYPSVFYGDYYGIPTHGVPAMKSKIDPILEARQKYAYGKQNDYLDHHNMIGWTREGNTAHPNSGLATIMSDGPGGNKWMYVGRNKAGQVWRDITGNRSGTVTINADGWGNFSVNGGSVSIWV

SEQ ID NO: 21502 - protein, 483 aa, Synthetic construct
HHNGTNGTMMQYFEWYLPNDGNHWNRLRSDASNLKDKGITAVWIPPAWKGASQNDVGYGAYDLYDLGEFNQKGTVRTKYGTRNQLQAAVTALKSNGIQVYGDVVMNHKGGADATEWVRAVEVNPSNRNQEVSGDYTIEAWTKFDFPGRGNTHSNFKWRWWHFDGVDWDQSRQLHNRIYKFRGDGKGWDWEVDTENGNYDYLMYADIDMDHPEVVNELRNWGVWYTNTLGLDGFRIDAVKHIKYSFTRDWLTHVRNTTGKNMFAVAEFWKNDIGAIENYLSKTNWNHSVFDVPLHYNLYNASRSGGNYDMRQIFNGTVVQRHPTHAVTFVDNHDSQPEEALESFVEEWFKPLAYALTLTRDQGYPSVFYGDYYGIPTHGVPAMKSKIDPILEARQKYAYGKQNDYLDHHNMIGWTREGNTAHPNSGLATIMSDGPGGNKWMYVGRNKAGQVWRDITGNRSGTVTINADGWGNFSVNGGSVSIWV

SEQ ID NO: 21503 - protein, 483 aa, Synthetic construct
HHNGTNGTMMQYFEWYLPNDGNHWHRLRSDASNLKDKGITAVWIPPAWKGASQNDVGYGAYDLYDLGEFNQKGTVRTKYGTRNQLQAAVTALKSNGIQVYGDVVMNHKGGADATEWVRAVEVNPSNRNQEVSGDYTIEAWTKFDFPGRGNTHSNFKWRWYHFDGVDWDQSRQLQNRIYKFRGDGKEWDWEVDTENGNYDYLMYADYDMDHPEVVNELRNWGVWYTNTLGLDGFRIDAVKHIKYSFTRDWLTHVRNTTGKNMFAVAEFWKNDIGAIRNYLSKTNWNHSVFDVPLHYNLYNASRSGGNYDMRQIFNGTVVQRHPTHAVTFVDNHDSQPEEALESFVEEWFKPLAYALTLTRDQGYPSVFYGDYYGIPTHGVPAMKSKIDPILEARQKYAYGKQNDYMDHHNMIGWTREGNTAHPNSGLATIMSDGPGGNKWMYVGRNKAGQVWRDITGNRSGTVTINADGWGNFSVNGGSVSIWV

SEQ ID NO: 21504 - protein, 483 aa, Synthetic construct
HHNGTNGTMMQYFEWYLPNDGNHWNRLRSDASNLKDKGITAVWIPPAWKGASQNDVGYGAYDLYDLGEFNQKGTVRTKYGTRNQLQAAVTALKSNGIQVYGDVVMNHKGGADATEWVRAVEVNPSNRNQEVSGDYTIEAWTKFDFPGRGNTHSNFKWRWYHFDGVDWDQSRQLQNRIYKFRGDGKEWDWEVDTENGNYDYLMYADIDMDHPEVVNELRNWGVWYTNTLGLDGFRIDAVKHIKYSFTRDWLTHVRNTTGKNMFAVAEFWKNDIGAIENYLSKTNWNHSVFDVPLHYNLYNASRSGGNYDMRQIFEGTVVQRHPTHAVTFVDNHDSQPEEALESFVEEWFKPLAYALTLTRDQGYPSVFYGDYYGIPTHGVPAMKSKIDPILEARQKYAYGKQNDYLDHHNMIGWTREGNTEHPNSGLATIMSDGPGGNKWMYVGRNKAGQVWRDITGNRSGEVTINADGWGNFSVNGGSVSIWV

SEQ ID NO: 21505 - protein, 483 aa, Synthetic construct
HHNGTNGTMMQYFEWYLPNDGNHWNRLRSDASNLKDKGITAVWIPPAWKGASQNDVGYGAYDLYDLGEFNQKGTVRTKYGTRNQLQAAVTALKSNGIQVYGDVVMNHKGGADATEWVRAVEVNPSNRNQEVSGDYTIEAWTKFDFPGRGNTHSNFKWRWYHFDGVDWDQSRQLQNRIYKFRGDGKGWDWEVDTENGNYDYLMYADIDMDHPEVVNELRNWGVWYTNTLGLDGFRIDAVKHIKYSFTRDWLTHVRNTTGKNMFAVAEFWKNDIGAIENYLSKTNWNHSVFDVPLHYNLYNASRSGGNYDMRQIFNGTVVQRHPTHAVTFVDNHDSQPEEALESFVEEWFKPLCYALTLTRDQGYPSVFYGDYCGIPTHGVPAMKSKIDPILEARQKYAYGKQNDYLDHHNMIGWTREGNTAHPNSGLATIMSDGPGGNKWMYVGRNKAGQVWRDITGNRSGTVTINADGWGNFSVNGGSVSIWV

SEQ ID NO: 21506 - protein, 483 aa, Synthetic construct
HHNGTNGTMMQYFEWYLPNDGNHWYRLRSDASNLKDKGITAVWIPPAWKGASQNDVGYGAYDLYDLGEFNQKGTVRTKYGTRNQLQAAVTALKSNGIQVYGDVVMNHKGGADATEWVRAVEVNPSNRNQEVSGDYTIEAWTKFDFPGRGNTHSNFKWRWYHFDGVDWDQSRQLQNRIYKFRGDGKGWDWEVDTENGNYDYLMYADIDMDHPEVVNELRNWGVWYTNTLGLDGFRIDAVKHIKYSFTRDWLTHVRNTTGKNMFAVAEFWKNDIGAIENYLSKTNWNHSVFDVPLHYNLYNASRSGGNYDMRQIFNGTVVQRHPTHAVTFVDNHDSQPEEALESFVEEWFKPLAYALTLTRDQGYPSVFYGDYYGIPTHGVPAMKSKIDKILEARQKYAYGKQNDYLDHHNMIGWTREGNTAHPNSGLATIMSDGPGGNKWMYVGRNKAGQVWRDITGNRSGTVTINADGWGNFSVNGGSVSIWV

SEQ ID NO: 21507 - protein, 483 aa, Bacillus sp. 7-7
HHKGTNGTMMQYFEWYLPNDGNHWNRLRSDASNLKDKGITAVWIPPAWKGASQNDVGYGAYDLYDLGEFNQKGTVRTKYGTRNQLQAAVTALKSNGIQVYGDVVMNHKGGADATEWVRAVEVNPSNRNQEVSGDYTIEAWTKFDFPGRGNTHSNFKWRWYHFDGVDWDQSRQLQNRIYKFRGDGKGWDWEVDTENGNYDYLMYADIDMDHPEVVNELRNWGVWYTNTLGLDGFRIDAVKHIKYSFTRDWLTHVRNTTGKNMFAVAEFWKNDIGAIENYLSKTNWNHSVFDVPLHYNLYNASRSGGNYDMRQIFNGTVVQRHPTHAVTFVDNHDSQPEEALESFVEEWFKPLAYALTLTRDQGYPSVFYGDYYGIPTHGVPAMKSKIDPILEARQKYAYGKQNDYLDHHNMIGWTREGNTAHPNSGLATIMSDGPGGNKWMYVGRNKAGQVWRDITGNRSGTVTINADGWGNFSVXGGSVSIWV

SEQ ID NO: 21508 - protein, 483 aa, Synthetic construct
HHNGTNGTMMQYFEWYLPNDGNHWNRLRSDASNLKDKGITAVWIPPAWKGASQNDVGYGAYDLYDLGEFNQKGTVRTKYGTRNQLQAAVTALKSNGIQVYGDVVMNHKGGADATEWVRAVEVNPSNRNQEVSGDYTIEAWTKFDFPGRGNTHSNFKWRWYHFDGVDWDQSRQLQNRIYKFRGDGKGWDWEVDTENGNYDYLMYADIDMDHPEVVNELRNWGVWYTNTLGLDGFRIDAVKHIKYSFTRDWLTHVRNTTGKNMFAVAEFWKNDIGAIENYLSKTNWNHSVFDVPLHYNLYNASRSGGNYDMRQIFNGTVVQRHPTHAVTFVDNHDSQPEEALESFVEEWFKPLAYALTLTRDQGYPSVFYGDYYGIPTHGVPAMKSKIDPILEARQKYAGGKQNDYLDHHNMIGWTREGNTAHPNSGLATIMSDGSGGNKWMYVGRNKAGQVWRDITGNRSGTVTINADGWGNFSVNGGSVSIWV

SEQ ID NO: 21509 - protein, 483 aa, Synthetic construct
HHNGTNGTMMQYFEWYLPNDGNHWNRLRSDASNLKDKGITAVWIPPAWKGASQNDVGYGAYDLYDLGEFNQKGTVRTKYGTRNQLQAAVTALKSNGIQVYGDVVMNHKGGADATEWVRAVEVNPSDRNQEVSGDYTIEAWTKFDFPGRGNTHSNFKWRWYHFDGVDWDQSRQLQNRIYKFRGDGKGWDWEVDTENGNYDYLMYADIDMDHPEVVNELRNWGVWYTNTLGLDGFRIDAVKHIKYSFTRDWLTHVRNTTGKNMFAVAEFWKNDIGAIENYLSKTNWNHSVFDVPLHYNLYNASRSGGNYDMRQIFNGTVVQRHPTHAVTFVDNHDSQPEEALESFVEEWFKPLAYALTLTRDQGYPSVFYGDYYGIPTHGVPAMKSKINPILEARQKYAYGKQNDYLDHHNMIGWTREGNTAHPNSGLATIMSDGPGGNKWMYVGRNKAGQVWRDITGNRSGTVTINADGWGNFSVNGGSVSIWV

SEQ ID NO: 21510 - protein, 483 aa, Synthetic construct
HHNGTNGTMMQYFEWYLPNDGNHWHRLRSDASNLKDKGITAVWIPPAWKGASQNDVGYGAYDLYDLGEFNQKGTVRTKYGTRNQLQAAVTALKSNGIQVYGDVVMNHKGGADATEWVRAVEVNPSNRNQEVSGDYTIEAWTKFDFPGRGNTHSNFKWRWYHFDGVDWDQSRQLQNRIYKFRGDGKEWDWEVDTENGNYDYLMYADYDMDHPEVVNELRNWGVWYTNTLGLDGFRIDAVKHIKYSFTRDWLTHVRNTTGKNMFAVAEFWKNDIGAIRNYLSKTNWNHSVFDVPLHYNLYNASRSGGNYDMRQIFNGTVVQRHPGHAVTFVDNHDSQPEEALESFVEEWFKPLAYALTLTRDQGYPSVFYGDYYGIPTHGVPAMKSKIDPILEARQKYAYGKQNDYLDHHNMIGWTREGNTAHPNSGLATIMSDGPGGNKWMYVGRNKAGQVWRDITGNRSGTVTINADGWGNFSVNGGSVSIWV

SEQ ID NO: 21511 - protein, 483 aa, Synthetic construct
HHNGTNGTMMQYFEWYLPNDGNHWNRLRSDASNLKDKGITAVWIPPAWKGASQNDVGYGAYDLYDLGEFHQKGTVRTKYGTRNQLQAAVTALKSNGIQVYGDVVMNHKGGADATEWVRAVEVNPSNRNQEVSGDYTIEAWTKFDFPGRGNTHSNFKWRWYHFDGVDWDQSRQLQNRIYKFRGDGKGWDWEVDTENGNYDYLMYADIDMDHPEVVNELRNWGVWYTNTLGLDGFRIDAVKHIKYSFTRDWLTHVRNTTGKNMFAVAEFWKNDIGAIENYLSKTNWNHSVFDVPLHYNLYNASRSGGNYDMRQIFNGTVVQRHPTHAVTFVDNHDSQPEEALESFVEEWFKPLAYALTLTRDQGYPSVFYGDYYGIPTHGVPAMKSKIDPILEARQKYAYGKQNDYLDHHNMIGWTREGNTAHPNSGLATIMSDGPGGNKWMYVGRNKAGQVWRDITGNRSGAVTINADGWGNFSVNGGSVSIWV

SEQ ID NO: 21512 - protein, 483 aa, Synthetic construct
HHNGTHGTMMQYFEWYLPNDGNHWNRLRSDASNLKDKGITAVWIPPAWKGASQNDVGYGAYDLYDLGEFNQKGTVRTKYGTRNQLQAAVTALKSNGIQVYGDVVMNHKGGADATEWVRAVEVNPSNRNQEVSGDYTIEAWTKFDFPGRGNTHSNFKWRWYHFDGVDWDQSRQLQNRIYKFRGDGKGWDWEVDTENGNYDYLMYADIDMDHPEVVNELRNWGVWYTNTLGLDGFRIDAVKHIKYSFTRDWLTHVRNTTGKNMFAVAEFWKNDIGAIENYLSKTNWNHSVFDVPLHYNLYNASRSGGNYDMRQIFNGTVVQRHPTHAVTFVDNHDSQPEEALESFVEEWFKPLAYALTLTRDQGYPSVFYGDYYGIPTHGVPAMKSKIDPIFEARQKYAYGKQNDYLDHHNMIGWTREGNTAHPNSGLATIMSDGPGGNKWMYVGRNKAGQVWRDITGNRSGTVTINADGWGNFSVNGGSVSIWV

SEQ ID NO: 21513 - protein, 483 aa, Synthetic construct
HHNGTNGTMMQYFEWYLPNDGNHWNRLRSDASNLKDKGITAVWIPPAWKGASQNDVGYGAYDLYDLGEFNQKGTVRTKYGTRNQLQAAVTALKSNGIQVYGDVVMNHKGGADATEWVRAVEVNPSNRNQEVSGDYTIEAWTKFDFPGRGNTHSNFKWRWYHFDGVDWDQSRQLQNKIYKFRGDGKGWDWEVDTENGNYDYLMYADYDMDHPEVVNELRNWGVWYTNTLGLDGFRIDAVKHIKYSFTRDWLTHVRNTTGKNMFAVAEFWKNDIGAIRNYLSKTNWNHSVFDVPLHYNLYNASRSGGNYDMRQIFNGTVVQRHPTHAVTFVDNHDSQPEEALESFVEEWFKPLAYALTLTRDQGYPSVFYGDYYGIPTHGVPAMKSKIDPILEARQKYAYGKQNDYLDHHNMIGWTREGNTAHPNSGLATIMSDGPGGNKWMYVGRNKAGQVWRDITGNRSGTVTINADGWGNFSVNGGSVSIWV

SEQ ID NO: 21514 - protein, 483 aa, Synthetic construct
HHNGTNGTMMQYFEWYLPNDGNHWNRLRSDASNLKDKGITAVWIPPAWKGASQNDVGYGAYDLYDLGEFNQKGTVRTKYGTRNQLQAAVTALKSNGIQVYGDVVMNHKGGADATEWVRAVEVNPSNRNQEVSGDYTIEAWTKFDFPGRGNTHSNFKWRWWHFDGVDWDQSRQLQNRIYKFRGDGKGWDWEVDTENGNYDYLMYADIDMDHPEVVNELRNWGVWYTNTLGLDGFRIDAVKHIKYSFTRDWLEHVRNTTGKNMFAVAEFWKNDIGAIENYLSKTNWNHSVFDVPLHYNLYNASRSGGNYDMRQIFNGTVVQRHPTHAVTFVDNHDSQPEEALESFVEEWFKPLAYALTLTRDQGYPSVFYGDYYGIPTHGVPAMKSKIDPILEARQKYAYGKQNDYLDHHNMIGWTREGNTAHPNSGLATIMSDGPGGNKWMYVGRNKAGQVWRDITGNRSGTVTINADGWGNFSVNGGSVSIWV

SEQ ID NO: 21515 - protein, 483 aa, Synthetic construct
HHNQTNGTMMQYFEWYLPNDGNHWNRLRSDASNLKDKGITAVWIPPAWKGASQNDVGYGAYDLYDLGEFNQKGTVRTKYGTRNQLQAAVTALKSNGIQVYGDVVMNHKGGADATEWVRAVEVNPSNRNQEVSGDYTIEAWTKFDFPGRGNTHSNFKWRWYHFDGVDWDQSRQLQNKIYKFRGDGKEWDWEVDTENGNYDYLMYADIDMDHPEVVNELRNWGVWYTNTLGLDGFRIDAVKHIKYSFTRDWLTHVRNTTGKNMFAVAEFWKNDIGAIENYLSKTNWNHSVFDVPLHYNLYNASRSGGNYDMRQIFNGTVVQRHPGHAVTFVDNHDSQPEEALESFVEEWFKPLAYALTLTRDQGYPSVFYGDYYGIPTHGVPAMKSKIDPILEARQKYAYGKQNDYMDHHNMIGWTREGNTAHPNSGLATIMSDGPGGNKWMYVGRNKAGQVWRDITGNRSGTVTINADGWGNFSVNGGSVSIWV

SEQ ID NO: 21516 - protein, 483 aa, Synthetic construct
HHNGTNGTMMQYFEWYLPNDGNHWNRLRSDASNLKDKGITAVWIPPAWKGASQNDVGYGAYDLYDLGEFNQCGTVRTKYGTRNQLQAAVTALKSNGIQVYGDVVMNHKGGADATEWVRAVEVNPSNRNQEVSGDYTIEAWTKFDFPGRGNTHSNFKWRWYHFDGVDWDQSRQLQNRIYKFRGDGKGWDWEVDTENGNYDYLMYADIDMDHPEVVNELRNWGVWYTNTLGLDGFRIDAVKHIKYSFTRDWLTHVRNTTGKNMFAVAEFWKNDIGAIENYLSKTNWNHSVFDVPLHYNLYNASRSGGNYDMRQIFNGTVVQRHPTHAVTFVDNHDSQPEEALESFVEEWFKPLAYALTLTRDQGYPSVFYGDYYGIPTHGVPAMKSKIDPILEARQKYAYGKQNDYLDHHNMIGWTREGFTAHPNSGLATIMSDGPGGNKWMYVGRNKAGQVWRDITGNRSGTVTINADGWGNFSVNGGSVSIWV

SEQ ID NO: 21517 - protein, 483 aa, Synthetic construct
HHNGTNGTMMQYFEWYLPNDGNHWNRLRSDASNLKDKGITAVWIPPAWKGASQNDVGYGAYDLYDLGEFNQKGTLRTKYGTRNQLQAAVTALKSNGIQVYGDVVMNHKGGADATEWVRAVEVNPSNRNQEVSGDYTIEAWTKFDFPGRGNTHSNFKWRWYHFDGVDWDQSRQLQNRIYKFRGDGKGWDWEVDTENGNYDYLMYADIDMDHPEVVNELRNWGVWYTNTLGLDGFRIDAVKHIKYSFTRDWLTHVRNTTGKNMFAVAEFWKNDIGAIENYLSKTNWNHSVFDVPLHYNLYNASRSGGNYDMRQIFNGTVVKRHPTHAVTFVDNHDSQPEEALESFVEEWFKPLAYALTLTRDQGYPSVFYGDYYGIPTHGVPAMKSKIDPILEARQKYAYGKQNDYLDHHNMIGWTREGNTAHPNSGLATIMSDGPGGNKWMYVGRNKAGQVWRDITGNRSGTVTINADGWGNFSVNGGSVSIWV

SEQ ID NO: 21518 - protein, 483 aa, Synthetic construct
HHNGTNGTMMQYFEWYLPNDGNHWHRLRSDASNLKDKGITAVWIPPAWKGASQNDVGYGAYDLYDLGEFNQKGTVRTKYGTRNQLQAAVTALKSNGIQVYGDVVMNHKGGADATEWVRAVEVNPSNRNQEVSGDYTIEAWTKFDFPGRGNTHSNFKWRWYHFDGVDWDQSRQLQNKIYKFRGDGKEWDWEVDEENGNYDYLMYADYDMDHPEVVNELRNWGVWYTNTLGLDGFRIDAVKHIKYSFTRDWLTHVRNTTGKNMFAVAEFWKNDIGAIENYLSKTNWNHSVFDVPLHYNLYNASRSGGNYDMRQIFNGTVVQRHPTHAVTFVDNHDSQPEEALESFVEEWFKPLAYALTLTRDQGYPSVFYGDYYGIPTHGVPAMKSKIDPILEARQKYAYGKQNDYLDHHNMIGWTREGNTAHPNSGLATIMSDGPGGNKWMYVGRNKAGQVWRDITGNRSGTVTINADGWGNFSVNGGSVSIWV

SEQ ID NO: 21519 - protein, 483 aa, Synthetic construct
HHNGTNGTMMQYFEWYLPNDGNHWNRLRSDASNLKDKGITAVWIPPAWKGASQNDVGYGAYDLYDLGEFNQKGTVRTKYGTRNQLQAAVTALKSNGIQVYGDVVMNHKGGADATEWVRAVEVNPSNRNQEVSGYYTIEAWTKFDFPGRGNTHSNFKWRWYHFDGVDWDQSRQLQNRIYKFRGDGKGWDWEVDTENGNYDYLMYADIDMDHPEVVNELRNWGVWYTNTLGLDGFRIDAVKHIKYSFTRDWLTHVRNTTGKNMFAVAEFWKNDIGAIENYLSKTNWNHSVFDVPLHYNLYNASRSGGNYDMRQIFNGTVVQRHPTHAVTFVDNHDSQPEEALESFVEEWFKPLAYALTLTRDQGYPSVFYGDYYGIPTHGVPAMKSKIDPILEAQQKYAYGKQNDYLDHHNMIGWTREGNTAHPNSGLATIMSDGPGGNKWMYVGRNKAGQVWRDITGNRSGTVTINADGWGNFSVNGGSVSIWV

SEQ ID NO: 21520 - protein, 483 aa, Synthetic construct
HHNGTNGTMMQYFEWYLPNDGNHWNRLRSDASNLKDKGITAVWIPPAWKGASQNDVGYGAYDLYDLGEFNQKGTVRTKYGTRNQLQDAVTALKSNGIQVYGDVVMNHKGGADATEWVRAVEVNPSNRNQEVSGDYTIEAWTKFDFPGRGNTHSNFKWRWDHFDGVDWDQSRQLQNRIYKFRGDGKEWDWEVDTENGNYDYLMYADIDMDHPEVVNELRNWGVWYTNTLGLDGFRIDAVKHIKYSFTRDWLTHVRNTTGKNMFAVAEFWKNDIGAIENYLSKTNWNHSVFDVPLHYNLYNASRSGGNYDMRQIFNGTVVQRHPTHAVTFVDNHDSQPEEALESFVEEWFKPLAYALTLTRDQGYPSVFYGDYYGIPTHGVPAMKSKIDPILEARQKYAYGKQNDYLDHHNMIGWTREGNTAHPNSGLATIMSDGPGGNKWMYVGRNKAGQVWRDITGNRSGEVTINADGWGNFSVNGGSVSIWV

SEQ ID NO: 21521 - protein, 483 aa, Synthetic construct
HHNGTNGTMMQYFEWYLPNDGNHWNRLRSDASNLKDKGITAVWIPPAWKGASQNDVGYGAYDLYDLGEFNQKGTVRTKYGTRNQLQAAVTALKSNGIQVYGDVVMNHKGGADATEWVRAVEVNPSNRNQEVSGDYTIEAWTKFDFPGRGNTHSNFKWRWWHFDGVDWDQSRQLQNKIYKFRGDGKEWDWEVDEENGNYDYLMYADYDMDHPEVVNELRNWGVWYTNTLGLDGFRIDAVKHIKYSFTRDWLTHVRNTTGKNMFAVAEFWKNDIGAIENYLSKTNWNHSVFDVPLHYNLYNASRSGGNYDMRQIFNGTVVQRHPTHAVTFVDNHDSQPEEALESFVEEWFKPLAYALTLTRDQGYPSVFYGDYYGIPTHGVPAMKSKIDPILEARQKYAYGKQNDYLDHHNMIGWTREGNTAHPNSGLATIMSDGPGGNKWMYVGRNKAGQVWRDITGNRSGTVTINADGWGNFSVNGGSVSIWV

SEQ ID NO: 21522 - protein, 483 aa, Synthetic construct
HHNGTNGTMMQYFEWYLPNDGNHWHRLRSDASNLKDKGITAVWIPPAWKGASQNDVGYGAYDLYDLGEFNQKGTVRTKYGTRNQLQAAVTALKSNGIQVYGDVVMNHKGGADATEWVRAVEVNPSNRNQEVSGDYTIEAWTKFDFPGRGNTHSNFKWRWWHFDGVDWDQSRQLQNRIYKFRGDGKEWDWEVDTENGNYDYLMYADYDMDHPEVVNELRNWGVWYTNTLGLDGFRIDAVKHIKYSFTRDWLTHVRNTTGKNMFAVAEFWKNDIGAIENYLSKTNWNHSVFDVPLHYNLYNASRSGGNYDMRQIFNGTVVQRHPTHAVTFVDNHDSQPEEALESFVEEWFKPLAYALTLTRDQGYPSVFYGDYYGIPTHGVPAMKSKIDPILEARQKYAYGKQNDYLDHHNMIGWTREGNTAHPNSGLATIMSDGPGGNKWMYVGRNKAGQVWRDITGNRSGTVTINADGWGNFSVNGGSVSIWV

SEQ ID NO: 21523 - protein, 483 aa, Synthetic construct
HHNQTNGTMMQYFEWYLPNDGNHWNRLRSDASNLKDKGITAVWIPPAWKGASQNDVGYGAYDLYDLGEFNQKGTVRTKYGTRNQLQAAVTALKSNGIQVYGDVVMNHKGGADATEWVRAVEVNPSNRNQEVSGDYTIEAWTKFDFPGRGNTHSNFKWRWYHFDGVDWDQSRQLQNKIYKFRGDGKGWDWEVDTENGNYDYLMYADYDMDHPEVVNELRNWGVWYTNTLGLDGFRIDAVKHIKYSFTRDWLTHVRNTTGKNMFAVAEFWKNDIGAIENYLSKTNWNHSVFDVPLHYNLYNASRSGGNYDMRQIFNGTVVQRHPTHAVTFVDNHDSQPEEALESFVEEWFKPLAYALTLTRDQGYPSVFYGDYYGIPTHGVPAMKSKIDPILEARQKYAYGKQNDYLDHHNMIGWTREGNTAHPNSGLATIMSDGPGGNKWMYVGRNKAGQVWRDITGNRSGTVTINADGWGNFSVNGGSVSIWV

SEQ ID NO: 21524 - protein, 483 aa, Synthetic construct
HHNGTNGTMMQYFEWYLPNDGNHWNRLRSDASNLKDKGITAVWIPPAWKGASQNDVGYGAYDLYDLGEFNQKGTVRTKYGTRNQLQAAVTALKSNGIQVYGDVVMNHKGGADATEWVRAVEVNPSNRNQEVSGDYTIEAWTKFDFPGRGNTHSNFKWRWYHFDGVDWDQSRQLQNRIYKFRGDGKGWDWEVDTENGNYDYLMYADIDMDHPEVVNELRNWGVWYTNTLGLDGFRIDAVKHIKYSFTRDWLTHVRNTTGKNMFAVAEFWKNDIGAIENYLSKTNWNHSVFDVPLHYNLYNASRSGGNYDMRQIFNGTVVQRHPTHAVTFVDNHDSQPEEALESFVEEWFKPLAYALTLTRDQGSPSVFFGDYYGIPTHGVPAMKSKIDPILEARQKYAYGKQNDYLDHHNMIGWTREGNTAHPNSGLATIMSDGPGGNKWMYVGRNKAGQVWRDITGNRSGTVTINADGWGNFSVNGGSVSIWV

SEQ ID NO: 21525 - protein, 483 aa, Synthetic construct
HHNGTNGTMMQYFEWYLPNDGNHWNRLRSDASNLKDKGITAVWIPPAWKGASQNDVGYGAYDLYDLGEFNQKGTVRTKYGTRNQLQAAVTALKSNGIQVYGDVVMNHKGGADATEWVRAVEVNPSNRNQEVSGDYTIEAWTKFDFPGRGNTHSNFKWRWWHFDGVDWDQSRQLQNKIYKFRGDGKGWDWEVDTENGNYDYLMYADYDMDHPEVVNELRNWGVWYTNTLGLDGFRIDAVKHIKYSFTRDWLTHVRNTTGKNMFAVAEFWKNDIGAIENYLSKTNWNHSVFDVPLHYNLYNASRSGGNYDMRQIFNGTVVQRHPTHAVTFVDNHDSQPEEALESFVEEWFKPLAYALTLTRDQGYPSVFYGDYYGIPTHGVPAMKSKIDPILEARQKYAYGKQNDYMDHHNMIGWTREGNTAHPNSGLATIMSDGPGGNKWMYVGRNKAGQVWRDITGNRSGTVTINADGWGNFSVNGGSVSIWV

SEQ ID NO: 21526 - protein, 483 aa, Bacillus sp. NCIB 12512
HHNGTNGTMMQYFEWYLPNDGNHWNRLRDDAANLKSKGITAVWIPPAWKGTSQNDVGYGAYDLYDLGEFNQKGTVRTKYGTRNQLQAAVTSLKNNGIQVYGDVVMNHKGGADGTEIVNAVEVNRSNRNQETSGEYAIEAWTKFDFPGRGNNHSSFKWRWYHFDGTDWDQSRQLQNKIYKFRGTGKAWDWEVDTENGNYDYLMYADVDMDHPEVIHELRNWGVWYTNTLNLDGFRIDAVKHIKYSFTRDWLTHVRNTTGKPMFAVAEFWKNDLGAIENYLNKTSWNHSVFDVPLHYNLYNASNSGGYYDMRNILNGSVVQKHPTHAVTFVDNHDSQPGEALESFVQQWFKPLAYALVLTREQGYPSVFYGDYYGIPTHGVPAMKSKIDPLLQARQTFAYGTQHDYFDHHDIIGWTREGNSSHPNSGLATIMSDGPGGNKWMYVGKNKAGQVWRDITGNRTGTVTINADGWGNFSVNGGSVSVWV

SEQ ID NO: 21527 - protein, 483 aa, Bacillus sp. NCIB 12513
HHNGTNGTMMQYFEWHLPNDGNHWNRLRDDASNLRNRGITAIWIPPAWKGTSQNDVGYGAYDLYDLGEFNQKGTVRTKYGTRSQLESAIHALKNNGVQVYGDVVMNHKGGADATENVLAVEVNPNNRNQEISGDYTIEAWTKFDFPGRGNTYSDFKWRWYHFDGVDWDQSRQFQNRIYKFRGDGKAWDWEVDSENGNYDYLMYADVDMDHPEVVNELRRWGEWYTNTLNLDGFRIDAVKHIKYSFTRDWLTHVRNATGKEMFAVAEFWKNDLGALENYLNKTNWNHSVFDVPLHYNLYNASNSGGNYDMAKLLNGTVVQKHPMHAVTFVDNHDSQPGESLESFVQEWFKPLAYALILTREQGYPSVFYGDYYGIPTHSVPAMKAKIDPILEARQNFAYGTQHDYFDHHNIIGWTREGNTTHPNSGLATIMSDGPGGEKWMYVGQNKAGQVWHDITGNKPGTVTINADGWANFSVNGGSVSIWV

SEQ ID NO: 21528 - protein, 482 aa, Synthetic construct
APVNGTMMQYFEWDLPNDGTLWTKVKNEAANLSSLGITALWLPPAYKGTSQSDVGYGVYDLYDLGEFNQKGTIRTKYGTKTQYIQAIQAAKAAGMQVYADVVFDHKGGADGTEWVDAVEVNPSDRNQEISGTYQIQAWTKFDFPGRGNTYSSFKWRWYHFDGVDWDESRKLSRIYKFRGIGKAWDWEVDTENGNYDYLMYADLDMDHPEVVAELKNWGKWYVNTTNVDGFRLDAVKHIKYSFFPDWLSYVRNQTGKNLFAVGEFWSYDVNKLHNYITKTNGTMSLFDAPLHNNFYIASKSSGYFDMRYLLNNTLMKDQPALAVTLVDNHDTQPGQSLQSWVEPWFKPLAYAFILTRQEGYPCVFYGDYYGIPKYNIPGLKSKIDPLLIARRDYAYGTQRDYIDHPDIIGWTREGIDAKPNSGLAALITDGPGGSKWMYVGKKHAGKVFYDLTGNRSDTVTINADGWGQFKVNGGSVSIWVAK

SEQ ID NO: 21529 - protein, 491 aa, Geobacillus stearothermophilus
AAPFNGTMMQYFEWYLPDDGTLWTKVANEANNLSSLGITALWLPPAYKGTSRSDVGYGVYDLYDLGEFNQKGTVRTKYGTKAQYLQAIQAAHAAGMQVYADVVFNHKAGADETEVFKVIEVDPNDRTKEISEPFEIEGWTKFTFPGRGDQYSSFKWNSEHFNGTDFDAKGERTGVFRIAGKKWNWEVDTEFGNYDYLMFANIDYNHPDVVTELKNWGKWYVNTTNIDGFRLDAVKHIKFSFFPDWLSYVRSQTGKPLFTVGEYWSYDINKLHNYITKTDGTMSLFDAPLHNKFYTASKSGGAFDMRTLMTNTLMKDQPTLAVTFVDNHDTEPGQALQSWVDPWFKPLAYAFILTRQEGYPCVFYGDYYGIPQYNIPSLKSKIDPLLIARRDYAYGTQHDYLDHSNIIGWTREGGTEKPGSGLAALITNGDGGSKWMYVGKQHAGKVFYDLTGNRSDTVTINSDGWGEFKVNGKSVSVWVPRKTTVSTIARP

SEQ ID NO: 21530 - protein, 491 aa, Unidentified
AAPFNGTMMQYFEWYLPDDGTLWTKVANEANNLSSLGITALWLPPAYKGTSRSDVGYGVYDLYDLGEFNQKGTVRTKYGTKAQYLQAIQAAHAAGMQVYADVVFDHKAGADETEVFKVIEVDPNDRTKEISEPFEIEGWTKFTFPGRGDQYSSFKWNSEHFNGVDFDAKGERTGVFRIAGKAWNWEVDTEFGNYDYLMFANIDYNHPDVVTELKNWGKWVVQTTNIDGFRLDAVKHIKFQFFPDWLSYVRSQTGKPLFTVGEYWSYDINKLHNYITKTDGTTSLFDAPLHNKFYTASKSGGAFDLRTLMTNTLMKDQPTLAVTFVDNHDTEPGQALQSWVDPWFKPLAYAFILTRQEGYPCVFYGDYYGIPQYNIPSLKSKIDPLLIARRDYAYGTQHDYLDHSNIIGWTREGGTEKPGSGLAALITNGDGGSKWMYVGKQHAGKVFYDLTGNRSDTVTINSDGWGEFKVNGGSVSVWVPRKTTVSTIARP

SEQ ID NO: 21531 - protein, 491 aa, Unidentified
AAPFNGTMMQYFEWYLPDDGTLWTKVANEANNLSSLGITALWLPPAYKGTSRSDVGYGVYDLYDLGEFNQKGTVRTKYGTKAQYLQAIQAAHAAGMQVYADVVFNHKAGADETEVFKVIEVDPNDRTKEISEPFEIEGWTKFTFPGRGDQYSSFKWNSEHFNGTDFDAKGERTGVFRIAGKAWNWEVDTEFGNYDYLMFANIDYNHPDVVTELKNWGKWYVNTTNIDGFRLDAVKHIKFSFFPDWLSYVRSQTGKPLFTVGEYWSYDLNKLHNYITKTDGTMSLFDAPLHNKFYTASKSGGAFDMRTLMTNTLMKDQPTLAVTFVDNHDTEPGQALQSWVDPWFKPLAYAFILTRQEGYPCVFYGDYYGIPQYNIPSLKSKIDPLLIARRDYAYGTQHDYLDHSNIIGWTREGGTEKPGSGLAALITNGDGGSKWMYVGKQHAGKVFYDLTGNRSDTVTINSDGWGEFKVNGGSVSVWVPRKTTVSTIARP

SEQ ID NO: 21532 - protein, 491 aa, Unidentified
AAPFNGTMMQYFEWYLPDDGTLWTKVANEANNLSSLGITALWLPPAYKGTSRSDVGYGVYDLYDLGEFNQKGTVRTKYGTKAQYLQAIQAAHAAGMQVYADVVFDHKAGADETEVFKVIEVDPNDRTKEISEPFEIEGWTKFTFPGRGDQYSSFKWNSEHFNGTDFDAKGERTGVFRIAGKKWNWEVDTEFGNYDYLMFANIDYNHPDVVTELKNWGPWYVLTTNIDGFRLDAVKHIKFSFFPDWLSYVRSQTGKPLFTVGEYWSYDINKLHNYITKTDGTMSLFDAPLHNKFYTASKSGGAFDMRTLMTNTLMKDQPTLAVTFVDNHDTEPGQALQSWVDPWFKPLAYAFILTRQEGYPCVFYGDYYGIPQYNIPSLKSKIDPLLIARRDYAYGTQHDYLDHSNIIGWTREGGTEKPGSGLAALITNGDGGSKWMYVGKQHAGKVFYDLTGNRSDTVTINSDGWGEFKVNGGSVSVWVPRKTTVSTIARP

SEQ ID NO: 21533 - protein, 491 aa, Geobacillus stearothermophilus
AAPFNGTMMQYFEWYLPDDGTLWTKVANEANNLSSLGITALWLPPAYKGTSGYDVGYGVYDLYDLGEFNQKGTVRTKYGTKAQYLQAIQAAHAAGMQVYADVVFDHKAGADETEVFKVIEVDPNDRTKEISEPFEIEGWTKFTFPGRGDQYSSFKWNSEHFNGTDFDAKGERTGVFRIAGKAWNWEVDTEFGNYDYLMFANIDYNHPDVVTELKNWGKWYVNTTNIDGFRLDAVKHIKFSFFPDWLSYVRSQTGKPLFTVGEYWSYDINKLHNYITKTDGTMSLFDAPLHNKFYTASKSGGAFDMRTLMTNTLMKDQPTLAVTFVDNHDTEPGQALQSWVDPWFKPLAYAFILTRQEGYPCVFYGDYYGIPQYNIPSLKSKIDPLLIARRDYAYGTQHDYLDHSNIIGWTREGGTEKPGSGLAALITNGDGGSKWMYVGKQHAGKVFYDLTGNRSDTVTINSDGWGEFKVNGGSVSVWVPRKTTVSTIARP

SEQ ID NO: 21534 - protein, 491 aa, Unidentified
AAPFNGTMMQYFEWYLPDDGTLWTKVANEANNLSSLGITALWLPPAYKGTSRSDVGYGVYDLYDLGEFNQKGTVRTKYGTKAQYLQAIQAAHAAGMQVYADVVFDHKAGADETEVFKVIEVDPNDRTKEISEPFEIEGWTKFTFPGRGDTYSSFKWNSEHFNGTDFDAKGERTGVFRIAGKAWNWEVDTEFGNYDYLMFANIDYNHPDVVTELKNWGKWYVNTTNIDGFRLDAVKHIKFSFFPDWLSYVRSQTGKPLFTVGEYWSYDINKLHNYITKTDGTMSLFDAPLHNKFYTASKKGRDFDMRTLMTNTLMKDQPTLAVTFVDNHDTEPGQALQSWVDPWFKPLAYAFILTRQEGYPCVFYGDYYGIPQYNIPSLKSKIDPLLIARRDYAYGTQHDYLDHSNIIGWTREGGTEKPGSGLAALITNGDGGSKWMYVGKQHAGKVFYDLTGNRSDTVTINSDGWGEFKVNGGSVSVWVPRKTTVSTIARP

SEQ ID NO: 21535 - protein, 491 aa, Unidentified
AAPFNGTMMQYFEWYLPDDGTLWTKVANEANNLSSLGITALWLPPAYKGTSRSDVGYGVYDLYDLGEFNQKGTVRTKYGTKAQYLQAIQAAHAAGMQVYLDVVFDHKAGADETEVFKVIEVDPNDRTKEISEPFEIEGWTKFTFPGRGDQYSSFKWNSEHFNGVDFDAKGERTGVFRIAGKAWNWEVDTEFGNYDYLMFANIDYNHPDVVTELKNWGKWVVNTTNIDGFRLDAVKHIKFSFFPDWLSYVRSQTGKPLFTVGEYWSYDINKLHNYITKTDGTMSLFDAPLHNKFYTASKSGGAFDLRTLMTNTLMKDQPTLAVTFVDNHDTEPGQALQSWVDPWFKPLAYAFILTRQEGYPCVFYGDYYGIPQYNIPSLKSKIDPLLIARRDYAYGTQHDYLDHSNIIGWTREGGTEKPGSGLAALITNGDGGSKWMYVGKQHAGKVFYDLTGNRSDTVTINSDGWGEFKVNGGSVSVWVPRKTTVSTIARP

SEQ ID NO: 21536 - protein, 491 aa, Unidentified
AAPFNGTMMQYFEWYLPDDGTLWTKVANEANNLSSLGITALWLPPAYKGTSRSDVGYGVYDLYDLGEFNQKGTVRTKYGTKAQYLQAIQAAHAAGMQVYADVVFNHKAGADETEVFKVIEVDPNDRTKEISEPFEIEGWTKFTFPGRGDQYSSFKWNSEHFNGTDFDAKGERTGVFRIAGKKWNWEVDTEFGNYDYLMFANIDYNHPDVVTELKNWGKWYVNTTNIDGFRLDAVKHIKFSFFPDWLSYVRSQTGKPLFTVGEYWSYDINKLHNYITKTDGTMSLFDAPLHNKFYTASKSGGAFDMRTLMTNTLMKDQPTLAVTFVDNHDTEPGQALQSWVDPWFKPLAYAFILTRQEGYPCVFYGDYYGIPQYNIPSLKSKIDPLLIARRDYAYGTQHDYLDHSNIIGWTREGGTEKPGSGLAALITNGDGGSKWMYVGKQHAGKVFYDLTGNRSDTVTINSDGWGEFKVNGQSVSVWVPRKTTVSTIARP

SEQ ID NO: 21537 - protein, 485 aa, Synthetic construct
HHNGTNGTMMQYFEWYLPNDGNHWNRLRDDAANLKSKGITAVWIPPAWKGTSQNDVGYGAYDLYDLGEFNQKGTVRTKYGTRNQLQAAVTSLKNNGIQVYGDVVMNHKGGADGTEIVNAVEVNRSNRNQETSGEYAIEAWTKFDFPGRGNNHSSFKWRWYHFDGTDWDQSRQLQNKIYKFRGTGKAWDWEVDTENGNYDYLMYADVNMDHPEVIHELRNWGVWYTNTLNLDGFRIDAVKHIKYSFTRDWLTHVRNTTGKPMFAVAEFWKNDLGAIENYLNKTSWNHSVFDVPLHYNLYNASNSGGYYDMRNILNGSVVQKHPTHAVTFVDNHDSQPGEALESFVQQWFKPLAYALVLTREQGYPSVFYGDYYGIPTHGVPAMKSKIDPLLQARQTFAYGTQHDYFDHHDIIGWTREGNSSHPNSGLATIMSDGPGGNKWMYVGKNKAGQVWRDITGNRTGTVTINADGWGNFSVNGGSVSVWVKQ

SEQ ID NO: 21538 - protein, 484 aa, Bacillus licheniformis
HHNGTNGTMMQYFEWHLPNDGQHWNRLRNDAANLKNLGITAVWIPPAWKGTSQNDVGYGAYDLYDLGEFNQKGTIRTKYGTRSQLQSAIASLQNNGIQVYGDVVMNHKGGADGTEWVQAVEVNPSNRNQEVTGEYTIEAWTKFDFPGRGNTHSSFKWRWYHFDGTDWDQSRRLNNRIYKFTGKGWDWEVDTENGNYDYLMYADVDMDHPEVINELRRWGVWYTNTLNLDGFRIDAVKHIKYSFTRDWLNHVRSTTGKNNMFAVAEFWKNDLGAIENYLHKTNWNHSVFDVPLHYNLYNASKSGGNYDMRQILNGTVVSKHPMHAVTFVDNHDSQPAEALESFVEAWFKPLAYALILTREQGYPSVFYGDYYGIPTHGVAAMKGKIDPILEARQKYAYGTQHDYLDHHNIIGWTREGNSAHPNSGLATIMSDGPGGSKWMYVGRHKAGQVWRDITGNRTGTVTINADGWGNFSVNGGSVSIWVNK

SEQ ID NO: 21539 - protein, 485 aa, Synthetic construct
HHNGTNGTMMQYFEWYLPNDGNHWNRLRSDASNLKDKGITAVWIPPAWKGASQNDVGYGAYDLYDLGEFNQKGTVRTKYGTRNQLQAAVTALKSNGIQVYGDVVMNHKGGADATEWVRAVEVNPSNRNQEVSGDYTIEAWTKFDFPGRGNTHSNFKWRWYHFDGVDWDQSRQLQNRIYKFRGDGKEWDWEVDTENGNYDYLMYADIDMDHPEVVNELRNWGVWYTNTLGLDGFRIDAVKHIKYSFTRDWLTHVRNTTGKNMFAVAEFWKNDIGAIENYLSKTNWNHSVFDVPLHYNLYNASRSGGNYDMRQIFNGTVVQRHPTHAVTFVDNHDSQPEEALESFVEEWFKPLAYALTLTRDQGYPSVFYGDYYGIPTHGVPAMKSKIDPILEARQKYAYGKQNDYLDHHNMIGWTREGNTAHPNSGLATIMSDGPGGNKWMYVGRNKAGQVWRDITGNRSDTVTINADGWGEFSVNGGSVSIWVNR

SEQ ID NO: 21540 - protein, 485 aa, Synthetic construct
HHNGTNGTMMQYFEWYLPNDGNHWNRLRDDAANLKSKGITAVWIPPAWKGTSQNDVGYGAYDLYDLGEFNQKGTVRTKYGTRNQLQAAVTSLKNNGIQVYGDVVMNHKGGADGTEIVNAVEVNRSNRNQETSGEYAIEAWTKFDFPGRGNNHSSFKWRWYHFDGTDWDQSRQLQNKIYKFRGTGKAWDWEVDTENGNYDYLMYADVDXDHPEVIHELRNWGVWYTNTLNLDGFRIDAVKHIKYSFTRDWLTHVRNTTGKPMFAVAEFWKNDLGAIENYLNKTSWNHSVFDVPLHYNLYNASNSGGYYDMRNILNGSVVQKHPTHAVTFVDNHDSQPGEALESFVQQWFKPLAYALVLTREQGYPSVFYGDYYGIPTHGVPAMKSKIDPLLQARQTFAYGTQHDYFDHHDIIGWTREGNSSHPNSGLATIMSDGPGGNKWMYVGKNKAGQVWRDITGNRTGTVTINADGWGNFSVNGGSVSVWVKQ

SEQ ID NO: 21541 - protein, 485 aa, Synthetic construct
HHNGTNGTMMQYFEWYLPNDGNHWNRLRDDAANLKSKGITAVWIPPAWKGTSQNDVGYGAYDLYDLGEFNQKGTVRTKYGTRNQLQAAVTSLKNNGIQVYGDVVMDHKGGADGTEIVNAVEVNRSNRNQETSGEYAIEAWTKFDFPGRGNNHSSFKWRWYHFDGTDWDQSRQLQNKIYKFRGTGKAWDWEVDTENGNYDYLMYADVDMDHPEVIHELRNWGVWYTNTLNLDGFRIDAVKHIKYSFTRDWLTHVRNTTGKPMFAVAEFWKNDLGAIENYLNKTSWNHSVFDVPLHYNLYNASNSGGYYDMRNILNGSVVQKHPTHAVTFVDNHDSQPGEALESFVQQWFKPLAYALVLTREQGYPSVFYGDYYGIPTHGVPAMKSKIDPLLQARQTFAYGTQHDYFDHHDIIGWTREGNSSHPNSGLATIMSDGPGGNKWMYVGKNKAGQVWRDITGNRTGTVTINADGWGNFSVNGGSVSVWVKQ

SEQ ID NO: 21542 - protein, 485 aa, Synthetic construct
HHNGTNGTMMQYFEWYLPNDGNHWNRLRDDAANLKSKGITAVWIPPAWKGTSQNDVGYGAYDLYDLGEFNQKGTVRTKYGTRNQLQAAVTSLKNNGIQVYGDVVMNHKGGADGTEIVNAVEVNRSNRNQETSGEYAIEAWTKFDFPGRGNNHSSFKWRWYHFDGTDWDQSRQLQNKIYKFRGTGKAWDWEVDTENGNYDYLMYADVDMDHPEVIHELRNWGVWYTNTLNLDGFRIDAVKHIKFSFTRDWLTHVRNTTGKPMFAVAEFWKNDLGAIENYLNKTSWNHSVFDVPLHYNLYNASNSGGYYDMRNILNGSVVQKHPTHAVTFVDNHDSQPGEALESFVQQWFKPLAYALVLTREQGYPSVFYGDYYGIPTHGVPAMKSKIDPLLQARQTFAYGTQHDYFDHHDIIGWTREGNSSHPNSGLATIMSDGPGGNKWMYVGKNKAGQVWRDITGNRTGTVTINADGWGNFSVNGGSVSVWVKQ

SEQ ID NO: 21543 - protein, 485 aa, Synthetic construct
HHNGTNGTMLQYFEWYLPNDGNHWNRLRDDAANLKSKGITAVWIPPAWKGTSQNDVGYGAYDLYDLGEFNQKGTVRTKYGTRNQLQAAVTSLKNNGIQVYGDVVMNHKGGADGTEIVNAVEVNRSNRNQETSGEYAIEAWTKFDFPGRGNNHSSFKWRWYHFDGTDWDQSRQLQNKIYKFRGTGKAWDWEVDTENGNYDYLMYADVDMDHPEVIHELRNWGVWYTNTLNLDGFRIDAVKHIKYSFTRDWLTHVRNTTGKPMFAVAEFWKNDLGAIENYLNKTSWNHSVFDVPLHYNLYNASNSGGYYDMRNILNGSVVQKHPTHAVTFVDNHDSQPGEALESFVQQWFKPLAYALVLTREQGYPSVFYGDYYGIPTHGVPAMKSKIDPLLQARQTFAYGTQHDYFDHHDIIGWTREGNSSHPNSGLATIMSDGPGGNKWMYVGKNKAGQVWRDITGNRTGTVTINADGWGNFSVNGGSVSVWVKQ

SEQ ID NO: 21544 - protein, 485 aa, Synthetic construct
HHNGTNGTLMQYFEWYLPNDGNHWNRLRDDAANLKSKGITAVWIPPAWKGTSQNDVGYGAYDLYDLGEFNQKGTVRTKYGTRNQLQAAVTSLKNNGIQVYGDVVMNHKGGADGTEIVNAVEVNRSNRNQETSGEYAIEAWTKFDFPGRGNNHSSFKWRWYHFDGTDWDQSRQLQNKIYKFRGTGKAWDWEVDTENGNYDYLMYADVDMDHPEVIHELRNWGVWYTNTLNLDGFRIDAVKHIKYSFTRDWLTHVRNTTGKPMFAVAEFWKNDLGAIENYLNKTSWNHSVFDVPLHYNLYNASNSGGYYDMRNILNGSVVQKHPTHAVTFVDNHDSQPGEALESFVQQWFKPLAYALVLTREQGYPSVFYGDYYGIPTHGVPAMKSKIDPLLQARQTFAYGTQHDYFDHHDIIGWTREGNSSHPNSGLATIMSDGPGGNKWMYVGKNKAGQVWRDITGNRTGTVTINADGWGNFSVNGGSVSVWVKQ

SEQ ID NO: 21545 - protein, 485 aa, Synthetic construct
HHNGTNGTMMQYFEWYLPNDGNHWNRLRDDAANLKSKGITAVWIPPAWKGTSQNDVGYGAYDLYDLGEFNQKGTVRTKYGTRNQLQAAVTSLKNNGIQVYGDVVMNHKGGADGTEIVNAVEVNRSNRNQETSGEYAIEAWTKFDFPGRGNNHSSFKWRWYHFDGTDWDQSRQLQNKIYKFRGTGKAWDWEVDTQNGNYDYLMYADVDMDHPEVIHELRNWGVWYTNTLNLDGFRIDAVKHIKYSFTRDWLTHVRNTTGKPMFAVAEFWKNDLGAIENYLNKTSWNHSVFDVPLHYNLYNASNSGGYYDMRNILNGSVVQKHPTHAVTFVDNHDSQPGEALESFVQQWFKPLAYALVLTREQGYPSVFYGDYYGIPTHGVPAMKSKIDPLLQARQTFAYGTQHDYFDHHDIIGWTREGNSSHPNSGLATIMSDGPGGNKWMYVGKNKAGQVWRDITGNRTGTVTINADGWGNFSVNGGSVSVWVKQ

SEQ ID NO: 21546 - protein, 483 aa, Synthetic construct
HHNGTNGTMMQYFEWYLPNDGNHWNRLRDDAANLKSKGITAVWIPPAWKGTSQNDVGYGAYDLYDLGEFNQKGTVRTKYGTRNQLQAAVTSLKNNGIQVYGDVVMNHKGGADGTEIVNAVEVNRSNRNQETSGEYAIEAWTKFDFPGRGNNHSSFKWRWYHFDGTDWDQSRQLQNKIYKFRGKAWDWEVDTENGNYDYLMYADVDMDHPEVIHELRNWGVWYTNTLNLDGFRIDAVKHIKFSFTRDWLTHVRNTTGKPMFAVAEFWKNDLGAIENYLNKTSWNHSVFDVPLHYNLYNASNSGGYYDMRNILNGSVVQKHPTHAVTFVDNHDSQPGEALESFVQQWFKPCAYALVLTREQGYPSVFYGDYYGIPTHGVPAMKSKIDPLLEARQTFAYGTQHDYFDHHDIIGWTREGNSSHPNSGLATICSDGPGGNKWMYVGQNKAGQVWRDITGNRTGTVTINADGWGNFSVNGGSVSVWVKQ

SEQ ID NO: 21547 - protein, 485 aa, Synthetic construct
HHNGTNGTMMQYFEWYLPNDGNHWNRLRSDASNLKDKGITAVWIPPAWKGASQNDVGYGAYDLYDLGEFNQKGTVRTKYGTRNQLQAAVTALKSNGIQVYGDVVMNHKGGADATEWVRAVEVNPSNRNQEVSGDYTIEAWTKFDFPGRGNTHSNFKWRWYHFDGVDWDQSRQLQNRIYKFRGDGKEWDWEVDTENGNYDYLMYADIDMDHPEVVNELRNWGVWYTNTLGLDGFRIDAVKHIKYSFTRDWLTHVRNTTGKNMFAVAEFWKNDIGAIENYLSKTNWNHSVFDVPLHYNLYNASRSGGNYDMRQIFNGTVVQRHPTHAVTFVDNHDSQPEEALESFVEEWFKPLAYALTLTRDQGYPSVFYGDYYGIPTHGVPAMKSKIDPILEARQKYAYGKQNDYLDHHNMIGWTREGNTKHPNSGLATIMSDGPGGNKWMYVGRNKAGQRWRDITGNRSGTVTINADGWGEFSVNGGSVSIWVNR

SEQ ID NO: 21548 - protein, 485 aa, Synthetic construct
HHNGTNGTMMQYFEWYLPNDGNHWNRLRDDAANLKSKGITAVWIPPAWKGTSQNDVGYGAYDLYDLGEFNQKGTVRTKYGTRNQLQAAVTSLKNNGIQVYGDVVMNHKGGADGTEIVNAVEVNRSNRNQETSGEYAIEAWTKFDFPGRGNNHSSFKWRWYHFDGTDWDQSRQLQNKIYKFRGTGKAWDWEVDTENGNYDYLXYADVDMDHPEVIHELRNWGVWYTNTLNLDGFRIDAVKHIKYSFTRDWLTHVRNTTGKPMFAVAEFWKNDLGAIENYLNKTSWNHSVFDVPLHYNLYNASNSGGYYDMRNILNGSVVQKHPTHAVTFVDNHDSQPGEALESFVQQWFKPLAYALVLTREQGYPSVFYGDYYGIPTHGVPAMKSKIDPLLQARQTFAYGTQHDYFDHHDIIGWTREGNSSHPNSGLATIMSDGPGGNKWMYVGKNKAGQVWRDITGNRTGTVTINADGWGNFSVNGGSVSVWVKQ

SEQ ID NO: 21549 - protein, 483 aa, Synthetic construct
HHNGTNGTMMQYFEWYLPNDGNHWNRLRDDAANLKSKGITAVWIPPAWKGTSQNDVGYGAYDLYDLGEFNQKGTVRTKYGTRNQLQAAVTSLKNNGIQVYGDVVMNHKGGADGTEIVNAVEVNRSNRNQETSGEYAIEAWTKFDFPGRGNNHSSFKWRWYHFDGTDWDQSRQLQNKIYKFRTKAWDWEVDTENGNYDYLMYADVDMDHPEVIHELRNWGVWYTNTLNLDGFRIDAVKHIKYSFTRDWLTHVRNTTGKPMFAVAEFWKNDLGAIENYLNKTSWNHSVFDVPLHYNLYNASNSGGYYDMRNILNGSVVQKHPTHAVTFVDNHDSQPGEALESFVQQWFKPLAYALVLTREQGYPSVFYGDYYGIPTHGVPAMKSKIDPLLQARQTFAYGTQHDYFDHHDIIGWTREGNSSHPNSGLATIMSDGPGGNKWMYVGKNKAGQVWRDITGNRTGTVTINADGWGNFSVNGGSVSVWVKQ

SEQ ID NO: 21550 - protein, 483 aa, Synthetic construct
HHNGTNGTMMQYFEWYLPNDGNHWNRLRDDAANLKSKGITAVWIPPAWKGTSQNDVGYGAYDLYDLGEFNQKGTVRTKYGTRNQLQAAVTSLKNNGIQVYGDVVMNHKGGADGTEIVNAVEVNRSNRNQETSGEYAIEAWTKFDFPGRGNNHSSFKWRWYHFDGTDWDQSRQLQNKIYKFGGKAWDWEVDTENGNYDYLMYADVDMDHPEVIHELRNWGVWYTNTLNLDGFRIDAVKHIKYSFTRDWLTHVRNTTGKPMFAVAEFWKNDLGAIENYLNKTSWNHSVFDVPLHYNLYNASNSGGYYDMRNILNGSVVQKHPTHAVTFVDNHDSQPGEALESFVQQWFKPLAYALVLTREQGYPSVFYGDYYGIPTHGVPAMKSKIDPLLQARQTFAYGTQHDYFDHHDIIGWTREGNSSHPNSGLATIMSDGPGGNKWMYVGKNKAGQVWRDITGNRTGTVTINADGWGNFSVNGGSVSVWVKQ

SEQ ID NO: 21551 - protein, 485 aa, Synthetic construct
HHNGTNGTMMQYFEWYLPNDGNHWNRLRDDAANLKSKGITAVWIPPAWKGTSQNDVGYGAYDLYDLGEFNQKGTVRTKYGTRNQLQAAVTSLKNNGIQVYGDVVMNHKGGADGTEIVNAVEVNRSNRNQETSGEYAIEAWTKFDFPGRGNNHSSFKWRWYHFDGTDWDQSRQLQNKIYRFRGTGKAWDWEVDTENGNYDYLMYADVDMDHPEVIHELRNWGVWYTNTLNLDGFRIDAVKHIKYSFTRDWLTHVRNTTGKPMFAVAEFWKNDLGAIENYLNKTSWNHSVFDVPLHYNLYNASNSGGYYDMRNILNGSVVQKHPTHAVTFVDNHDSQPGEALESFVQQWFKPLAYALVLTREQGYPSVFYGDYYGIPTHGVPAMKSKIDPLLQARQTFAYGTQHDYFDHHDIIGWTREGNSSHPNSGLATIMSDGPGGNKWMYVGKNKAGQVWRDITGNRTGTVTINADGWGNFSVNGGSVSVWVKQ

SEQ ID NO: 21552 - protein, 486 aa, Bacillus sp.
HHNGTNGTMMQYFEWHLPNDGQHWNRLRNDAANLKNLGITAVWIPPAWKGTSQNDVGYGAYDLYDLGEFNQKGTIRTKYGTRSQLQSAIASLQNNGIQVYGDVVMNHKGGADGTEWVQAVEVNPSNRNQEVTGEYTIEAWTKFDFPGRGNTHSSFKWRWYHFDGTDWDQSRRLNNRIYKFRGTGKGWDWEVDTENGNYDYLLYADVDMDHPEVINELRRWGVWYTNTLNLDGFRIDAVKHIKYSFTRDWLNHVRSTTGKNNMFAVAEFWKNDLGAIENYLHKTNWNHSVFDVPLHYNLYNASKSGGNYDMRQILNGTVVSKHPMHAVTFVDNHDSQPAEALESFVEAWFKPLAYALILTREQGYPSVFYGDYYGIPTHGVAAMKGKIDPILEARQKYAYGTQHDYLDHHNIIGWTREGNSAHPNSGLATIMSDGPGGSKWMYVGRHKAGQVWRDITGNRTGTVTINADGWGNFSVNGGSVSIWVNK

SEQ ID NO: 21553 - protein, 485 aa, Synthetic construct
HHNGTNGTMMQYFEWYLPNDGNHWNRLRSDASNLKDKGITAVWIPPAWKGASQNDVGYGAYDLYDLGEFNQKGTVRTKYGTRNQLQAAVTALKSNGIQVYGDVVMNHKGGADATEWVRAVEVNPSNRNQEVSGDYTIEAWTKFDFPGRGNTHSNFKWRWDHFDGVDWDQSRQLQNRIYKFRGDGKEWDWEVDTENGNYDYLMYADIDMDHPEVVNELRNWGVWYTNTLGLDGFRIDAVKHIKYSFTRDWLTHVRNTTGKNMFAVAEFWKNDIGAIENYLSKTNWNHSVFDVPLHYNLYNASRSGGNYDMRQIFKGTVVQRHPTHAVTFVDNHDSQPEEALESFVEEWFKPLAYALTLTRDQGYPSVFYGDYYGIPTHGVPAMKSKIDPILEARQKYAYGKQNDYLDHHNMIGWTREGNTAHPNSGLATIMSDGPGGNKWMYVGRNKAGQVWRDITGNRSGTVTINADGWGNFSVNGGSVSIWVNR

SEQ ID NO: 21554 - protein, 485 aa, Synthetic construct
HHNGTNGTMMQYFEWYLPNDGNHWNRLRDDAANLKSKGITAVWIPPAWKGTSQNDVGYGAYDLYDLGEFNQKGTVRTKYGTRNQLQAAVTSLKNNGIQVYGDVVMNHKGGADGTEIVNAVEVNRSNRNQETSGEYAIEAWTKFDFPGRGNNHSSFKWRWYHFDGTDWDQSRQLQNKIYKFRGTGKAWDWEVDTENGNYDYLMYADVDMDHPEVIHELRNWGVWYTNTLNLDGFRIDAVKHIKYSFTRDWLTHVRNTTGKPMFAVAEFWKNDLGAIENYLNKTSWNHSVFDVPLHYNLYNASNSGGYYDLRNILNGSVVQKHPTHAVTFVDNHDSQPGEALESFVQQWFKPLAYALVLTREQGYPSVFYGDYYGIPTHGVPAMKSKIDPLLQARQTFAYGTQHDYFDHHDIIGWTREGNSSHPNSGLATIMSDGPGGNKWMYVGKNKAGQVWRDITGNRTGTVTINADGWGNFSVNGGSVSVWVKQ

SEQ ID NO: 21555 - protein, 485 aa, Synthetic construct
HHNGTNGTMMQYFEWYLPNDGNHWNRLRDDAANLKSKGITAVWIPPAWKGTSQNDVGYGAYDLYDLGEFNQKGTVRTKYGTRNQLQAAVTSLKNNGIQVYGDVVMNHKGGADGTEIVNAVEVNRSNRNQETSGEYAIEAWTKFDFPGRGNNHSSFKWRWYHFDGTDWDQSRQLQNKIYKFRGTGKAWDWEVDTENGNYDYLMYADVDMDHPEVIHELRNWGVWYTNTLNLDGFRIDAVKHIKYSFTRDWLTHVRNTTGKPMFAVAEFWKNDLGAIENYLNKTSWNHSVFDVPLHYNLYNASNSGGYYDMRNILNGSVVQKHPTHAVTFVDNHDSQPGEALESFVQQWFKPLAYALVLTREQGYPSVFYGDYYGIPTHGVPAMKSKIDPLLQARQTFAYGTQHDYFDHHDIIGWTREGNSSHPNSGLATILSDGPGGNKWMYVGKNKAGQVWRDITGNRTGTVTINADGWGNFSVNGGSVSVWVKQ

SEQ ID NO: 21556 - protein, 485 aa, Synthetic construct
HHNGTNGTMMQYFEWYLPNDGNHWNRLRDDAANLKSKGITAVWIPPAWKGTSQNDVGYGAYDLYDLGEFNQKGTVRTKYGTRNQLQAAVTSLKNNGIQVYGDVVMNHKGGADGTEIVNAVEVNRSNRNQETSGEYAIEAWTKFDFPGRGNNHSSFKWRWYHFDGTDWDQSRQLQNKIYKFRGTGKAWDWEVDTENGNYDYLMYADXDMDHPEVIHELRNWGVWYTNTLNLDGFRIDAVKHIKYSFTRDWLTHVRNTTGKPMFAVAEFWKNDLGAIENYLNKTSWNHSVFDVPLHYNLYNASNSGGYYDMRNILNGSVVQKHPTHAVTFVDNHDSQPGEALESFVQQWFKPLAYALVLTREQGYPSVFYGDYYGIPTHGVPAMKSKIDPLLQARQTFAYGTQHDYFDHHDIIGWTREGNSSHPNSGLATIMSDGPGGNKWMYVGKNKAGQVWRDITGNRTGTVTINADGWGNFSVNGGSVSVWVKQ

SEQ ID NO: 21557 - protein, 485 aa, Bacillus sp.
HHNGTNGTMMQYFEWYLPNDGNHWNRLRDDAANLKSKGITAVWIPPAWKGTSQNDVGYGAYDLYDLGEFNQKGTVRTKYGTRNQLQAAVTSLKNNGIQVYGDVVMNHKGGADGTEIVNAVEVNRSNRNQETSGEYAIEAWTKFDFPGRGNNHSSFKWRWYHFDGTDWDQSRQLQNKIYKFRGTGKAWDWEVDTENGNYDYLMYADVDMDHPEVIHELRNWGVWYTNTLNLDGFRIDAVKHIKYSFTRDWLTHVRNTTGKPMFAVAEFWKNDLGAIENYLNKTSWNHSAFDVPLHYNLYNASNSGGYYDMRNILNGSVVQKHPTHAVTFVDNHDSQPGEALESFVQQWFKPLAYALVLTREQGYPSVFYGDYYGIPTHGVPAMKSKIDPLLQARQTFAYGTQHDYFDHHDIIGWTREGNSSHPNSGLATIMSDGPGGNKWMYVGKNKAGQVWRDITGNRTGTVTINADGWGNFSVNGGSVSVWVKQ

SEQ ID NO: 21558 - protein, 485 aa, Synthetic construct
HHNGTNGTMMQYFEWYLPNDGNHWNRLRDDAANLKSKGITAVWIPPAWKGTSQNDVGYGAYDLYDLGEFNQKGTVRTKYGTRNQLQAAVTSLKNNGIQVYGDVVMNHKGGADGTEIVNAVEVNRSNRNQETSGEYAIEAWTKFDFPGRGNNHSSFKWRWYHFDGTDWDQSRQLQNKIYKFRGTGKAWNWEVDTENGNYDYLMYADVDMDHPEVIHELRNWGVWYTNTLNLDGFRIDAVKHIKYSFTRDWLTHVRNTTGKPMFAVAEFWKNDLGAIENYLNKTSWNHSVFDVPLHYNLYNASNSGGYYDMRNILNGSVVQKHPTHAVTFVDNHDSQPGEALESFVQQWFKPLAYALVLTREQGYPSVFYGDYYGIPTHGVPAMKSKIDPLLQARQTFAYGTQHDYFDHHDIIGWTREGNSSHPNSGLATIMSDGPGGNKWMYVGKNKAGQVWRDITGNRTGTVTINADGWGNFSVNGGSVSVWVKQ

SEQ ID NO: 21559 - protein, 484 aa, Bacillus sp.
HHNGTNGTMMQYFEWHLPNDGQHWNRLRNDAANLKNLGITAVWIPPAWKGTSQNDVGYGAYDLYDLGEFNQKGTIRTKYGTRSQLQSAIASLQNNGIQVYGDVVMNHKGGADGTEWVQAVEVNPSNRNQEVTGEYTIEAWTKFDFPGRGNTHSSFKWRWYHFDGTDWDQSRQLNNRIYKFTGKAWDWEVDTENGNYDYLMYADVDMDHPEVINELRRWGVWYTNTLNLDGFRIDAVKHIKYSFTRDWLNHVRSTTGKNNMFAVAEFWKNDLGAIENYLHKTNWNHSVFDVPLHYNLYNASKSGGNYDMRQILNGTVVSKHPIHAVTFVDNHDSQPAEALESFVEAWFKPLAYALILTREQGYPLVFYGDYYGIPTHGVAAMKGKIDPILEARQKYAYGTQHDYLDHHNIIGWTREGNSAHPNSGLATIMSDGPGGSKWMYVGRHKAGQVWRDITGNRTGTVTINADGWGNFSVNGGSVSIWVNK

SEQ ID NO: 21560 - protein, 486 aa, Bacillus sp.
HHNGTNGTMMQYFEWHLPNDGQHWNRLRNDAANLKNLGITAVWIPPAWKGTSQNDVGYGAYDLYDLGEFNQKGTIRTKYGTRSQLQSAIARLQNNGIQVYGDVVMNHKGGADGTEWVQAVEVNPSNRNQEVTGEYTIEAWTKFDFPGRGNTHSSFKWRWYHFDGTDWDQSRRLNNRIYKFRGTGKAWDWPVDTENGNYDYLMYADVDMDHPEVINELRRWGVWYTNTLNLDGFRIDAVKHIKYSFTRDWLNHVRSTTGKNNMFAVAEFWKNDLGAIENYLHKTNWNHSVFDVPLHYNLYNASKSGGNYDMRQILNGTVVSKHPRHAVTFVDNHDSQPAEALESFVEAWFKPLAYALILTREQGYPSVFYGDYYGIPTHGVAAMKGKIDPILEARQKYAYGTQHDYLDHHNIIGWTREGNSAHPNSGLATIMSDGPGGSKWMYVGRHKAGQVWRDITGNRTGTVTINADGWGNFSVNGGSVSIWVNK

SEQ ID NO: 21561 - protein, 485 aa, Synthetic construct
HHNGTNGTMMQYFEWYLPNDGNHWNRLRDDAANLKSKGITAVWIPPAWKGTSQNDVGYGAYDLYDLGEFNQKGTVRTKYGTRNQLQAAVTSLKNNGIQVYGDVVMNHKGGADGTEIVNAVEVNRSNRNQETSGEYAIEAWTKFDFPGRGNNHSSFKWRWYHFDGTDWDQSRQLQNKIYKFRGTGKAWDWEVNTENGNYDYLMYADVDMDHPEVIHELRNWGVWYTNTLNLDGFRIDAVKHIKYSFTRDWLTHVRNTTGKPMFAVAEFWKNDLGAIENYLNKTSWNHSVFDVPLHYNLYNASNSGGYYDMRNILNGSVVQKHPTHAVTFVDNHDSQPGEALESFVQQWFKPLAYALVLTREQGYPSVFYGDYYGIPTHGVPAMKSKIDPLLQARQTFAYGTQHDYFDHHDIIGWTREGNSSHPNSGLATIMSDGPGGNKWMYVGKNKAGQVWRDITGNRTGTVTINADGWGNFSVNGGSVSVWVKQ

SEQ ID NO: 21562 - protein, 485 aa, Synthetic construct
HHNGTNGTMMQYFEWYLPNDGNHWNRLRDDAANLKSKGITAVWIPPAWKGTSQNDVGYGAYDLYDLGEFNQKGTVRTKYGTRNQLQAAVTSLKNNGIQVYGDVVMNHKGGADGTEIVNAVEVNRSNRNQETSGEYAIEAWTKFDFPGRGNNHSSFKWRWYHFDGTDWDQSRQLQNKIYKFRGTGKAWDWEVDTENGNYDYLMYADVDLDHPEVIHELRNWGVWYTNTLNLDGFRIDAVKHIKYSFTRDWLTHVRNTTGKPMFAVAEFWKNDLGAIENYLNKTSWNHSVFDVPLHYNLYNASNSGGYYDMRNILNGSVVQKHPTHAVTFVDNHDSQPGEALESFVQQWFKPLAYALVLTREQGYPSVFYGDYYGIPTHGVPAMKSKIDPLLQARQTFAYGTQHDYFDHHDIIGWTREGNSSHPNSGLATIMSDGPGGNKWMYVGKNKAGQVWRDITGNRTGTVTINADGWGNFSVNGGSVSVWVKQ

SEQ ID NO: 21563 - protein, 485 aa, Synthetic construct
HHNGTNGTMMQYFEWYLPNDGNHWNRLRDDAANLKSKGITAVWIPPAWKGTSQNDVGYGAYDLYDLGEFNQKGTVRTKYGTRNQLQAAVTSLKNNGIQVYGDVVMNHKGGADGTEIVNAVEVNRSNRNQETSGEYAIEAWTKFDFPGRGNNHSSFKWRWYHFDGTDWDQSRQLQNKIYKFRGTGKAWDWEVDTENGNYDYLMYADVDMDHPEVIHELRNWGVWYTNTLNLDGFRIDAVRHIKYSFTRDWLTHVRNTTGKPMFAVAEFWKNDLGAIENYLNKTSWNHSVFDVPLHYNLYNASNSGGYYDMRNILNGSVVQKHPTHAVTFVDNHDSQPGEALESFVQQWFKPLAYALVLTREQGYPSVFYGDYYGIPTHGVPAMKSKIDPLLQARQTFAYGTQHDYFDHHDIIGWTREGNSSHPNSGLATIMSDGPGGNKWMYVGKNKAGQVWRDITGNRTGTVTINADGWGNFSVNGGSVSVWVKQ

SEQ ID NO: 21564 - protein, 485 aa, Synthetic construct
HHNGTNGTMMQYFEWYLPNDGNHWNRLRDDAANLKSKGITAVWIPPAWKGTSQNDVGYGAYDLYDLGEFNQKGTVRTKYGTRNQLQAAVTSLKNNGIQVYGDVVMNHKGGADGTEIVNAVEVNRSNRNQETSGEYAIEAWTKFDFPGRGNNHSSFKWRWYHFDGTDWDQSRQLQNKIYKFRGTGKAWDWEVDTENGNYNYLMYADVDMDHPEVIHELRNWGVWYTNTLNLDGFRIDAVKHIKYSFTRDWLTHVRNTTGKPMFAVAEFWKNDLGAIENYLNKTSWNHSVFDVPLHYNLYNASNSGGYYDMRNILNGSVVQKHPTHAVTFVDNHDSQPGEALESFVQQWFKPLAYALVLTREQGYPSVFYGDYYGIPTHGVPAMKSKIDPLLQARQTFAYGTQHDYFDHHDIIGWTREGNSSHPNSGLATIMSDGPGGNKWMYVGKNKAGQVWRDITGNRTGTVTINADGWGNFSVNGGSVSVWVKQ

SEQ ID NO: 21565 - protein, 485 aa, Synthetic construct
HHNGTNGTMMQYFEWYLPNDGNHWNRLRDDAANLKSKGITAVWIPPAWKGTSQNDVGYGAYDLYDLGEFNQKGTVRTKYGTRNQLQAAVTSLKNNGIQVYGDVVMNHKGGADGTEIVNAVEVNRSNRNQETSGEYAIEAWTKFDFPGRGNNHSSFKWRWYHFDGTDWDQSRQLQNKIYKFRGTGKAWDWEVDTENGNYDYLMYADVDMDHPEVIHEIRNWGVWYTNTLNLDGFRIDAVKHIKYSFTRDWLTHVRNTTGKPMFAVAEFWKNDLGAIENYLNKTSWNHSVFDVPLHYNLYNASNSGGYYDMRNILNGSVVQKHPTHAVTFVDNHDSQPGEALESFVQQWFKPLAYALVLTREQGYPSVFYGDYYGIPTHGVPAMKSKIDPLLQARQTFAYGTQHDYFDHHDIIGWTREGNSSHPNSGLATIMSDGPGGNKWMYVGKNKAGQVWRDITGNRTGTVTINADGWGNFSVNGGSVSVWVKQ

SEQ ID NO: 21566 - protein, 485 aa, Synthetic construct
HHNGTNGTMMQYFEWYLPNDGNHWNRLRDDAANLKSKGITAVWIPPAWKGTSQNDVGYGAYDLYDLGEFNQKGTVRTKYGTRNQLQAAVTSLKNNGIQVYGDVVMNHKGGADGTEIVNAVEVNRSNRNQETSGEYAIEAWTKFDFPGRGNNHSSFKWRWYHFDGTDWDQSRQLQNKIYKFRGTGKAWDWEVDTENGNYDYLMYADVDMDHPEVIHELRNWGVWYTNTLNLDGFRIDAVKHIKYSFTRDWLTHVRNTTGKPMFAVAEFWKNDLGAIENYLNKTSWNHSVFDVPLHYNLYNASNSGGYYDMRNILNGSVVQKHPTHAVTFVDNHDSQPGEALESFVQQWFKPLAYALVLTREQGYPSVFYGDYYGIPTHGVPALKSKIDPLLQARQTFAYGTQHDYFDHHDIIGWTREGNSSHPNSGLATIMSDGPGGNKWMYVGKNKAGQVWRDITGNRTGTVTINADGWGNFSVNGGSVSVWVKQ

SEQ ID NO: 21567 - protein, 486 aa, Bacillus sp.
HHNGTNGTMMQYFEWHLPNDGQHWNRLRNDAANLKNLGITAVWIPPAWKGTSQNDVGYGAYDLYDLGEFNQKGTIRTKYGTRSQLQSAIARLQNNGIQVYGDVVMNHKGGADGTEWVQAVEVNPSNRNQEVTGEYTIEAWTKFDFPGRGNTHSSFKWRWYHFDGTDWDQSRRLNNRIYKFRGTGKAWDWPVDTENGNYDYLMYADVDMDHPEVINELRRWGVWYTNTLNLDGFRIDAVKHIKYSFTRDWLNHVRSTTGKNNMFAVAEFWKNDLGAIENYLHKTNWNHSVFDVPLHYNLYNASKSGGNYDMRQILNGTVVSKHPNHAVTFVDNHDSQPAEALESFVEAWFKPLAYALILTREQGYPSVFYGDYYGIPTHGVAAMKGKIDPILEARQKYAYGTQHDYLDHHNIIGWTREGNSAHPNSGLATIMSDGPGGSKWMYVGRHKAGQVWRDITGNRTGTVTINADGWGNFSVNGGSVSIWVNK

SEQ ID NO: 21568 - protein, 486 aa, Bacillus sp.
HHNGTNGTMMQYFEWHLPNDGQHWNRLRNDAANLKNLGITAVWIPPAWKGTSQNDVGYGAYDLYDLGEFNQKGTIRTKYGTRSQLQSAIASLQNNGIQVYGDVVMNHKGGADGTEWVQAVEVNPSNRNQEVTGEYTIEAWTKFDFPGRGNTHSSFKWRWYHFDGTDWDQSRQLNNRIYKFRGDGKAWDWPVDTENGNYDYLLYADVDMDHPEVINELRRWGVWYTNTLNLDGFRIDAVKHIKYSFTRDWLNHVRSTTGKNNMFAVAEFWKNDLGAIENYLHKTNWNHSVFDVPLHYNLYNASKSGGNYDMRQILNGTVVSKHPIHAVTFVDNHDSQPAEALESFVEAWFKPLAYALILTREQGYPSVFYGDYYGIPTHGVAAMKGKIDPILEARQKYAYGTQHDYLDHHNIIGWTREGNSAHPNSGLATIMSDGPGGSKWMYVGRHKAGQVWRDITGNRTGTVTINADGWGNFSVNGGSVSIWVNK

SEQ ID NO: 21569 - protein, 485 aa, Bacillus
HHNGTNGTMMQYFEWYLPNDGNHWNRLRDDAANLKSKGITAVWIPPAWKGTSQNDVGYGAYDLYDLGEFNQKGTVRTKYGTRNQLQAAVTSLKNNGIQVYGDVVMNHKGGADGTEIVNAVEVNRSNRNQETSGEYAIEAWTKFDFPGRGNNHSSFKWRWYHFDGTDTDQSRQLQNKIYKFRGTGKAWDWEVDTENGNYDYLMYADVDMDHPEVIHELRNWGVWYTNTLNLDGFRIDAVKHIKYSFTRDWLTHVRNTTGKPMFAVAEFWKNDLGAIENYLNKTSWNHSVFDVPLHYNLYNASNSGGYYDMRNILNGSVVQKHPTHAVTFVDNHDSQPGEALESFVQQWFKPLAYALVLTREQGYPSVFYGDYYGIPTHGVPAMKSKIDPLLQARQTFAYGTQHDYFDHHDIIGWTREGNSSHPNSGLATIMSDGPGGNKWMYVGKNKAGQVWRDITGNRTGTVTINADGWGNFSVNGGSVSVWVKQ

SEQ ID NO: 21570 - protein, 485 aa, Synthetic construct
HHNGTNGTMMQYFEWYLPNDGNHWNRLRDDAANLKSKGITAVWIPPAWKGTSQNDVGYGAYDLYDLGEFNQKGTVRTKYGTRNQLQAAVTSLKNNGIQVYGDVVMNHKGGADGTEIVNAVEVNRSNRNQETSGEYAIEAWTKFDFPGRGNNHSSFKWRWYHFDGTDWDQSRQLQNKIYKFRGTGKAWDWEVDTENGNYDYLMYADVDMDHPEVIHELRNWGVWYTNTLNLDGFRIDAVKHIRYSFTRDWLTHVRNTTGKPMFAVAEFWKNDLGAIENYLNKTSWNHSVFDVPLHYNLYNASNSGGYYDMRNILNGSVVQKHPTHAVTFVDNHDSQPGEALESFVQQWFKPLAYALVLTREQGYPSVFYGDYYGIPTHGVPAMKSKIDPLLQARQTFAYGTQHDYFDHHDIIGWTREGNSSHPNSGLATIMSDGPGGNKWMYVGKNKAGQVWRDITGNRTGTVTINADGWGNFSVNGGSVSVWVKQ

SEQ ID NO: 21571 - protein, 485 aa, Bacillus sp.
HHNGTNGTMMQYFEWYLPNDGNHWNRLRDDAANLKSKGITAVWIPPAWKGTSQNDVGYGAYDLYDLGEFNQKGTVRTKYGTRNQLQAAVTSLKNNGIQVYGDVVMNHKGGADGTEIVNAVEVNRSNRNQETSGEYAIEAWTKFDFPGRGNNHSSFKWRWYHFDGTDWDQSRQLQNKIYKFRGTGKAWDWEVDTENGNYDYLMYADVDMDHPEVIHELRNWGVWYTNTLNLDGFRIDAVKHIKYSFTRDWLTHVRNTTGKPMFAVAEFWKNDLGAIENYLNKTSWNHSVFDVPLHYNLYNASNSGGYYDMRNILNGSVVQKHPTHAVTFVDNHDSQPGEALESFVQQWFKPLAYALVLFREQGYPSVFYGDYYGIPTHGVPAMKSKIDPLLQARQTFAYGTQHDYFDHHDIIGWTREGNSSHPNSGLATIMSDGPGGNKWMYVGKNKAGQVWRDITGNRTGTVTINADGWGNFSVNGGSVSVWVKQ

SEQ ID NO: 21572 - protein, 485 aa, Synthetic construct
HHNGTNGTMMQYFEWYLPNDGNHWNRLRDDAANLKSKGITAVWIPPAWKGTSQNDVGYGAYDLYDLGEFNQKGTVRTKYGTRNQLQAAVTSLKNNGIQVYGDVVMNHKGGADGTEIVNAVEVNRSNRNQETSGEYAIEAWTKFDFPGRGNNHSSFKWRWYHFDGTDWDQSRQLQNKIYKFRGTGKAWDWEVDTENGNYDYLMYADVDMDHPEVIHELRNWGVWYTNTLNLDGFRIDAVKHIKYSFTRDWLTHVRNTTGKPMFAVAEFWKNDLGAIENYLNKTSWNHSVFDVPLHYNLYNASNSGGYYDMRNILNGSVVQKHPTHAVTFVDNHDSQPGEALESFVQQWFKPLAYALVLTREQGYPSVFYGDYYGIPTHGVPAMKSKIDPLLQARQTFAYGTQHDYFDHHDIIGWTREGNSSHPNSGLATIMSDGPGGNKWLYVGKNKAGQVWRDITGNRTGTVTINADGWGNFSVNGGSVSVWVKQ

SEQ ID NO: 21573 - protein, 485 aa, Synthetic construct
HHNGTNGTMMQYFEWYLPNDGNHWNRLRDDAANLKSKGITAVWIPPAWKGTSQNDVGYGAYDLYDLGEFNQKGTVRTKYGTRNQLQAAVTSLKNNGIQVYGDVVXNHKGGADGTEIVNAVEVNRSNRNQETSGEYAIEAWTKFDFPGRGNNHSSFKWRWYHFDGTDWDQSRQLQNKIYKFRGTGKAWDWEVDTENGNYDYLMYADVDMDHPEVIHELRNWGVWYTNTLNLDGFRIDAVKHIKYSFTRDWLTHVRNTTGKPMFAVAEFWKNDLGAIENYLNKTSWNHSVFDVPLHYNLYNASNSGGYYDMRNILNGSVVQKHPTHAVTFVDNHDSQPGEALESFVQQWFKPLAYALVLTREQGYPSVFYGDYYGIPTHGVPAMKSKIDPLLQARQTFAYGTQHDYFDHHDIIGWTREGNSSHPNSGLATIMSDGPGGNKWMYVGKNKAGQVWRDITGNRTGTVTINADGWGNFSVNGGSVSVWVKQ

SEQ ID NO: 21574 - protein, 486 aa, Bacillus sp.
HHNGTNGTMMQYFEWHLPNDGQHWNRLRNDAANLKNLGITAVWIPPAWKGTSQNDVGYGAYDLYDLGEFNQKGTIRTKYGTRSQLQSAIASLQNNGIQVYGDVVMNHKGGADGTEWVQAVEVNPSNRNQEVTGEYTIEAWTKFDFPGRGNTHSSFKWRWYHFDGTDWDQSRRLNNRIYKFRGTGKGWDWEVDTENGNYDYLMYADVDMDHPEVINELRRWGVWYTNTLNLDGFRIDAVKHIKYSFTRDWLNHVRSTTGKNNMFAVAEFWKNDLGAIENYLHKTNWNHSVFDVPLHYNLYNASKSGGNYDMRQILNGTVVSKHPIHAVTFVDNHDSQPAEALESFVEAWFKPLAYALILTREQGYPSVFYGDYYGIPTHGVAAMKGKIDPILEARQKYAYGTQHDYLDHHNIIGWTREGNSAHPNSGLATIMSDGPGGSKWMYVGRHKAGQVWRDITGNRTGTVTINADGWGNFSVNGGSVSIWVNK

SEQ ID NO: 21575 - protein, 485 aa, Synthetic construct
HHNGTNGTMMQYFEWYLPNDGNHWNRLRDDAANLKSKGITAVWIPPAWKGTSQNDVGYGAYDLYDLGEFNQKGTVRTKYGTRNQLQAAVTSLKNNGIQVYGDVVMNHKGGADGTEIVNAVEVNRSNRNQETSGEYAIEAWTKFDFPGRGNNHSSFKWRWYHFNGTDWDQSRQLQNKIYKFRGTGKAWDWEVDTENGNYDYLMYADVDMDHPEVIHELRNWGVWYTNTLNLDGFRIDAVKHIKYSFTRDWLTHVRNTTGKPMFAVAEFWKNDLGAIENYLNKTSWNHSVFDVPLHYNLYNASNSGGYYDMRNILNGSVVQKHPTHAVTFVDNHDSQPGEALESFVQQWFKPLAYALVLTREQGYPSVFYGDYYGIPTHGVPAMKSKIDPLLQARQTFAYGTQHDYFDHHDIIGWTREGNSSHPNSGLATIMSDGPGGNKWMYVGKNKAGQVWRDITGNRTGTVTINADGWGNFSVNGGSVSVWVKQ

SEQ ID NO: 21576 - protein, 485 aa, Synthetic construct
HHNGTNGTMMQYFEWYLPNDGNHWNRLRDDAANLKSKGITAVWIPPAWKGTSQNDVGYGAYDLYDLGEFNQKGTVRTKYGTRNQLQAAVTSLKNNGIQVYGDVVMNHKGGADGTEIVNAVEVNRSNRNQETSGEYAIEAWTKFDFPGRGNNHSSFKWRWYHFDGTDWDQSRQLQNKIYKFRGTGKAWDWQVDTENGNYDYLMYADVDMDHPEVIHELRNWGVWYTNTLNLDGFRIDAVKHIKYSFTRDWLTHVRNTTGKPMFAVAEFWKNDLGAIENYLNKTSWNHSVFDVPLHYNLYNASNSGGYYDMRNILNGSVVQKHPTHAVTFVDNHDSQPGEALESFVQQWFKPLAYALVLTREQGYPSVFYGDYYGIPTHGVPAMKSKIDPLLQARQTFAYGTQHDYFDHHDIIGWTREGNSSHPNSGLATIMSDGPGGNKWMYVGKNKAGQVWRDITGNRTGTVTINADGWGNFSVNGGSVSVWVKQ

SEQ ID NO: 21577 - protein, 483 aa, Synthetic construct
HHNGTNGTMMQYFEWYLPNDGNHWNRLRDDAANLKSKGITAVWIPPAWKGTSQNDVGYGAYDLYDLGEFNQKGTVRTKYGTRNQLQAAVTSLKNNGIQVYGDVVMNHKGGADGTEIVNAVEVNRSNRNQETSGEYAIEAWTKFDFPGRGNNHSSFKWRWYHFDGTDWDQSRQLQNKIYKFTGKAWDWEVDTENGNYDYLMYADVDMDHPEVIHELRNWGVWYTNTLNLDGFRIDAVKHIKYSFTRDWLTHVRNTTGKPMFAVAEFWKNDLGAIENYLNKTSWNHSVFDVPLHYNLYNASNSGGYYDMRNILNGSVVQKHPTHAVTFVDNHDSQPGEALESFVQQWFKPLAYALVLTREQGYPSVFYGDYYGIPTHGVPAMKSKIDPLLQARQTFAYGTQHDYFDHHDIIGWTREGNSSHPNSGLATIMSDGPGGNKWMYVGKNKAGQVWRDITGNRTGTVTINADGWGNFSVNGGSVSVWVKQ

SEQ ID NO: 21578 - protein, 485 aa, Synthetic construct
HHNGTNGTMMQYFEWYLPNDGNHWNRLRDDAANLKSKGITAVWIPPAWKGTSQNDVGYGAYDLYDLGEFNQKGTVRTKYGTRNQLQAAVTSLKNNGIQVYGDVVMNHKGGADGTEIVNAVEVNRSNRNQETSGEYAIEAWTKFDFPGRGNNHSSFKWRWYHFDGTDWDQSRQLQNKIYKFRGTGKAWDWEVDTENGNYDYLMYADVDMNHPEVIHELRNWGVWYTNTLNLDGFRIDAVKHIKYSFTRDWLTHVRNTTGKPMFAVAEFWKNDLGAIENYLNKTSWNHSVFDVPLHYNLYNASNSGGYYDMRNILNGSVVQKHPTHAVTFVDNHDSQPGEALESFVQQWFKPLAYALVLTREQGYPSVFYGDYYGIPTHGVPAMKSKIDPLLQARQTFAYGTQHDYFDHHDIIGWTREGNSSHPNSGLATIMSDGPGGNKWMYVGKNKAGQVWRDITGNRTGTVTINADGWGNFSVNGGSVSVWVKQ

SEQ ID NO: 21579 - protein, 485 aa, Synthetic construct
HHNGTNGTMMQYFEWYLPNDGNHWNRLRDDAANLKSKGITAVWIPPAWKGTSQNDVGYGAYDLYDLGEFNQKGTVRTKYGTRNQLQAAVTSLKNNGIQVYGDVVMNHKGGADGTEIVNAVEVNRSNRNQETSGEYAIEAWTKFDFPGRGNNHSSFKWRWYHFDGTDWDQSRQLQNKIYKFRGTGKAWDWEVDTENGNYDYLMYANVDMDHPEVIHELRNWGVWYTNTLNLDGFRIDAVKHIKYSFTRDWLTHVRNTTGKPMFAVAEFWKNDLGAIENYLNKTSWNHSVFDVPLHYNLYNASNSGGYYDMRNILNGSVVQKHPTHAVTFVDNHDSQPGEALESFVQQWFKPLAYALVLTREQGYPSVFYGDYYGIPTHGVPAMKSKIDPLLQARQTFAYGTQHDYFDHHDIIGWTREGNSSHPNSGLATIMSDGPGGNKWMYVGKNKAGQVWRDITGNRTGTVTINADGWGNFSVNGGSVSVWVKQ

SEQ ID NO: 21580 - protein, 485 aa, Synthetic construct
HHNGTNGTMMQYFEWYLPNDGNHWNRLRDDAANLKSKGITAVWIPPAWKGTSQNDVGYGAYDLYDLGEFNQKGTVRTKYGTRNQLQAAVTSLKNNGIQVYGDVVMNHKGGADGTEIVNAVEVNRSNRNQETSGEYAIEAWTKFDFPGRGNNHSSFKWRWYHFDGTDWDQSRQLQNKIYKFRGTGKAWDWEVDTENGNYDYLMYADVDMDHPEVIHELRNWGVWYTNTLNLDGFRIDAVKHIKYSFTRDWLTHVRNTTGKPMFAVAEFWRNDLGAIENYLNKTSWNHSVFDVPLHYNLYNASNSGGYYDMRNILNGSVVQKHPTHAVTFVDNHDSQPGEALESFVQQWFKPLAYALVLTREQGYPSVFYGDYYGIPTHGVPAMKSKIDPLLQARQTFAYGTQHDYFDHHDIIGWTREGNSSHPNSGLATIMSDGPGGNKWMYVGKNKAGQVWRDITGNRTGTVTINADGWGNFSVNGGSVSVWVKQ

SEQ ID NO: 21581 - protein, 485 aa, Synthetic construct
HHNGTNGTMMQYFEWYLPNDGNHWNRLRDDAANLKSKGITAVWIPPAWKGTSQNDVGYGAYDLYDLGEFNQKGTVRTKYGTRNQLQAAVTSLKNNGIQVYGDVVMNHKGGADGTEIVNAVEVNRSNRNQETSGEYAIEAWTKFDFPGRGNNHSSFKWRWYHFDGTDWDQSRQLQNKIYKFRGTGKAWDWEVDTENGNYDYLMYADVDMDHPEVIHELRNWGVWYTNTLNLDGFRIDAVKHIKYSFTRDWLTHVRNTTGKPLFAVAEFWKNDLGAIENYLNKTSWNHSVFDVPLHYNLYNASNSGGYYDMRNILNGSVVQKHPTHAVTFVDNHDSQPGEALESFVQQWFKPLAYALVLTREQGYPSVFYGDYYGIPTHGVPAMKSKIDPLLQARQTFAYGTQHDYFDHHDIIGWTREGNSSHPNSGLATIMSDGPGGNKWMYVGKNKAGQVWRDITGNRTGTVTINADGWGNFSVNGGSVSVWVKQ

SEQ ID NO: 21582 - protein, 485 aa, Bacillus sp.
HHNGTNGTMMQYFEWYLPNDGNHWNRLRDDAANLKSKGITAVWIPPAWKGTSQNDVGYGAYDLYDLGEFNQKGTVRTKYGTRNQLQAAVTSLKNNGIQVYGDVVMNHKGGADGTEIVNAVEVNRSNRNQETSGEYAIEAWTKFDFPGRGNNHSSFKWRWYHFDGTDWDQSRQLQNKIYKFRGTGKAWDWEVDTENGNYDYLMYADVDMDHPEVIHELRNWGVWYTNTLNLDGFRIDAVKHIKYSFTRDWLTHVRNTTGKPMFAVAEFWKNDLGAIENYLNKTSWNHSVFDVPLHYNLYNASNSGGYYDMRNILNGSVVQKHPTHAVTFVDNHDSQPGEALESFVQQWFKPLAYALVLTREQGYPSVFYGDYYGIPKHGVPAMKSKIDPLLQARQTFAYGTQHDYFDHHDIIGWTREGNSSHPNSGLATIMSDGPGGNKWMYVGKNKAGQVWRDITGNRTGTVTINADGWGNFSVNGGSVSVWVKQ

SEQ ID NO: 21583 - protein, 485 aa, Synthetic construct
HHNGTNGTMMQYFEWYLPNDGNHWNRLRDDAANLKSKGITAVWIPPAWKGTSQNDVGYGAYDLYDLGEFNQKGTVRTKYGTRNQLQAAVTSLKNNGIQVYGDVVMNHRGGADGTEIVNAVEVNRSNRNQETSGEYAIEAWTKFDFPGRGNNHSSFKWRWYHFDGTDWDQSRQLQNKIYKFRGTGKAWDWEVDTENGNYDYLMYADVDMDHPEVIHELRNWGVWYTNTLNLDGFRIDAVKHIKYSFTRDWLTHVRNTTGKPMFAVAEFWKNDLGAIENYLNKTSWNHSVFDVPLHYNLYNASNSGGYYDMRNILNGSVVQKHPTHAVTFVDNHDSQPGEALESFVQQWFKPLAYALVLTREQGYPSVFYGDYYGIPTHGVPAMKSKIDPLLQARQTFAYGTQHDYFDHHDIIGWTREGNSSHPNSGLATIMSDGPGGNKWMYVGKNKAGQVWRDITGNRTGTVTINADGWGNFSVNGGSVSVWVKQ

SEQ ID NO: 21584 - protein, 485 aa, Synthetic construct
HHNGTNGTMMQYFEWYLPNDGNHWNRLRDDAANLKSKGITAVWIPPAWKGTSQNDVGYGAYDLYDLGEFNQKGTVRTKYGTRNQLQAAVTSLKNNGIQVYGDVVLNHKGGADGTEIVNAVEVNRSNRNQETSGEYAIEAWTKFDFPGRGNNHSSFKWRWYHFDGTDWDQSRQLQNKIYKFRGTGKAWDWEVDTENGNYDYLMYADVDMDHPEVIHELRNWGVWYTNTLNLDGFRIDAVKHIKYSFTRDWLTHVRNTTGKPMFAVAEFWKNDLGAIENYLNKTSWNHSVFDVPLHYNLYNASNSGGYYDMRNILNGSVVQKHPTHAVTFVDNHDSQPGEALESFVQQWFKPLAYALVLTREQGYPSVFYGDYYGIPTHGVPAMKSKIDPLLQARQTFAYGTQHDYFDHHDIIGWTREGNSSHPNSGLATIMSDGPGGNKWMYVGKNKAGQVWRDITGNRTGTVTINADGWGNFSVNGGSVSVWVKQ

SEQ ID NO: 21585 - protein, 483 aa, Synthetic construct
HHNQTNGTMMQYFEWYLPNDGNHWNRLRSDASNLKDKGITAVWIPPAWKGASQNDVGYGAYDLYDLGEFNQKGTVRTKYGTRNQLQAAVTALKSNGIQVYGDVVMNHKGGADATEWVRAVEVNPSNRNQEVSGDYTIEAWTKFDFPGRGNTHSNFKWRWYHFDGVDWDQSRQLQNRIYKFRGDGKEWDWEVDTENGNYDYLMYADIDMDHPEVVNELRNWGVWYTNTLGLDGFRIDAVKHIKYSFTRDWLEHVRNTTGKNMFAVAEFWKNDIGAIRNYLSKTNWNHSVFDVPLHYNLYNASRSGGNYDMRQIFNGTVVQRHPTHAVTFVDNHDSQPEEALESFVEEWFKPLAYALTLTRDQGYPSVFYGDYYGIPTHGVPAMKSKIDPILEARQKYAYGKQNDYMDHHNMIGWTREGNTAHPNSGLATIMSDGPGGNKWMYVGRNKAGQVWRDITGNRSGTVTINADGWGNFSVNGGSVSIWV

SEQ ID NO: 21586 - protein, 483 aa, Synthetic construct
HHNGTNGTMMQYFEWYLPNDGNHWHRLRSDASNLKDKGITAVWIPPAWKGASQNDVGYGAYDLYDLGEFNQKGTVRTKYGTRNQLQAAVTALKSNGIQVYGDVVMNHKGGADATEWVRAVEVNPSNRNQEVSGDYTIEAWTKFDFPGRGNTHSNFKWRWYHFDGVDWDQSRQLQNKIYKFRGDGKGWDWEVDTENGNYDYLMYADYDMDHPEVVNELRNWGVWYTNTLGLDGFRIDAVKHIKYSFTRDWLTHVRNTTGKNMFAVAEFWKNDIGAIRNYLSKTNWNHSVFDVPLHYNLYNASRSGGNYDMRQIFNGTVVQRHPTHAVTFVDNHDSQPEEALESFVEEWFKPLAYALTLTRDQGYPSVFYGDYYGIPTHGVPAMKSKIDPILEARQKYAYGKQNDYMDHHNMIGWTREGNTAHPNSGLATIMSDGPGGNKWMYVGRNKAGQVWRDITGNRSGTVTINADGWGNFSVNGGSVSIWV

SEQ ID NO: 21587 - protein, 483 aa, Synthetic construct
HHNQTNGTMMQYFEWYLPNDGNHWNRLRSDASNLKDKGITAVWIPPAWKGASQNDVGYGAYDLYDLGEFNQKGTVRTKYGTRNQLQAAVTALKSNGIQVYGDVVMNHKGGADATEWVRAVEVNPSNRNQEVSGDYTIEAWTKFDFPGRGNTHSNFKWRWWHFDGVDWDQSRQLQNRIYKFRGDGKEWDWEVDTENGNYDYLMYADYDMDHPEVVNELRNWGVWYTNTLGLDGFRIDAVKHIKYSFTRDWLEHVRNTTGKNMFAVAEFWKNDIGAIENYLSKTNWNHSVFDVPLHYNLYNASRSGGNYDMRQIFNGTVVQRHPTHAVTFVDNHDSQPEEALESFVEEWFKPLAYALTLTRDQGYPSVFYGDYYGIPTHGVPAMKSKIDPILEARQKYAYGKQNDYLDHHNMIGWTREGNTAHPNSGLATIMSDGPGGNKWMYVGRNKAGQVWRDITGNRSGTVTINADGWGNFSVNGGSVSIWV

SEQ ID NO: 21588 - protein, 483 aa, Synthetic construct
HHNGTNGTMMQYFEWYLPNDGNHWHRLRSDASNLKDKGITAVWIPPAWKGASQNDVGYGAYDLYDLGEFNQKGTVRTKYGTRNQLQAAVTALKSNGIQVYGDVVMNHKGGADATEWVRAVEVNPSNRNQEVSGDYTIEAWTKFDFPGRGNTHSNFKWRWYHFDGVDWDQSRQLQNRIYKFRGDGKEWDWEVDTENGNYDYLMYADYDMDHPEVVNELRNWGVWYTNTLGLDGFRIDAVKHIKYSFTRDWLEHVRNTTGKNMFAVAEFWKNDIGAIRNYLSKTNWNHSVFDVPLHYNLYNASRSGGNYDMRQIFNGTVVQRHPGHAVTFVDNHDSQPEEALESFVEEWFKPLAYALTLTRDQGYPSVFYGDYYGIPTHGVPAMKSKIDPILEARQKYAYGKQNDYMDHHNMIGWTREGNTAHPNSGLATIMSDGPGGNKWMYVGRNKAGQVWRDITGNRSGTVTINADGWGNFSVNGGSVSIWV

SEQ ID NO: 21589 - protein, 483 aa, Synthetic construct
HHNGTNGTMMQYFEWYLPNDGNHWHRLRSDASNLKDKGITAVWIPPAWKGASQNDVGYGAYDLYDLGEFNQKGTVRTKYGTRNQLQAAVTALKSNGIQVYGDVVMNHKGGADATEWVRAVEVNPSNRNQEVSGDTTIEAWTKFDFPGRGNTHSNFKWRWYHFDGVDWDQSRQLQNKIYKFRGDGKEWDWEVDTENGNYDYLMYADYDMDHPEVVNELRNWGVWYTNTLGLDGFRIDAVKHIKYSFTRDWLTHVRNTTGKNMFAVAEFWKNDIGAIENYLSKTNWNHSVFDVPLHYNLYNASRSGGNYDMRQIFNGTVVQRHPTHAVTFVDNHDSQPEEALESFVEEWFKPLAYALTLTRDQGYPSVFYGDYYGIPTHGVPAMKSKIDPILEARQKYAYGKQNDYLDHHNMIGWTREGNTAHPNSGLATIMSDGPGGNKWMYVGRNKAGQVWRDITGNRSGTVTINADGWGNFSVNGGSVSIWV

SEQ ID NO: 21590 - protein, 483 aa, Synthetic construct
HHNGTNGTMMQYFEWYLPNDGNHWNRLRSDASNLKDKGITAVWIPPAWKGASQNDVGYGAYDLYDLGEFNQKGTVRTKYGTRNQLQDAVTALKSNGIQVYGDVVMNHKGGADATEWVRAVEVNPSNRNQEVSGDYTIEAWTKFDFPGRGNTHSNFKWRWYHFDGVDWDQSRQLQNRIYKFRGDGKEWDWEVDTENGNYDYLMYADIDMDHPEVVNELRNWGVWYTDTLGLDGFRIDAVKHIKYSFTRDWLTHVRNTTGKNMFAVAEFWKNDIGAIENYLSKTNWNHSVFDVPLHYNLYNASRSGGNYDMRQIFEGTVVQRHPTHAVTFVDNHDSQPEEALESFVEEWFKPLAYALTLTRDQGYPSVFYGDYYGIPTHGVPAMKSKIDPILEARQKYAYGKQNDYLDHHNMIGWTREGNTEHPNSGLATIMSDGPGGNKWMYVGRNKAGQVWRDITGNRSGEVTINADGWGNFSVNGGSVSIWV

SEQ ID NO: 21591 - protein, 483 aa, Synthetic construct
HHNGTNGTMMQYFEWYLPNDGNHWHRLRSDASNLKDKGITAVWIPPAWKGASQNDVGYGAYDLYDLGEFNQKGTVRTKYGTRNQLQAAVTALKSNGIQVYGDVVMNHKGGADATEWVRAVEVNPSNRNQEVSGDYTIEAWTKFDFPGRGNTHSNFKWRWWHFDGVDWDQSRQLQNRIYKFRGDGKEWDWEVDTENGNYDYLMYADYDMDHPEVVNELRNWGVWYTNTLGLDGFRIDAVKHIKYSFTRDWLEHVRNTTGKNMFAVAEFWKNDIGAIENYLSKTNWNHSVFDVPLHYNLYNASRSGGNYDMRQIFNGTVVQRHPTHAVTFVDNHDSQPEEALESFVEEWFKPLAYALTLTRDQGYPSVFYGDYYGIPTHGVPAMKSKIDPILEARQKYAYGKQNDYMDHHNMIGWTREGNTAHPNSGLATIMSDGPGGNKWMYVGRNKAGQVWRDITGNRSGTVTINADGWGNFSVNGGSVSIWV

SEQ ID NO: 21592 - protein, 483 aa, Synthetic construct
HHNGTNGTMMQYFEWYLPNDGNHWHRLRSDASNLKDKGITAVWIPPAWKGASQNDVGYGAYDLYDLGEFNQKGTVRTKYGTRNQLQAAVTALKSNGIQVYGDVVMNHKGGADATEWVRAVEVNPSNRNQEVSGDYTIEAWTKFDFPGRGNTHSNFKWRWYHFDGVDWDQSRQLQNKIYKFDGDGKEWDWEVDTENGNYDYLMYADYDMDHPEVVNELRNWGVWYTNTLGLDGFRIDAVKHIKYSFTRDWLTHVRNTTGKNMFAVAEFWKNDIGAIENYLSKTNWNHSVFDVPLHYNLYNASRSGGNYDMRQIFNGTVVQRHPTHAVTFVDNHDSQPEEALESFVEEWFKPLAYALTLTRDQGYPSVFYGDYYGIPTHGVPAMKSKIDPILEARQKYAYGKQNDYLDHHNMIGWTREGNTAHPNSGLATIMSDGPGGNKWMYVGRNKAGQVWRDITGNRSGTVTINADGWGNFSVNGGSVSIWV

SEQ ID NO: 21593 - protein, 483 aa, Synthetic construct
HHNGTNGTMMQYFEWYLPNDGNHWNRLRSDASNLKDKGITAVWIPPAWKGASQNDVGYGAYDLYDLGEFNQKGTVRTKYGTRNQLQAAVTALKSNGIQVYGDVVMNHKGGADATEWVRAVEVNPSNRNQEVSGDYTIEAWTKFDFPGRGNTHSNFKWRWWHFDGVDWDQSRQLQNKIYKFRGDGKGWDWEVDTENGNYDYLMYADYDMDHPEVVNELRNWGVWYTNTLGLDGFRIDAVKHIKYSFTRDWLTHVRNTTGKNMFAVAEFWKNDIGAIRNYLSKTNWNHSVFDVPLHYNLYNASRSGGNYDMRQIFNGTVVQRHPTHAVTFVDNHDSQPEEALESFVEEWFKPLAYALTLTRDQGYPSVFYGDYYGIPTHGVPAMKSKIDPILEARQKYAYGKQNDYMDHHNMIGWTREGNTAHPNSGLATIMSDGPGGNKWMYVGRNKAGQVWRDITGNRSGTVTINADGWGNFSVNGGSVSIWV

SEQ ID NO: 21594 - protein, 483 aa, Synthetic construct
HHNQTNGTMMQYFEWYLPNDGNHWHRLRSDASNLKDKGITAVWIPPAWKGASQNDVGYGAYDLYDLGEFNQKGTVRTKYGTRNQLQAAVTALKSNGIQVYGDVVMNHKGGADATEWVRAVEVNPSNRNQEVSGDYTIEAWTKFDFPGRGNTHSNFKWRWWHFDGVDWDQSRQLQNRIYKFRGDGKEWDWEVDTENGNYDYLMYADIDMDHPEVVNELRNWGVWYTNTLGLDGFRIDAVKHIKYSFTRDWLTHVRNTTGKNMFAVAEFWKNDIGAIENYLSKTNWNHSVFDVPLHYNLYNASRSGGNYDMRQIFNGTVVQRHPGHAVTFVDNHDSQPEEALESFVEEWFKPLAYALTLTRDQGYPSVFYGDYYGIPTHGVPAMKSKIDPILEARQKYAYGKQNDYLDHHNMIGWTREGNTAHPNSGLATIMSDGPGGNKWMYVGRNKAGQVWRDITGNRSGTVTINADGWGNFSVNGGSVSIWV

SEQ ID NO: 21595 - protein, 483 aa, Synthetic construct
HHNGTNGTMMQYFEWYLPNDGNHWHRLRSDASNLKDKGITAVWIPPAWKGASQNDVGYGAYDLYDLGEFNQKGTVRTKYGTRNQLQAAVTALKSNGIQVYGDVVMNHKGGADATEWVRAVEVNPSNRNQEVSGDYTIEAWTKFDFPGRGNTHSNFKWRWYHFDGVDWDQSRQLQNKIYKFRGDGKEWDWEVDEENGNYDYLMYADYDMDHPEVVNELRNWGVWYTNTLGLDGFRIDAVKHIKYSFTRDWLEHVRNTTGKNMFAVAEFWKNDIGAIENYLSKTNWNHSVFDVPLHYNLYNASRSGGNYDMRQIFNGTVVQRHPTHAVTFVDNHDSQPEEALESFVEEWFKPLAYALTLTRDQGYPSVFYGDYYGIPTHGVPAMKSKIDPILEARQKYAYGKQNDYLDHHNMIGWTREGNTAHPNSGLATIMSDGPGGNKWMYVGRNKAGQVWRDITGNRSGTVTINADGWGNFSVNGGSVSIWV

SEQ ID NO: 21596 - protein, 483 aa, Synthetic construct
HHNGTNGTMMQYFEWYLPNDGNHWHRLRSDASNLKDKGITAVWIPPAWKGASQNDVGYGAYDLYDLGEFNQKGTVRTKYGTRNQLQAAVTALKSNGIQVYGDVVMNHKGGADATEWVRAVEVNPSNRNQEVSGDYTIEAWTKFDFPGRGNTHSNFKWRWYHFDGVDWDQSRQLQNKIYKFRGDGKGWDWEVDTENGNYDYLMYADYDMDHPEVVNELRNWGVWYTNTLGLDGFRIDAVKHIKYSFTRDWLEHVRNTTGKNMFAVAEFWKNDIGAIENYLSKTNWNHSVFDVPLHYNLYNASRSGGNYDMRQIFNGTVVQRHPTHAVTFVDNHDSQPEEALESFVEEWFKPLAYALTLTRDQGYPSVFYGDYYGIPTHGVPAMKSKIDPILEARQKYAYGKQNDYMDHHNMIGWTREGNTAHPNSGLATIMSDGPGGNKWMYVGRNKAGQVWRDITGNRSGTVTINADGWGNFSVNGGSVSIWV

SEQ ID NO: 21597 - protein, 483 aa, Synthetic construct
HHNGTNGTMMQYFEWYLPNDGNHWNRLRSDASNLKDKGITAVWIPPAWKGASQNDVGYGAYDLYDLGEFNQKGTVRTKYGTRNQLQAAVTALKSNGIQVYGDVVMNHKGGADATEWVRAVEVNPSNRNQEVSGDYTIEAWTKFDFPGRGNTHSNFKWRWDHFDGVDWDQSRQLQNRIYKFRGDGKEWDWEVDTENGNYDYLMYADIDMDHPEVVNELRNWGVWYTNTLGLDGFRIDAVKHIKYSFTRDWLTHVRNTTGKNMFAVAEFWKNDIGAIENYLSKTNWNHSVFDVPLHYNLYNASRSGGNYDMRQIFNKTVVQRHPTHAVTFVDNHDSQPEEALESFVEEWFKPLAYALTLTRDQGYPSVFYGDYYGIPTHGVPAMKSKIDPILEARQKYAYGKQNDYLDHHNMIGWTREGNTAHPNSGLATIMSDGPGGNKWMYVGRNKAGQRWRDITGNRSGTVTINADGWGNFSVNGGSVSIWV

SEQ ID NO: 21598 - protein, 483 aa, Synthetic construct
HHNGTNHTMMQYFEWYLPNDGNHWHRLRSDASNLKDKGITAVWIPPAWKGASQNDVGYGAYDLYDLGEFNQKGTVRTKYGTRNQLQAAVTALKSNGIQVYGDVVMNHKGGADATEWVRAVEVNPSNRNQEVSGDYTIEAWTKFDFPGRGNTHSNFKWRWYHFDGVDWDQSRQLQNKIYKFRGDGKEWDWEVDTENGNYDYLMYADYDMDHPEVVNELRNWGVWYTNTLGLDGFRIDAVKHIKYSFTRDWLTHVRNTTGKNMFAVAEFWKNDIGAIENYLSKTNWNHSVFDVPLHYNLYNASRSGGNYDMRQIFNGTVVQRHPTHAVTFVDNHDSQPEEALESFVEEWFKPLAYALTLTRDQGYPSVFYGDYYGIPTHGVPAMKSKIDPILEARQKYAYGKQNDYLDHHNMIGWTREGNTAHPNSGLATIMSDGPGGNKWMYVGRNKAGQVWRDITGNRSGTVTINADGWGNFSVNGGSVSIWV

SEQ ID NO: 21599 - protein, 483 aa, Synthetic construct
HHNQTNGTMMQYFEWYLPNDGNHWHRLRSDASNLKDKGITAVWIPPAWKGASQNDVGYGAYDLYDLGEFNQKGTVRTKYGTRNQLQAAVTALKSNGIQVYGDVVMNHKGGADATEWVRAVEVNPSNRNQEVSGDYTIEAWTKFDFPGRGNTHSNFKWRWYHFDGVDWDQSRQLQNRIYKFRGDGKEWDWEVDTENGNYDYLMYADYDMDHPEVVNELRNWGVWYTNTLGLDGFRIDAVKHIKYSFTRDWLTHVRNTTGKNMFAVAEFWKNDIGAIRNYLSKTNWNHSVFDVPLHYNLYNASRSGGNYDMRQIFNGTVVQRHPTHAVTFVDNHDSQPEEALESFVEEWFKPLAYALTLTRDQGYPSVFYGDYYGIPTHGVPAMKSKIDPILEARQKYAYGKQNDYLDHHNMIGWTREGNTAHPNSGLATIMSDGPGGNKWMYVGRNKAGQVWRDITGNRSGTVTINADGWGNFSVNGGSVSIWV

SEQ ID NO: 21600 - protein, 483 aa, Synthetic construct
HHNQTNGTMMQYFEWYLPNDGNHWHRLRSDASNLKDKGITAVWIPPAWKGASQNDVGYGAYDLYDLGEFNQKGTVRTKYGTRNQLQAAVTALKSNGIQVYGDVVMNHKGGADATEWVRAVEVNPSNRNQEVSGDYTIEAWTKFDFPGRGNTHSNFKWRWYHFDGVDWDQSRQLQNKIYKFRGDGKGWDWEVDTENGNYDYLMYADYDMDHPEVVNELRNWGVWYTNTLGLDGFRIDAVKHIKYSFTRDWLTHVRNTTGKNMFAVAEFWKNDIGAIENYLSKTNWNHSVFDVPLHYNLYNASRSGGNYDMRQIFNGTVVQRHPTHAVTFVDNHDSQPEEALESFVEEWFKPLAYALTLTRDQGYPSVFYGDYYGIPTHGVPAMKSKIDPILEARQKYAYGKQNDYMDHHNMIGWTREGNTAHPNSGLATIMSDGPGGNKWMYVGRNKAGQVWRDITGNRSGTVTINADGWGNFSVNGGSVSIWV

SEQ ID NO: 21601 - protein, 483 aa, Synthetic construct
HHNQTNGTMMQYFEWYLPNDGNHWHRLRSDASNLKDKGITAVWIPPAWKGASQNDVGYGAYDLYDLGEFNQKGTVRTKYGTRNQLQAAVTALKSNGIQVYGDVVMNHKGGADATEWVRAVEVNPSNRNQEVSGDYTIEAWTKFDFPGRGNTHSNFKWRWYHFDGVDWDQSRQLQNKIYKFRGDGKGWDWEVDTENGNYDYLMYADYDMDHPEVVNELRNWGVWYTNTLGLDGFRIDAVKHIKYSFTRDWLTHVRNTTGKNMFAVAEFWKNDIGAIENYLSKTNWNHSVFDVPLHYNLYNASRSGGNYDMRQIFNGTVVQRHPTHAVTFVDNHDSQPEEALESFVEEWFKPLAYALTLTRDQGYPSVFYGDYYGIPTHGVPAMKSKIDPILEARQKYAYGKQNDYLDHHNMIGWTREGNTAHPNSGLATIMSDGPGGNKWMYVGRNKAGQVWRDITGNRSGTVTINADGWGNFSVNGGSVSIWV

SEQ ID NO: 21602 - protein, 483 aa, Synthetic construct
HHNGTNGTMMQYFEWYLPNDGNHWHRLRSDASNLKDKGITAVWIPPAWKGASQNDVGYGAYDLYDLGEFNQKGTVRTKYGTRNQLQAAVTALKSNGIQVYGDVVMNHKGGADATEWVRAVEVNPSNRNQEVSGDYTIEAWTKFDFPGRGNTHSNFKWRWYHFDGVDWDQSRQLQNKIYKFRGDGKEWDWEVDTENGNYDYLMYADYDMDHPEVVNELRNWGVWYTNTLGLDGFRIDAVKHIKYSFTRDWLTHVRNTTGKNMFAVAEFWKNDIGAIENYLSKTNWNHSVFDVPLHYNLYNASRSGGNYDMRQIFNGTVVQRHPTHAVTFVDNHDSQPEEALESFVEEWFKPLAYALTLTRDQGHPSVFYGDYYGIPTHGVPAMKSKIDPILEARQKYAYGKQNDYLDHHNMIGWTREGNTAHPNSGLATIMSDGPGGNKWMYVGRNKAGQVWRDITGNRSGTVTINADGWGNFSVNGGSVSIWV

SEQ ID NO: 21603 - protein, 483 aa, Synthetic construct
HHNQTNGTMMQYFEWYLPNDGNHWNRLRSDASNLKDKGITAVWIPPAWKGASQNDVGYGAYDLYDLGEFNQKGTVRTKYGTRNQLQAAVTALKSNGIQVYGDVVMNHKGGADATEWVRAVEVNPSNRNQEVSGDYTIEAWTKFDFPGRGNTHSNFKWRWYHFDGVDWDQSRQLQNRIYKFRGDGKEWDWEVDTENGNYDYLMYADYDMDHPEVVNELRNWGVWYTNTLGLDGFRIDAVKHIKYSFTRDWLEHVRNTTGKNMFAVAEFWKNDIGAIRNYLSKTNWNHSVFDVPLHYNLYNASRSGGNYDMRQIFNGTVVQRHPTHAVTFVDNHDSQPEEALESFVEEWFKPLAYALTLTRDQGYPSVFYGDYYGIPTHGVPAMKSKIDPILEARQKYAYGKQNDYMDHHNMIGWTREGNTAHPNSGLATIMSDGPGGNKWMYVGRNKAGQVWRDITGNRSGTVTINADGWGNFSVNGGSVSIWV

SEQ ID NO: 21604 - protein, 483 aa, Synthetic construct
HHNGTNGTMMQYFEWYLPNDGNHWHRLRSDASNLKDKGITAVWIPPAWKGASQNDVGYGAYDLYDLGEFNQKGTVRTKYGTRNQLQAAVTALKSNGIQVYGDVVMNHKGGADATEWVRAVEVNPSNRNQEVSGDYTIEAWTKFDFPGRGNTHSNFKWRWYHFDGVDWDQSRQLQNKIYKFRGDGKEWDWEVDEENGNYDYLMYADYDMDHPEVVNELRNWGVWYTNTLGLDGFRIDAVKHIKYSFTRDWLTHVRNTTGKNMFAVAEFWKNDIGAIENYLSKTNWNHSVFDVPLHYNLYNASRSGGNYDMRQIFNGTVVQRHPTHAVTFVDNHDSQPEEALESFVEEWFKPLAYALTLTRDQGEPSVFYGDYYGIPTHGVPAMKSKIDPILEARQKYAYGKQNDYLDHHNMIGWTREGNTAHPNSGLATIMSDGPGGNKWMYVGRNKAGQVWRDITGNRSGTVTINADGWGNFSVNGGSVSIWV

SEQ ID NO: 21605 - protein, 483 aa, Synthetic construct
HHNQTNGTMMQYFEWYLPNDGNHWHRLRSDASNLKDKGITAVWIPPAWKGASQNDVGYGAYDLYDLGEFNQKGTVRTKYGTRNQLQAAVTALKSNGIQVYGDVVMNHKGGADATEWVRAVEVNPSNRNQEVSGDYTIEAWTKFDFPGRGNTHSNFKWRWYHFDGVDWDQSRQLQNRIYKFRGDGKEWDWEVDTENGNYDYLMYADYDMDHPEVVNELRNWGVWYTNTLGLDGFRIDAVKHIKYSFTRDWLEHVRNTTGKNMFAVAEFWKNDIGAIENYLSKTNWNHSVFDVPLHYNLYNASRSGGNYDMRQIFNGTVVQRHPAHAVTFVDNHDSQPEEALESFVEEWFKPLAYALTLTRDQGYPSVFYGDYYGIPTHGVPAMKSKIDPILEARQKYAYGKQNDYMDHHNMIGWTREGNTAHPNSGLATIMSDGPGGNKWMYVGRNKAGQVWRDITGNRSGTVTINADGWGNFSVNGGSVSIWV

SEQ ID NO: 21606 - protein, 483 aa, Synthetic construct
HHNGTNWTMMQYFEWYLPNDGNHWHRLRSDASNLKDKGITAVWIPPAWKGASQNDVGYGAYDLYDLGEFNQKGTVRTKYGTRNQLQAAVTALKSNGIQVYGDVVMNHKGGADATEWVRAVEVNPSNRNQEVSGDYTIEAWTKFDFPGRGNTHSNFKWRWYHFDGVDWDQSRQLQNKIYKFRGDGKEWDWEVDTENGNYDYLMYADYDMDHPEVVNELRNWGVWYTNTLGLDGFRIDAVKHIKYSFTRDWLTHVRNTTGKNMFAVAEFWKNDIGAIENYLSKTNWNHSVFDVPLHYNLYNASRSGGNYDMRQIFNGTVVQRHPTHAVTFVDNHDSQPEEALESFVEEWFKPLAYALTLTRDQGYPSVFYGDYYGIPTHGVPAMKSKIDPILEARQKYAYGKQNDYLDHHNMIGWTREGNTAHPNSGLATIMSDGPGGNKWMYVGRNKAGQVWRDITGNRSGTVTINADGWGNFSVNGGSVSIWV

SEQ ID NO: 21607 - protein, 483 aa, Synthetic construct
HHNQTNGTMMQYFEWYLPNDGNHWNRLRSDASNLKDKGITAVWIPPAWKGASQNDVGYGAYDLYDLGEFNQKGTVRTKYGTRNQLQAAVTALKSNGIQVYGDVVMNHKGGADATEWVRAVEVNPSNRNQEVSGDYTIEAWTKFDFPGRGNTHSNFKWRWWHFDGVDWDQSRQLQNKIYKFRGDGKGWDWEVDTENGNYDYLMYADYDMDHPEVVNELRNWGVWYTNTLGLDGFRIDAVKHIKYSFTRDWLTHVRNTTGKNMFAVAEFWKNDIGAIENYLSKTNWNHSVFDVPLHYNLYNASRSGGNYDMRQIFNGTVVQRHPTHAVTFVDNHDSQPEEALESFVEEWFKPLAYALTLTRDQGYPSVFYGDYYGIPTHGVPAMKSKIDPILEARQKYAYGKQNDYLDHHNMIGWTREGNTAHPNSGLATIMSDGPGGNKWMYVGRNKAGQVWRDITGNRSGTVTINADGWGNFSVNGGSVSIWV

SEQ ID NO: 21608 - protein, 483 aa, Synthetic construct
HHNQTNGTMMQYFEWYLPNDGNHWNRLRSDASNLKDKGITAVWIPPAWKGASQNDVGYGAYDLYDLGEFNQKGTVRTKYGTRNQLQAAVTALKSNGIQVYGDVVMNHKGGADATEWVRAVEVNPSNRNQEVSGDYTIEAWTKFDFPGRGNTHSNFKWRWWHFDGVDWDQSRQLQNRIYKFRGDGKEWDWEVDTENGNYDYLMYADIDMDHPEVVNELRNWGVWYTNTLGLDGFRIDAVKHIKYSFTRDWLEHVRNTTGKNMFAVAEFWKNDIGAIENYLSKTNWNHSVFDVPLHYNLYNASRSGGNYDMRQIFNGTVVQRHPTHAVTFVDNHDSQPEEALESFVEEWFKPLAYALTLTRDQGYPSVFYGDYYGIPTHGVPAMKSKIDPILEARQKYAYGKQNDYMDHHNMIGWTREGNTAHPNSGLATIMSDGPGGNKWMYVGRNKAGQVWRDITGNRSGTVTINADGWGNFSVNGGSVSIWV

SEQ ID NO: 21609 - protein, 483 aa, Synthetic construct
HHNGTNGTMMQYFEWYLPNDGNHWHRLRSDASNLKDKGITAVWIPPAWKGASQNDVGYGAYDLYDLGEFNQKGTVRTKYGTRNQLQAAVTALKSNGIQVYGDVVMNHKGGADATEWVRAVEVNPSNRNQEVSGDYTIEAWTKFDFPGRGNTHSNFKWRWWHFDGVDWDQSRQLQNKIYKFRGDGKEWDWEVDEENGNYDYLMYADYDMDHPEVVNELRNWGVWYTNTLGLDGFRIDAVKHIKYSFTRDWLTHVRNTTGKNMFAVAEFWKNDIGAIENYLSKTNWNHSVFDVPLHYNLYNASRSGGNYDMRQIFNGTVVQRHPTHAVTFVDNHDSQPEEALESFVEEWFKPLAYALTLTRDQGYPSVFYGDYYGIPTHGVPAMKSKIDPILEARQKYAYGKQNDYLDHHNMIGWTREGNTAHPNSGLATIMSDGPGGNKWMYVGRNKAGQVWRDITGNRSGTVTINADGWGNFSVNGGSVSIWV

SEQ ID NO: 21610 - protein, 483 aa, Synthetic construct
HHNGTNGTMMQYFEWYLPNDGNHWHRLRSDASNLKDKGITAVWIPPAWKGASQNDVGYGAYDLYDLGEFNQKGTVRTKYGTRNQLQAAVTALKSNGIQVYGDVVMNHKGGADATEWVRAVEVNPSNRNQEVSGDYTIEAWTKFDFPGRGNTHSNFKWRWYHFDGVDWDQSRQLQNKIYKFRGDGKEWDWEVDTENGNYDYLMYADYDMDHPEVVNELRNWGVWYTNTLGLDGFRIDAVKHIKYSFTRDWLTHVRNTTGKNMFAVAEFWKNDIGAIENYLSNTNWNHSVFDVPLHYNLYNASRSGGNYDMRQIFNGTVVQRHPTHAVTFVDNHDSQPEEALESFVEEWFKPLAYALTLTRDQGYPSVFYGDYYGIPTHGVPAMKSKIDPILEARQKYAYGKQNDYLDHHNMIGWTREGNTAHPNSGLATIMSDGPGGNKWMYVGRNKAGQVWRDITGNRSGTVTINADGWGNFSVNGGSVSIWV

SEQ ID NO: 21611 - protein, 483 aa, Synthetic construct
HHNGTNGTMMQYFEWYLPNDGNHWHRLRSDASNLKDKGITAVWIPPAWKGASQNDVGYGAYDLYDLGEFNQKGTVRTKYGTRNQLQAAVTALKSNGIQVWGDVVMNHKGGADATEWVRAVEVNPSNRNQEVSGDYTIEAWTKFDFPGRGNTHSNFKWRWYHFDGVDWDQSRQLQNKIYKFRGDGKEWDWEVDEENGNYDYLMYADYDMDHPEVVNELRNWGVWYTNTLGLDGFRIDAVKHIKYSFTRDWLTHVRNTTGKNMFAVAEFWKNDIGAIENYLSKTNWNHSVFDVPLHYNLYNASRSGGNYDMRQIFNGTVVQRHPTHAVTFVDNHDSQPEEALESFVEEWFKPLAYALTLTRDQGYPSVFYGDYYGIPTHGVPAMKSKIDPILEARQKYAYGKQNDYLDHHNMIGWTREGNTAHPNSGLATIMSDGPGGNKWMYVGRNKAGQVWRDITGNRSGTVTINADGWGNFSVNGGSVSIWV

SEQ ID NO: 21612 - protein, 483 aa, Synthetic construct
HHNQTNGTMMQYFEWYLPNDGNHWNRLRSDASNLKDKGITAVWIPPAWKGASQNDVGYGAYDLYDLGEFNQKGTVRTKYGTRNQLQAAVTALKSNGIQVYGDVVMNHKGGADATEWVRAVEVNPSNRNQEVSGDYTIEAWTKFDFPGRGNTHSNFKWRWYHFDGVDWDQSRQLQNRIYKFRGDGKEWDWEVDTENGNYDYLMYADYDMDHPEVVNELRNWGVWYTNTLGLDGFRIDAVKHIKYSFTRDWLEHVRNTTGKNMFAVAEFWKNDIGAIRNYLSKTNWNHSVFDVPLHYNLYNASRSGGNYDMRQIFNGTVVQRHPTHAVTFVDNHDSQPEEALESFVEEWFKPLAYALTLTRDQGYPSVFYGDYYGIPTHGVPAMKSKIDPILEARQKYAYGKQNDYLDHHNMIGWTREGNTAHPNSGLATIMSDGPGGNKWMYVGRNKAGQVWRDITGNRSGTVTINADGWGNFSVNGGSVSIWV

SEQ ID NO: 21613 - protein, 483 aa, Synthetic construct
HHNQTNGTMMQYFEWYLPNDGNHWNRLRSDASNLKDKGITAVWIPPAWKGASQNDVGYGAYDLYDLGEFNQKGTVRTKYGTRNQLQAAVTALKSNGIQVYGDVVMNHKGGADATEWVRAVEVNPSNRNQEVSGDYTIEAWTKFDFPGRGNTHSNFKWRWYHFDGVDWDQSRQLQNKIYKFRGDGKEWDWEVDTENGNYDYLMYADIDMDHPEVVNELRNWGVWYTNTLGLDGFRIDAVKHIKYSFTRDWLTHVRNTTGKNMFAVAEFWKNDIGAIRNYLSKTNWNHSVFDVPLHYNLYNASRSGGNYDMRQIFNGTVVQRHPTHAVTFVDNHDSQPEEALESFVEEWFKPLAYALTLTRDQGYPSVFYGDYYGIPTHGVPAMKSKIDPILEARQKYAYGKQNDYMDHHNMIGWTREGNTAHPNSGLATIMSDGPGGNKWMYVGRNKAGQVWRDITGNRSGTVTINADGWGNFSVNGGSVSIWV

SEQ ID NO: 21614 - protein, 483 aa, Synthetic construct
HHNGTNGTMMQYFEWYLPNDGNHWHRLRSDASNLKDKGITAVWIPPAWKGASQNDVGYGAYDLYDLGEFNQKGTVRTKYGTRNQLQAAVTALKSNGIQVYGDVVMNHKGGADATEWVRAVEVNPSNRNQEVSGDYTIEAWTKFDFPGRGNTHSNFKWRWYHFDGVDWDQSRQLQNKIYKFRGDGKEWDWEVDTENGNYDYLMYADYDMDHPEVVNELRNWGVWYTNTLGLDGFRIDAVKHIKYSFTRDWLTHVRNTTGKNMFAVAEFWKNDIGAIENYLSKTNWNHSVFDVPLHYNLYNASRSGGNYDMRQIFNGTVVQRHPTHAVTFVDNHDSQPEEALESFVEEWFKPLAYALTLTRDQGNPSVFYGDYYGIPTHGVPAMKSKIDPILEARQKYAYGKQNDYLDHHNMIGWTREGNTAHPNSGLATIMSDGPGGNKWMYVGRNKAGQVWRDITGNRSGTVTINADGWGNFSVNGGSVSIWV

SEQ ID NO: 21615 - protein, 483 aa, Synthetic construct
HHNQTNGTMMQYFEWYLPNDGNHWNRLRSDASNLKDKGITAVWIPPAWKGASQNDVGYGAYDLYDLGEFNQKGTVRTKYGTRNQLQAAVTALKSNGIQVYGDVVMNHKGGADATEWVRAVEVNPSNRNQEVSGDYTIEAWTKFDFPGRGNTHSNFKWRWYHFDGVDWDQSRQLQNKIYKFRGDGKEWDWEVDEENGNYDYLMYADYDMDHPEVVNELRNWGVWYTNTLGLDGFRIDAVKHIKYSFTRDWLTHVRNTTGKNMFAVAEFWKNDIGAIRNYLSKTNWNHSVFDVPLHYNLYNASRSGGNYDMRQIFNGTVVQRHPTHAVTFVDNHDSQPEEALESFVEEWFKPLAYALTLTRDQGYPSVFYGDYYGIPTHGVPAMKSKIDPILEARQKYAYGKQNDYMDHHNMIGWTREGNTAHPNSGLATIMSDGPGGNKWMYVGRNKAGQVWRDITGNRSGTVTINADGWGNFSVNGGSVSIWV

SEQ ID NO: 21616 - protein, 483 aa, Synthetic construct
HHNGTNGTMMQYFEWYLPNDGNHWHRLRSDASNLKDKGITAVWIPPAWKGASQNDVGYGAYDLYDLGEFNQKGTVRTKYGTRNQLQAAVTALKSNGIQVYGDVVMNHKGGADATEWVRAVEVNPSNRNQEVSGDYTIEAWTKFDFPGRGNTHSNFKWRWDHFDGVDWDQSRQLQNKIYKFRGDGKEWDWEVDTENGNYDYLMYADYDMDHPEVVNELRNWGVWYTNTLGLDGFRIDAVKHIKYSFTRDWLTHVRNTTGKNMFAVAEFWKNDIGAIENYLSKTNWNHSVFDVPLHYNLYNASRSGGNYDMRQIFNGTVVQRHPTHAVTFVDNHDSQPEEALESFVEEWFKPLAYALTLTRDQGYPSVFYGDYYGIPTHGVPAMKSKIDPILEARQKYAYGKQNDYLDHHNMIGWTREGNTAHPNSGLATIMSDGPGGNKWMYVGRNKAGQVWRDITGNRSGTVTINADGWGNFSVNGGSVSIWV

SEQ ID NO: 21617 - protein, 483 aa, Synthetic construct
HHNQTNGTMMQYFEWYLPNDGNHWNRLRSDASNLKDKGITAVWIPPAWKGASQNDVGYGAYDLYDLGEFNQKGTVRTKYGTRNQLQAAVTALKSNGIQVYGDVVMNHKGGADATEWVDAVEVNPSNRNQEVSGDYTIEAWTKFDFPGRGNTHSNFKWRWYHFDGVDWDQSRQLQNKIYKFRGDGKEWDWEVDEENGNYDYLMYADYDMDHPEVVNELRNWGVWYTNTLGLDGFRIDAVKHIKYSFTRDWLEHVRNTTGKNMFAVAEFWKNDIGAIENYLSKTNWNHSVFDVPLHYNLYNASRSGGNYDMRQIFNGTVVQRHPTHAVTFVDNHDSQPEEALESFVEEWFKPLAYALTLTRDQGYPSVFYGDYYGIPTHGVPAMKSKIDPILEARQKYAYGKQNDYMDHHNMIGWTREGNTAHPNSGLATIMSDGPGGNKWMYVGRNKAGQVWRDITGNRSGTVTINADGWGNFSVNGGSVSIWV

SEQ ID NO: 21618 - protein, 483 aa, Synthetic construct
HHNGTNGTMMQYFEWYLPNDGNHWNRLRSDASNLKDKGITAVWIPPAWKGASQNDVGYGAYDLYDLGEFNQKGTVRTKYGTRNQLQAAVTALKSNGIQVYGDVVMNHKGGADATEWVRAVEVNPSNRNQEVSGDYTIEAWTKFDFPGRGNTHSNFKWRWYHFDGVDWDQSRQLQNRIYKFRGDGKEWDWEVDTENGNYDYLMYADIDMDHPEVVNELRNWGVWYTNTLGLDGFRIDAVKHIKYSFTRDWLTHVRNTTGKNMFAVAEFWKNDIGAIENYLSKTNWNHSVFDVPLHYNLYNASRSGGNYDMRQIFEGTVVQRHPTHAVTFVDNHDSQPEEALESFVEEWFKPLAYALTLTRDQGYPSVFYGDYYGIPTHGVPAMKSKIDPILEARQKYAYGKQNDYLDHHNMIGWTREGNTAHPNSGLATIMSDGPGGNKWMYVGRNKAGQVWRDITGNRSDEVTINADGWGNFSVNGGSVSIWV

SEQ ID NO: 21619 - protein, 483 aa, Synthetic construct
HHNGTNGTMMQYFEWYLPNDGNHWHRLRSDASNLKDKGITAVWIPPAWKGASQNDVGYGAYDLYDLGEFNQKGTVRTKYGTRNQLQAAVTALKSNGIQVYGDVVMNHKGGADATEWVRAVEVNPSNRNQEVSGDYTIEAWTKFDFPGRGNTHSNFKWRWYHFDGVDWDQSRQLQNKIYKFRGDGKGWDWEVDTENGNYDYLMYADYDMDHPEVVNELRNWGVWYTNTLGLDGFRIDAVKHIKYSFTRDWLTHVRNTTGKNMFAVAEFWKNDIGAIRNYLSKTNWNHSVFDVPLHYNLYNASRSGGNYDMRQIFNGTVVQRHPTHAVTFVDNHDSQPEEALESFVEEWFKPLAYALTLTRDQGYPSVFYGDYYGIPTHGVPAMKSKIDPILEARQKYAYGKQNDYLDHHNMIGWTREGNTAHPNSGLATIMSDGPGGNKWMYVGRNKAGQVWRDITGNRSGTVTINADGWGNFSVNGGSVSIWV

SEQ ID NO: 21620 - protein, 483 aa, Synthetic construct
HHNQTNGTMMQYFEWYLPNDGNHWNRLRSDASNLKDMGITAVWIPPAWKGASQNDVGYGAYDLYDLGEFNQKGTVRTKYGTRNQLQAAVTALKSNGIQVYGDVVMNHKGGADATEWVRAVEVNPSNRNQEVSGDYTIEAWTKFDFPGRGNTHSNFKWRWYHFDGVDWDQSRQLQNKIYKFRGDGKEWDWEVDEENGNYDYLMYADYDMDHPEVVNELRNWGVWYTNTLGLDGFRIDAVKHIKYSFTRDWLEHVRNTTGKNMFAVAEFWKNDIGAIENYLSKTNWNHSVFDVPLHYNLYNASRSGGNYDMRQIFNGTVVQRHPTHAVTFVDNHDSQPEEALESFVEEWFKPLAYALTLTRDQGYPSVFYGDYYGIPTHGVPAMKSKIDPILEARQKYAYGKQNDYMDHHNMIGWTREGNTAHPNSGLATIMSDGPGGNKWMYVGRNKAGQVWRDITGNRSGTVTINADGWGNFSVNGGSVSIWV

SEQ ID NO: 21621 - protein, 483 aa, Synthetic construct
HHNGTNGTMMQYFEWYLPNDGNHWHRLRSDASNLKDKGITAVWIPPAWKGASQNDVGYGAYDLYDLGEFNQKGTVRTKYGTRNQLQAAVTALKSNGIQVYGDVVMNHKGGADATEWVRAVEVNPSNRNQEVSGDWTIEAWTKFDFPGRGNTHSNFKWRWYHFDGVDWDQSRQLQNKIYKFRGDGKEWDWEVDTENGNYDYLMYADYDMDHPEVVNELRNWGVWYTNTLGLDGFRIDAVKHIKYSFTRDWLTHVRNTTGKNMFAVAEFWKNDIGAIENYLSKTNWNHSVFDVPLHYNLYNASRSGGNYDMRQIFNGTVVQRHPTHAVTFVDNHDSQPEEALESFVEEWFKPLAYALTLTRDQGYPSVFYGDYYGIPTHGVPAMKSKIDPILEARQKYAYGKQNDYLDHHNMIGWTREGNTAHPNSGLATIMSDGPGGNKWMYVGRNKAGQVWRDITGNRSGTVTINADGWGNFSVNGGSVSIWV

SEQ ID NO: 21622 - protein, 483 aa, Synthetic construct
HHNGTNGTMMQYFEWYLPNDGNHWNRLRSDASNLKDKGITAVWIPPAWKGASQNDVGYGAYDLYDLGEFNQKGTVRTKYGTRNQLQAAVTALKSNGIQVYGDVVMNHKGGADATEWVRAVEVNPSNRNQEVSGDYTIEAWTKFDFPGRGNTHSNFKWRWWHFDGVDWDQSRQLQNKIYKFRGDGKEWDWEVDEENGNYDYLMYADYDMDHPEVVNELRNWGVWYTNTLGLDGFRIDAVKHIKYSFTRDWLEHVRNTTGKNMFAVAEFWKNDIGAIENYLSKTNWNHSVFDVPLHYNLYNASRSGGNYDMRQIFNGTVVQRHPTHAVTFVDNHDSQPEEALESFVEEWFKPLAYALTLTRDQGYPSVFYGDYYGIPTHGVPAMKSKIDPILEARQKYAYGKQNDYLDHHNMIGWTREGNTAHPNSGLATIMSDGPGGNKWMYVGRNKAGQVWRDITGNRSGTVTINADGWGNFSVNGGSVSIWV

SEQ ID NO: 21623 - protein, 483 aa, Synthetic construct
HHNGTNGTMMQYFEWYLPNDGNHWHRLRSDASNLKDKGITAVWIPPAWKGASQNDVGYGAYDLYDLGEFNQKGTVRTKYGTRNQLQAAVTALKSNGIQVYGDVVMNHKGGADATEWVRAVEVNPSNRNQEVSGDYTIEAWTKFDFPGRGNTHSNFKWRWYHFDGVDWDQSRQLQNKIYKFRGDGKEWDWEVDTENGNYDYLMYADYDMDHPEVVNELRNWGVWYTNTLGLDGFRIDAVKHIKYSFTRDWLEHVRNTTGKNMFAVAEFWKNDIGAIENYLSKTNWNHSVFDVPLHYNLYNASRSGGNYDMRQIFNGTVVQRHPTHAVTFVDNHDSQPEEALESFVEEWFKPLAYALTLTRDQGYPSVFYGDYYGIPTHGVPAMKSKIDPILEARQKYAYGKQNDYLDHHNMIGWTREGNTAHPNSGLATIMSDGPGGNKWMYVGRNKAGQVWRDITGNRSGTVTINADGWGNFSVNGGSVSIWV

SEQ ID NO: 21624 - protein, 483 aa, Synthetic construct
HHNQTNGTMMQYFEWYLPNDGNHWNRLRSDASNLKDKGITAVWIPPAWKGASQNDVGYGAYDLYDLGEFNQKGTVRTKYGTRNQLQAAVTALKSNGIQVYGDVVMNHKGGADATEWVRAVEVNPSNRNQEVSGDYTIEAWTKFDFPGRGNTHSNFKWRWYHFDGVDWDQSRQLQNKIYKFRGDGKEWDWEVDTENGNYDYLMYADIDMDHPEVVNELRNWGVWYTNTLGLDGFRIDAVKHIKYSFTRDWLEHVRNTTGKNMFAVAEFWKNDIGAIENYLSKTNWNHSVFDVPLHYNLYNASRSGGNYDMRQIFNGTVVQRHPTHAVTFVDNHDSQPEEALESFVEEWFKPLAYALTLTRDQGYPSVFYGDYYGIPTHGVPAMKSKIDPILEARQKYAYGKQNDYMDHHNMIGWTREGNTAHPNSGLATIMSDGPGGNKWMYVGRNKAGQVWRDITGNRSGTVTINADGWGNFSVNGGSVSIWV

SEQ ID NO: 21625 - protein, 483 aa, Synthetic construct
HHNGTNGTMMQYFEWYLPNDGNHWHRLRSDASNLKDKGITAVWIPPAWKGASQNDVGYGAYDLYDLGEFNQKGTVRTKYGTRNQLQAAVTALKSNGIQVYGDVVMNHKGGADATEWVRAVEVNPSNRNQEVSGDYTIEAWTKFDFPGRGNTHSNFKWRWYHFDGVDWDQSRQLQNKIYKFQGDGKEWDWEVDEENGNYDYLMYADYDMDHPEVVNELRNWGVWYTNTLGLDGFRIDAVKHIKYSFTRDWLTHVRNTTGKNMFAVAEFWKNDIGAIENYLSKTNWNHSVFDVPLHYNLYNASRSGGNYDMRQIFNGTVVQRHPTHAVTFVDNHDSQPEEALESFVEEWFKPLAYALTLTRDQGYPSVFYGDYYGIPTHGVPAMKSKIDPILEARQKYAYGKQNDYLDHHNMIGWTREGNTAHPNSGLATIMSDGPGGNKWMYVGRNKAGQVWRDITGNRSGTVTINADGWGNFSVNGGSVSIWV

SEQ ID NO: 21626 - protein, 483 aa, Synthetic construct
HHNGTNGTMMQYFEWYLPNDGNHWNRLRSDASNLKDKGITAVWIPPAWKGASQNDVGYGAYDLYDLGEFNQKGTVRTKYGTRNQLQAAVTALKSNGIQVYGDVVMNHKGGADATEWVRAVEVNPSNRNQEVSGDYTIEAWTKFDFPGRGNTHSNFKWRWWHFDGVDWDQSRQLQNKIYKFRGDGKGWDWEVDTENGNYDYLMYADYDMDHPEVVNELRNWGVWYTNTLGLDGFRIDAVKHIKYSFTRDWLEHVRNTTGKNMFAVAEFWKNDIGAIENYLSKTNWNHSVFDVPLHYNLYNASRSGGNYDMRQIFNGTVVQRHPTHAVTFVDNHDSQPEEALESFVEEWFKPLAYALTLTRDQGYPSVFYGDYYGIPTHGVPAMKSKIDPILEARQKYAYGKQNDYMDHHNMIGWTREGNTAHPNSGLATIMSDGPGGNKWMYVGRNKAGQVWRDITGNRSGTVTINADGWGNFSVNGGSVSIWV

SEQ ID NO: 21627 - protein, 483 aa, Synthetic construct
HHNQTNGTMMQYFEWYLPNDGNHWHRLRSDASNLKDKGITAVWIPPAWKGASQNDVGYGAYDLYDLGEFNQKGTVRTKYGTRNQLQAAVTALKSNGIQVYGDVVMNHKGGADATEWVRAVEVNPSNRNQEVSGDYTIEAWTKFDFPGRGNTHSNFKWRWWHFDGVDWDQSRQLQNRIYKFRGDGKEWDWEVDTENGNYDYLMYADYDMDHPEVVNELRNWGVWYTNTLGLDGFRIDAVKHIKYSFTRDWLTHVRNTTGKNMFAVAEFWKNDIGAIENYLSKTNWNHSVFDVPLHYNLYNASRSGGNYDMRQIFNGTVVQRHPTHAVTFVDNHDSQPEEALESFVEEWFKPLAYALTLTRDQGYPSVFYGDYYGIPTHGVPAMKSKIDPILEARQKYAYGKQNDYMDHHNMIGWTREGNTAHPNSGLATIMSDGPGGNKWMYVGRNKAGQVWRDITGNRSGTVTINADGWGNFSVNGGSVSIWV

SEQ ID NO: 21628 - protein, 483 aa, Synthetic construct
HHNGTNGTMMQYFEWYLPNDGNHWHRLRSDASNLKDKGITAVWIPPAWKGASQNDVGYGAYDLYDLGEFNQKGTVRTKYGTRNQLQAAVTALKSNGIQVWGDVVMNHKGGADATEWVRAVEVNPSNRNQEVSGDYTIEAWTKFDFPGRGNTHSNFKWRWYHFDGVDWDQSRQLQNKIYKFRGDGKEWDWEVDTENGNYDYLMYADYDMDHPEVVNELRNWGVWYTNTLGLDGFRIDAVKHIKYSFTRDWLTHVRNTTGKNMFAVAEFWKNDIGAIENYLSKTNWNHSVFDVPLHYNLYNASRSGGNYDMRQIFNGTVVQRHPTHAVTFVDNHDSQPEEALESFVEEWFKPLAYALTLTRDQGYPSVFYGDYYGIPTHGVPAMKSKIDPILEARQKYAYGKQNDYLDHHNMIGWTREGNTAHPNSGLATIMSDGPGGNKWMYVGRNKAGQVWRDITGNRSGTVTINADGWGNFSVNGGSVSIWV

SEQ ID NO: 21629 - protein, 483 aa, Synthetic construct
HHNGTNGTMMQYFEWYLPNDGNHWNRLRSDASNLKDKGITAVWIPPAWKGASQNDVGYGAYDLYDLGEFNQKGTVRTKYGTRNQLQAAVTALKSNGIQVYGDVVMNHKGGADATEWVRAVEVNPSNRNQEVSGDYTIEAWTKFDFPGRGNTHSNFKWRWWHFDGVDWDQSRQLQNKIYKFRGDGKEWDWEVDTENGNYDYLMYADIDMDHPEVVNELRNWGVWYTNTLGLDGFRIDAVKHIKYSFTRDWLTHVRNTTGKNMFAVAEFWKNDIGAIRNYLSKTNWNHSVFDVPLHYNLYNASRSGGNYDMRQIFNGTVVQRHPTHAVTFVDNHDSQPEEALESFVEEWFKPLAYALTLTRDQGYPSVFYGDYYGIPTHGVPAMKSKIDPILEARQKYAYGKQNDYMDHHNMIGWTREGNTAHPNSGLATIMSDGPGGNKWMYVGRNKAGQVWRDITGNRSGTVTINADGWGNFSVNGGSVSIWV

SEQ ID NO: 21630 - protein, 483 aa, Synthetic construct
HHNGTNGTMMQYFEWYLPNDGNHWHRLRSDASNLKDKGITAVWIPPAWKGASQNDVGYGAYDLYDLGEFNQKGTVRTKYGTRNQLQAAVTALKSNGIQVYGDVVMNHKGGADATEWVRAVEVNPSNRNQEVSGDYTIEAWTKFDFPGRGNTHSNFKWRWYHFDGVDWDQSRQLQNKIYKFRGDGKGWDWEVDTENGNYDYLMYADYDMDHPEVVNELRNWGVWYTNTLGLDGFRIDAVKHIKYSFTRDWLEHVRNTTGKNMFAVAEFWKNDIGAIENYLSKTNWNHSVFDVPLHYNLYNASRSGGNYDMRQIFNGTVVQRHPTHAVTFVDNHDSQPEEALESFVEEWFKPLAYALTLTRDQGYPSVFYGDYYGIPTHGVPAMKSKIDPILEARQKYAYGKQNDYLDHHNMIGWTREGNTAHPNSGLATIMSDGPGGNKWMYVGRNKAGQVWRDITGNRSGTVTINADGWGNFSVNGGSVSIWV

SEQ ID NO: 21631 - protein, 483 aa, Synthetic construct
HHNGTNGTMMQYFEWYLPNDGNHWHRLRSDASNLKDKGITAVWIPPAWKGASQNDVGYGAYDLYDLGEFNQKGTVRTKYGTRNQLQAAVTALKSNGIQVYGDVVMNHKGGADATEWVRAVEVNPSNRNQEVSGDYTIEAWTKFDFPGRGNTHSNFKWRWYHFDGVDWDQSRQLQNKIYKFNGDGKEWDWEVDTENGNYDYLMYADYDMDHPEVVNELRNWGVWYTNTLGLDGFRIDAVKHIKYSFTRDWLTHVRNTTGKNMFAVAEFWKNDIGAIENYLSKTNWNHSVFDVPLHYNLYNASRSGGNYDMRQIFNGTVVQRHPTHAVTFVDNHDSQPEEALESFVEEWFKPLAYALTLTRDQGYPSVFYGDYYGIPTHGVPAMKSKIDPILEARQKYAYGKQNDYLDHHNMIGWTREGNTAHPNSGLATIMSDGPGGNKWMYVGRNKAGQVWRDITGNRSGTVTINADGWGNFSVNGGSVSIWV

SEQ ID NO: 21632 - protein, 483 aa, Synthetic construct
HHNGTNGTMMQYFEWYLPNDGNHWNRLRSDASNLKDKGITAVWIPPAWKGASQNDVGYGAYDLYDLGEFNQKGTVRTKYGTRNQLQAAVTALKSNGIQVYGDVVMNHKGGADATEWVRAVEVNPSNRNQEVSGDYTIEAWTKFDFPGRGNTHSNFKWRWYHFDGVDWDQSRQLQNRIYKFRGDGKEWDWEVDTENGNYDYLMYADIDMDHPEVVNELRNWGVWYTNTLGLDGFRIDAVKHIKYSFTRDWLTHVRNTTGKNMFAVAEFWKNDIGAIENYLSKTNWNHSVFDVPLHYNLYNASRSGGNYDMRQIFKGTVVQRHPTHAVTFVDNHDSQPEEALESFVEEWFKPLAYALTLTRDQGYPSVFYGDYYGIPTHGVPAMKSKIDPILEARQKYAYGKQNDYLDHHNMIGWTREGNTAHPNSGLATIMSDGPGGNKWMYVGRNKAGQRWRDITGNRSDTVTINADGWGNFSVNGGSVSIWV

SEQ ID NO: 21633 - protein, 483 aa, Synthetic construct
HHNQTNGTMMQYFEWYLPNDGNHWNRLRSDASNLKDKGITAVWIPPAWKGASQNDVGYGAYDLYDLGEFNQKGTVRTKYGTRNQLQAAVTALKSNGIQVYGDVVMNHKGGADATEWVRAVEVNPSNRNQEVSGDYTIEAWTKFDFPGRGNTHSNFKWRWYHFDGVDWDQSRQLQNKIYKFRGDGKEWDWEVDTENGNYDYLMYADYDMDHPEVVNELRNWGVWYTNTLGLDGFRIDAVKHIKYSFTRDWLTHVRNTTGKNMFAVAEFWKNDIGAIRNYLSKTNWNHSVFDVPLHYNLYNASRSGGNYDMRQIFNGTVVQRHPTHAVTFVDNHDSQPEEALESFVEEWFKPLAYALTLTRDQGYPSVFYGDYYGIPTHGVPAMKSKIDPILEARQKYAYGKQNDYMDHHNMIGWTREGNTAHPNSGLATIMSDGPGGNKWMYVGRNKAGQVWRDITGNRSGTVTINADGWGNFSVNGGSVSIWV

SEQ ID NO: 21634 - protein, 483 aa, Synthetic construct
HHNQTNGTMMQYFEWYLPNDGNHWNRLRSDASNLKDKGITAVWIPPAWKGASQNDVGYGAYDLYDLGEFNQKGTVRTKYGTRNQLQAAVTALKSNGIQVYGDVVMNHKGGADATEWVRAVEVNPSNRNQEVSGDYTIEAWTKFDFPGRGNTHSNFKWRWWHFDGVDWDQSRQLQNRIYKFRGDGKEWDWEVDTENGNYDYLMYADIDMDHPEVVNELRNWGVWYTNTLGLDGFRIDAVKHIKYSFTRDWLTHVRNTTGKNMFAVAEFWKNDIGAIRNYLSKTNWNHSVFDVPLHYNLYNASRSGGNYDMRQIFNGTVVQRHPTHAVTFVDNHDSQPEEALESFVEEWFKPLAYALTLTRDQGYPSVFYGDYYGIPTHGVPAMKSKIDPILEARQKYAYGKQNDYMDHHNMIGWTREGNTAHPNSGLATIMSDGPGGNKWMYVGRNKAGQVWRDITGNRSGTVTINADGWGNFSVNGGSVSIWV

SEQ ID NO: 21635 - protein, 483 aa, Synthetic construct
HHNGTNGTMMQYFEWYLPNDGNHWHRLRSDASNLKDKGITAVWIPPAWKGASQNDVGYGAYDLYDLGEFNQKGTVRTKYGTRNQLQAAVTALKSNGIQVYGDVVMNHKGGADATEWVRAVEVNPSNRNQEVSGDYTIEAWTKFDFPGRGNTHSNFKWRWWHFDGVDWDQSRQLQNRIYKFRGDGKEWDWEVDTENGNYDYLMYADYDMDHPEVVNELRNWGVWYTNTLGLDGFRIDAVKHIKYSFTRDWLEHVRNTTGKNMFAVAEFWKNDIGAIENYLSKTNWNHSVFDVPLHYNLYNASRSGGNYDMRQIFNGTVVQRHPTHAVTFVDNHDSQPEEALESFVEEWFKPLAYALTLTRDQGYPSVFYGDYYGIPTHGVPAMKSKIDPILEARQKYAYGKQNDYLDHHNMIGWTREGNTAHPNSGLATIMSDGPGGNKWMYVGRNKAGQVWRDITGNRSGTVTINADGWGNFSVNGGSVSIWV

SEQ ID NO: 21636 - protein, 483 aa, Synthetic construct
HHNQTNGTMMQYFEWYLPNDGNHWHRLRSDASNLKDKGITAVWIPPAWKGASQNDVGYGAYDLYDLGEFNQKGTVRTKYGTRNQLQAAVTALKSNGIQVYGDVVMNHKGGADATEWVRAVEVNPSNRNQEVSGDYTIEAWTKFDFPGRGNTHSNFKWRWYHFDGVDWDQSRQLQNRIYKFRGDGKEWDWEVDTENGNYDYLMYADYDMDHPEVVNELRNWGVWYTNTLGLDGFRIDAVKHIKYSFTRDWLTHVRNTTGKNMFAVAEFWKNDIGAIRNYLSKTNWNHSVFDVPLHYNLYNASRSGGNYDMRQIFNGTVVQRHPTHAVTFVDNHDSQPEEALESFVEEWFKPLAYALTLTRDQGYPSVFYGDYYGIPTHGVPAMKSKIDPILEARQKYAYGKQNDYMDHHNMIGWTREGNTAHPNSGLATIMSDGPGGNKWMYVGRNKAGQVWRDITGNRSGTVTINADGWGNFSVNGGSVSIWV

SEQ ID NO: 21637 - protein, 483 aa, Synthetic construct
HHNGTNGTMMQYFEWYLPNDGNHWHRLRSDASNLKDKGITAVWIPPAWKGASQNDVGYGAYDLYDLGEFNQKGTVRTKYGTRNQLQAAVTALKSNGIQVYGDVVMNHKGGADATEWVRAVEVNPSNRNQEVSGDYTIEAWTKFDFPGRGNTHSNFKWRWEHFDGVDWDQSRQLQNKIYKFRGDGKEWDWEVDTENGNYDYLMYADYDMDHPEVVNELRNWGVWYTNTLGLDGFRIDAVKHIKYSFTRDWLTHVRNTTGKNMFAVAEFWKNDIGAIENYLSKTNWNHSVFDVPLHYNLYNASRSGGNYDMRQIFNGTVVQRHPTHAVTFVDNHDSQPEEALESFVEEWFKPLAYALTLTRDQGYPSVFYGDYYGIPTHGVPAMKSKIDPILEARQKYAYGKQNDYLDHHNMIGWTREGNTAHPNSGLATIMSDGPGGNKWMYVGRNKAGQVWRDITGNRSGTVTINADGWGNFSVNGGSVSIWV

SEQ ID NO: 21638 - protein, 483 aa, Synthetic construct
HHNGTNGTMMQYFEWYLPNDGNHWHRLRSDASNLKDKGITAVWIPPAWKGASQNDVGYGAYDLYDLGEFNQKGTVRTKYGTRNQLQAAVTALKSNGIQVYGDVVMNHKGGADATEWVRAVEVNPSNRNQEVSGDYTIEAWTKFDFPGRGNTHSNFKWRWYHFDGVDWDQSRQLQNKIYKFRGDGKEWDWEVDTENGNYDYLMYADIDMDHPEVVNELRNWGVWYTNTLGLDGFRIDAVKHIKYSFTRDWLTHVRNTTGKNMFAVAEFWKNDIGAIRNYLSKTNWNHSVFDVPLHYNLYNASRSGGNYDMRQIFNGTVVQRHPGHAVTFVDNHDSQPEEALESFVEEWFKPLAYALTLTRDQGYPSVFYGDYYGIPTHGVPAMKSKIDPILEARQKYAYGKQNDYMDHHNMIGWTREGNTAHPNSGLATIMSDGPGGNKWMYVGRNKAGQVWRDITGNRSGTVTINADGWGNFSVNGGSVSIWV

SEQ ID NO: 21639 - protein, 483 aa, Synthetic construct
HHNQTNGTMMQYFEWYLPNDGNHWNRLRSDASNLKDKGITAVWIPPAWKGASQNDVGYGAYDLYDLGEFNQKGTVRTKYGTRNQLQAAVTALKSNGIQVYGDVVMNHKGGADATEWVRAVEVNPSNRNQEVSGDYTIEAWTKFDFPGRGNTHSNFKWRWYHFDGVDWDQSRQLQNKIYKFRGDGKEWDWEVDTENGNYDYLMYADYDMDHPEVVNELRNWGVWYTNTLGLDGFRIDAVKHIKYSFTRDWLTHVRNTTGKNMFAVAEFWKNDIGAIRNYLSKTNWNHSVFDVPLHYNLYNASRSGGNYDMRQIFNGTVVQRHPTHAVTFVDNHDSQPEEALESFVEEWFKPLAYALTLTRDQGYPSVFYGDYYGIPTHGVPAMKSKIDPILEARQKYAYGKQNDYLDHHNMIGWTREGNTAHPNSGLATIMSDGPGGNKWMYVGRNKAGQVWRDITGNRSGTVTINADGWGNFSVNGGSVSIWV

SEQ ID NO: 21640 - protein, 483 aa, Synthetic construct
HHNGTNGTMMQYFEWYLPNDGNHWHRLRSDASNLKDKGITAVWIPPAWKGASQNDVGYGAYDLYDLGEFNQKGTVRTKYGTRNQLQAAVTALKSNGIQVYGDVVMNHKGGADATEWVRAVEVNPSNRNQEVSGDETIEAWTKFDFPGRGNTHSNFKWRWYHFDGVDWDQSRQLQNKIYKFRGDGKEWDWEVDTENGNYDYLMYADYDMDHPEVVNELRNWGVWYTNTLGLDGFRIDAVKHIKYSFTRDWLTHVRNTTGKNMFAVAEFWKNDIGAIENYLSKTNWNHSVFDVPLHYNLYNASRSGGNYDMRQIFNGTVVQRHPTHAVTFVDNHDSQPEEALESFVEEWFKPLAYALTLTRDQGYPSVFYGDYYGIPTHGVPAMKSKIDPILEARQKYAYGKQNDYLDHHNMIGWTREGNTAHPNSGLATIMSDGPGGNKWMYVGRNKAGQVWRDITGNRSGTVTINADGWGNFSVNGGSVSIWV

SEQ ID NO: 21641 - protein, 483 aa, Synthetic construct
HHNGTNGTMMQYFEWYLPNDGNHWHRLRSDASNLKDKGITAVWIPPAWKGASQNDVGYGAYDLYDLGEFNQKGTVRTKYGTRNQLQAAVTALKSNGIQVYGDVVMNHKGGADATEWVRAVEVNPSNRNQEVSGDYTIEAWTKFDFPGRGNTHSNFKWRWYHFDGVDWDQSRQLQNKIYKFRGDGKEWDWEVDTENGNYDYLMYADYDMDHPEVVNELRNWGVWYTNTLGLDGFRIDAVKHIKYSFTRDWLTHVRNTTGKNMFAVAEFWKNDIGAIENYLSKTNWNHSVFDVPLHYNLYNASRSGGNYDMRQIFNGTVVQRHPTHAVTFVDNHDSQPEEALESFVEEWFKPLAYALTLTRDQGEPSVFYGDYYGIPTHGVPAMKSKIDPILEARQKYAYGKQNDYLDHHNMIGWTREGNTAHPNSGLATIMSDGPGGNKWMYVGRNKAGQVWRDITGNRSGTVTINADGWGNFSVNGGSVSIWV

SEQ ID NO: 21642 - protein, 483 aa, Synthetic construct
HHNGTNGTMMQYFEWYLPNDGNHWHRLRSDASNLKDKGITAVWIPPAWKGASQNDVGYGAYDLYDLGEFNQKGTVRTKYGTRNQLQAAVTALKSNGIQVYGDVVMNHKGGADATEWVRAVEVNPSNRNQEVSGDYTIEAWTKFDFPGRGNTHSNFKWRWWHFDGVDWDQSRQLQNKIYKFRGDGKGWDWEVDTENGNYDYLMYADYDMDHPEVVNELRNWGVWYTNTLGLDGFRIDAVKHIKYSFTRDWLTHVRNTTGKNMFAVAEFWKNDIGAIENYLSKTNWNHSVFDVPLHYNLYNASRSGGNYDMRQIFNGTVVQRHPTHAVTFVDNHDSQPEEALESFVEEWFKPLAYALTLTRDQGYPSVFYGDYYGIPTHGVPAMKSKIDPILEARQKYAYGKQNDYLDHHNMIGWTREGNTAHPNSGLATIMSDGPGGNKWMYVGRNKAGQVWRDITGNRSGTVTINADGWGNFSVNGGSVSIWV

SEQ ID NO: 21643 - protein, 483 aa, Synthetic construct
HHNGTNGTMMQYFEWYLPNDGNHWNRLRSDASNLKDKGITAVWIPPAWKGASQNDVGYGAYDLYDLGEFNQKGTVRTKYGTRNQLQAAVTALKSNGIQVYGDVVMNHKGGADATEWVRAVEVNPSNRNQEVSGDYTIEAWTKFDFPGRGNTHSNFKWRWYHFDGVDWDQSRQLQNRIYKFRGDGKEWDWEVDTENGNYDYLMYADIDMDHPEVVNELRNWGVWYTDTLGLDGFRIDAVKHIKYSFTRDWLTHVRNTTGKNMFAVAEFWKNDIGAIENYLSKTNWNHSVFDVPLHYNLYNASRSGGNYDMRQIFNGTVVQRHPTHAVTFVDNHDSQPEEALESFVEEWFKPLAYALTLTRDQGYPSVFYGDYYGIPTHGVPAMKSKIDPILEARQKYAYGKQNDYLDHHNMIGWTREGNTAHPNSGLATIMSDGPGGNKWMYVGRNKAGQVWRDITGNRSGEVTINADGWGEFSVNGGSVSIWV

SEQ ID NO: 21644 - protein, 483 aa, Synthetic construct
HHNGTNGTMMQYFEWYLPNDGNHWNRLRSDASNLKDKGITAVWIPPAWKGASQNDVGYGAYDLYDLGEFNQKGTVRTKYGTRNQLQAAVTALKSNGIQVYGDVVMNHKGGADATEWVRAVEVNPSNRNQEVSGDYTIEAWTKFDFPGRGNTHSNFKWRWYHFDGVDWDQSRQLQNKIYKFRGDGKEWDWEVDTENGNYDYLMYADIDMDHPEVVNELRNWGVWYTNTLGLDGFRIDAVKHIKYSFTRDWLEHVRNTTGKNMFAVAEFWKNDIGAIRNYLSKTNWNHSVFDVPLHYNLYNASRSGGNYDMRQIFNGTVVQRHPTHAVTFVDNHDSQPEEALESFVEEWFKPLAYALTLTRDQGYPSVFYGDYYGIPTHGVPAMKSKIDPILEARQKYAYGKQNDYMDHHNMIGWTREGNTAHPNSGLATIMSDGPGGNKWMYVGRNKAGQVWRDITGNRSGTVTINADGWGNFSVNGGSVSIWV

SEQ ID NO: 21645 - protein, 483 aa, Synthetic construct
HHNGTNGTMMQYFEWYLPNDGNHWHRLRSDASNLKDKGITAVWIPPAWKGASQNDVGYGAYDLYDLGEFNQKGTVRTKYGTRNQLQAAVTALKSNGIQVYGDVVMNHKGGADATEWVRAVEVNPSNRNQEVSGDYTIEAWTKFDFPGRGNTHSNFKWRWWHFDGVDWDQSRQLQNKIYKFRGDGKEWDWEVDTENGNYDYLMYADIDMDHPEVVNELRNWGVWYTNTLGLDGFRIDAVKHIKYSFTRDWLTHVRNTTGKNMFAVAEFWKNDIGAIENYLSKTNWNHSVFDVPLHYNLYNASRSGGNYDMRQIFNGTVVQRHPTHAVTFVDNHDSQPEEALESFVEEWFKPLAYALTLTRDQGYPSVFYGDYYGIPTHGVPAMKSKIDPILEARQKYAYGKQNDYMDHHNMIGWTREGNTAHPNSGLATIMSDGPGGNKWMYVGRNKAGQVWRDITGNRSGTVTINADGWGNFSVNGGSVSIWV

SEQ ID NO: 21646 - protein, 483 aa, Synthetic construct
HHNGTNGTMMQYFEWYLPNDGNHWNRLRSDASNLKDKGITAVWIPPAWKGASQNDVGYGAYDLYDLGEFNQKGTVRTKYGTRNQLQAAVTALKSNGIQVYGDVVMNHKGGADATEWVRAVEVNPSNRNQEVSGDYTIEAWTKFDFPGRGNTHSNFKWRWWHFDGVDWDQSRQLQNKIYKFRGDGKGWDWEVDTENGNYDYLMYADYDMDHPEVVNELRNWGVWYTNTLGLDGFRIDAVKHIKYSFTRDWLTHVRNTTGKNMFAVAEFWKNDIGAIRNYLSKTNWNHSVFDVPLHYNLYNASRSGGNYDMRQIFNGTVVQRHPGHAVTFVDNHDSQPEEALESFVEEWFKPLAYALTLTRDQGYPSVFYGDYYGIPTHGVPAMKSKIDPILEARQKYAYGKQNDYLDHHNMIGWTREGNTAHPNSGLATIMSDGPGGNKWMYVGRNKAGQVWRDITGNRSGTVTINADGWGNFSVNGGSVSIWV

SEQ ID NO: 21647 - protein, 483 aa, Synthetic construct
HHNQTNGTMMQYFEWYLPNDGNHWNRLRSDASNLKDKGITAVWIPPAWKGASQNDVGYGAYDLYDLGEFNQKGTVRTKYGTRNQLQAAVTALKSNGIQVYGDVVMNHKGGADATEWVRAVEVNPSNRNQEVSGDYTIEAWTKFDFPGRGNTHSNFKWRWYHFDGVDWDQSRQLQNKIYKFRGDGKGWDWEVDTENGNYDYLMYADYDMDHPEVVNELRNWGVWYTNTLGLDGFRIDAVKHIKYSFTRDWLEHVRNTTGKNMFAVAEFWKNDIGAIENYLSKTNWNHSVFDVPLHYNLYNASRSGGNYDMRQIFNGTVVQRHPAHAVTFVDNHDSQPEEALESFVEEWFKPLAYALTLTRDQGYPSVFYGDYYGIPTHGVPAMKSKIDPILEARQKYAYGKQNDYLDHHNMIGWTREGNTAHPNSGLATIMSDGPGGNKWMYVGRNKAGQVWRDITGNRSGTVTINADGWGNFSVNGGSVSIWV

SEQ ID NO: 21648 - protein, 483 aa, Synthetic construct
HHNQTNGTMMQYFEWYLPNDGNHWHRLRSDASNLKDKGITAVWIPPAWKGASQNDVGYGAYDLYDLGEFNQKGTVRTKYGTRNQLQAAVTALKSNGIQVYGDVVMNHKGGADATEWVRAVEVNPSNRNQEVSGDYTIEAWTKFDFPGRGNTHSNFKWRWWHFDGVDWDQSRQLQNRIYKFRGDGKEWDWEVDTENGNYDYLMYADYDMDHPEVVNELRNWGVWYTNTLGLDGFRIDAVKHIKYSFTRDWLTHVRNTTGKNMFAVAEFWKNDIGAIENYLSKTNWNHSVFDVPLHYNLYNASRSGGNYDMRQIFNGTVVQRHPGHAVTFVDNHDSQPEEALESFVEEWFKPLAYALTLTRDQGYPSVFYGDYYGIPTHGVPAMKSKIDPILEARQKYAYGKQNDYMDHHNMIGWTREGNTAHPNSGLATIMSDGPGGNKWMYVGRNKAGQVWRDITGNRSGTVTINADGWGNFSVNGGSVSIWV

SEQ ID NO: 21649 - protein, 483 aa, Synthetic construct
HHNGTNGTMMQYFEWYLPNDGNHWNRLRSDASNLKDKGITAVWIPPAWKGASQNDVGYGAYDLYDLGEFNQKGTVRTKYGTRNQLQRAVTALKSNGIQVYGDVVMNHKGGADATEWVRAVEVNPSNRNQEVSGDYTIEAWTKFDFPGRGNTHSNFKWRWYHFDGVDWDQSRQLQNRIYKFRGDGKEWDWEVDTENGNYDYLMYADIDMDHPEVVNELRNWGVWYTRTLGLDGFRIDAVKHIKYSFTRDWLTHVRNTTGKNMFAVAEFWKNDIGAIENYLSKTNWNHSVFDVPLHYNLYNASRSGGNYDMRQIFKGTVVQRHPTHAVTFVDNHDSQPEEALESFVEEWFKPLAYALTLTRDQGYPSVFYGDYYGIPTHGVPAMKSKIDPILEARQKYAYGKQNDYLDHHNMIGWTREGNTKHPNSGLATIMSDGPGGNKWMYVGRNKAGQVWRDITGNRSGRVTINADGWGNFSVNGGSVSIWV

SEQ ID NO: 21650 - protein, 484 aa, Bacillus sp.
HHNGTNGTMMQYFEWHLPNDGQHWNRLRNDAANLKNLGITAVWIPPAWKGTSQNDVGYGAYDLYDLGEFNQKGTIRTKYGTRSQLQSAIASLQNNGIQVYGDAMNHKGGADGTEWVQAVEVNPSNRNQEVTGEYTIEAWTKFDFPGRGNTHSSFKWRWYHFDGTDWDQSRQLNNRIYKFRGTGKAWDWEVDTENGNYDYLMYADVDMDHPEVINELRRWGVWYTNTLNLDGFRIDAVKHIKYSFTRDWLNHVRSTTGKNNMFAVAEFWKNDLGAIENYLHKTNWNHSVFDVPLHYNLYNASKSGGNYDMRQILNGTWSKHPIHAVTFVDNHDSQPAEALESFVEAWFKPLAYALILTREQGYPSVFYGDYYGIPTHGVAAMKGKIDPILEARQKYAYGTQHDYLDHHNIIGWTREGNSAHPNSGLATIMSDGPGGSKWMYVGRHKAGQVWRDITGNRTGTVTINADGWGNFSVNGGSVSIWVNK

SEQ ID NO: 21651 - protein, 483 aa, Synthetic construct
HHNGTNGTMMQYFEWYLPNDGNHWNRLRSDASNLKDKGITAVWIPPAWKGASQNDVGYGAYDLYDLGEFNQKGTVRTKYGTRNQLQAAVTALKSNGIQVYGDVVMNHKGGADATEWVRAVEVNPSNRNQEVSGDYTIEAWTKFDFPGRGNTHSNFKWRWWHFDGVDWDQSRQLQNRIYKFRGDGKEWDWEVDTENGNYDYLMYADIDMDHPEVVNELRNWGVWYTNTLGLDGFRIDAVKHIKYSFTRDWLEHVRNTTGKNMFAVAEFWKNDIGAIRNYLSKTNWNHSVFDVPLHYNLYNASRSGGNYDMRQIFNGTVVQRHPTHAVTFVDNHDSQPEEALESFVEEWFKPLAYALTLTRDQGYPSVFYGDYYGIPTHGVPAMKSKIDPILEARQKYAYGKQNDYMDHHNMIGWTREGNTAHPNSGLATIMSDGPGGNKWMYVGRNKAGQVWRDITGNRSGTVTINADGWGNFSVNGGSVSIWV

SEQ ID NO: 21652 - protein, 483 aa, Synthetic construct
HHNGTNGTMMQYFEWYLPNDGNHWHRLRSDASNLKDKGITAVWIPPAWKGASQNDVGYGAYDLYDLGEFNQKGTVRTKYGTRNQLQAAVTALKSNGIQVYGDVVMNHKGGADATEWVRAVEVNPSNRNQEVSGDYTIEAWTKFDFPGRGNTHSNFKWRWYHFDGVDWDQSRQLQNKIYKFRGDGKEWDWEVDEENGNYDYLMYADYDMDHPEVVNELRNWGVWYTNTLGLDGFRIDAVKHIKYSFTRDWLTHVRNTTQKNMFAVAEFWKNDIGAIENYLSKTNWNHSVFDVPLHYNLYNASRSGGNYDMRQIFNGTVVQRHPTHAVTFVDNHDSQPEEALESFVEEWFKPLAYALTLTRDQGYPSVFYGDYYGIPTHGVPAMKSKIDPILEARQKYAYGKQNDYLDHHNMIGWTREGNTAHPNSGLATIMSDGPGGNKWMYVGRNKAGQVWRDITGNRSGTVTINADGWGNFSVNGGSVSIWV

SEQ ID NO: 21653 - protein, 483 aa, Synthetic construct
HHNGTNGTMMQYFEWYLPNDGNHWNRLRSDASNLKDKGITAVWIPPAWKGASQNDVGYGAYDLYDLGEFNQKGTVRTKYGTRNQLQAAVTALKSNGIQVYGDVVMNHKGGADATEWVRAVEVNPSNRNQEVSGDYTIEAWTKFDFPGRGNTHSNFKWRWDHFDGVDWDQSRQLQNRIYKFRGDGKEWDWEVDTENGNYDYLMYADIDMDHPEVVNELRNWGVWYTDTLGLDGFRIDAVKHIKYSFTRDWLTHVRNTTGKNMFAVAEFWKNDIGAIENYLSKTNWNHSVFDVPLHYNLYNASRSGGNYDMRQIFKGTVVQRHPTHAVTFVDNHDSQPEEALESFVEEWFKPLAYALTLTRDQGYPSVFYGDYYGIPTHGVPAMKSKIDPILEARQKYAYGKQNDYLDHHNMIGWTREGNTEHPNSGLATIMSDGPGGNKWMYVGRNKAGQVWRDITGNRSGTVTINADGWGNFSVNGGSVSIWV

SEQ ID NO: 21654 - protein, 483 aa, Synthetic construct
HHNGTNGTMMQYFEWYLPNDGNHWHRLRSDASNLKDKGITAVWIPPAWKGASQNDVGYGAYDLYDLGEFNQKGTVRTKYGTRNQLQAAVTALKSNGIQVYGDVVMNHKGGADATEWVRAVEVNPSNRNQEVSGDYEIEAWTKFDFPGRGNTHSNFKWRWYHFDGVDWDQSRQLQNKIYKFRGDGKEWDWEVDTENGNYDYLMYADYDMDHPEVVNELRNWGVWYTNTLGLDGFRIDAVKHIKYSFTRDWLTHVRNTTGKNMFAVAEFWKNDIGAIENYLSKTNWNHSVFDVPLHYNLYNASRSGGNYDMRQIFNGTVVQRHPTHAVTFVDNHDSQPEEALESFVEEWFKPLAYALTLTRDQGYPSVFYGDYYGIPTHGVPAMKSKIDPILEARQKYAYGKQNDYLDHHNMIGWTREGNTAHPNSGLATIMSDGPGGNKWMYVGRNKAGQVWRDITGNRSGTVTINADGWGNFSVNGGSVSIWV

SEQ ID NO: 21655 - protein, 483 aa, Synthetic construct
HHNQTNGTMMQYFEWYLPNDGNHWHRLRSDASNLKDKGITAVWIPPAWKGASQNDVGYGAYDLYDLGEFNQKGTVRTKYGTRNQLQAAVTALKSNGIQVYGDVVMNHKGGADATEWVRAVEVNPSNRNQEVSGDYTIEAWTKFDFPGRGNTHSNFKWRWYHFDGVDWDQSRQLQNKIYKFRGDGKGWDWEVDTENGNYDYLMYADYDMDHPEVVNELRNWGVWYTNTLGLDGFRIDAVKHIKYSFTRDWLTHVRNTTGKNMFAVAEFWKNDIGAIENYLSKTNWNHSVFDVPLHYNLYNASRSGGNYDMRQIFNGTVVQRHPGHAVTFVDNHDSQPEEALESFVEEWFKPLAYALTLTRDQGYPSVFYGDYYGIPTHGVPAMKSKIDPILEARQKYAYGKQNDYLDHHNMIGWTREGNTAHPNSGLATIMSDGPGGNKWMYVGRNKAGQVWRDITGNRSGTVTINADGWGNFSVNGGSVSIWV

SEQ ID NO: 21656 - protein, 483 aa, Synthetic construct
HHNQTNGTMMQYFEWYLPNDGNHWNRLRSDASNLKDKGITAVWIPPAWKGASQNDVGYGAYDLYDLGEFNQKGTVRTKYGTRNQLQAAVTALKSNGIQVYGDVVMNHKGGADATEWVRAVEVNPSNRNQEVSGDYTIEAWTKFDFPGRGNTHSNFKWRWYHFDGVDWDQSRQLQNKIYKFRGDGKGWDWEVDTENGNYDYLMYADYDMDHPEVVNELRNWGVWYTNTLGLDGFRIDAVKHIKYSFTRDWLTHVRNTTGKNMFAVAEFWKNDIGAIRNYLSKTNWNHSVFDVPLHYNLYNASRSGGNYDMRQIFNGTVVQRHPTHAVTFVDNHDSQPEEALESFVEEWFKPLAYALTLTRDQGYPSVFYGDYYGIPTHGVPAMKSKIDPILEARQKYAYGKQNDYLDHHNMIGWTREGNTAHPNSGLATIMSDGPGGNKWMYVGRNKAGQVWRDITGNRSGTVTINADGWGNFSVNGGSVSIWV

SEQ ID NO: 21657 - protein, 483 aa, Synthetic construct
HHNQTNGTMMQYFEWYLPNDGNHWNRLRSDASNLKDKGITAVWIPPAWKGASQNDVGYGAYDLYDLGEFNQKGTVRTKYGTRNQLQAAVTALKSNGIQVYGDVVMNHKGGADATEWVRAVEVNPSNRNQEVSGDYTIEAWTKFDFPGRGNTHSNFKWRWYHFDGVDWDQSRQLQNKIYKFRGDGKEWDWEVDEENGNYDYLMYADYDMDHPEVVNELRNWGVWYTNTLGLDGFRIDAVKHIKYSFTRDWLEHVRNTTGKNMFAVAEFWKNDIGAIENYLSKTNWNHSVFDVPLHYNLYNASRSGGNYDMRQIFNGTVVQRHPTHAVTFVDNHDSQPEEALESFVEEWFKPLAYALTLTRDQGYPSVFYGDYYGIPTHGVPAMKSKIDPILEARQKYAYGKQNDYMDHHNMIGWTREGNTAHPNSGLATIMSDGPGGNKWMYVGRNKAGQVWRDITGNRSGTVTINADGWGNFSVNGGSVSIWV

SEQ ID NO: 21658 - protein, 483 aa, Synthetic construct
HHNGTNGTMMQYFEWYLPNDGNHWHRLRSDASNLKDKGITAVWIPPAWKGASQNDVGYGAYDLYDLGEFNQKGTVRTKYGTRNQLQAAVTALKSNGIQVYGDVVMNHKGGADATEWVRAVEVNPSNRNQEVSGDYTIEAWTKFDFPGRGNTHSNFKWRWYHFDGVDWDQSRQLQNKIYKFQGDGKEWDWEVDTENGNYDYLMYADYDMDHPEVVNELRNWGVWYTNTLGLDGFRIDAVKHIKYSFTRDWLTHVRNTTGKNMFAVAEFWKNDIGAIENYLSKTNWNHSVFDVPLHYNLYNASRSGGNYDMRQIFNGTVVQRHPTHAVTFVDNHDSQPEEALESFVEEWFKPLAYALTLTRDQGYPSVFYGDYYGIPTHGVPAMKSKIDPILEARQKYAYGKQNDYLDHHNMIGWTREGNTAHPNSGLATIMSDGPGGNKWMYVGRNKAGQVWRDITGNRSGTVTINADGWGNFSVNGGSVSIWV

SEQ ID NO: 21659 - protein, 483 aa, Synthetic construct
HHNQTNGTMMQYFEWYLPNDGNHWNRLRSDASNLKDKGITAVWIPPAWKGASQNDVGYGAYDLYDLGEFNQKGTVRTKYGTRNQLQAAVTALKSNGIQVYGDVVMNHKGGADATEWVRAVEVNPSNRNQEVSGDYTIEAWTKFDFPGRGNTHSNFKWRWYHFDGVDWDQSRQLQNKIYKFRGDGKGWDWEVDTENGNYDYLMYADYDMDHPEVVNELRNWGVWYTNTLGLDGFRIDAVKHIKYSFTRDWLEHVRNTTGKNMFAVAEFWKNDIGAIENYLSKTNWNHSVFDVPLHYNLYNASRSGGNYDMRQIFNGTVVQRHPTHAVTFVDNHDSQPEEALESFVEEWFKPLAYALTLTRDQGYPSVFYGDYYGIPTHGVPAMKSKIDPILEARQKYAYGKQNDYMDHHNMIGWTREGNTAHPNSGLATIMSDGPGGNKWMYVGRNKAGQVWRDITGNRSGTVTINADGWGNFSVNGGSVSIWV

SEQ ID NO: 21660 - protein, 483 aa, Synthetic construct
HHNGTNGTMMQYFEWYLPNDGNHWHRLRSDASNLKDKGITAVWIPPAWKGASQNDVGYGAYDLYDLGEFNQKGTVRTKYGTRNQLQAAVTALKSNGIQVYGDVVMNHKGGADATEWVRAVEVNPSNRNQEVSGDYTIEAWTKFDFPGRGNTHSNFKWRWYHFDGVDWDQSRQLQNRIYKFRGDGKEWDWEVDTENGNYDYLMYADIDMDHPEVVNELRNWGVWYTNTLGLDGFRIDAVKHIKYSFTRDWLEHVRNTTGKNMFAVAEFWKNDIGAIRNYLSKTNWNHSVFDVPLHYNLYNASRSGGNYDMRQIFNGTVVQRHPTHAVTFVDNHDSQPEEALESFVEEWFKPLAYALTLTRDQGYPSVFYGDYYGIPTHGVPAMKSKIDPILEARQKYAYGKQNDYLDHHNMIGWTREGNTAHPNSGLATIMSDGPGGNKWMYVGRNKAGQVWRDITGNRSGTVTINADGWGNFSVNGGSVSIWV

SEQ ID NO: 21661 - protein, 483 aa, Synthetic construct
HHNQTNGTMMQYFEWYLPNDGNHWHRLRSDASNLKDKGITAVWIPPAWKGASQNDVGYGAYDLYDLGEFNQKGTVRTKYGTRNQLQAAVTALKSNGIQVYGDVVMNHKGGADATEWVRAVEVNPSNRNQEVSGDYTIEAWTKFDFPGRGNTHSNFKWRWWHFDGVDWDQSRQLQNRIYKFRGDGKEWDWEVDTENGNYDYLMYADIDMDHPEVVNELRNWGVWYTNTLGLDGFRIDAVKHIKYSFTRDWLTHVRNTTGKNMFAVAEFWKNDIGAIENYLSKTNWNHSVFDVPLHYNLYNASRSGGNYDMRQIFNGTVVQRHPTHAVTFVDNHDSQPEEALESFVEEWFKPLAYALTLTRDQGYPSVFYGDYYGIPTHGVPAMKSKIDPILEARQKYAYGKQNDYMDHHNMIGWTREGNTAHPNSGLATIMSDGPGGNKWMYVGRNKAGQVWRDITGNRSGTVTINADGWGNFSVNGGSVSIWV

SEQ ID NO: 21662 - protein, 483 aa, Synthetic construct
HHNQTNGTMMQYFEWYLPNDGNHWNRLRSDASNLKDKGITAVWIPPAWKGASQNDVGYGAYDLYDLGEFNQKGTVRTKYGTRNQLQAAVTALKSNGIQVYGDVVMNHKGGADATEWVRAVEVNPSNRNQEVSGDYTIEAWTKFDFPGRGNTHSNFKWRWYHFDGVDWDQSRQLQNKIYKFRGDGKEWDWEVDTENGNYDYLMYADYDMDHPEVVNELRNWGVWYTNTLGLDGFRIDAVKHIKYSFTRDWLEHVRNTTGKNMFAVAEFWKNDIGAIENYLSKTNWNHSVFDVPLHYNLYNASRSGGNYDMRQIFNGTVVQRHPTHAVTFVDNHDSQPEEALESFVEEWFKPLAYALTLTRDQGYPSVFYGDYYGIPTHGVPAMKSKIDPILEARQKYAYGKQNDYMDHHNMIGWTREGNTAHPNSGLATIMSDGPGGNKWMYVGRNKAGQVWRDITGNRSGTVTINADGWGNFSVNGGSVSIWV

SEQ ID NO: 21663 - protein, 483 aa, Synthetic construct
HHNGTNGTMMQYFEWYLPNDGNHWNRLRSDASNLKDKGITAVWIPPAWKGASQNDVGYGAYDLYDLGEFNQKGTVRTKYGTRNQLQAAVTALKSNGIQVYGDVVMNHKGGADATEWVRAVEVNPSNRNQEVSGDYTIEAWTKFDFPGRGNTHSNFKWRWWHFDGVDWDQSRQLQNKIYKFRGDGKEWDWEVDTENGNYDYLMYADYDMDHPEVVNELRNWGVWYTNTLGLDGFRIDAVKHIKYSFTRDWLEHVRNTTGKNMFAVAEFWKNDIGAIENYLSKTNWNHSVFDVPLHYNLYNASRSGGNYDMRQIFNGTVVQRHPTHAVTFVDNHDSQPEEALESFVEEWFKPLAYALTLTRDQGYPSVFYGDYYGIPTHGVPAMKSKIDPILEARQKYAYGKQNDYMDHHNMIGWTREGNTAHPNSGLATIMSDGPGGNKWMYVGRNKAGQVWRDITGNRSGTVTINADGWGNFSVNGGSVSIWV

SEQ ID NO: 21664 - protein, 483 aa, Synthetic construct
HHNGTNGTMMQYFEWYLPNDGNHWHRLRSDASNLKDKGITAVWIPPAWKGASQNDVGYGAYDLYDLGEFNQKGTVRTKYGTRNQLQAAVTALKSNGIQVYGDVVMNHKGGADATEWVRAVEVNPSNRNQEVSGDYTIEAWTKFDFPGRGNTHSNFKWRWWHFDGVDWDQSRQLQNKIYKFRGDGKEWDWEVDTENGNYDYLMYADIDMDHPEVVNELRNWGVWYTNTLGLDGFRIDAVKHIKYSFTRDWLTHVRNTTGKNMFAVAEFWKNDIGAIENYLSKTNWNHSVFDVPLHYNLYNASRSGGNYDMRQIFNGTVVQRHPGHAVTFVDNHDSQPEEALESFVEEWFKPLAYALTLTRDQGYPSVFYGDYYGIPTHGVPAMKSKIDPILEARQKYAYGKQNDYMDHHNMIGWTREGNTAHPNSGLATIMSDGPGGNKWMYVGRNKAGQVWRDITGNRSGTVTINADGWGNFSVNGGSVSIWV

SEQ ID NO: 21665 - protein, 483 aa, Synthetic construct
HHNGTNGTMMQYFEWYLPNDGNHWNRLRSDASNLKDKGITAVWIPPAWKGASQNDVGYGAYDLYDLGEFNQKGTVRTKYGTRNQLQAAVTALKSNGIQVYGDVVMNHKGGADATEWVRAVEVNPSNRNQEVSGDYTIEAWTKFDFPGRGNTHSNFKWRWWHFDGVDWDQSRQLQNRIYKFRGDGKEWDWEVDTENGNYDYLMYADIDMDHPEVVNELRNWGVWYTNTLGLDGFRIDAVKHIKYSFTRDWLEHVRNTTGKNMFAVAEFWKNDIGAIRNYLSKTNWNHSVFDVPLHYNLYNASRSGGNYDMRQIFNGTVVQRHPTHAVTFVDNHDSQPEEALESFVEEWFKPLAYALTLTRDQGYPSVFYGDYYGIPTHGVPAMKSKIDPILEARQKYAYGKQNDYLDHHNMIGWTREGNTAHPNSGLATIMSDGPGGNKWMYVGRNKAGQVWRDITGNRSGTVTINADGWGNFSVNGGSVSIWV

SEQ ID NO: 21666 - protein, 483 aa, Synthetic construct
HHNGTNGTMMQYFEWYLPNDGNHWHRLRSDASNLKDKGITAVWIPPAWKGASQNDVGYGAYDLYDLGEFNQKGTVRTKYGTRNQLQAAVTALKSNGIQVYGDVVMNHKGGADATEWVRAVEVNPSNRNQEVSGDYTIEAWTKFDFPGRGNTHSNFKWRWYHFDGVDWDQSRQLQNKIYKFRGDGKEWDWEVDTENGNYDYLMYADYDMDHPEVVNELRNWGVWYTNTLGLDGFRIDAVKHIKYSFTRDWLTHVRNTTGKNMFAVAEFWKNDIGAIRNYLSKTNWNHSVFDVPLHYNLYNASRSGGNYDMRQIFNGTVVQRHPTHAVTFVDNHDSQPEEALESFVEEWFKPLAYALTLTRDQGYPSVFYGDYYGIPTHGVPAMKSKIDPILEARQKYAYGKQNDYLDHHNMIGWTREGNTAHPNSGLATIMSDGPGGNKWMYVGRNKAGQVWRDITGNRSGTVTINADGWGNFSVNGGSVSIWV

SEQ ID NO: 21667 - protein, 483 aa, Synthetic construct
HHNQTNGTMMQYFEWYLPNDGNHWNRLRSDASNLKDKGITAVWIPPAWKGASQNDVGYGAYDLYDLGEFNQKGTVRTKYGTRNQLQAAVTALKSNGIQVYGDVVMNHKGGADATEWVRAVEVNPSNRNQEVSGDYTIEAWTKFDFPGRGNTHSNFKWRWWHFDGVDWDQSRQLQNRIYKFRGDGKEWDWEVDTENGNYDYLMYADYDMDHPEVVNELRNWGVWYTNTLGLDGFRIDAVKHIKYSFTRDWLTHVRNTTGKNMFAVAEFWKNDIGAIRNYLSKTNWNHSVFDVPLHYNLYNASRSGGNYDMRQIFNGTVVQRHPGHAVTFVDNHDSQPEEALESFVEEWFKPLAYALTLTRDQGYPSVFYGDYYGIPTHGVPAMKSKIDPILEARQKYAYGKQNDYLDHHNMIGWTREGNTAHPNSGLATIMSDGPGGNKWMYVGRNKAGQVWRDITGNRSGTVTINADGWGNFSVNGGSVSIWV

SEQ ID NO: 21668 - protein, 483 aa, Synthetic construct
HHNQTNGTMMQYFEWYLPNDGNHWNRLRSDASNLKDKGITAVWIPPAWKGASQNDVGYGAYDLYDLGEFNQKGTVRTKYGTRNQLQAAVTALKSNGIQVYGDVVMNHKGGADATEWVRAVEVNPSNRNQEVSGDYTIEAWTKFDFPGRGNTHSNFKWRWWHFDGVDWDQSRQLQNKIYKFRGDGKEWDWEVDTENGNYDYLMYADIDMDHPEVVNELRNWGVWYTNTLGLDGFRIDAVKHIKYSFTRDWLTHVRNTTGKNMFAVAEFWKNDIGAIENYLSKTNWNHSVFDVPLHYNLYNASRSGGNYDMRQIFNGTVVQRHPTHAVTFVDNHDSQPEEALESFVEEWFKPLAYALTLTRDQGYPSVFYGDYYGIPTHGVPAMKSKIDPILEARQKYAYGKQNDYLDHHNMIGWTREGNTAHPNSGLATIMSDGPGGNKWMYVGRNKAGQVWRDITGNRSGTVTINADGWGNFSVNGGSVSIWV

SEQ ID NO: 21669 - protein, 483 aa, Synthetic construct
HHNGLNGTMMQYFEWYLPNDGNHWNRLRSDASNLKDKGITAVWIPPAWKGASQNDVGYGAYDLYDLGEFNQKGTVRTKYGTRNQLQAAVTALKSNGIQVYGDVVMNHKGGADATEWVRAVEVNPSNRNQEVSGDYTIEAWTKFDFPGRGNTHSNFKWRWYHFDGVDWDQSRQLQNRIYKFRGDGKGWDWEVDTENGNYDYLMYADIDMDHPEVVNELKNWGVWYSNTLGLDGFRIDAVKHIKYSFTRDWLTHVRNTTGKNMFAVAEFWKNDIGAIENYLSKTNWNHSVFDVPLHYNLYNASRSGGNYDMRQIFNGTVVQRHPTHAVTFVDNHDSQPEEALESFVEEWFKPLAYALTLTRDQGYPSVFYGDYYGIPTHGVPAMKSKIDPILEARQKYAYGKQNDYLDHHNMIGWTREGNTAHPNSGLATIMSDGPGGNKWMYVGRNKAGQVWRDITGNRSGTVTINADGWGNFSVNGGSVSIWV

SEQ ID NO: 21670 - protein, 483 aa, Synthetic construct
HHNGTNGTMMQYFEWYLPNDGNHWHRLRSDASNLKDKGITAVWIPPAWKGASQNDVGYGAYDLYDLGEFNQKGTVRTKYGTRNQLQAAVTALKSNGIQVYGDVVMNHKGGADATEWVRAVEVNPSNRNQEVSGDYTIEAWTKFDFPGRGNTHSNFKWRWYHFDGVDWDQSRQLQNRIYKFRGDGKEWDWEVDEENGNYDYLMYADYDMDHPEVVNELRNWGVWYTNTLGLDGFRIDAVKHIKYSFTRDWLEHVRNTTGKNMFAVAEFWKNDIGAIRNYLSKTNWNHSVFDVPLHYNLYNASRSGGNYDMRQIFNGTVVQRHPTHAVTFVDNHDSQPEEALESFVEEWFKPLAYALTLTRDQGYPSVFYGDYYGIPTHGVPAMKSKIDPILEARQKYAYGKQNDYMDHHNMIGWTREGNTAHPNSGLATIMSDGPGGNKWMYVGRNKAGQVWRDITGNRSGTVTINADGWGNFSVNGGSVSIWV

SEQ ID NO: 21671 - protein, 483 aa, Synthetic construct
HHNGTNGTMMQYFEWYLPNDGNHWHRLRSDASNLKDKGITAVWIPPAWKGASQNDVGYGAYDLYDLGEFNQKGTVRTKYGTRNQLQAAVTALKSNGIQVYGDVVMNHKGGADATEWVRAVEVNPSNRNQEVSGDYTIEAWTKFDFPGRGNTHSNFKWRWYHFDGVDWDQSRQLQNKIYKFRGDGKEWDWEVDTENGNYDYLMYADYDMDHPEVVNELRNWGVWYTNTLGLDGFRIDAVKHIKYSFTRDWLTHVRNTTQKNMFAVAEFWKNDIGAIENYLSKTNWNHSVFDVPLHYNLYNASRSGGNYDMRQIFNGTVVQRHPTHAVTFVDNHDSQPEEALESFVEEWFKPLAYALTLTRDQGYPSVFYGDYYGIPTHGVPAMKSKIDPILEARQKYAYGKQNDYLDHHNMIGWTREGNTAHPNSGLATIMSDGPGGNKWMYVGRNKAGQVWRDITGNRSGTVTINADGWGNFSVNGGSVSIWV

SEQ ID NO: 21672 - protein, 483 aa, Synthetic construct
HHNGTNGTMMQYFEWYLPNDGNHWHRLRSDASNLKDKGITAVWIPPAWKGASQNDVGYGAYDLYDLGEFNQKGTVRTKYGTRNQLQAAVTALKSNGIQVYGDVVMNHKGGADATEWVRAVEVNPSNRNQEVSGDYTIEAWTKFDFPGRGNTHSNFKWRWWHFDGVDWDQSRQLQNKIYKFRGDGKEWDWEVDEENGNYDYLMYADYDMDHPEVVNELRNWGVWYTNTLGLDGFRIDAVKHIKYSFTRDWLTHVRNTTGKNMFAVAEFWKNDIGAIENYLSKTNWNHSVFDVPLHYNLYNASRSGGNYDMRQIFNGTVVQRHPTHAVTFVDNHDSQPEEALESFVEEWFKPLAYALTLTRDQGYPSVFYGDYYGIPTHGVPAMKSKIDPILEARQKYAYGKQNDYMDHHNMIGWTREGNTAHPNSGLATIMSDGPGGNKWMYVGRNKAGQVWRDITGNRSGTVTINADGWGNFSVNGGSVSIWV

SEQ ID NO: 21673 - protein, 483 aa, Synthetic construct
HHNGTNGTMMQYFEWYLPNDGNHWHRLRSDASNLKDKGITAVWIPPAWKGASQNDVGYGAYDLYDLGEFNQKGTVRTKYGTRNQLQAAVTALKSNGIQVYGDVVMNHKGGADATEWVRAVEVNPSNRNQEVSGDYTIEAWTKFDFPGRGNTHSNFKWRWYHFDGVDWDQSRQLQNKIYKFRGDGKEWDWEVDTENGNYDYLMYADYDMDHPEVVNELRNWGVWYTNTLGLDGFRIDAVKHIKYSFTRDWLEHVRNTTGKNMFAVAEFWKNDIGAIENYLSKTNWNHSVFDVPLHYNLYNASRSGGNYDMRQIFNGTVVQRHPTHAVTFVDNHDSQPEEALESFVEEWFKPLAYALTLTRDQGYPSVFYGDYYGIPTHGVPAMKSKIDPILEARQKYAYGKQNDYMDHHNMIGWTREGNTAHPNSGLATIMSDGPGGNKWMYVGRNKAGQVWRDITGNRSGTVTINADGWGNFSVNGGSVSIWV

SEQ ID NO: 21674 - protein, 483 aa, Synthetic construct
HHNQTNGTMMQYFEWYLPNDGNHWNRLRSDASNLKDKGITAVWIPPAWKGASQNDVGYGAYDLYDLGEFNQKGTVRTKYGTRNQLQAAVTALKSNGIQVYGDVVMNHKGGADATEWVRAVEVNPSNRNQEVSGDYTIEAWTKFDFPGRGNTHSNFKWRWYHFDGVDWDQSRQLQNKIYKFRDDGKEWDWEVDEENGNYDYLMYADYDMDHPEVVNELRNWGVWYTNTLGLDGFRIDAVKHIKYSFTRDWLEHVRNTTGKNMFAVAEFWKNDIGAIENYLSKTNWNHSVFDVPLHYNLYNASRSGGNYDMRQIFNGTVVQRHPTHAVTFVDNHDSQPEEALESFVEEWFKPLAYALTLTRDQGYPSVFYGDYYGIPTHGVPAMKSKIDPILEARQKYAYGKQNDYMDHHNMIGWTREGNTAHPNSGLATIMSDGPGGNKWMYVGRNKAGQVWRDITGNRSGTVTINADGWGNFSVNGGSVSIWV

SEQ ID NO: 21675 - protein, 481 aa, Bacillus licheniformis
LNGTLMQYFEWYMPNDGQHWKRLQNDAEHLSDIGITAVWIPPAYKGLSQSDNGYGPYDLYDLGEFQQKGTVRTKYGTKSELQDAIGSLHSRNVQVYGDVVLNHKAGADATEDVTAVEVNPANRNQETSEEYQIKAWTDFRFPGRGNTYSDFKWHWYHFDGTDWDESRKLNRIYKFQGKAWDWEVSNENGNYDYLMYADIDYDHPDVAAEIKRWGTWYANELQLDGFRLDAVKHIKFSFLRDWVNHVREKTGKEMFTVAEYWQNDLGALENYLNKTNFNHSVFDVPLHYQFHAASTQGGGYDMRKLLNSTVVSKHPLKAVTFVDNHDTQPGQSLESTVQTWFKPLAYAFILTRESGYPQVFYGDMYGTKGDSQREIPALKHKIEPILKARKQYAYGAQHDYFDHHDIVGWTREGDSSVANSGLAALITDGPGGAKRMYVGRQNAGETWHDITGNRSEPVVINSEGWGEFHVNGGSVSIYVQR

SEQ ID NO: 21676 - protein, 482 aa, Synthetic construct
APVNGTMMQYFEWDLPNDGTLWTKVKNEATNLFSLGITALWLPPAYKGTSQSDVGYGVYDLYDLGEFNQKGTIRTKYGTKTQYIQAIQAAKAAGMQVYADVVFDHKGGADGTEWVDAVEVNPSDRNQEISGTYQIQAWTKFDFPGRGNTYSSFKWRWYHFDGVDWDESRKLSRIYKFRGIGKAWDWEVDTENGNYDYLMYADLDMDHPEVVTELKNWGTWYVNTTNIDGFRLDAVKHIKYSFFPDWLTYVRNQTGKNLFAVGEFWSYDVNKLHNYITKTNGSMSLFDAPLHNNFYTASKSSGYFDMRYLLNNTLMKDQPSLAVTLVDNHDTQPGQSLQSWVEPWFKPLAYAFILTRQEGYPCVFYGDYYGIPKYNIPGLKSKIDPLLIARRDYAYGTQRDYIDHQDIIGWTREGIDTKPNSGLAALITDGPGGSKWMYVGKKHAGKVFYDLTGNRSDTVTINADGWGEFKVNGGSVSIWVAK

SEQ ID NO: 21677 - protein, 482 aa, Synthetic construct
APINETMMQYFEWDLPNDGTLWTKVKNEAANLSSLGITALWLPPAYKGTSQSDVGYGVYDLYDLGEFNQKGTIRTKYGTKTQYIQAIQAAKAAGMQVYADVVFDHKGGADGTEWVDAVEVNPSDRNQEISGTYQIQAWTKFDFPGRGNTYSSFKWRWYHFDGVDWDESRKLSRIYKFRGIGKAWDWEVDTENGNYDYLMYADLDMDHPEVVTELKNWGTWYVNTTNIDGFRLDAVKHIKYSFFPDWLTYVRNQTGKNLFAVGEFWSYDVNKLHNYITKTNGSMSLFDAPLHNNFYTASKSSGYFDMRYLLNNTLMKDQPSLAVTLVDNHDTQPGQSLQSWVEPWFKPLAYAFILTRQEGYPCVFYGDYYGIPKYNIPGLKSKIDPLLIARRDYAYGTQRDYIDHQDIIGWTREGIDTKPNSGLAALITDGPGGSKWMYVGKKHAGKVFYDLTGNRSDTVTINADGWGEFKVNGGSVSIWVAK

SEQ ID NO: 21678 - protein, 479 aa, unidentified
TNGTMMQYFEWYLPNDGNHWNRLRSDASNLKDKGISAVWIPPAWKGASQNDVGYGAYDLYDLGEFNQKGTIRTKYGTRNQLQAAVNALKSNGIQVYGDVVMNHKGGADATEMVRAVEVNPNNRNQEVSGEYTIEAWTKFDFPGRGNTHSNFKWRWYHFDGVDWDQSRKLNNRIYKFRGDGKGWDWEVDTENGNYDYLMYADIDMDHPEVVNELRNWGVWYTNTLGLDGFRIDAVKHIKYSFTRDWINHVRSATGKNMFAVAEFWKNDLGAIENYLNKTNWNHSVFDVPLHYNLYNASKSGGNYDMRQIFNGTVVQRHPMHAVTFVDNHDSQPEEALESFVEEWFKPLAYALTLTREQGYPSVFYGDYYGIPTHGVPAMKSKIDPILEARQKYAYGRQNDYLDHHNIIGWTREGNTAHPNSGLATIMSDGAGGNKWMFVGRNKAGQVWTDITGNRAGTVTINADGWGNFSVNGGSVSIWV

SEQ ID NO: 21679 - protein, 491 aa, Geobacillus stearothermophilus
AAPFNGTMMQYFEWYLPDDGTLWTKVQNEANNLSSLGITALWLPPAYKGTSRSDVGYGVYDLYDLGEFNQKGTVRTKYGTKAQYLSAIQSAHAAGMQVYADVVFDHKAGADETEVFKVIEVDPNDRTKEISEPFEIEGWTKFTFPGRGDQYSSFKWNSEHFNGTDFDAKGERTGVFRIAGKAWNWEVDTEFGNYDYLMFANIDYNHPDVVTELKNWGKWYVNTTNIDGFRLDAVKHIKFSFFPDWLSYVRSQTGKPLFTVGEYWSYDINKLHNYITKTDGTMSLFDAPLHNKFYTASKSGGAFDMRTLMTNTLMKDQPTLAVTFVDNHDTEPGQALQSWVDPWFKPLAYAFILTRQEGYPCVFYGDYYGIPQYNIPSLKSKIDPLLIARRDYAYGTQHDYLDHSNIIGWTREGGTEKPGSGLAALITNGDGGSKWMYVGKQHAGKVFYDLTGNRSDTVTINSDGWGEFKVNGGSVSVWVPRKTTVSTIARP

SEQ ID NO: 21680 - protein, 491 aa, Geobacillus stearothermophilus
AAPFNGTMMQYFEWYLPDDGTLWTKVANEANNLSSLGITALWLPPAYKGTSRSDVGYGVYDLYDLGEFNQKGTVRTKYGTKAQYLQAIQAAHAAGMQVYADVVFDHKAGADETEVFKVIEVDPNDRTKEISEPFEIEGWTKFTFPGRGDQYSSFKWNSEHFNGTDFDAKGERTGVFRIAGKKWNWEVDTEFGNYDYLMFANIDYNHPDVVTELKNWGKWYVNTTNIDGFRLDAVKHIKFSFFPDWLSYVRSQTGKPLFTVGEYWSYDINKLHNYITKTDGTMSLFDAPLHNKFYTASKKGRDFDMRTLMTNTLMKDQPTLAVTFVDNHDTEPGQALQSWVDPWFKPLAYAFILTRQEGYPCVFYGDYYGIPQYNIPSLKSKIDPLLIARRDYAYGTQHDYLDHSNIIGWTREGGTEKPGSGLAALITNGDGGSKWMYVGKQHAGKVFYDLTGNRSDTVTINSDGWGEFKVNGGSVSVWVPRKTTVSTIARP

SEQ ID NO: 21681 - protein, 491 aa, Geobacillus stearothermophilus
AAPFNGTMMQYFEWYLPDDGTLWTKVANEANNLSSLGITALWLPPAYKGTSRSDVGYGVYDLYDLGEFNQKGTVRTKYGTKAQYLQAIQAAHAAGMQVYADVVFDHKAGADETEVFKVIEVDPNDRTKEISEPFEIEGWTKFTFPGRGDQYSSFKWNSEHFNGTDFDAKGERTGVFRIAGKAWNWEVDTEFGNYDYLMFANIDYNHPDVVTELKNWGKWYVNTTNIDGFRLDAVKHIKFSFFPDWLSYVRSQTGKPLFTVGEYWSYDINKLHNYITKTDGTMSLFDAPLHNKFYTASKKGRDFDMRTLMTNTLMKDQPTLAVTFVDNHDTEPGQALQSWVDPWFKPLAYAFILTRQEGYPCVFYGDYYGIPQYNIPSLKSKIDPLLIARRDYAYGTQHDYLDHSNIIGWTREGGTEKPGSGLAALITNGDGGSKWMYVGKQHAGKVFYDLTGNRSDTVTINSDGWGEFKVNGGSVSVWVPRKTTVSTIARP

SEQ ID NO: 21682 - protein, 483 aa, Synthetic construct
HHNGTNGTMMQYFEWYLPNDGNHWNRLRDDAANLKSKGITAVWIPPAWKGTSQNDVGYGAYDLYDLGEFNQKGTVRTKYGTRNQLQAAVTSLKNNGIQVYGDVVMNHKGGADGTEIVNAVEVNRSNRNQETSGEYAIEAWTKFDFPGRGNNHSSFKWRWYHFDGTDWDQSRQLQNKIYKFRGKAWDWEVDTENGNYDYLMYADVDMDHPEVIHELRNWGVWYTNTLNLDGFRIDAVKHIKYSFTRDWLTHVRNTTGKPMFAVAEFWKNDLGAIENYLNKTSWNHSVFDVPLHYNLYNASNSGGYYDMRNILNGSVVQKHPTHAVTFVDNHDSQPGEALESFVQQWFKPCAYALVLTREQGYPSVFYGDYYGIPTHGVPAMKSKIDPLLQARQTFAYGTQHDYFDHHDIIGWTREGNSSHPNSGLATICSDGPGGNKWMYVGKNKAGQVWRDITGNRTGTVTINADGWGNFSVNGGSVSVWVKQ

SEQ ID NO: 21683 - protein, 485 aa, Synthetic construct
HHNGTNGTMMQYFEWYLPNDGNHWNRLRDDAANLKSKGITAVWIPPAWKGTSQNDVGYGAYDLYDLGEFNQKGTVRTKYGTRNQLQAAVTSLKNNGIQVYGDVVMNHKGGADGTEIVNAVEVNRSNRNQETSGEYAIEAWTKFDFPGRGNNHSSFKWRWYHFDGTDWDQSRQLQNKIYKFRGTGKAWDWEVDTENGNYDYLMYADVDMDHPEVIHELRNWGVWYTNTLNLDGFRIDAVKHIKYSFTRDWLTHVRNTTGKPMFAVAEFWKNDLGAIENYLNKTSWNHSVFDVPLHYNLYNASNSGGYYDMRNILNGSVVQKHPTHAVTFVDNHDSQPGEALESFVQQWFKPCAYALVLTREQGYPSVFYGDYYGIPTHGVPAMKSKIDPLLQARQTFAYGTQHDYFDHHDIIGWTREGNSSHPNSGLATICSDGPGGNKWMYVGKNKAGQVWRDITGNRTGTVTINADGWGNFSVNGGSVSVWVKQ

SEQ ID NO: 21684 - protein, 483 aa, Bacillus sp.
HHNGTNGTMMQYFEWYLPNDGNHWNRLRSDASNLKDKGISAVWIPPAWKGASQNDVGYGAYDLYDLGEFNQKGTIRTKYGTRNQLQAAVNALKSNGIQVYGDVVMNHKGGADATEMVKAVEVNPNNRNQEVSGEYTIEAWTKFDFPGRGNTHSNFKWRWYHFDGVDWDQSRKLNNRIYKFRGKGWDWEVDTEFGNYDYLMYADLDMDHPEVVNELRNWGVWYTNTLGLDGFRIDAVKHIKYSFTRDWINHVRSATGKNMFAVAEFWKNDLGAIENYLNKTNWNHSVFDVPLHYNLYNASKSGGNYDMRQIFNGTVVQKHPMHAVTFVDNHDSQPEEALESFVEEWFKPLAYALTLTREQGYPSVFYGDYYGIPTHGVPAMKSKIDPILEARQKYAYGRQNDYLDHHNIIGWTREGNTAHPNSGLATIMSDGAGGNKWMFVGRNKAGQVWTDITGNKAGTVTINADGWGNFSVNGGSVSIWVNK

SEQ ID NO: 21685 - protein, 483 aa, Bacillus sp.; identical to SEQ ID NO: 40

SEQ ID NO: 21686 - protein, 485 aa, Bacillus subtilis
HHNGTNGTMMQYFEWYLPNDGNHWNRLRSDASNLKDKGITAVWIPPAWKGASQNDVGYGAYDLYDLGEFNQKGTIRTKYGTRNQLQAAVNALKSNGIQVYGDVVMNHKGGADATEMVRAVEVNPNNRNQEVSGEYTIEAWTKFDFPGRGNTHSNFKWRWYHFDGVDWDQSRKLNNRIYKFRGDGKGWDWEVDTENGNYDYLMYADIDMDHPEVVNELRNWGVWYTNTLGLDGFRIDAVKHIKYSFTRDWINHVRSATGKNMFAVAEFWKNDLGAIENYLNKTNWNHSVFDVPLHYNLYNASKSGGNYDMRQIFNGTVVQRHPMHAVTFVDNHDSQPEEALESFVEEWFKPLAYALTLTREQGYPSVFYGDYYGIPTHGVPAMKSKIDPILEARQKYAYGRQNDYLDHHNIIGWTREGNTAHPNSGLATIMSDGAGGNKWMFVGRNKAGQVWTDITGNRAGTVTINADGWGNFSVNGGSVSIWVNK

SEQ ID NO: 21687 - protein, 486 aa, Bacillus sp.
HHNGTNGTMMQYFEWHLPNDGQHWNRLRNDAANLKNLGITAVWIPPAWKGTSQNDVGYGAYDLYDLGEFNQKGTIRTKYGTRSQLQSAIARLQNNGIQVYGDVVMNHKGGADGTERVQAVEVNPSNRNQEVTGEYTIEAWTKFDFPGRGNTHSSFKWRWYHFDGTDWDQSRRLNNRIYKFRGTGKAWDWEVDTENGNYDYLMYADVDMDHPEVINELRRWGVWYTNTLNLDGFRIDAVKHIKYEFTRDWLNHVRSTTGKNNMFAVAEFWKNDLGAIENYLSKTNWNHDVFDVPLHYNLYNASKSGGNYDMRQILNGTVVSKHPIHAVTFVDNHDSQPAEALESFVEAWFKPLAYALILTREQGYPSVFYGDYYGIPTHGVAAMKGKIDPILEARQKYAYGTQHDYLDHHNIIGWTREGNSAHPNSGLATIMSDGPGGSKWMYVGRHKAGQVWRDITGNRTGTVTINADGWGNFSVNGGSVSIWVNK

SEQ ID NO: 21688 - protein, 485 aa, Bacillus sp.
HHNGTNGTMMQYFEWYLPNDGNHWNRLRSDASNLKDKGISAVWIPPAWKGASQNDVGYGAYDLYDLGEFNQKGTIRTKYGTRNQLQAAVNALKSNGIQVYGDVVMNHKGGADATEMVKAVEVNPNNRNQEVSGEYTIEAWTKFDFPGRGNTHSNFKWRWYHFDGVDWDQSRKLNNRIYKFRGDGKGWDWEVDTEFGNYDYLMYADIDMDHPEVVNELRNWGVWYTNTLGLDGFRIDAVKHIKYSFTRDWINHVRSATGKNMFAVAEFWKNDLGAIENYLNKTNWNHSVFDVPLHYNLYNASKSGGNYDMRQIFNGTVVQKHPMHAVTFVDNHDSQPEEALESFVEEWFKPLAYALTLTREQGYPSVFYGDYYGIPTHGVPAMKSKIDPILEARQKYAYGRQNDYLDHHNIIGWTREGNTAHPNSGLATIMSDGAGGNKWMFVGRNKAGQVWTDITGNKAGTVTINADGWGNFSVNGGSVSIWVNK

SEQ ID NO: 21689 - protein, 485 aa, Bacillus subtilis
HHNGTNGTMMQYFEWYLPNDGNHWNRLRSDASNLKDRGISAVWIPPAWKGASQNDVGYGAYDLYDLGEFNQKGTIRTKYGTRNQLQAAVNALKSNGIQVYGDVVMNHKGGADATEMVRAVEVNPNNRNQEVSGEYTIEAWTKFDFPGRGNTHSNFKWRWYHFDGVDWDQSRKLNNRIYKFRGDGKGWDWEVDTENGNYDYLMYADIDMDHPEVVNELRNWGVWYTNTLGLDGFRIDAVKHIKYSFTRDWINHVRSATGKNMFAVAEFWKNDLGAIENYLNKTNWNHSVFDVPLHYNLYNASKSGGNYDMRQIFNGTVVQRHPMHAVTFVDNHDSQPEEALESFVEEWFKPLAYALTLTREQGYPSVFYGDYYGIPTHGVPAMKSKIDPILEARQKYAYGRQNDYLDHHNIIGWTREGNTAHPNSGLATIMSDGAGGNKWMFVGRNKAGQVWTDITGNRAGTVTINADGWGNFSVNGGSVSIWVNK

SEQ ID NO: 21690 - protein, 486 aa, Bacillus sp.
HHNGTNGTMMQYFEWHLPNDGQHWNRLRNDAANLKNLGINAVWIPPAWKGTSQNDVGYGAYDLYDLGEFNQKGTIRTKYGTRSQLQSAIARLQNNGIQVYGDVVMNHKGGADGTEWVQAVEVNPSNRNQEVTGEYTIEAWTKFDFPGRGNTHSSFKWRWYHFDGTDWDQSRQLNNRIYKFRGTGKAWDWPVDTENGNYDYLMYADVDMDHPEVINELRRWGVWYTNTLNLDGFRIDAVKHIKYSFTRDWLNHVRSTTGKNNMYAVAEFWKNDLGAIENYLHKTNWNHSVFDVPLHYNLYNASKSGGNYDMRQILNGTVVSKHPIHAVTFVDNHDSQPAEALESFVEAWFKPLAYALILTREQGYPSVFYGDYYGIPTHGVAAMKGKIDPILEARQKYAYGTQHDYLDHHNIIGWTREGNSAHPNSGLATIMSDGPGGSKWMYVGRHKAGQVWRDITGNRTGTVTINADGWGNFSVNGGSVSIWVNK

SEQ ID NO: 21691 - protein, 485 aa, Bacillus subtilis
HHNGTNGTMMQYFEWYLPNDGNHWNRLRSDASNLKDKGISAVWIPPAWKGASQNDVGYGAYDLYDLGEFNQKGTIRTKYGTRNQLQAAVNALKSNGIQVYGDVVMNHKGGADATEMVRAVEVNPNNRNQEVSGEYTIEAWTKFDFPGRGNTHSNFKWRWYHFDGVDWDQSRKLNNRIYKFRGDGKGWDWEVDTENGNYDYLMYADIDMDHPEVVNELRNWGVWYTNTLGLDGFRIDAVKHIKYSFTRDWLNHVRSATGKNMFAVAEFWKNDLGAIENYLNKTNWNHSVFDVPLHYNLYNASKSGGNYDMRQIFNGTVVQRHPMHAVTFVDNHDSQPEEALESFVEEWFKPLAYALTLTREQGYPSVFYGDYYGIPTHGVPAMKSKIDPILEARQKYAYGRQNDYLDHHNIIGWTREGNTAHPNSGLATIMSDGAGGNKWMFVGRNKAGQVWTDITGNRAGTVTINADGWGNFSVNGGSVSIWVNK

SEQ ID NO: 21692 - protein, 485 aa, Bacillus sp.
HHNGTNGTMMQYFEWYLPNDGNHWNRLRSDASNLKDKGISAVWIPPAWKGASQNDVGYGAYDLYDLGEFNQKGTIRTKYGTRNQLQAAVNALKSNGIQVYGDVVMNHKGGADATEMVKAVEVNPNNRNQEVSGEYTIEAWTKFDFPGRGNTHSNFKWRWYHFDGVDWDQSRKLNNRIYKFRGXXKGWDWEVDTEFGNYDYLMYADLDMDHPEVVNELRNWGVWYTNTLGLDGFRIDAVKHIKYSFTRDWINHVRSATGKNMFAVAEFWKNDLGAIENYLNKTNWNHSVFDVPLHYNLYNASKSGGNYDMRQIFNGTVVQKHPMHAVTFVDNHDSQPEEALESFVEEWFKPLAYALTLTREQGYPSVFYGDYYGIPTHGVPAMKSKIDPILEARQKYAYGRQNDYLDHHNIIGWTREGNTAHPNSGLATIMSDGAGGNKWMFVGRNKAGQVWTDITGNKAGTVTINADGWGNFSVNGGSVSIWVNK

SEQ ID NO: 21693 - protein, 486 aa, Bacillus sp.
HHNGTNGTMMQYFEWHLPNDGQHWNRLRNDAANLKNLGINAVWIPPAWKGTSQNDVGYGAYDLYDLGEFNQKGTIRTKYGTRSQLQSAIARLQNNGIQVYGDVVMNHKGGADGTEWVQAVEVNPSNRNQEVTGEYTIEAWTKFDFPGRGNTHSSFKWRWYHFDGTDWDQSRQLNNRIYKFRGTGKAWDWEVDTENGNYDYLMYADVDMDHPEVINELRRWGVWYTNTLNLDGFRIDAVKHIKYEFTRDWLNHVRSTTGKNNMFAVAEFWKNDLGAIENYLHKTNWNHSVFDVPLHYNLYNASKSGGNYDMRQILNGTVVSKHPIHAVTFVDNHDSQPAEALESFVEAWFKPLAYALILTREQGLPSVFYGDYYGIPTHGVAAMKGKIDPILEARQKYAYGTQHDYLDHHNIIGWTREGNSAHPNSGLATIMSDGPGGSKWMYVGRHKAGQVWRDITGNRTGTVTINADGWGNFSVNGGSVSIWVNK

SEQ ID NO: 21694 - protein, 485 aa, Bacillus sp.
HHNGTNGTMMQYFEWYLPNDGNHWNRLRSDASNLKDKGISAVWIPPAWKGASQNDVGYGAYDLYDLGEFNQKGTIRTKYGTRNQLQAAVNALKSNGIQVYGDVVMNHKGGADATEMVKAVEVNPNNRNQEVSGEYTIEAWTKFDFPGRGNTHSNFKWRWYHFDGVDWDQSRKLNNRIYKFRGXXKGWDWEVDTEFGNYDYLMYADIDMDHPEVVNELRNWGVWYTNTLGLDGFRIDAVKHIKYSFTRDWINHVRSATGKNMFAVAEFWKNDLGAIENYLNKTNWNHSVFDVPLHYNLYNASKSGGNYDMRQIFNGTVVQKHPMHAVTFVDNHDSQPEEALESFVEEWFKPLAYALTLTREQGYPSVFYGDYYGIPTHGVPAMKSKIDPILEARQKYAYGRQNDYLDHHNIIGWTREGNTAHPNSGLATIMSDGAGGNKWMFVGRNKAGQVWTDITGNKAGTVTINADGWGNFSVNGGSVSIWVNK

SEQ ID NO: 21695 - protein, 486 aa, Bacillus sp.
HHNGTNGTMMQYFEWHLPNDGQHWNRLRNDAANLKNLGITAVWIPPAWKGTSQNDVGYGAYDLYDLGEFNQKGTIRTKYGTRSQLQSAIASLQNNGIQVYGDVVMNHKGGADGTEWVQAVEVNPSNRNQEVTGEYTIEAWTKFDFPGRGNTHSSFKWRWYHFDGTDWDQSRRLNNRIYKFRGTGKGWDWEVDTENGNYDYLLYADVDMDHPEVINELRRWGVWYTNTLNLDGFRIDAVKHIKYSFTRDWLNHVRSTTGKNNMFAVAEFWKNDLGAIENYLHKTNWNHSVFDVPLHYNLYNASKSGGNYDMRQILNGTVVSKHPIHAVTFVDNHDSQPAEALESFVEAWFKPLAYALILTREQGYPSVFYGDYYGIPTHGVAAMKGKIDPILEARQKYAYGTQHDYLDHHNIIGWTREGNSAHPNSGLATIMSDGPGGSKWMYVGRHKAGQVWRDITGNRTGTVTINADGWGNFSVNGGSVSIWVNK

SEQ ID NO: 21696 - protein, 485 aa, Bacillus subtilis
HHNGTNGTMMQYFEWYLPNDGNHWNRLRSDASNLKDKGISAVWIPPAWKGTSQNDVGYGAYDLYDLGEFNQKGTIRTKYGTRNQLQAAVNALKSNGIQVYGDVVMNHKGGADATEMVRAVEVNPNNRNQEVSGEYTIEAWTKFDFPGRGNTHSNFKWRWYHFDGVDWDQSRKLNNRIYKFRGDGKGWDWEVDTENGNYDYLMYADIDMDHPEVVNELRNWGVWYTNTLGLDGFRIDAVKHIKYSFTRDWINHVRSATGKNMFAVAEFWKNDLGAIENYLNKTNWNHSVFDVPLHYNLYNASKSGGNYDMRQIFNGTVVQRHPMHAVTFVDNHDSQPEEALESFVEEWFKPLAYALTLTREQGYPSVFYGDYYGIPTHGVPAMKSKIDPILEARQKYAYGRQNDYLDHHNIIGWTREGNTAHPNSGLATIMSDGAGGNKWMFVGRNKAGQVWTDITGNRAGTVTINADGWGNFSVNGGSVSIWVNK

SEQ ID NO: 21697 - protein, 483 aa, Unidentified
HHNGTNGTMMQYFEWYLPNDGNHWNRLRSDASNLKDKGISAVWIPPAWKGASQNDVGYGAYDLYDLGEFNQKGTIRTKYGTRNQLQAAVNALKSNGIQVYGDVVMNHKGGADATEMVKAVEVNPNNRNQEVSGEYTIEAWTKFDFPGRGNTHSNFKWRWYHFDGVDWDQSRKLNNRIYKFRGKGWDWEVDTEFGNYDYLMYADYDMDHPEVVNELRNWGVWYTNTLGLDGFRIDAVKHIKYSFTRDWINHVRSATGKNMFAVAEFWKNDLGAIENYLNKTNWNHSVFDVPLHYNLYNASKSGGNYDMRQIFNGTVVQKHPMHAVTFVDNHDSQPEEALESFVEEWFKPLAYALTLTREQGYPSVFYGDYYGIPTHGVPAMKSKIDPILEARQKYAYGRQNDYLDHHNIIGWTREGNTAHPNSGLATIMSDGAGGNKWMFVGRNKAGQVWTDITGNKAGTVTINADGWGNFSVNGGSVSIWVNK

SEQ ID NO: 21698 - protein, 486 aa, Bacillus sp.
HHNGTNGTMMQYFEWHLPNDGQHWNRLRNDAANLKNLGITAVWIPPAWKGTSQNDVGYGAYDLYDLGEFNQKGTIRTKYGTRSQLQSAIASLQNNGIQVYGDVVMNHKGGADGTEWVQAVEVNPSNRNQEVTGEYTIEAWTKFDFPGRGNTHSSFKWRWYHFDGTDWDQSRRLNNRIYKFRGTGKAWDWPVDTENGNYDYLMYADVDMDHPEVINELRRWGVWYTNTLNLDGFRIDAVKHIKYSFTRDWLNHVRSTTGKNNMFAVAEFWKNDLGAIENYLHKTNWNHDVFDVPLHYNLYNASKSGGNYDMRQILNGTVVSKHPIHAVTFVDNHDSQPAEALESFVEAWFKPLAYALILTREQGYPSVFYGDYYGIPTHGVAAMKGKIDPILEARQKYAYGTQHDYLDHHNIIGWTREGNSAHPNSGLATIMSDGPGGSKWMYVGRHKAGQVWRDITGNRTGTVTINADGWGNFSVNGGSVSIWVNK

SEQ ID NO: 21699 - protein, 486 aa, Bacillus sp.
HHNGTNGTMMQYFEWHLPNDGQHWNRLRNDAANLKNLGIDAVWIPPAWKGTSQNDVGYGAYDLYDLGEFNQKGTIRTKYGTRSQLQSAIARLQNNGIQVYGDVVMNHKGGADGTEWVQAVEVNPSNRNQEVTGEYTIEAWTKFDFPGRGNTHSSFKWRWYHFDGTDWDQSRRLNNRIYKFRGTGKAWDWPVDTENGNYDYLMYADVDMDHPEVINELRRWGVWYTNTLNLDGFRIDAVKHIKYSFTRDWLNHVRSTTGKNNMFAVAEFWKNDLGAIENYLSKTNWNHSVFDVPLHYNLYNASKSGGNYDMRQILNGTVVSKHPRHAVTFVDNHDSQPAEALESFVEAWFKPLAYALILTREQGYPSVFYGDYYGIPTHGVAAMKGKIDPILEARQKYAYGTQHDYLDHHNIIGWTREGNSAHPNSGLATIMSDGPGGSKWMYVGRHKAGQVWRDITGNRTGTVTINADGWGNFSVNGGSVSIWVNK

SEQ ID NO: 21700 - protein, 485 aa, Bacillus sp.
HHNGTNGTMMQYFEWYLPNDGNHWNRLRSDASNLKDKGISAVWIPPAWKGASQNDVGYGAYDLYDLGEFNQKGTIRTKYGTRNQLQAAVNALKSNGIQVYGDVVMNHKGGADATEMVKAVEVNPNNRNQEVSGEYTIEAWTKFDFPGRGNTHSNFKWRWYHFDGVDWDQSRKLNNRIYKFRGXXKGWDWEVDTEFGNYDYLMYADYDMDHPEVVNELRNWGVWYTNTLGLDGFRIDAVKHIKYSFTRDWINHVRSATGKNMFAVAEFWKNDLGAIENYLNKTNWNHSVFDVPLHYNLYNASKSGGNYDMRQIFNGTVVQKHPMHAVTFVDNHDSQPEEALESFVEEWFKPLAYALTLTREQGYPSVFYGDYYGIPTHGVPAMKSKIDPILEARQKYAYGRQNDYLDHHNIIGWTREGNTAHPNSGLATIMSDGAGGNKWMFVGRNKAGQVWTDITGNKAGTVTINADGWGNFSVNGGSVSIWVNK

SEQ ID NO: 21701 - protein, 485 aa, Bacillus subtilis
HHNGTNGTMMQYFEWYLPNDGNHWNRLRSDASNLKDKGISAVWIPPAWKGASQNDVGYGAYDLYDLGEFNQKGTIRTKYGTRNQLQAAVNALKSNGIQVYGDVVMNHKGGADATEMVRAVEVNPNNRNQEVSGEYTIEAWTKFDFPGRGNTHSNFKWRWYHFDGVDWDQSRKLQNRIYKFRGDGKGWDWEVDTENGNYDYLMYADIDMDHPEVVNELRNWGVWYTNTLGLDGFRIDAVKHIKYSFTRDWINHVRSATGKNMFAVAEFWKNDLGAIENYLNKTNWNHSVFDVPLHYNLYNASKSGGNYDMRQIFNGTVVQRHPMHAVTFVDNHDSQPEEALESFVEEWFKPLAYALTLTREQGYPSVFYGDYYGIPTHGVPAMKSKIDPILEARQKYAYGRQNDYLDHHNIIGWTREGNTAHPNSGLATIMSDGAGGNKWMFVGRNKAGQVWTDITGNRAGTVTINADGWGNFSVNGGSVSIWVNK

SEQ ID NO: 21702 - protein, 484 aa, Bacillus subtilis
HHNGTNGTMMQYFEWYLPNDGNHWNRLRSDASNLKDKGISAVWIPPAWKGASQNDVGYGAYDLYDLGEFNQKGTIRTKYGTRNQLQAAVNALKSNGIQVYGDVVMNHKGGADATEMVRAVEVNPNNRNQEVSGEYTIEAWTKFDFPGRGNTHSNFKWRWYHFDGVDWDQSRKLQRIYKFRGDGKGWDWEVDTENGNYDYLMYADIDMDHPEVVNELRNWGVWYTNTLGLDGFRIDAVKHIKYSFTRDWINHVRSATGKNMFAVAEFWKNDLGAIENYLNKTNWNHSVFDVPLHYNLYNASKSGGNYDMRQIFNGTVVQRHPMHAVTFVDNHDSQPEEALESFVEEWFKPLAYALTLTREQGYPSVFYGDYYGIPTHGVPAMKSKIDPILEARQKYAYGRQNDYLDHHNIIGWTREGNTAHPNSGLATIMSDGAGGNKWMFVGRNKAGQVWTDITGNRAGTVTINADGWGNFSVNGGSVSIWVNK

SEQ ID NO: 21703 - protein, 484 aa, Bacillus subtilis
HHNGTNGTMMQYFEWYLPNDGNHWNRLRSDASNLKDKGISAVWIPPAWKGASQNDVGYGAYDLYDLGEFNQKGTIRTKYGTRNQLQAAVNALKSNGIQVYGDVVMNHKGGADATEMVRAVEVNPNNRNQEVSGEYTIEAWTKFDFPGRGNTHSNFKWRWYHFDGVDWDQSRKLNRIYKFRGDGKGWDWEVDTENGNYDYLMYADIDMDHPEVVNELRNWGVWYTNTLGLDGFRIDAVKHIKYSFTRDWINHVRSATGKNMFAVAEFWKNDLGAIENYLNKTNWNHSVFDVPLHYNLYNASKSGGNYDMRQIFNGTVVQRHPMHAVTFVDNHDSQPEEALESFVEEWFKPLAYALTLTREQGYPSVFYGDYYGIPTHGVPAMKSKIDPILEARQKYAYGRQNDYLDHHNIIGWTREGNTAHPNSGLATIMSDGAGGNKWMFVGRNKAGQVWTDITGNRAGTVTINADGWGNFSVNGGSVSIWVNK

SEQ ID NO: 21704 - protein, 483 aa, Synthetic construct
HHNQTNGTMMQYFEWYLPNDGNHWNRLRSDASNLKDKGITAVWIPPAWKGASQNDVGYGAYDLYDLGEFNQKGTVRTKYGTRNQLQAAVTALKSNGIQVYGDVVMNHKGGADATEWVRAVEVNPSNRNQEVSGDYTIEAWTKFDFPGRGNTHSNFKWRWYHFDGVDWDQSRQLQNKIYKFFGDGKEWDWEVDEENGNYDYLMYADYDMDHPEVVNELRNWGVWYTNTLGLDGFRIDAVKHIKYSFTRDWLEHVRNTTGKNMFAVAEFWKNDIGAIENYLSKTNWNHSVFDVPLHYNLYNASRSGGNYDMRQIFNGTVVQRHPTHAVTFVDNHDSQPEEALESFVEEWFKPLAYALTLTRDQGYPSVFYGDYYGIPTHGVPAMKSKIDPILEARQKYAYGKQNDYMDHHNMIGWTREGNTAHPNSGLATIMSDGPGGNKWMYVGRNKAGQVWRDITGNRSGTVTINADGWGNFSVNGGSVSIWV

SEQ ID NO: 21705 - protein, 483 aa, Synthetic construct
HHNGTNGTMMQYFEWYLPNDGNHWHRLRSDASNLKDKGITAVWIPPAWKGASQNDVGYGAYDLYDLGEFNQKGTVRTKYGTRNQLQAAVTALKSNGIQVYGDVVMNHKGGADATEWVRAVEVNPSNRNQEVSGDYTIEAWTKFDFPGRGNTHSNFKWRWYHFDGVDWDQSRQLQNKIYKFQGDGKEWDWEVDTENGNYDYLMYADYDMDHPEVVNELRNWGVWYTNTLGLDGFRIDAVKHIKYSFTRDWLTHVRNTTGKNMFAVAEFWKNDIGAIENYLSKTNWNHSVFDVPLHYNLYNASRSGGNYDMRQIFNGTVVQRHPTHAVTFVDNHDSQPEEALESFVEEWFKPLAYALTLTRDQGEPSVFYGDYYGIPTHGVPAMKSKIDPILEARQKYAYGKQNDYLDHHNMIGWTREGNTAHPNSGLATIMSDGPGGNKWMYVGRNKAGQVWRDITGNRSGTVTINADGWGNFSVNGGSVSIWV

SEQ ID NO: 21706 - protein, 483 aa, Synthetic construct
HHNGTNGTMMQYFEWYLPNDGNHWHRLRSDASNLKDKGITAVWIPPAWKGASQNDVGYGAYDLYDLGEFNQKGTVRTKYGTRNQLQAAVTALKSNGIQVYGDVVMNHKGGADATEWVRAVEVNPSNRNQEVSGDYTIEAWTKFDFPGRGNTHSNFKWRWWHFDGVDWDQSRQLQNKIYKFRGDGKGWDWEVDTENGNYDYLMYADYDMDHPEVVNELRNWGVWYTNTLGLDGFRIDAVKHIKYSFTRDWLEHVRNTTGKNMFAVAEFWKNDIGAIENYLSKTNWNHSVFDVPLHYNLYNASRSGGNYDMRQIFNGTVVQRHPGHAVTFVDNHDSQPEEALESFVEEWFKPLAYALTLTRDQGYPSVFYGDYYGIPTHGVPAMKSKIDPILEARQKYAYGKQNDYMDHHNMIGWTREGNTAHPNSGLATIMSDGPGGNKWMYVGRNKAGQVWRDITGNRSGTVTINADGWGNFSVNGGSVSIWV

SEQ ID NO: 21707 - protein, 483 aa, Synthetic construct
HHNQTNGTMMQYFEWYLPNDGNHWHRLRSDASNLKDKGITAVWIPPAWKGASQNDVGYGAYDLYDLGEFNQKGTVRTKYGTRNQLQAAVTALKSNGIQVYGDVVMNHKGGADATEWVRAVEVNPSNRNQEVSGDYTIEAWTKFDFPGRGNTHSNFKWRWYHFDGVDWDQSRQLQNKIYKFRGDGKEWDWEVDTENGNYDYLMYADYDMDHPEVVNELRNWGVWYTNTLGLDGFRIDAVKHIKYSFTRDWLTHVRNTTGKNMFAVAEFWKNDIGAIRNYLSKTNWNHSVFDVPLHYNLYNASRSGGNYDMRQIFNGTVVQRHPTHAVTFVDNHDSQPEEALESFVEEWFKPLAYALTLTRDQGYPSVFYGDYYGIPTHGVPAMKSKIDPILEARQKYAYGKQNDYLDHHNMIGWTREGNTAHPNSGLATIMSDGPGGNKWMYVGRNKAGQVWRDITGNRSGTVTINADGWGNFSVNGGSVSIWV

SEQ ID NO: 21708 - protein, 483 aa, Synthetic construct
HHNQTNWTMMQYFEWYLPNDGNHWNRLRSDASNLKDKGITAVWIPPAWKGASQNDVGYGAYDLYDLGEFNQKGTVRTKYGTRNQLQAAVTALKSNGIQVYGDVVMNHKGGADATEWVRAVEVNPSNRNQEVSGDYTIEAWTKFDFPGRGNTHSNFKWRWYHFDGVDWDQSRQLQNKIYKFRGDGKEWDWEVDEENGNYDYLMYADYDMDHPEVVNELRNWGVWYTNTLGLDGFRIDAVKHIKYSFTRDWLEHVRNTTGKNMFAVAEFWKNDIGAIENYLSKTNWNHSVFDVPLHYNLYNASRSGGNYDMRQIFNGTVVQRHPTHAVTFVDNHDSQPEEALESFVEEWFKPLAYALTLTRDQGYPSVFYGDYYGIPTHGVPAMKSKIDPILEARQKYAYGKQNDYMDHHNMIGWTREGNTAHPNSGLATIMSDGPGGNKWMYVGRNKAGQVWRDITGNRSGTVTINADGWGNFSVNGGSVSIWV

SEQ ID NO: 21709 - protein, 483 aa, Synthetic construct
HHNQTNGTMMQYFEWYLPNDGNHWHRLRSDASNLKDKGITAVWIPPAWKGASQNDVGYGAYDLYDLGEFNQKGTVRTKYGTRNQLQAAVTALKSNGIQVYGDVVMNHKGGADATEWVRAVEVNPSNRNQEVSGDYTIEAWTKFDFPGRGNTHSNFKWRWYHFDGVDWDQSRQLQNKIYKFRGDGKEWDWEVDTENGNYDYLMYADYDMDHPEVVNELRNWGVWYTNTLGLDGFRIDAVKHIKYSFTRDWLEHVRNTTGKNMFAVAEFWKNDIGAIENYLSKTNWNHSVFDVPLHYNLYNASRSGGNYDMRQIFNGTVVQRHPTHAVTFVDNHDSQPEEALESFVEEWFKPLAYALTLTRDQGYPSVFYGDYYGIPTHGVPAMKSKIDPILEARQKYAYGKQNDYMDHHNMIGWTREGNTAHPNSGLATIMSDGPGGNKWMYVGRNKAGQVWRDITGNRSGTVTINADGWGNFSVNGGSVSIWV

SEQ ID NO: 21710 - protein, 483 aa, Synthetic construct
HHNGTNGTMMQYFEWYLPNDGNHWHRLRSDASNLKDKGITAVWIPPAWKGASQNDVGYGAYDLYDLGEFNQKGTVRTKYGTRNQLQAAVTALKSNGIQVYGDVVMNHKGGADATEWVRAVEVNPSNRNQEVSGDTTIEAWTKFDFPGRGNTHSNFKWRWYHFDGVDWDQSRQLQNKIYKFRGDGKEWDWEVDTENGNYDYLMYADYDMDHPEVVNELRNWGVWYTNTLGLDGFRIDAVKHIKYSFTRDWLTHVRNTTGKNMFAVAEFWKNDIGAIENYLSNTNWNHSVFDVPLHYNLYNASRSGGNYDMRQIFNGTVVQRHPTHAVTFVDNHDSQPEEALESFVEEWFKPLAYALTLTRDQGYPSVFYGDYYGIPTHGVPAMKSKIDPILEARQKYAYGKQNDYLDHHNMIGWTREGNTAHPNSGLATIMSDGPGGNKWMYVGRNKAGQVWRDITGNRSGTVTINADGWGNFSVNGGSVSIWV

SEQ ID NO: 21711 - protein, 483 aa, Synthetic construct
HHNQTNGTMMQYFEWYLPNDGNHWHRLRSDASNLKDKGITAVWIPPAWKGASQNDVGYGAYDLYDLGEFNQKGTVRTKYGTRNQLQAAVTALKSNGIQVYGDVVMNHKGGADATEWVRAVEVNPSNRNQEVSGDYTIEAWTKFDFPGRGNTHSNFKWRWYHFDGVDWDQSRQLQNKIYKFRGDGKEWDWEVDTENGNYDYLMYADYDMDHPEVVNELRNWGVWYTNTLGLDGFRIDAVKHIKYSFTRDWLTHVRNTTGKNMFAVAEFWKNDIGAIRNYLSKTNWNHSVFDVPLHYNLYNASRSGGNYDMRQIFNGTVVQRHPTHAVTFVDNHDSQPEEALESFVEEWFKPLAYALTLTRDQGYPSVFYGDYYGIPTHGVPAMKSKIDPILEARQKYAYGKQNDYMDHHNMIGWTREGNTAHPNSGLATIMSDGPGGNKWMYVGRNKAGQVWRDITGNRSGTVTINADGWGNFSVNGGSVSIWV

SEQ ID NO: 21712 - protein, 483 aa, Synthetic construct
HHNQTNGTMMQYFEWYLPNDGNHWNRLRSDASNLKDKGITAVWIPPAWKGASQNDVGYGAYDLYDLGEFNQKGTVRTKYGTRNQLQAAVTALKSNGIQVYGDVVMNHKGGADATEWVRAVEVNPSNRNQEVSGDETIEAWTKFDFPGRGNTHSNFKWRWYHFDGVDWDQSRQLQNKIYKFRGDGKEWDWEVDEENGNYDYLMYADYDMDHPEVVNELRNWGVWYTNTLGLDGFRIDAVKHIKYSFTRDWLEHVRNTTGKNMFAVAEFWKNDIGAIENYLSKTNWNHSVFDVPLHYNLYNASRSGGNYDMRQIFNGTVVQRHPTHAVTFVDNHDSQPEEALESFVEEWFKPLAYALTLTRDQGYPSVFYGDYYGIPTHGVPAMKSKIDPILEARQKYAYGKQNDYMDHHNMIGWTREGNTAHPNSGLATIMSDGPGGNKWMYVGRNKAGQVWRDITGNRSGTVTINADGWGNFSVNGGSVSIWV

SEQ ID NO: 21713 - protein, 483 aa, Synthetic construct
HHNQTNGTMMQYFEWYLPNDGNHWNRLRSDASNLKDKGITAVWIPPAWKGASQNDVGYGAYDLYDLGEFNQKGTVRTKYGTRNQLQAAVTALKSNGIQVYGDVVMNHKGGADATEWVRAVEVNPSNRNQEVSGDYEIEAWTKFDFPGRGNTHSNFKWRWYHFDGVDWDQSRQLQNKIYKFRGDGKEWDWEVDEENGNYDYLMYADYDMDHPEVVNELRNWGVWYTNTLGLDGFRIDAVKHIKYSFTRDWLEHVRNTTGKNMFAVAEFWKNDIGAIENYLSKTNWNHSVFDVPLHYNLYNASRSGGNYDMRQIFNGTVVQRHPTHAVTFVDNHDSQPEEALESFVEEWFKPLAYALTLTRDQGYPSVFYGDYYGIPTHGVPAMKSKIDPILEARQKYAYGKQNDYMDHHNMIGWTREGNTAHPNSGLATIMSDGPGGNKWMYVGRNKAGQVWRDITGNRSGTVTINADGWGNFSVNGGSVSIWV

SEQ ID NO: 21714 - protein, 483 aa, Synthetic construct
HHNGTNGTMMQYFEWYLPNDGNHWHRLRSDASNLKDKGITAVWIPPAWKGASQNDVGYGAYDLYDLGEFNQKGTVRTKYGTRNQLQAAVTALKSNGIQVWGDVVMNHKGGADATEWVRAVEVNPSNRNQEVSGDYTIEAWTKFDFPGRGNTHSNFKWRWYHFDGVDWDQSRQLQNKIYKFRGDGKEWDWEVDTENGNYDYLMYADYDMDHPEVVNELRNWGVWYTNTLGLDGFRIDAVKHIKYSFTRDWLTHVRNTTGKNMFAVAEFWKNDIGAIENYLSNTNWNHSVFDVPLHYNLYNASRSGGNYDMRQIFNGTVVQRHPTHAVTFVDNHDSQPEEALESFVEEWFKPLAYALTLTRDQGYPSVFYGDYYGIPTHGVPAMKSKIDPILEARQKYAYGKQNDYLDHHNMIGWTREGNTAHPNSGLATIMSDGPGGNKWMYVGRNKAGQVWRDITGNRSGTVTINADGWGNFSVNGGSVSIWV

SEQ ID NO: 21715 - protein, 483 aa, Synthetic construct
HHNGTNGTMMQYFEWYLPNDGNHWHRLRSDASNLKDKGITAVWIPPAWKGASQNDVGYGAYDLYDLGEFNQKGTVRTKYGTRNQLQAAVTALKSNGIQVYGDVVMNHKGGADATEWVRAVEVNPSNRNQEVSGDYTIEAWTKFDFPGRGNTHSNFKWRWWHFDGVDWDQSRQLQNKIYKFRGDGKEWDWEVDTENGNYDYLMYADYDMDHPEVVNELRNWGVWYTNTLGLDGFRIDAVKHIKYSFTRDWLTHVRNTTGKNMFAVAEFWKNDIGAIRNYLSKTNWNHSVFDVPLHYNLYNASRSGGNYDMRQIFNGTVVQRHPTHAVTFVDNHDSQPEEALESFVEEWFKPLAYALTLTRDQGYPSVFYGDYYGIPTHGVPAMKSKIDPILEARQKYAYGKQNDYMDHHNMIGWTREGNTAHPNSGLATIMSDGPGGNKWMYVGRNKAGQVWRDITGNRSGTVTINADGWGNFSVNGGSVSIWV

SEQ ID NO: 21716 - protein, 483 aa, Synthetic construct
HHNQTNGTMMQYFEWYLPNDGNHWDRLRSDASNLKDKGITAVWIPPAWKGASQNDVGYGAYDLYDLGEFNQKGTVRTKYGTRNQLQAAVTALKSNGIQVYGDVVMNHKGGADATEWVRAVEVNPSNRNQEVSGDYTIEAWTKFDFPGRGNTHSNFKWRWYHFDGVDWDQSRQLQNKIYKFRGDGKEWDWEVDEENGNYDYLMYADYDMDHPEVVNELRNWGVWYTNTLGLDGFRIDAVKHIKYSFTRDWLEHVRNTTGKNMFAVAEFWKNDIGAIENYLSKTNWNHSVFDVPLHYNLYNASRSGGNYDMRQIFNGTVVQRHPTHAVTFVDNHDSQPEEALESFVEEWFKPLAYALTLTRDQGYPSVFYGDYYGIPTHGVPAMKSKIDPILEARQKYAYGKQNDYMDHHNMIGWTREGNTAHPNSGLATIMSDGPGGNKWMYVGRNKAGQVWRDITGNRSGTVTINADGWGNFSVNGGSVSIWV

SEQ ID NO: 21717 - protein, 483 aa, Synthetic construct
HHNGTNGTMMQYFEWYLPNDGNHWHRLRSDASNLKDKGITAVWIPPAWKGASQNDVGYGAYDLYDLGEFNQKGTVRTKYGTRNQLQAAVTALKSNGIQVYGDVVMNHKGGADATEWVRAVEVNPSNRNQEVSGDYTIEAWTKFDFPGRGNTHSNFKWRWYHFDGVDWDQSRQLQNKIYKFRGDGKEWDWEVDTENGNYDYLMYADYDMDHPEVVNELRNWGVWYTNTLGLDGFRIDAVKHIKYSFTRDWLTHVRNTTQKNMFAVAEFWKNDIGAIENYLSNTNWNHSVFDVPLHYNLYNASRSGGNYDMRQIFNGTVVQRHPTHAVTFVDNHDSQPEEALESFVEEWFKPLAYALTLTRDQGYPSVFYGDYYGIPTHGVPAMKSKIDPILEARQKYAYGKQNDYLDHHNMIGWTREGNTAHPNSGLATIMSDGPGGNKWMYVGRNKAGQVWRDITGNRSGTVTINADGWGNFSVNGGSVSIWV

SEQ ID NO: 21718 - protein, 483 aa, Synthetic construct
HHNQTNGTMMQYFEWYLPNDGNHWNRLRSDASNLKDKGITAVWIPPAWKGASQNDVGYGAYDLYDLGEFNQKGTVRTKYGTRNQLQAAVTALKSNGIQVWGDVVMNHKGGADATEWVRAVEVNPSNRNQEVSGDYTIEAWTKFDFPGRGNTHSNFKWRWYHFDGVDWDQSRQLQNKIYKFRGDGKEWDWEVDEENGNYDYLMYADYDMDHPEVVNELRNWGVWYTNTLGLDGFRIDAVKHIKYSFTRDWLEHVRNTTGKNMFAVAEFWKNDIGAIENYLSKTNWNHSVFDVPLHYNLYNASRSGGNYDMRQIFNGTVVQRHPTHAVTFVDNHDSQPEEALESFVEEWFKPLAYALTLTRDQGYPSVFYGDYYGIPTHGVPAMKSKIDPILEARQKYAYGKQNDYMDHHNMIGWTREGNTAHPNSGLATIMSDGPGGNKWMYVGRNKAGQVWRDITGNRSGTVTINADGWGNFSVNGGSVSIWV

SEQ ID NO: 21719 - protein, 483 aa, Synthetic construct
HHNQTNGTMMQYFEWYLPNDGNHWHRLRSDASNLKDKGITAVWIPPAWKGASQNDVGYGAYDLYDLGEFNQKGTVRTKYGTRNQLQAAVTALKSNGIQVYGDVVMNHKGGADATEWVRAVEVNPSNRNQEVSGDYTIEAWTKFDFPGRGNTHSNFKWRWWHFDGVDWDQSRQLQNRIYKFRGDGKEWDWEVDEENGNYDYLMYADYDMDHPEVVNELRNWGVWYTNTLGLDGFRIDAVKHIKYSFTRDWLTHVRNTTGKNMFAVAEFWKNDIGAIRNYLSKTNWNHSVFDVPLHYNLYNASRSGGNYDMRQIFNGTVVQRHPTHAVTFVDNHDSQPEEALESFVEEWFKPLAYALTLTRDQGYPSVFYGDYYGIPTHGVPAMKSKIDPILEARQKYAYGKQNDYLDHHNMIGWTREGNTAHPNSGLATIMSDGPGGNKWMYVGRNKAGQVWRDITGNRSGTVTINADGWGNFSVNGGSVSIWV

SEQ ID NO: 21720 - protein, 483 aa, Synthetic construct
HHNGTNGTMMQYFEWYLPNDGNHWHRLRSDASNLKDKGITAVWIPPAWKGASQNDVGYGAYDLYDLGEFNQKGTVRTKYGTRNQLQAAVTALKSNGIQVYGDVVMNHKGGADATEWVRAVEVNPSNRNQEVSGDYTIEAWTKFDFPGRGNTHSNFKWRWWHFDGVDWDQSRQLQNKIYKFRGDGKGWDWEVDTENGNYDYLMYADYDMDHPEVVNELRNWGVWYTNTLGLDGFRIDAVKHIKYSFTRDWLTHVRNTTGKNMFAVAEFWKNDIGAIRNYLSKTNWNHSVFDVPLHYNLYNASRSGGNYDMRQIFNGTVVQRHPGHAVTFVDNHDSQPEEALESFVEEWFKPLAYALTLTRDQGYPSVFYGDYYGIPTHGVPAMKSKIDPILEARQKYAYGKQNDYMDHHNMIGWTREGNTAHPNSGLATIMSDGPGGNKWMYVGRNKAGQVWRDITGNRSGTVTINADGWGNFSVNGGSVSIWV

SEQ ID NO: 21721 - protein, 483 aa, Synthetic construct
HHNQTNGTMMQYFEWYLPNDGNHWNRLRSDASNLKDKGITAVWIPPAWKGASQNDVGYGAYDLYDLGEFNQKGTVRTKYGTRNQLQAAVTALKSNGIQVYGDVVMNHKGGADATEWVRAVEVNPSNRNQEVSGDYTIEAWTKFDFPGRGNTHSNFKWRWYHFDGVDWDQSRQLQNKIYKFRGDGKEWDWEVDEENGNYDYLMYADYDMDHPEVVNELRNWGVWYTNTLGLDGFRIDAVKHIKYSFTRDWLEHVRNTTGKNMFAVAEFWKNDIGAIENYLSKTNWNHSVFDVPLHYNLYNASRSGGNYDMRQIFNGTVVQRHPTHAVTFVDNHDSQPEEALESFVEEWFKPLAYALTLTRDQGHPSVFYGDYYGIPTHGVPAMKSKIDPILEARQKYAYGKQNDYMDHHNMIGWTREGNTAHPNSGLATIMSDGPGGNKWMYVGRNKAGQVWRDITGNRSGTVTINADGWGNFSVNGGSVSIWV

SEQ ID NO: 21722 - protein, 483 aa, Synthetic construct
HHNQTNGTMMQYFEWYLPNDGNHWHRLRSDASNLKDKGITAVWIPPAWKGASQNDVGYGAYDLYDLGEFNQKGTVRTKYGTRNQLQAAVTALKSNGIQVYGDVVMNHKGGADATEWVRAVEVNPSNRNQEVSGDYTIEAWTKFDFPGRGNTHSNFKWRWYHFDGVDWDQSRQLQNKIYKFRGDGKEWDWEVDTENGNYDYLMYADIDMDHPEVVNELRNWGVWYTNTLGLDGFRIDAVKHIKYSFTRDWLEHVRNTTGKNMFAVAEFWKNDIGAIENYLSKTNWNHSVFDVPLHYNLYNASRSGGNYDMRQIFNGTVVQRHPTHAVTFVDNHDSQPEEALESFVEEWFKPLAYALTLTRDQGYPSVFYGDYYGIPTHGVPAMKSKIDPILEARQKYAYGKQNDYLDHHNMIGWTREGNTAHPNSGLATIMSDGPGGNKWMYVGRNKAGQVWRDITGNRSGTVTINADGWGNFSVNGGSVSIWV

SEQ ID NO: 21723 - protein, 483 aa, Synthetic construct
HHNQTNGTMMQYFEWYLPNDGNHWYRLRSDASNLKDKGITAVWIPPAWKGASQNDVGYGAYDLYDLGEFNQKGTVRTKYGTRNQLQAAVTALKSNGIQVYGDVVMNHKGGADATEWVRAVEVNPSNRNQEVSGDYTIEAWTKFDFPGRGNTHSNFKWRWYHFDGVDWDQSRQLQNKIYKFRGDGKEWDWEVDEENGNYDYLMYADYDMDHPEVVNELRNWGVWYTNTLGLDGFRIDAVKHIKYSFTRDWLEHVRNTTGKNMFAVAEFWKNDIGAIENYLSKTNWNHSVFDVPLHYNLYNASRSGGNYDMRQIFNGTVVQRHPTHAVTFVDNHDSQPEEALESFVEEWFKPLAYALTLTRDQGYPSVFYGDYYGIPTHGVPAMKSKIDPILEARQKYAYGKQNDYMDHHNMIGWTREGNTAHPNSGLATIMSDGPGGNKWMYVGRNKAGQVWRDITGNRSGTVTINADGWGNFSVNGGSVSIWV

SEQ ID NO: 21724 - protein, 483 aa, Synthetic construct
HHNQTNGTMMQYFEWYLPNDGNHWNRLRSDASNLKDKGITAVWIPPAWKGASQNDVGYGAYDLYDLGEFNQKGTVRTKYGTRNQLQAAVTALKSNGIQVYGDVVMNHKGGADATEWVRAVEVNPSNRNQEVSGDYTIEAWTKFDFPGRGNTHSNFKWRWDHFDGVDWDQSRQLQNKIYKFRGDGKEWDWEVDEENGNYDYLMYADYDMDHPEVVNELRNWGVWYTNTLGLDGFRIDAVKHIKYSFTRDWLEHVRNTTGKNMFAVAEFWKNDIGAIENYLSKTNWNHSVFDVPLHYNLYNASRSGGNYDMRQIFNGTVVQRHPTHAVTFVDNHDSQPEEALESFVEEWFKPLAYALTLTRDQGYPSVFYGDYYGIPTHGVPAMKSKIDPILEARQKYAYGKQNDYMDHHNMIGWTREGNTAHPNSGLATIMSDGPGGNKWMYVGRNKAGQVWRDITGNRSGTVTINADGWGNFSVNGGSVSIWV

SEQ ID NO: 21725 - protein, 483 aa, Synthetic construct
HHNGTNGTMMQYFEWYLPNDGNHWHRLRSDASNLKDKGITAVWIPPAWKGASQNDVGYGAYDLYDLGEFNQKGTVRTKYGTRNQLQAAVTALKSNGIQVYGDVVMNHKGGADATEWVRAVEVNPSNRNQEVSGDYTIEAWTKFDFPGRGNTHSNFKWRWYHFDGVDWDQSRQLQNKIYKFRGDGKEWDWEVDEENGNYDYLMYADYDMDHPEVVNELRNWGVWYTNTLGLDGFRIDAVKHIKYSFTRDWLEHVRNTTGKNMFAVAEFWKNDIGAIRNYLSKTNWNHSVFDVPLHYNLYNASRSGGNYDMRQIFNGTVVQRHPTHAVTFVDNHDSQPEEALESFVEEWFKPLAYALTLTRDQGYPSVFYGDYYGIPTHGVPAMKSKIDPILEARQKYAYGKQNDYMDHHNMIGWTREGNTAHPNSGLATIMSDGPGGNKWMYVGRNKAGQVWRDITGNRSGTVTINADGWGNFSVNGGSVSIWV

SEQ ID NO: 21726 - protein, 483 aa, Synthetic construct
HHNGTNGTMMQYFEWYLPNDGNHWHRLRSDASNLKDKGITAVWIPPAWKGASQNDVGYGAYDLYDLGEFNQKGTVRTKYGTRNQLQAAVTALKSNGIQVYGDVVMNHKGGADATEWVRAVEVNPSNRNQEVSGDYTIEAWTKFDFPGRGNTHSNFKWRWWHFDGVDWDQSRQLQNRIYKFRGDGKEWDWEVDTENGNYDYLMYADIDMDHPEVVNELRNWGVWYTNTLGLDGFRIDAVKHIKYSFTRDWLEHVRNTTGKNMFAVAEFWKNDIGAIRNYLSKTNWNHSVFDVPLHYNLYNASRSGGNYDMRQIFNGTVVQRHPTHAVTFVDNHDSQPEEALESFVEEWFKPLAYALTLTRDQGYPSVFYGDYYGIPTHGVPAMKSKIDPILEARQKYAYGKQNDYMDHHNMIGWTREGNTAHPNSGLATIMSDGPGGNKWMYVGRNKAGQVWRDITGNRSGTVTINADGWGNFSVNGGSVSIWV

SEQ ID NO: 21727 - protein, 483 aa, Synthetic construct
HHNGTNGTMMQYFEWYLPNDGNHWHRLRSDASNLKDKGITAVWIPPAWKGASQNDVGYGAYDLYDLGEFNQKGTVRTKYGTRNQLQAAVTALKSNGIQVYGDVVMNHKGGADATEWVRAVEVNPSNRNQEVSGDTTIEAWTKFDFPGRGNTHSNFKWRWYHFDGVDWDQSRQLQNKIYKFRGDGKEWDWEVDTENGNYDYLMYADYDMDHPEVVNELRNWGVWYTNTLGLDGFRIDAVKHIKYSFTRDWLTHVRNTTGKNMFAVAEFWKNDIGAIENYLSKTNWNHSVFDVPLHYNLYNASRSGGNYDMRQIFNGTVVQRHPTHAVTFVDNHDSQPEEALESFVEEWFKPLAYALTLTRDQGEPSVFYGDYYGIPTHGVPAMKSKIDPILEARQKYAYGKQNDYLDHHNMIGWTREGNTAHPNSGLATIMSDGPGGNKWMYVGRNKAGQVWRDITGNRSGTVTINADGWGNFSVNGGSVSIWV

SEQ ID NO: 21728 - protein, 483 aa, Synthetic construct
HHNQTNGTMMQYFEWYLPNDGNHWHRLRSDASNLKDKGITAVWIPPAWKGASQNDVGYGAYDLYDLGEFNQKGTVRTKYGTRNQLQAAVTALKSNGIQVYGDVVMNHKGGADATEWVRAVEVNPSNRNQEVSGDYTIEAWTKFDFPGRGNTHSNFKWRWYHFDGVDWDQSRQLQNKIYKFRGDGKEWDWEVDEENGNYDYLMYADIDMDHPEVVNELRNWGVWYTNTLGLDGFRIDAVKHIKYSFTRDWLEHVRNTTGKNMFAVAEFWKNDIGAIENYLSKTNWNHSVFDVPLHYNLYNASRSGGNYDMRQIFNGTVVQRHPTHAVTFVDNHDSQPEEALESFVEEWFKPLAYALTLTRDQGYPSVFYGDYYGIPTHGVPAMKSKIDPILEARQKYAYGKQNDYLDHHNMIGWTREGNTAHPNSGLATIMSDGPGGNKWMYVGRNKAGQVWRDITGNRSGTVTINADGWGNFSVNGGSVSIWV

SEQ ID NO: 21729 - protein, 483 aa, Synthetic construct
HHNQTNGTMMQYFEWYLPNDGNHWNRLRSDASNLKDKGITAVWIPPAWKGASQNDVGYGAYDLYDLGEFNQKGTVRTKYGTRNQLQAAVTALKSNGIQVYGDVVMNHKGGADATEWVRAVEVNPSNRNQEVSGDYTIEAWTKFDFPGRGNTHSNFKWRWYHFDGVDWDQSRQLQNKIYKFRGDGKEWDWEVDTENGNYDYLMYADYDMDHPEVVNELRNWGVWYTNTLGLDGFRIDAVKHIKYSFTRDWLEHVRNTTGKNMFAVAEFWKNDIGAIRNYLSKTNWNHSVFDVPLHYNLYNASRSGGNYDMRQIFNGTVVQRHPTHAVTFVDNHDSQPEEALESFVEEWFKPLAYALTLTRDQGYPSVFYGDYYGIPTHGVPAMKSKIDPILEARQKYAYGKQNDYMDHHNMIGWTREGNTAHPNSGLATIMSDGPGGNKWMYVGRNKAGQVWRDITGNRSGTVTINADGWGNFSVNGGSVSIWV

SEQ ID NO: 21730 - protein, 483 aa, Synthetic construct
HHNGTNGTMMQYFEWYLPNDGNHWHRLRSDASNLKDKGITAVWIPPAWKGASQNDVGYGAYDLYDLGEFNQKGTVRTKYGTRNQLQAAVTALKSNGIQVWGDVVMNHKGGADATEWVRAVEVNPSNRNQEVSGDYTIEAWTKFDFPGRGNTHSNFKWRWYHFDGVDWDQSRQLQNKIYKFRGDGKEWDWEVDTENGNYDYLMYADYDMDHPEVVNELRNWGVWYTNTLGLDGFRIDAVKHIKYSFTRDWLTHVRNTTGKNMFAVAEFWKNDIGAIENYLSKTNWNHSVFDVPLHYNLYNASRSGGNYDMRQIFNGTVVQRHPTHAVTFVDNHDSQPEEALESFVEEWFKPLAYALTLTRDQGEPSVFYGDYYGIPTHGVPAMKSKIDPILEARQKYAYGKQNDYLDHHNMIGWTREGNTAHPNSGLATIMSDGPGGNKWMYVGRNKAGQVWRDITGNRSGTVTINADGWGNFSVNGGSVSIWV

SEQ ID NO: 21731 - protein, 483 aa, Synthetic construct
HHNQTNGTMMQYFEWYLPNDGNHWHRLRSDASNLKDKGITAVWIPPAWKGASQNDVGYGAYDLYDLGEFNQKGTVRTKYGTRNQLQAAVTALKSNGIQVYGDVVMNHKGGADATEWVRAVEVNPSNRNQEVSGDYTIEAWTKFDFPGRGNTHSNFKWRWYHFDGVDWDQSRQLQNKIYKFRGDGKGWDWEVDTENGNYDYLMYADYDMDHPEVVNELRNWGVWYTNTLGLDGFRIDAVKHIKYSFTRDWLEHVRNTTGKNMFAVAEFWKNDIGAIENYLSKTNWNHSVFDVPLHYNLYNASRSGGNYDMRQIFNGTVVQRHPTHAVTFVDNHDSQPEEALESFVEEWFKPLAYALTLTRDQGYPSVFYGDYYGIPTHGVPAMKSKIDPILEARQKYAYGKQNDYLDHHNMIGWTREGNTAHPNSGLATIMSDGPGGNKWMYVGRNKAGQVWRDITGNRSGTVTINADGWGNFSVNGGSVSIWV

SEQ ID NO: 21732 - protein, 483 aa, Synthetic construct
HHNQTNGTMMQYFEWYLPNDGNHWHRLRSDASNLKDKGITAVWIPPAWKGASQNDVGYGAYDLYDLGEFNQKGTVRTKYGTRNQLQAAVTALKSNGIQVYGDVVMNHKGGADATEWVRAVEVNPSNRNQEVSGDYTIEAWTKFDFPGRGNTHSNFKWRWWHFDGVDWDQSRQLQNKIYKFRGDGKGWDWEVDTENGNYDYLMYADYDMDHPEVVNELRNWGVWYTNTLGLDGFRIDAVKHIKYSFTRDWLTHVRNTTGKNMFAVAEFWKNDIGAIENYLSKTNWNHSVFDVPLHYNLYNASRSGGNYDMRQIFNGTVVQRHPTHAVTFVDNHDSQPEEALESFVEEWFKPLAYALTLTRDQGYPSVFYGDYYGIPTHGVPAMKSKIDPILEARQKYAYGKQNDYLDHHNMIGWTREGNTAHPNSGLATIMSDGPGGNKWMYVGRNKAGQVWRDITGNRSGTVTINADGWGNFSVNGGSVSIWV

SEQ ID NO: 21733 - protein, 483 aa, Synthetic construct
HHNGTNGTMMQYFEWYLPNDGNHWHRLRSDASNLKDKGITAVWIPPAWKGASQNDVGYGAYDLYDLGEFNQKGTVRTKYGTRNQLQAAVTALKSNGIQVYGDVVMNHKGGADATEWVRAVEVNPSNRNQEVSGDYTIEAWTKFDFPGRGNTHSNFKWRWWHFDGVDWDQSRQLQNKIYKFRGDGKEWDWEVDTENGNYDYLMYADIDMDHPEVVNELRNWGVWYTNTLGLDGFRIDAVKHIKYSFTRDWLEHVRNTTGKNMFAVAEFWKNDIGAIENYLSKTNWNHSVFDVPLHYNLYNASRSGGNYDMRQIFNGTVVQRHPTHAVTFVDNHDSQPEEALESFVEEWFKPLAYALTLTRDQGYPSVFYGDYYGIPTHGVPAMKSKIDPILEARQKYAYGKQNDYMDHHNMIGWTREGNTAHPNSGLATIMSDGPGGNKWMYVGRNKAGQVWRDITGNRSGTVTINADGWGNFSVNGGSVSIWV

SEQ ID NO: 21734 - protein, 483 aa, Synthetic construct
HHNQTNGTMMQYFEWYLPNDGNHWNRLRSDASNLKDKGITAVWIPPAWKGASQNDVGYGAYDLYDLGEFNQKGTVRTKYGTRNQLQAAVTALKSNGIQVYGDVVMNHKGGADATEWVRAVEVNPSNRNQEVSGDTTIEAWTKFDFPGRGNTHSNFKWRWYHFDGVDWDQSRQLQNKIYKFRGDGKEWDWEVDEENGNYDYLMYADYDMDHPEVVNELRNWGVWYTNTLGLDGFRIDAVKHIKYSFTRDWLEHVRNTTGKNMFAVAEFWKNDIGAIENYLSKTNWNHSVFDVPLHYNLYNASRSGGNYDMRQIFNGTVVQRHPTHAVTFVDNHDSQPEEALESFVEEWFKPLAYALTLTRDQGYPSVFYGDYYGIPTHGVPAMKSKIDPILEARQKYAYGKQNDYMDHHNMIGWTREGNTAHPNSGLATIMSDGPGGNKWMYVGRNKAGQVWRDITGNRSGTVTINADGWGNFSVNGGSVSIWV

SEQ ID NO: 21735 - protein, 483 aa, Synthetic construct
HHNGTNGTMMQYFEWYLPNDGNHWHRLRSDASNLKDKGITAVWIPPAWKGASQNDVGYGAYDLYDLGEFNQKGTVRTKYGTRNQLQAAVTALKSNGIQVYGDVVMNHKGGADATEWVRAVEVNPSNRNQEVSGDYTIEAWTKFDFPGRGNTHSNFKWRWYHFDGVDWDQSRQLQNKIYKFRGDGKEWDWEVDTENGNYDYLMYADIDMDHPEVVNELRNWGVWYTNTLGLDGFRIDAVKHIKYSFTRDWLEHVRNTTGKNMFAVAEFWKNDIGAIRNYLSKTNWNHSVFDVPLHYNLYNASRSGGNYDMRQIFNGTVVQRHPTHAVTFVDNHDSQPEEALESFVEEWFKPLAYALTLTRDQGYPSVFYGDYYGIPTHGVPAMKSKIDPILEARQKYAYGKQNDYLDHHNMIGWTREGNTAHPNSGLATIMSDGPGGNKWMYVGRNKAGQVWRDITGNRSGTVTINADGWGNFSVNGGSVSIWV

SEQ ID NO: 21736 - protein, 483 aa, Synthetic construct
HHNQTNGTMMQYFEWYLPNDGNHWHRLRSDASNLKDKGITAVWIPPAWKGASQNDVGYGAYDLYDLGEFNQKGTVRTKYGTRNQLQAAVTALKSNGIQVYGDVVMNHKGGADATEWVRAVEVNPSNRNQEVSGDYTIEAWTKFDFPGRGNTHSNFKWRWWHFDGVDWDQSRQLQNKIYKFRGDGKEWDWEVDTENGNYDYLMYADIDMDHPEVVNELRNWGVWYTNTLGLDGFRIDAVKHIKYSFTRDWLTHVRNTTGKNMFAVAEFWKNDIGAIENYLSKTNWNHSVFDVPLHYNLYNASRSGGNYDMRQIFNGTVVQRHPTHAVTFVDNHDSQPEEALESFVEEWFKPLAYALTLTRDQGYPSVFYGDYYGIPTHGVPAMKSKIDPILEARQKYAYGKQNDYMDHHNMIGWTREGNTAHPNSGLATIMSDGPGGNKWMYVGRNKAGQVWRDITGNRSGTVTINADGWGNFSVNGGSVSIWV

SEQ ID NO: 21737 - protein, 483 aa, Synthetic construct
HHNQTNGTMMQYFEWYLPNDGNHWHRLRSDASNLKDKGITAVWIPPAWKGASQNDVGYGAYDLYDLGEFNQKGTVRTKYGTRNQLQAAVTALKSNGIQVYGDVVMNHKGGADATEWVRAVEVNPSNRNQEVSGDYTIEAWTKFDFPGRGNTHSNFKWRWWHFDGVDWDQSRQLQNRIYKFRGDGKEWDWEVDTENGNYDYLMYADYDMDHPEVVNELRNWGVWYTNTLGLDGFRIDAVKHIKYSFTRDWLEHVRNTTGKNMFAVAEFWKNDIGAIENYLSKTNWNHSVFDVPLHYNLYNASRSGGNYDMRQIFNGTVVQRHPTHAVTFVDNHDSQPEEALESFVEEWFKPLAYALTLTRDQGYPSVFYGDYYGIPTHGVPAMKSKIDPILEARQKYAYGKQNDYLDHHNMIGWTREGNTAHPNSGLATIMSDGPGGNKWMYVGRNKAGQVWRDITGNRSGTVTINADGWGNFSVNGGSVSIWV

SEQ ID NO: 21738 - protein, 483 aa, Synthetic construct
HHNGTNGTMMQYFEWYLPNDGNHWHRLRSDASNLKDKGITAVWIPPAWKGASQNDVGYGAYDLYDLGEFNQKGTVRTKYGTRNQLQAAVTALKSNGIQVYGDVVMNHKGGADATEWVRAVEVNPSNRNQEVSGDYTIEAWTKFDFPGRGNTHSNFKWRWWHFDGVDWDQSRQLQNKIYKFRGDGKEWDWEVDTENGNYDYLMYADYDMDHPEVVNELRNWGVWYTNTLGLDGFRIDAVKHIKYSFTRDWLTHVRNTTGKNMFAVAEFWKNDIGAIRNYLSKTNWNHSVFDVPLHYNLYNASRSGGNYDMRQIFNGTVVQRHPTHAVTFVDNHDSQPEEALESFVEEWFKPLAYALTLTRDQGYPSVFYGDYYGIPTHGVPAMKSKIDPILEARQKYAYGKQNDYLDHHNMIGWTREGNTAHPNSGLATIMSDGPGGNKWMYVGRNKAGQVWRDITGNRSGTVTINADGWGNFSVNGGSVSIWV

SEQ ID NO: 21739 - protein, 483 aa, Synthetic construct
HHNGTNGTMMQYFEWYLPNDGNHWHRLRSDASNLKDKGITAVWIPPAWKGASQNDVGYGAYDLYDLGEFNQKGTVRTKYGTRNQLQAAVTALKSNGIQVWGDVVMNHKGGADATEWVRAVEVNPSNRNQEVSGDYTIEAWTKFDFPGRGNTHSNFKWRWYHFDGVDWDQSRQLQNKIYKFQGDGKEWDWEVDEENGNYDYLMYADYDMDHPEVVNELRNWGVWYTNTLGLDGFRIDAVKHIKYSFTRDWLTHVRNTTGKNMFAVAEFWKNDIGAIENYLSKTNWNHSVFDVPLHYNLYNASRSGGNYDMRQIFNGTVVQRHPTHAVTFVDNHDSQPEEALESFVEEWFKPLAYALTLTRDQGYPSVFYGDYYGIPTHGVPAMKSKIDPILEARQKYAYGKQNDYLDHHNMIGWTREGNTAHPNSGLATIMSDGPGGNKWMYVGRNKAGQVWRDITGNRSGTVTINADGWGNFSVNGGSVSIWV

SEQ ID NO: 21740 - protein, 483 aa, Synthetic construct
HHNQTNGTMMQYFEWYLPNDGNHWNRLRSDASNLKDKGITAVWIPPAWKGASQNDVGYGAYDLYDLGEFNQKGTVRTKYGTRNQLQAAVTALKSNGIQVYGDVVMNHKGGADATEWVRAVEVNPSNRNQEVSGDYTIEAWTKFDFPGRGNTHSNFKWRWYHFDGVDWDQSRQLQNKIYKFRGDGKEWDWEVDTENGNYDYLMYADIDMDHPEVVNELRNWGVWYTNTLGLDGFRIDAVKHIKYSFTRDWLEHVRNTTGKNMFAVAEFWKNDIGAIRNYLSKTNWNHSVFDVPLHYNLYNASRSGGNYDMRQIFNGTVVQRHPTHAVTFVDNHDSQPEEALESFVEEWFKPLAYALTLTRDQGYPSVFYGDYYGIPTHGVPAMKSKIDPILEARQKYAYGKQNDYMDHHNMIGWTREGNTAHPNSGLATIMSDGPGGNKWMYVGRNKAGQVWRDITGNRSGTVTINADGWGNFSVNGGSVSIWV

SEQ ID NO: 21741 - protein, 483 aa, Synthetic construct
HHNQTNGTMMQYFEWYLPNDGNHWNRLRSDASNLKDKGITAVWIPPAWKGASQNDVGYGAYDLYDLGEFNQKGTVRTKYGTRNQLQAAVTALKSNGIQVYGDVVMNHKGGADATEWVRAVEVNPSNRNQEVSGDYTIEAWTKFDFPGRGNTHSNFKWRWWHFDGVDWDQSRQLQNRIYKFRGDGKEWDWEVDTENGNYDYLMYADYDMDHPEVVNELRNWGVWYTNTLGLDGFRIDAVKHIKYSFTRDWLEHVRNTTGKNMFAVAEFWKNDIGAIRNYLSKTNWNHSVFDVPLHYNLYNASRSGGNYDMRQIFNGTVVQRHPTHAVTFVDNHDSQPEEALESFVEEWFKPLAYALTLTRDQGYPSVFYGDYYGIPTHGVPAMKSKIDPILEARQKYAYGKQNDYMDHHNMIGWTREGNTAHPNSGLATIMSDGPGGNKWMYVGRNKAGQVWRDITGNRSGTVTINADGWGNFSVNGGSVSIWV

SEQ ID NO: 21742 - protein, 483 aa, Synthetic construct
HHNQTNGTMMQYFEWYLPNDGNHWNRLRSDASNLKDKGITAVWIPPAWKGASQNDVGYGAYDLYDLGEFNQKGTVRTKYGTRNQLQAAVTALKSNGIQVYGDVVMNHKGGADATEWVRAVEVNPSNRNQEVSGDYTIEAWTKFDFPGRGNTHSNFKWRWWHFDGVDWDQSRQLQNKIYKFRGDGKGWDWEVDTENGNYDYLMYADYDMDHPEVVNELRNWGVWYTNTLGLDGFRIDAVKHIKYSFTRDWLEHVRNTTGKNMFAVAEFWKNDIGAIENYLSKTNWNHSVFDVPLHYNLYNASRSGGNYDMRQIFNGTVVQRHPGHAVTFVDNHDSQPEEALESFVEEWFKPLAYALTLTRDQGYPSVFYGDYYGIPTHGVPAMKSKIDPILEARQKYAYGKQNDYMDHHNMIGWTREGNTAHPNSGLATIMSDGPGGNKWMYVGRNKAGQVWRDITGNRSGTVTINADGWGNFSVNGGSVSIWV

SEQ ID NO: 21743 - protein, 483 aa, Synthetic construct
HHNQTNGTMMQYFEWYLPNDGNHWNRLRSDASNLKDKGITAVWIPPAWKGASQNDVGYGAYDLYDLGEFNQKGTVRTKYGTRNQLQAAVTALKSNGIQVYGDVVMNHKGGADATEWVRAVEVNPSNRNQEVSGDYTIEAWTKFDFPGRGNTHSNFKWRWEHFDGVDWDQSRQLQNKIYKFRGDGKEWDWEVDEENGNYDYLMYADYDMDHPEVVNELRNWGVWYTNTLGLDGFRIDAVKHIKYSFTRDWLEHVRNTTGKNMFAVAEFWKNDIGAIENYLSKTNWNHSVFDVPLHYNLYNASRSGGNYDMRQIFNGTVVQRHPTHAVTFVDNHDSQPEEALESFVEEWFKPLAYALTLTRDQGYPSVFYGDYYGIPTHGVPAMKSKIDPILEARQKYAYGKQNDYMDHHNMIGWTREGNTAHPNSGLATIMSDGPGGNKWMYVGRNKAGQVWRDITGNRSGTVTINADGWGNFSVNGGSVSIWV

SEQ ID NO: 21744 - protein, 483 aa, Synthetic construct
HHNGTNGTMMQYFEWYLPNDGNHWHRLRSDASNLKDKGITAVWIPPAWKGASQNDVGYGAYDLYDLGEFNQKGTVRTKYGTRNQLQAAVTALKSNGIQVWGDVVMNHKGGADATEWVRAVEVNPSNRNQEVSGDYTIEAWTKFDFPGRGNTHSNFKWRWYHFDGVDWDQSRQLQNKIYKFRGDGKEWDWEVDTENGNYDYLMYADYDMDHPEVVNELRNWGVWYTNTLGLDGFRIDAVKHIKYSFTRDWLTHVRNTTQKNMFAVAEFWKNDIGAIENYLSKTNWNHSVFDVPLHYNLYNASRSGGNYDMRQIFNGTVVQRHPTHAVTFVDNHDSQPEEALESFVEEWFKPLAYALTLTRDQGYPSVFYGDYYGIPTHGVPAMKSKIDPILEARQKYAYGKQNDYLDHHNMIGWTREGNTAHPNSGLATIMSDGPGGNKWMYVGRNKAGQVWRDITGNRSGTVTINADGWGNFSVNGGSVSIWV

SEQ ID NO: 21745 - protein, 483 aa, Synthetic construct
HHNGTNGTMMQYFEWYLPNDGNHWHRLRSDASNLKDKGITAVWIPPAWKGASQNDVGYGAYDLYDLGEFNQKGTVRTKYGTRNQLQAAVTALKSNGIQVWGDVVMNHKGGADATEWVRAVEVNPSNRNQEVSGDTTIEAWTKFDFPGRGNTHSNFKWRWYHFDGVDWDQSRQLQNKIYKFRGDGKEWDWEVDTENGNYDYLMYADYDMDHPEVVNELRNWGVWYTNTLGLDGFRIDAVKHIKYSFTRDWLTHVRNTTGKNMFAVAEFWKNDIGAIENYLSKTNWNHSVFDVPLHYNLYNASRSGGNYDMRQIFNGTVVQRHPTHAVTFVDNHDSQPEEALESFVEEWFKPLAYALTLTRDQGYPSVFYGDYYGIPTHGVPAMKSKIDPILEARQKYAYGKQNDYLDHHNMIGWTREGNTAHPNSGLATIMSDGPGGNKWMYVGRNKAGQVWRDITGNRSGTVTINADGWGNFSVNGGSVSIWV

SEQ ID NO: 21746 - protein, 483 aa, Synthetic construct
HHNQTNGTMMQYFEWYLPNDGNHWNRLRSDASNLKDKGITAVWIPPAWKGASQNDVGYGAYDLYDLGEFNQKGTVRTKYGTRNQLQAAVTALKSNGIQVYGDVVMNHKGGADATEWVRAVEVNPSNRNQEVSGDYTIEAWTKFDFPGRGNTHSNFKWRWYHFDGVDWDQSRQLQNKIYKFRGDGKEWDWEVDEENGNYDYLMYADYDMDHPEVVNELRNWGVWYTNTLGLDGFRIDAVKHIKYSFTRDWLEHVRNTTGKNMFAVAEFWKNDIGAIENYLSKTNWNHSVFDVPLHYNLYNASRSGGNYDMRQIFNGTVVQRHPTHAVTFVDNHDSQPEEALESFVEEWFKPLAYALTLTRDQGEPSVFYGDYYGIPTHGVPAMKSKIDPILEARQKYAYGKQNDYMDHHNMIGWTREGNTAHPNSGLATIMSDGPGGNKWMYVGRNKAGQVWRDITGNRSGTVTINADGWGNFSVNGGSVSIWV

SEQ ID NO: 21747 - protein, 483 aa, Synthetic construct
HHNQTNGTMMQYFEWYLPNDGNHWHRLRSDASNLKDKGITAVWIPPAWKGASQNDVGYGAYDLYDLGEFNQKGTVRTKYGTRNQLQAAVTALKSNGIQVYGDVVMNHKGGADATEWVRAVEVNPSNRNQEVSGDYTIEAWTKFDFPGRGNTHSNFKWRWYHFDGVDWDQSRQLQNKIYKFRGDGKEWDWEVDTENGNYDYLMYADIDMDHPEVVNELRNWGVWYTNTLGLDGFRIDAVKHIKYSFTRDWLEHVRNTTGKNMFAVAEFWKNDIGAIENYLSKTNWNHSVFDVPLHYNLYNASRSGGNYDMRQIFNGTVVQRHPTHAVTFVDNHDSQPEEALESFVEEWFKPLAYALTLTRDQGYPSVFYGDYYGIPTHGVPAMKSKIDPILEARQKYAYGKQNDYMDHHNMIGWTREGNTAHPNSGLATIMSDGPGGNKWMYVGRNKAGQVWRDITGNRSGTVTINADGWGNFSVNGGSVSIWV

SEQ ID NO: 21748 - protein, 483 aa, Synthetic construct
HHNQTNGTMMQYFEWYLPNDGNHWNRLRSDASNLKDKGITAVWIPPAWKGASQNDVGYGAYDLYDLGEFNQKGTVRTKYGTRNQLQAAVTALKSNGIQVYGDVVMNHKGGADATEWVRAVEVNPSNRNQEVSGDYTIEAWTKFDFPGRGNTHSNFKWRWWHFDGVDWDQSRQLQNKIYKFRGDGKEWDWEVDTENGNYDYLMYADIDMDHPEVVNELRNWGVWYTNTLGLDGFRIDAVKHIKYSFTRDWLTHVRNTTGKNMFAVAEFWKNDIGAIRNYLSKTNWNHSVFDVPLHYNLYNASRSGGNYDMRQIFNGTVVQRHPTHAVTFVDNHDSQPEEALESFVEEWFKPLAYALTLTRDQGYPSVFYGDYYGIPTHGVPAMKSKIDPILEARQKYAYGKQNDYMDHHNMIGWTREGNTAHPNSGLATIMSDGPGGNKWMYVGRNKAGQVWRDITGNRSGTVTINADGWGNFSVNGGSVSIWV

SEQ ID NO: 21749 - protein, 483 aa, Synthetic construct
HHNQTNGTMMQYFEWYLPNDGNHWNRLRSDASNLKDKGITAVWIPPAWKGASQNDVGYGAYDLYDLGEFNQKGTVRTKYGTRNQLQAAVTALKSNGIQVYGDVVMNHKGGADATEWVRAVEVNPSNRNQEVSGDYTIEAWTKFDFPGRGNTHSNFKWRWWHFDGVDWDQSRQLQNKIYKFRGDGKEWDWEVDTENGNYDYLMYADIDMDHPEVVNELRNWGVWYTNTLGLDGFRIDAVKHIKYSFTRDWLEHVRNTTGKNMFAVAEFWKNDIGAIENYLSKTNWNHSVFDVPLHYNLYNASRSGGNYDMRQIFNGTVVQRHPTHAVTFVDNHDSQPEEALESFVEEWFKPLAYALTLTRDQGYPSVFYGDYYGIPTHGVPAMKSKIDPILEARQKYAYGKQNDYMDHHNMIGWTREGNTAHPNSGLATIMSDGPGGNKWMYVGRNKAGQVWRDITGNRSGTVTINADGWGNFSVNGGSVSIWV

SEQ ID NO: 21750 - protein, 483 aa, Synthetic construct
HHNGTNGTMMQYFEWYLPNDGNHWHRLRSDASNLKDKGITAVWIPPAWKGASQNDVGYGAYDLYDLGEFNQKGTVRTKYGTRNQLQAAVTALKSNGIQVYGDVVMNHKGGADATEWVRAVEVNPSNRNQEVSGDYTIEAWTKFDFPGRGNTHSNFKWRWYHFDGVDWDQSRQLQNKIYKFRGDGKGWDWEVDTENGNYDYLMYADYDMDHPEVVNELRNWGVWYTNTLGLDGFRIDAVKHIKYSFTRDWLEHVRNTTGKNMFAVAEFWKNDIGAIRNYLSKTNWNHSVFDVPLHYNLYNASRSGGNYDMRQIFNGTVVQRHPTHAVTFVDNHDSQPEEALESFVEEWFKPLAYALTLTRDQGYPSVFYGDYYGIPTHGVPAMKSKIDPILEARQKYAYGKQNDYLDHHNMIGWTREGNTAHPNSGLATIMSDGPGGNKWMYVGRNKAGQVWRDITGNRSGTVTINADGWGNFSVNGGSVSIWV

SEQ ID NO: 21751 - protein, 483 aa, Synthetic construct
HHNGTNGTMMQYFEWYLPNDGNHWHRLRSDASNLKDKGITAVWIPPAWKGASQNDVGYGAYDLYDLGEFNQKGTVRTKYGTRNQLQAAVTALKSNGIQVYGDVVMNHKGGADATEWVRAVEVNPSNRNQEVSGDYTIEAWTKFDFPGRGNTHSNFKWRWWHFDGVDWDQSRQLQNKIYKFRGDGKEWDWEVDTENGNYDYLMYADIDMDHPEVVNELRNWGVWYTNTLGLDGFRIDAVKHIKYSFTRDWLEHVRNTTGKNMFAVAEFWKNDIGAIENYLSKTNWNHSVFDVPLHYNLYNASRSGGNYDMRQIFNGTVVQRHPTHAVTFVDNHDSQPEEALESFVEEWFKPLAYALTLTRDQGYPSVFYGDYYGIPTHGVPAMKSKIDPILEARQKYAYGKQNDYLDHHNMIGWTREGNTAHPNSGLATIMSDGPGGNKWMYVGRNKAGQVWRDITGNRSGTVTINADGWGNFSVNGGSVSIWV

SEQ ID NO: 21752 - protein, 483 aa, Synthetic construct
HHNQTNGTMMQYFEWYLPNDGNHWHRLRSDASNLKDKGITAVWIPPAWKGASQNDVGYGAYDLYDLGEFNQKGTVRTKYGTRNQLQAAVTALKSNGIQVYGDVVMNHKGGADATEWVRAVEVNPSNRNQEVSGDYTIEAWTKFDFPGRGNTHSNFKWRWWHFDGVDWDQSRQLQNKIYKFRGDGKGWDWEVDTENGNYDYLMYADYDMDHPEVVNELRNWGVWYTNTLGLDGFRIDAVKHIKYSFTRDWLTHVRNTTGKNMFAVAEFWKNDIGAIENYLSKTNWNHSVFDVPLHYNLYNASRSGGNYDMRQIFNGTVVQRHPTHAVTFVDNHDSQPEEALESFVEEWFKPLAYALTLTRDQGYPSVFYGDYYGIPTHGVPAMKSKIDPILEARQKYAYGKQNDYMDHHNMIGWTREGNTAHPNSGLATIMSDGPGGNKWMYVGRNKAGQVWRDITGNRSGTVTINADGWGNFSVNGGSVSIWV

SEQ ID NO: 21753 - protein, 483 aa, Synthetic construct
HHNGTNGTMMQYFEWYLPNDGNHWHRLRSDASNLKDKGITAVWIPPAWKGASQNDVGYGAYDLYDLGEFNQKGTVRTKYGTRNQLQAAVTALKSNGIQVWGDVVMNHKGGADATEWVRAVEVNPSNRNQEVSGDYTIEAWTKFDFPGRGNTHSNFKWRWYHFDGVDWDQSRQLQNKIYKFRGDGKEWDWEVDEENGNYDYLMYADYDMDHPEVVNELRNWGVWYTNTLGLDGFRIDAVKHIKYSFTRDWLTHVRNTTQKNMFAVAEFWKNDIGAIENYLSKTNWNHSVFDVPLHYNLYNASRSGGNYDMRQIFNGTVVQRHPTHAVTFVDNHDSQPEEALESFVEEWFKPLAYALTLTRDQGYPSVFYGDYYGIPTHGVPAMKSKIDPILEARQKYAYGKQNDYLDHHNMIGWTREGNTAHPNSGLATIMSDGPGGNKWMYVGRNKAGQVWRDITGNRSGTVTINADGWGNFSVNGGSVSIWV

SEQ ID NO: 21754 - protein, 490 aa, Synthetic construct
HHNGTNGTMMQYFEWHLPNDGQHWNRLRNDAANLKNLGITAVWIPPAWKGTSQNDVGYGAYDLYDLGEFNQKGTIRTKYGTRSQLQSAIASLQNNGIQVYGDVVMNHKAGADGTEFVDAVEVDPSNRNQETSGTYQIQAWTKFDFPGRGNTYSSFKWRWYHFDGTDWDESRKLNRIYKFRSTGKAWDWEVDTENGNYDYLMFADLDMDHPVDMDHPEVINELRRWGVWYTNTLNLDGFRIDAVKHIKYSFTRDWLNHVRSTGKNNMFAVAEFWKNDLGAIENYLHKTNWNHSVFDVPLHYNLYNASKSGGNYDMRQILNGTVVSKHPIHAVTFVDNHDSQPAEALESFVEAWFKPLAYALILTREQGYPSVFYGDYYGIPTHGVAAMKGKIDPILEARQKYAYGTQHDYLDHHNIIGWTREGNSAHPNSGLATIMSDGPGGSKWMYVGRHKAGQVWRDITGNRTGTVTINADGWGNFSVNGGSVSIWVNK

SEQ ID NO: 21755 - protein, 483 aa, Synthetic construct
HHNGTNGTMMQYFEWYLPNDGNHWHRLRSDASNLKDKGITAVWIPPAWKGASQNDVGYGAYDLYDLGEFNQKGTVRTKYGTRNQLQAAVTALKSNGIQVYGDVVMNHKGGADATEWVRAVEVNPSNRNQEVSGDYTIEAWTKFDFPGRGNTHSNFKWRWWHFDGVDWDQSRQLQNRIYKFRGDGKEWDWEVDTENGNYDYLMYADYDMDHPEVVNELRNWGVWYTNTLGLDGFRIDAVKHIKYSFTRDWLEHVRNTTGKNMFAVAEFWKNDIGAIRNYLSKTNWNHSVFDVPLHYNLYNASRSGGNYDMRQIFNGTVVQRHPGHAVTFVDNHDSQPEEALESFVEEWFKPLAYALTLTRDQGYPSVFYGDYYGIPTHGVPAMKSKIDPILEARQKYAYGKQNDYMDHHNMIGWTREGNTAHPNSGLATIMSDGPGGNKWMYVGRNKAGQVWRDITGNRSGTVTINADGWGNFSVNGGSVSIWV

SEQ ID NO: 21756 - protein, 483 aa, Synthetic construct
HHNQTNGTMMQYFEWYLPNDGNHWNRLRSDASNLKDKGITAVWIPPAWKGASQNDVGYGAYDLYDLGEFNQKGTVRTKYGTRNQLQAAVTALKSNGIQVYGDVVMNHKGGADATEWVRAVEVNPSNRNQEVSGDDTIEAWTKFDFPGRGNTHSNFKWRWYHFDGVDWDQSRQLQNKIYKFRGDGKEWDWEVDEENGNYDYLMYADYDMDHPEVVNELRNWGVWYTNTLGLDGFRIDAVKHIKYSFTRDWLEHVRNTTGKNMFAVAEFWKNDIGAIENYLSKTNWNHSVFDVPLHYNLYNASRSGGNYDMRQIFNGTVVQRHPTHAVTFVDNHDSQPEEALESFVEEWFKPLAYALTLTRDQGYPSVFYGDYYGIPTHGVPAMKSKIDPILEARQKYAYGKQNDYMDHHNMIGWTREGNTAHPNSGLATIMSDGPGGNKWMYVGRNKAGQVWRDITGNRSGTVTINADGWGNFSVNGGSVSIWV

SEQ ID NO: 21757 - protein, 483 aa, Synthetic construct
HHNGTNGTMMQYFEWYLPNDGNHWHRLRSDASNLKDKGITAVWIPPAWKGASQNDVGYGAYDLYDLGEFNQKGTVRTKYGTRNQLQAAVTALKSNGIQVYGDVVMNHKGGADATEWVRAVEVNPSNRNQEVSGDYTIEAWTKFDFPGRGNTHSNFKWRWWHFDGVDWDQSRQLQNKIYKFRGDGKEWDWEVDTENGNYDYLMYADYDMDHPEVVNELRNWGVWYTNTLGLDGFRIDAVKHIKYSFTRDWLEHVRNTTGKNMFAVAEFWKNDIGAIENYLSKTNWNHSVFDVPLHYNLYNASRSGGNYDMRQIFNGTVVQRHPTHAVTFVDNHDSQPEEALESFVEEWFKPLAYALTLTRDQGYPSVFYGDYYGIPTHGVPAMKSKIDPILEARQKYAYGKQNDYMDHHNMIGWTREGNTAHPNSGLATIMSDGPGGNKWMYVGRNKAGQVWRDITGNRSGTVTINADGWGNFSVNGGSVSIWV

SEQ ID NO: 21758 - protein, 483 aa, Synthetic construct
HHNQTNGTMMQYFEWYLPNDGNHWNRLRSDASNLKDKGITAVWIPPAWKGASQNDVGYGAYDLYDLGEFNQKGTVRTKYGTRNQLQAAVTALKSNGIQVYGDVVMNHKGGADATEWVRAVEVNPSNRNQEVSGDYTIEAWTKFDFPGRGNTHSNFKWRWYHFDGVDWDQSRQLQNKIYKFRGDGKEWDWEVDEENGNYDYLMYADYDMDHPEVVNELRNWGVWYTNTLGLDGFRIDAVKHIKYSFTRDWLEHVRNTTGKNMFAVAEFWKNDIGAIENYLSNTNWNHSVFDVPLHYNLYNASRSGGNYDMRQIFNGTVVQRHPTHAVTFVDNHDSQPEEALESFVEEWFKPLAYALTLTRDQGYPSVFYGDYYGIPTHGVPAMKSKIDPILEARQKYAYGKQNDYMDHHNMIGWTREGNTAHPNSGLATIMSDGPGGNKWMYVGRNKAGQVWRDITGNRSGTVTINADGWGNFSVNGGSVSIWV

SEQ ID NO: 21759 - protein, 483 aa, Synthetic construct
HHNQTNGTMMQYFEWYLPNDGNHWNRLRSDASNLKDKGITAVWIPPAWKGASQNDVGYGAYDLYDLGEFNQKGTVRTKYGTRNQLQAAVTALKSNGIQVYGDVVMNHKGGADATEWVRAVEVNPSNRNQEVSGDYTIEAWTKFDFPGRGNTHSNFKWRWYHFDGVDWDQSRQLQNKIYKFDGDGKEWDWEVDEENGNYDYLMYADYDMDHPEVVNELRNWGVWYTNTLGLDGFRIDAVKHIKYSFTRDWLEHVRNTTGKNMFAVAEFWKNDIGAIENYLSKTNWNHSVFDVPLHYNLYNASRSGGNYDMRQIFNGTVVQRHPTHAVTFVDNHDSQPEEALESFVEEWFKPLAYALTLTRDQGYPSVFYGDYYGIPTHGVPAMKSKIDPILEARQKYAYGKQNDYMDHHNMIGWTREGNTAHPNSGLATIMSDGPGGNKWMYVGRNKAGQVWRDITGNRSGTVTINADGWGNFSVNGGSVSIWV

SEQ ID NO: 21760 - protein, 483 aa, Synthetic construct
HHNGTNGTMMQYFEWYLPNDGNHWHRLRSDASNLKDKGITAVWIPPAWKGASQNDVGYGAYDLYDLGEFNQKGTVRTKYGTRNQLQAAVTALKSNGIQVYGDVVMNHKGGADATEWVRAVEVNPSNRNQEVSGDYTIEAWTKFDFPGRGNTHSNFKWRWYHFDGVDWDQSRQLQNKIYKFRGDGKEWDWEVDTENGNYDYLMYADYDMDHPEVVNELRNWGVWYTNTLGLDGFRIDAVKHIKYSFTRDWLEHVRNTTGKNMFAVAEFWKNDIGAIRNYLSKTNWNHSVFDVPLHYNLYNASRSGGNYDMRQIFNGTVVQRHPTHAVTFVDNHDSQPEEALESFVEEWFKPLAYALTLTRDQGYPSVFYGDYYGIPTHGVPAMKSKIDPILEARQKYAYGKQNDYMDHHNMIGWTREGNTAHPNSGLATIMSDGPGGNKWMYVGRNKAGQVWRDITGNRSGTVTINADGWGNFSVNGGSVSIWV

SEQ ID NO: 21761 - protein, 483 aa, Synthetic construct
HHNGTNGTMMQYFEWYLPNDGNHWHRLRSDASNLKDKGITAVWIPPAWKGASQNDVGYGAYDLYDLGEFNQKGTVRTKYGTRNQLQAAVTALKSNGIQVYGDVVMNHKGGADATEWVRAVEVNPSNRNQEVSGDYTIEAWTKFDFPGRGNTHSNFKWRWWHFDGVDWDQSRQLQNKIYKFRGDGKGWDWEVDTENGNYDYLMYADYDMDHPEVVNELRNWGVWYTNTLGLDGFRIDAVKHIKYSFTRDWLEHVRNTTGKNMFAVAEFWKNDIGAIENYLSKTNWNHSVFDVPLHYNLYNASRSGGNYDMRQIFNGTVVQRHPTHAVTFVDNHDSQPEEALESFVEEWFKPLAYALTLTRDQGYPSVFYGDYYGIPTHGVPAMKSKIDPILEARQKYAYGKQNDYLDHHNMIGWTREGNTAHPNSGLATIMSDGPGGNKWMYVGRNKAGQVWRDITGNRSGTVTINADGWGNFSVNGGSVSIWV

SEQ ID NO: 21762 - protein, 483 aa, Synthetic construct
HHNGTNGTMMQYFEWYLPNDGNHWHRLRSDASNLKDKGITAVWIPPAWKGASQNDVGYGAYDLYDLGEFNQKGTVRTKYGTRNQLQAAVTALKSNGIQVYGDVVMNHKGGADATEWVRAVEVNPSNRNQEVSGDYTIEAWTKFDFPGRGNTHSNFKWRWYHFDGVDWDQSRQLQNKIYKFRGDGKGWDWEVDTENGNYDYLMYADYDMDHPEVVNELRNWGVWYTNTLGLDGFRIDAVKHIKYSFTRDWLEHVRNTTGKNMFAVAEFWKNDIGAIRNYLSKTNWNHSVFDVPLHYNLYNASRSGGNYDMRQIFNGTVVQRHPTHAVTFVDNHDSQPEEALESFVEEWFKPLAYALTLTRDQGYPSVFYGDYYGIPTHGVPAMKSKIDPILEARQKYAYGKQNDYMDHHNMIGWTREGNTAHPNSGLATIMSDGPGGNKWMYVGRNKAGQVWRDITGNRSGTVTINADGWGNFSVNGGSVSIWV

SEQ ID NO: 21763 - protein, 483 aa, Synthetic construct
HHNGTNGTMMQYFEWYLPNDGNHWHRLRSDASNLKDKGITAVWIPPAWKGASQNDVGYGAYDLYDLGEFNQKGTVRTKYGTRNQLQAAVTALKSNGIQVWGDVVMNHKGGADATEWVRAVEVNPSNRNQEVSGDYTIEAWTKFDFPGRGNTHSNFKWRWYHFDGVDWDQSRQLQNKIYKFRGDGKEWDWEVDEENGNYDYLMYADYDMDHPEVVNELRNWGVWYTNTLGLDGFRIDAVKHIKYSFTRDWLTHVRNTTGKNMFAVAEFWKNDIGAIENYLSKTNWNHSVFDVPLHYNLYNASRSGGNYDMRQIFNGTVVQRHPTHAVTFVDNHDSQPEEALESFVEEWFKPLAYALTLTRDQGEPSVFYGDYYGIPTHGVPAMKSKIDPILEARQKYAYGKQNDYLDHHNMIGWTREGNTAHPNSGLATIMSDGPGGNKWMYVGRNKAGQVWRDITGNRSGTVTINADGWGNFSVNGGSVSIWV

SEQ ID NO: 21764 - protein, 483 aa, Synthetic construct
HHNGTNGTMMQYFEWYLPNDGNHWHRLRSDASNLKDKGITAVWIPPAWKGASQNDVGYGAYDLYDLGEFNQKGTVRTKYGTRNQLQAAVTALKSNGIQVWGDVVMNHKGGADATEWVRAVEVNPSNRNQEVSGDTTIEAWTKFDFPGRGNTHSNFKWRWYHFDGVDWDQSRQLQNKIYKFRGDGKEWDWEVDEENGNYDYLMYADYDMDHPEVVNELRNWGVWYTNTLGLDGFRIDAVKHIKYSFTRDWLTHVRNTTGKNMFAVAEFWKNDIGAIENYLSKTNWNHSVFDVPLHYNLYNASRSGGNYDMRQIFNGTVVQRHPTHAVTFVDNHDSQPEEALESFVEEWFKPLAYALTLTRDQGYPSVFYGDYYGIPTHGVPAMKSKIDPILEARQKYAYGKQNDYLDHHNMIGWTREGNTAHPNSGLATIMSDGPGGNKWMYVGRNKAGQVWRDITGNRSGTVTINADGWGNFSVNGGSVSIWV

SEQ ID NO: 21765 - protein, 483 aa, Synthetic construct
HHNGTNGTMMQYFEWYLPNDGNHWHRLRSDASNLKDKGITAVWIPPAWKGASQNDVGYGAYDLYDLGEFNQKGTVRTKYGTRNQLQAAVTALKSNGIQVYGDVVMNHKGGADATEWVRAVEVNPSNRNQEVSGDTTIEAWTKFDFPGRGNTHSNFKWRWYHFDGVDWDQSRQLQNKIYKFRGDGKEWDWEVDEENGNYDYLMYADYDMDHPEVVNELRNWGVWYTNTLGLDGFRIDAVKHIKYSFTRDWLTHVRNTTQKNMFAVAEFWKNDIGAIENYLSKTNWNHSVFDVPLHYNLYNASRSGGNYDMRQIFNGTVVQRHPTHAVTFVDNHDSQPEEALESFVEEWFKPLAYALTLTRDQGYPSVFYGDYYGIPTHGVPAMKSKIDPILEARQKYAYGKQNDYLDHHNMIGWTREGNTAHPNSGLATIMSDGPGGNKWMYVGRNKAGQVWRDITGNRSGTVTINADGWGNFSVNGGSVSIWV

SEQ ID NO: 21766 - protein, 483 aa, Synthetic construct
HHNGTNGTMMQYFEWYLPNDGNHWHRLRSDASNLKDKGITAVWIPPAWKGASQNDVGYGAYDLYDLGEFNQKGTVRTKYGTRNQLQAAVTALKSNGIQVYGDVVMNHKGGADATEWVRAVEVNPSNRNQEVSGDYTIEAWTKFDFPGRGNTHSNFKWRWYHFDGVDWDQSRQLQNKIYKFRGDGKEWDWEVDTENGNYDYLMYADYDMDHPEVVNELRNWGVWYTNTLGLDGFRIDAVKHIKYSFTRDWLTHVRNTTQKNMFAVAEFWKNDIGAIENYLSKTNWNHSVFDVPLHYNLYNASRSGGNYDMRQIFNGTVVQRHPTHAVTFVDNHDSQPEEALESFVEEWFKPLAYALTLTRDQGEPSVFYGDYYGIPTHGVPAMKSKIDPILEARQKYAYGKQNDYLDHHNMIGWTREGNTAHPNSGLATIMSDGPGGNKWMYVGRNKAGQVWRDITGNRSGTVTINADGWGNFSVNGGSVSIWV

SEQ ID NO: 21767 - protein, 483 aa, Synthetic construct
HHNQTNGTMMQYFEWYLPNDGNHWNRLRSDASNLKDKGITAVWIPPAWKGASQNDVGYGAYDLYDLGEFNQKGTVRTKYGTRNQLQAAVTALKSNGIQVYGDVVMNHKGGADATEWVRAVEVNPSNRNQEVSGDYTIEAWTKFDFPGRGNTHSNFKWRWYHFDGVDWDQSRQLQNKIYKFRGDGKEWDWEVDEENGNYDYLMYADYDMDHPEVVNELRNWGVWYTNTLGLDGFRIDAVKHIKYSFTRDWLEHVRNTTGKNMFAVAEFWKNDIGAIENYLSKTNWNHSVFDVPLHYNLYNASRSGGNYDMRQIFNGTVVQRHPTHAVTFVDNHDSQPEEALESFVEEWFKPLAYALTLTRDQGNPSVFYGDYYGIPTHGVPAMKSKIDPILEARQKYAYGKQNDYMDHHNMIGWTREGNTAHPNSGLATIMSDGPGGNKWMYVGRNKAGQVWRDITGNRSGTVTINADGWGNFSVNGGSVSIWV

SEQ ID NO: 21768 - protein, 483 aa, Synthetic construct
HHNGTNGTMMQYFEWYLPNDGNHWHRLRSDASNLKDKGITAVWIPPAWKGASQNDVGYGAYDLYDLGEFNQKGTVRTKYGTRNQLQAAVTALKSNGIQVYGDVVMNHKGGADATEWVRAVEVNPSNRNQEVSGDYTIEAWTKFDFPGRGNTHSNFKWRWWHFDGVDWDQSRQLQNRIYKFRGDGKEWDWEVDTENGNYDYLMYADYDMDHPEVVNELRNWGVWYTNTLGLDGFRIDAVKHIKYSFTRDWLEHVRNTTGKNMFAVAEFWKNDIGAIRNYLSKTNWNHSVFDVPLHYNLYNASRSGGNYDMRQIFNGTVVQRHPTHAVTFVDNHDSQPEEALESFVEEWFKPLAYALTLTRDQGYPSVFYGDYYGIPTHGVPAMKSKIDPILEARQKYAYGKQNDYLDHHNMIGWTREGNTAHPNSGLATIMSDGPGGNKWMYVGRNKAGQVWRDITGNRSGTVTINADGWGNFSVNGGSVSIWV

SEQ ID NO: 21769 - protein, 483 aa, Synthetic construct
HHNGTNGTMMQYFEWYLPNDGNHWHRLRSDASNLKDKGITAVWIPPAWKGASQNDVGYGAYDLYDLGEFNQKGTVRTKYGTRNQLQAAVTALKSNGIQVYGDVVMNHKGGADATEWVRAVEVNPSNRNQEVSGDYTIEAWTKFDFPGRGNTHSNFKWRWYHFDGVDWDQSRQLQNKIYKFRGDGKEWDWEVDEENGNYDYLMYADYDMDHPEVVNELRNWGVWYTNTLGLDGFRIDAVKHIKYSFTRDWLTHVRNTTGKNMFAVAEFWKNDIGAIENYLSNTNWNHSVFDVPLHYNLYNASRSGGNYDMRQIFNGTVVQRHPTHAVTFVDNHDSQPEEALESFVEEWFKPLAYALTLTRDQGEPSVFYGDYYGIPTHGVPAMKSKIDPILEARQKYAYGKQNDYLDHHNMIGWTREGNTAHPNSGLATIMSDGPGGNKWMYVGRNKAGQVWRDITGNRSGTVTINADGWGNFSVNGGSVSIWV

SEQ ID NO: 21770 - protein, 483 aa, Synthetic construct
HHNQTNGTMMQYFEWYLPNDGNHWHRLRSDASNLKDKGITAVWIPPAWKGASQNDVGYGAYDLYDLGEFNQKGTVRTKYGTRNQLQAAVTALKSNGIQVYGDVVMNHKGGADATEWVRAVEVNPSNRNQEVSGDYTIEAWTKFDFPGRGNTHSNFKWRWYHFDGVDWDQSRQLQNKIYKFRGDGKEWDWEVDTENGNYDYLMYADYDMDHPEVVNELRNWGVWYTNTLGLDGFRIDAVKHIKYSFTRDWLEHVRNTTGKNMFAVAEFWKNDIGAIENYLSKTNWNHSVFDVPLHYNLYNASRSGGNYDMRQIFNGTVVQRHPTHAVTFVDNHDSQPEEALESFVEEWFKPLAYALTLTRDQGYPSVFYGDYYGIPTHGVPAMKSKIDPILEARQKYAYGKQNDYLDHHNMIGWTREGNTAHPNSGLATIMSDGPGGNKWMYVGRNKAGQVWRDITGNRSGTVTINADGWGNFSVNGGSVSIWV

SEQ ID NO: 21771 - protein, 483 aa, Synthetic construct
HHNQTNGTMMQYFEWYLPNDGNHWNRLRSDASNLKDKGITAVWIPPAWKGASQNDVGYGAYDLYDLGEFNQKGTVRTKYGTRNQLQAAVTALKSNGIQVYGDVVMNHKGGADATEWVRAVEVNPSNRNQEVSGDYTIEAWTKFDFPGRGNTHSNFKWRWYHFDGVDWDQSRQLQNKIYKFRGDGKEWDWEVDEENGNYDYLMYADYDMDHPEVVNELRNWGVWYTNTLGLDGFRIDAVKHIKYSFTRDWLEHVRNTTQKNMFAVAEFWKNDIGAIENYLSKTNWNHSVFDVPLHYNLYNASRSGGNYDMRQIFNGTVVQRHPTHAVTFVDNHDSQPEEALESFVEEWFKPLAYALTLTRDQGYPSVFYGDYYGIPTHGVPAMKSKIDPILEARQKYAYGKQNDYMDHHNMIGWTREGNTAHPNSGLATIMSDGPGGNKWMYVGRNKAGQVWRDITGNRSGTVTINADGWGNFSVNGGSVSIWV

SEQ ID NO: 21772 - protein, 483 aa, Synthetic construct
HHNGTNGTMMQYFEWYLPNDGNHWHRLRSDASNLKDKGITAVWIPPAWKGASQNDVGYGAYDLYDLGEFNQKGTVRTKYGTRNQLQAAVTALKSNGIQVWGDVVMNHKGGADATEWVRAVEVNPSNRNQEVSGDYTIEAWTKFDFPGRGNTHSNFKWRWYHFDGVDWDQSRQLQNKIYKFRGDGKEWDWEVDTENGNYDYLMYADYDMDHPEVVNELRNWGVWYTNTLGLDGFRIDAVKHIKYSFTRDWLTHVRNTTGKNMFAVAEFWKNDIGAIENYLSKTNWNHSVFDVPLHYNLYNASRSGGNYDMRQIFNGTVVQRHPTHAVTFVDNHDSQPEEALESFVEEWFKPLAYALTLTRDRGYPSVFYGDYYGIPTHGVPAMKSKIDPILEARQKYAYGKQNDYLDHHNMIGWTREGNTAHPNSGLATIMSDGPGGNKWMYVGRNKAGQVWRDITGNRSGTVTINADGWGNFSVNGGSVSIWV

SEQ ID NO: 21773 - protein, 483 aa, Synthetic construct
HHNGTNGTMMQYFEWYLPNDGNHWHRLRSDASNLKDKGITAVWIPPAWKGASQNDVGYGAYDLYDLGEFNQKGTVRTKYGTRNQLQAAVTALKSNGIQVYGDVVMNHKGGADATEWVRAVEVNPSNRNQEVSGDYTIEAWTKFDFPGRGNTHSNFKWRWWHFDGVDWDQSRQLQNKIYKFRGDGKEWDWEVDEENGNYDYLMYADYDMDHPEVVNELRNWGVWYTNTLGLDGFRIDAVKHIKYSFTRDWLEHVRNTTGKNMFAVAEFWKNDIGAIENYLSKTNWNHSVFDVPLHYNLYNASRSGGNYDMRQIFNGTVVQRHPTHAVTFVDNHDSQPEEALESFVEEWFKPLAYALTLTRDQGYPSVFYGDYYGIPTHGVPAMKSKIDPILEARQKYAYGKQNDYMDHHNMIGWTREGNTAHPNSGLATIMSDGPGGNKWMYVGRNKAGQVWRDITGNRSGTVTINADGWGNFSVNGGSVSIWV

SEQ ID NO: 21774 - protein, 483 aa, Synthetic construct
HHNQTNGTMMQYFEWYLPNDGNHWNRLRSDASNLKDKGITAVWIPPAWKGASQNDVGYGAYDLYDLGEFNQKGTVRTKYGTRNQLQAAVTALKSNGIQVYGDVVMNHKGGADATEWVRAVEVNPSNRNQEVSGDWTIEAWTKFDFPGRGNTHSNFKWRWYHFDGVDWDQSRQLQNKIYKFRGDGKEWDWEVDEENGNYDYLMYADYDMDHPEVVNELRNWGVWYTNTLGLDGFRIDAVKHIKYSFTRDWLEHVRNTTGKNMFAVAEFWKNDIGAIENYLSKTNWNHSVFDVPLHYNLYNASRSGGNYDMRQIFNGTVVQRHPTHAVTFVDNHDSQPEEALESFVEEWFKPLAYALTLTRDQGYPSVFYGDYYGIPTHGVPAMKSKIDPILEARQKYAYGKQNDYMDHHNMIGWTREGNTAHPNSGLATIMSDGPGGNKWMYVGRNKAGQVWRDITGNRSGTVTINADGWGNFSVNGGSVSIWV

SEQ ID NO: 21775 - protein, 483 aa, Synthetic construct
HHNGTNGTMMQYFEWYLPNDGNHWNRLRSDASNLKDKGITAVWIPPAWKGASQNDVGYGAYDLYDLGEFNQKGTVRTKYGTRNQLQAAVTALKSNGIQVYGDVVMNHKGGADATEWVRAVEVNPSNRNQEVSGDYTIEAWTKFDFPGRGNTHSNFKWRWWHFDGVDWDQSRQLQNKIYKFRGDGKGWDWEVDTENGNYDYLMYADYDMDHPEVVNELRNWGVWYTNTLGLDGFRIDAVKHIKYSFTRDWLEHVRNTTGKNMFAVAEFWKNDIGAIRNYLSKTNWNHSVFDVPLHYNLYNASRSGGNYDMRQIFNGTVVQRHPTHAVTFVDNHDSQPEEALESFVEEWFKPLAYALTLTRDQGYPSVFYGDYYGIPTHGVPAMKSKIDPILEARQKYAYGKQNDYLDHHNMIGWTREGNTAHPNSGLATIMSDGPGGNKWMYVGRNKAGQVWRDITGNRSGTVTINADGWGNFSVNGGSVSIWV

SEQ ID NO: 21776 - protein, 483 aa, Synthetic construct
HHNQTNGTMMQYFEWYLPNDGNHWNRLRSDASNLKDKGITAVWIPPAWKGASQNDVGYGAYDLYDLGEFNQKGTVRTKYGTRNQLQAAVTALKSNGIQVYGDVVMNHKGGADATEWVRAVEVNPSNRNQEVSGDYTIEAWTKFDFPGRGNTHSNFKWRWYHFDGVDWDQSRQLQNKIYKFQGDGKEWDWEVDEENGNYDYLMYADYDMDHPEVVNELRNWGVWYTNTLGLDGFRIDAVKHIKYSFTRDWLEHVRNTTGKNMFAVAEFWKNDIGAIENYLSKTNWNHSVFDVPLHYNLYNASRSGGNYDMRQIFNGTVVQRHPTHAVTFVDNHDSQPEEALESFVEEWFKPLAYALTLTRDQGYPSVFYGDYYGIPTHGVPAMKSKIDPILEARQKYAYGKQNDYMDHHNMIGWTREGNTAHPNSGLATIMSDGPGGNKWMYVGRNKAGQVWRDITGNRSGTVTINADGWGNFSVNGGSVSIWV

SEQ ID NO: 21777 - protein, 483 aa, Synthetic construct
HHNQTNGTMMQYFEWYLPNDGNHWNRLRSDASNLKDKGITAVWIPPAWKGASQNDVGYGAYDLYDLGEFNQKGTVRTKYGTRNQLQAAVTALKSNGIQVYGDVVMNHKGGADATEWVRAVEVNPSNRNQEVSGDYTIEAWTKFDFPGRGNTHSNFKWRWYHFDGVDWDQSRQLQNKIYKFRGDGKGWDWEVDTENGNYDYLMYADYDMDHPEVVNELRNWGVWYTNTLGLDGFRIDAVKHIKYSFTRDWLEHVRNTTGKNMFAVAEFWKNDIGAIRNYLSKTNWNHSVFDVPLHYNLYNASRSGGNYDMRQIFNGTVVQRHPTHAVTFVDNHDSQPEEALESFVEEWFKPLAYALTLTRDQGYPSVFYGDYYGIPTHGVPAMKSKIDPILEARQKYAYGKQNDYMDHHNMIGWTREGNTAHPNSGLATIMSDGPGGNKWMYVGRNKAGQVWRDITGNRSGTVTINADGWGNFSVNGGSVSIWV

SEQ ID NO: 21778 - protein, 483 aa, Synthetic construct
HHNQTNGTMMQYFEWYLPNDGNHWNRLRSDASNLKDKGITAVWIPPAWKGASQNDVGYGAYDLYDLGEFNQKGTVRTKYGTRNQLQAAVTALKSNGIQVYGDVVMNHKGGADATEWVRAVEVNPSNRNQEVSGDYTIEAWTKFDFPGRGNTHSNFKWRWWHFDGVDWDQSRQLQNKIYKFRGDGKEWDWEVDTENGNYDYLMYADYDMDHPEVVNELRNWGVWYTNTLGLDGFRIDAVKHIKYSFTRDWLEHVRNTTGKNMFAVAEFWKNDIGAIENYLSKTNWNHSVFDVPLHYNLYNASRSGGNYDMRQIFNGTVVQRHPTHAVTFVDNHDSQPEEALESFVEEWFKPLAYALTLTRDQGYPSVFYGDYYGIPTHGVPAMKSKIDPILEARQKYAYGKQNDYLDHHNMIGWTREGNTAHPNSGLATIMSDGPGGNKWMYVGRNKAGQVWRDITGNRSGTVTINADGWGNFSVNGGSVSIWV

SEQ ID NO: 21779 - protein, 483 aa, Synthetic construct
HHNGTNGTMMQYFEWYLPNDGNHWHRLRSDASNLKDKGITAVWIPPAWKGASQNDVGYGAYDLYDLGEFNQKGTVRTKYGTRNQLQAAVTALKSNGIQVYGDVVMNHKGGADATEWVRAVEVNPSNRNQEVSGDTTIEAWTKFDFPGRGNTHSNFKWRWYHFDGVDWDQSRQLQNKIYKFRGDGKEWDWEVDTENGNYDYLMYADYDMDHPEVVNELRNWGVWYTNTLGLDGFRIDAVKHIKYSFTRDWLTHVRNTTQKNMFAVAEFWKNDIGAIENYLSKTNWNHSVFDVPLHYNLYNASRSGGNYDMRQIFNGTVVQRHPTHAVTFVDNHDSQPEEALESFVEEWFKPLAYALTLTRDQGYPSVFYGDYYGIPTHGVPAMKSKIDPILEARQKYAYGKQNDYLDHHNMIGWTREGNTAHPNSGLATIMSDGPGGNKWMYVGRNKAGQVWRDITGNRSGTVTINADGWGNFSVNGGSVSIWV

SEQ ID NO: 21780 - protein, 483 aa, Synthetic construct
HHNQTNGTMMQYFEWYLPNDGNHWNRLRSDASNLKDKGITAVWIPPAWKGASQNDVGYGAYDLYDLGEFNQKGTVRTKYGTRNQLQAAVTALKSNGIQVYGDVVMNHKGGADATEWVRAVEVNPSNRNQEVSGDYTIEAWTKFDFPGRGNTHSNFKWRWYHFDGVDWDQSRQLQNKIYKFNGDGKEWDWEVDEENGNYDYLMYADYDMDHPEVVNELRNWGVWYTNTLGLDGFRIDAVKHIKYSFTRDWLEHVRNTTGKNMFAVAEFWKNDIGAIENYLSKTNWNHSVFDVPLHYNLYNASRSGGNYDMRQIFNGTVVQRHPTHAVTFVDNHDSQPEEALESFVEEWFKPLAYALTLTRDQGYPSVFYGDYYGIPTHGVPAMKSKIDPILEARQKYAYGKQNDYMDHHNMIGWTREGNTAHPNSGLATIMSDGPGGNKWMYVGRNKAGQVWRDITGNRSGTVTINADGWGNFSVNGGSVSIWV

SEQ ID NO: 21781 - protein, 483 aa, Synthetic construct
HHNGTNGTMMQYFEWYLPNDGNHWNRLRSDASNLKDKGITAVWIPPAWKGASQNDVGYGAYDLYDLGEFNQKGTVRTKYGTRNQLQAAVTALKSNGIQVYGDVVMNHKGGADATEWVRAVEVNPSNRNQEVSGDYTIEAWTKFDFPGRGNTHSNFKWRWYHFDGVDWDQSRQLQNRIYKFRGDGKEWDWEVDTENGNYDYLMYADIDMDHPEVVNELRNWGVWYTDTLGLDGFRIDAVKHIKYSFTRDWLTHVRNTTGKNMFAVAEFWKNDIGAIENYLSKTNWNHSVFDVPLHYNLYNASRSGGNYDMRQIFEGTVVQRHPTHAVTFVDNHDSQPEEALESFVEEWFKPLAYALTLTRDQGYPSVFYGDYYGIPTHGVPAMKSKIDPILEARQKYAYGKQNDYLDHHNMIGWTREGNTAHPNSGLATIMSDGPGGNKWMYVGRNKAGQVWRDITGNRSGEVTINADGWGEFSVNGGSVSIWV

SEQ ID NO: 21782 - protein, 397 aa, Bacillus sp. 707
HHNGTNGTMMQYFEWYLPNDGNHWNRLNSDASNLKSKGITAVWIPPAWKGASQNDVGYGAYDLYDLGEFNQKGTVRTKYGTRSQLQAAVTSLKNNGIQVYGDVVMNHKGGADATEMVRAVEVNPNNRNQEVTGEYTIEAWTRFDFPGRGNTHSSFKWRWYHFDGVDWDQSRRLNNRIYKFRGKAWDWEVDTENGNYDYLMYADIDMDHPEVVNELRNWGVWYTNTLGLDGFRIDAVKHIKYSFTRDWINHVRSATGKNMFAVAEFWKNDLGAIENYLQKTNWNHSVFDVPLHYNLYNASKSGGNYDMRNIFNGTVVQRHPSHAVTFVDNHDSQPEEALESFVEEWFKPLAYALTLTREQGYPSVFYGDYYGIPTHGVPAMRSKIDPILEARQKYAYG

SEQ ID NO: 21783 - protein, 399 aa, Bacillus sp. 707
HHNGTNGTMMQYFEWYLPNDGNHWNRLNSDASNLKSKGITAVWIPPAWKGASQNDVGYGAYDLYDLGEFNQKGTVRTKYGTRSQLQAAVTSLKNNGIQVYGDVVMNHKGGADATEMVRAVEVNPNNRNQEVTGEYTIEAWTRFDFPGRGNTHSSFKWRWYHFDGVDWDQSRRLNNRIYKFRGHGKAWDWEVDTENGNYDYLMYADIDMDHPEVVNELRNWGVWYTNTLGLDGFRIDAVKHIKYSFTRDWINHVRSATGKNMFAVAEFWKNDLGAIENYLQKTNWNHSVFDVPLHYNLYNASKSGGNYDMRNIFNGTVVQRHPSHAVTFVDNHDSQPEEALESFVEEWFKPLAYALTLTREQGYPSVFYGDYYGIPTHGVPAMRSKIDPILEARQKYAYG

SEQ ID NO: 21784 - protein, 491 aa, Unidentified
AAPFNGTMMQYFEWYLPDDGTLWTKVANEANNLSSLGITALWLPPAYKGTSRSDVGYGVYDLYDLGEFNQKGTVRTKYGTKAQYLQAIQAAHAAGMQVYADVVFNHKAGADETEVFKVIEVDPNDRTKEISEPFEIEGWTKFTFPGRGDQYSSFKWNSEHFNGTDFDAKGERTGVFRIAGKKWNWEVDTEFGNYDYLMFANIDYNHPDVVTELKNWGKWYVNTTNIDGFRLDAVKHIKFSFFPDWLSYVRSQTGKPLFTVGEYWSYDINKLHNYITKTDGTMSLFDAPLHNKFYTASKKGRDFDMRTLMTNTLMKDQPTLAVTFVDNHDTEPGQALQSWVDPWFKPLAYAFILTRQEGYPCVFYGDYYGIPQYNIPSLKSKIDPLLIARRDYAYGTQHDYLDHSNIIGWTREGGTEKPGSGLAALITNGDGGSKWMYVGKQHAGKVFYDLTGNRSDTVTINSDGWGEFKVNGGSVSVWVPRKTTVSTIARP

SEQ ID NO: 21785 - protein, 491 aa, Unidentified
AAPFNGTMMQYFEWYLPDDGTLWTKVANEANNLSSLGITALWLPPAYKGTSRSDVGYGVYDLYDLGEFNQKGTVRTKYGTKAQYLQAIQAAHAAGMQVYADVVFDHKAGADETEVFKVIEVDPNDRTKEISEPFEIEGWTKFTFPGRGDQYSSFKWNSEHFNGTDFDAKGERTGVFRIATKAWNWEVDTEFGNYDYLMFANIDYNHPDVVTELKNWGKWYVNTTNIDGFRLDAVKHIKFSFFPDWLSYVRSQTGKPLFTVGEYWSYDINKLHNYITKTDGTMSLFDAPLHNKFYTASKKGRDFDMRTLMTNTLMKDQPTLAVTFVDNHDTEPGQALQSWVDPWFKPLAYAFILTRQEGYPCVFYGDYYGIPQYNIPSLKSKIDPLLIARRDYAYGTQHDYLDHSNIIGWTREGGTEKPGSGLAALITNGDGGSKWMYVGKQHAGKVFYDLTGNRSDTVTINSDGWGEFKVNGGSVSVWVPRKTTVSTIARP

SEQ ID NO: 21786 - protein, 486 aa, Bacillus sp.
HHNGTNGTMMQYFEWHLPNDGQHWNRLRNDAANLKNLGINAVWIPPAWKGTSQNDVGYGAYDLYDLGEFNQKGTIRTKYGTRSQLQSAIARLQNNGIQVYGDVVMNHKGGADGTEWVQAVEVNPSNRNQEVTGEYTIEAWTKFDFPGRGNTHSSFKWRWYHFDGTDWDQSRRLNNRIYKFRGTGKAWDWEVDTENGNYDYLMYADVDMDHPEVINELRRWGVWYTNTLNLDGFRIDAVKHIKYQFTRDWLNHVRSTTGKNNMYAVAEFWKNDLGAIENYLSKTNWNHSVFDVPLHYNLYNASKSGGNYDMRQILNGTVVSKHPIHAVTFVDNHDSQPAEALESFVEAWFKPLAYALILTREQGYPSVFYGDYYGIPTHGVAAMKGKIDPILEARQKYAYGTQHDYLDHHNIIGWTREGNSAHPNSGLATIMSDGPGGSKWMYVGRHKAGQVWRDITGNRTGTVTINADGWGNFSVNGGSVSIWVNK

SEQ ID NO: 21787 - protein, 485 aa, Bacillus sp.
HHNGTNGTMMQYFEWYLPNDGNHWNRLRSDASNLKDKGISAVWIPPAWKGASQNDVGYGAYDLYDLGEFNQKGTIRTKYGTRNQLQAAVNALKSNGIQVYGDVVMNHKGGADATEMVRAVEVNPNNRNQEVSGEYTIEAWTKFDFPGRGNTHSNFKWRWYHFDGVDWDQSRKLNNRIYKFRGDGKGWDWEVDTENGNYDYLIYADIDMDHPEVVNELRNWGVWYTNTLGLDGFRIDAVKHIKYSFTRDWINHVRSATGKNMFAVAEFWKNDLGAIENYLNKTNWNHSVFDVPLHYNLYNASKSGGNYDMRQIFNGTVVQRHPMHAVTFVDNHDSQPEESLESFVEEWFKPLAYALTLTREQGYPSVFYGDYYGIPTHGVPAMKSKIDPILEARQKYAYGRQNDYLDHHNIIGWTREGNTAHPNSGLATIMSDGAGGNKWMFVGRNKAGQVWTDITGNRAGTVTINADGWGNFSVNGGSVSIWVNK

SEQ ID NO: 21788 - protein, 483 aa, Unidentified
HHNGTNGTMMQYFEWYLPNDGNHWNRLRSDASNLKDKGISAVWIPPAWKGASQNDVGYGAYDLYDLGEFNQKGTIRTKYGTRNQLQAAVNALKSNGIQVYGDVVMNHKGGADATEMVKAVEVNPNNRNQEVSGEYTIEAWTKFDFPGRGNTHSNFKWRWYHFDGVDWDQSRKLNNRIYKFRGKGWDWEVDTEFGNYDYLMYADIDMDHPEVVNELRNWGVWYTNTLGLDGFRIDAVKHIKFSFTRDWINHVRSATGKNMFAVAEFWKNDLGAIENYLNKTNWNHSVFDVPLHYNLYNASKSGGNYDMRQIFNGTVVQKHPMHAVTFVDNHDSQPEEALESFVEEWFKPLAYALTLTREQGYPSVFYGDYYGIPTHGVPAMKSKIDPILEARQKYAYGRQNDYLDHHNIIGWTREGNTAHPNSGLATIMSDGAGGNKWMFVGRNKAGQVWTDITGNKAGTVTINADGWGNFSVNGGSVSIWVNK

SEQ ID NO: 21789 - protein, 485 aa, Bacillus sp.
HHNGTNGTMMQYFEWYLPNDGNHWNRLRSDASNLKDKGISAVWIPPAWKGASQNDVGYGAYDLYDLGEFNQKGTIRTKYGTRNQLQAAVNALKSNGIQVYGDVVMNHKGGADATEMVKAVEVNPNNRNQEVSGEYTIEAWTKFDFPGRGNTHSNFKWRWYHFDGVDWDQSRKLNNRIYKFRGXXKGWDWEVDTEFGNYDYLMYADIDMDHPEVVNELRNWGVWYTNTLGLDGFRIDAVKHIKFSFTRDWINHVRSATGKNMFAVAEFWKNDLGAIENYLNKTNWNHSVFDVPLHYNLYNASKSGGNYDMRQIFNGTVVQKHPMHAVTFVDNHDSQPEEALESFVEEWFKPLAYALTLTREQGYPSVFYGDYYGIPTHGVPAMKSKIDPILEARQKYAYGRQNDYLDHHNIIGWTREGNTAHPNSGLATIMSDGAGGNKWMFVGRNKAGQVWTDITGNKAGTVTINADGWGNFSVNGGSVSIWVNK

SEQ ID NO: 21790 - protein, 484 aa, Bacillus sp.
HHNGTNGTMMQYFEWYLPNDGNHWNRLRSDASNLKDKGISAVWIPPAWKGASQNDVGYGAYDLYDLGEFNQKGTIRTKYGTRNQLQAAVNALKSNGIQVYGDVVMNHKGGADATEMVRAVEVNPNNRNQEVSGEYTIEAWTKFDFPGRGNTHSNFKWRWYHFDGVDWDQSRKLNNRIYKFRGGKGWDWEVDTENGNYDYLMYADIDMDHPEVVNELRNWGVWYTNTLGLDGFRIDAVKHIKYSFTRDWINHVRSATGKNMFAVAEFWKNDLGAIENYLNKTNWNHSVFDVPLHYNLYNASKSGGNYDMRQIFNGTVVQRHPMHAVTFVDNHDSQPEEALESFVEEWFKPLAYALTLTREQGYPSVFYGDYYGIPTHGVPAMKSKIDPILEARQKYAYGRQNDYLDHHNIIGWTREGNTAHPNSGLATIMSDGAGGNKWMFVGRNKAGQVWTDITGNRAGTVTINADGWGNFSVNGGSVSIWVNK

SEQ ID NO: 21791 - protein, 485 aa, Bacillus subtilis
HHNGTNGTMMQYFEWYLPNDGNHWNRLRSDASNLKDKGISAVWIPPAWKGTSQNDVGYGAYDLYDLGEFNQKGTIRTKYGTRNQLQAAVNALKSNGIQVYGDVVMNHKGGADATEMVRAVEVNPNNRNQEVSGEYTIEAWTKFDFPGRGNTHSNFKWRWYHFDGVDWDQSRKLNNRIYKFRGDGKGWDWEVDTENGNYDYLMYADIDMDHPEVVNELRNWGVWYTNTLGLDGFRIDAVKHIKYSFTRDWINHVRSATGKNMFAVAEFWKNDLGAIENYLNKTNWNHSVFDVPLHYNLYNASKSGGNYDMRQIFNGTVVQRHPMHAVTFVDNHDSQPEEALESFVEEWFKPLAYALTLTREQGYPCVFYGDYYGIPTHGVPAMKSKIDPILEARQKYAYGRQNDYLDHHNIIGWTREGNTAHPNSGLATIMSDGAGGNKWMFVGRNKAGQVWTDITGNRAGTVTINADGWGNFSVNGGSVSIWVNK

SEQ ID NO: 21792 - protein, 485 aa, Bacillus subtilis
HHNGTNGTMMQYFEWYLPNDGNHWNRLRSDASNLKDVGISAVWIPPAWKGASQNDVGYGAYDLYDLGEFNQKGTIRTKYGTRNQLQAAVNALKSNGIQVYGDVVMNHKGGADATEMVRAVEVNPNNRNQEVSGEYTIEAWTKFDFPGRGNTHSNFKWRWYHFDGVDWDQSRKLNNRIYKFRGDGKGWDWEVDTENGNYDYLMYADIDMDHPEVVNELRNWGVWYTNTLGLDGFRIDAVKHIKYSFTRDWINHVRSATGKNMFAVAEFWKNDLGAIENYLNKTNWNHSVFDVPLHYNLYNASKSGGNYDMRQIFNGTVVQRHPMHAVTFVDNHDSQPEEALESFVEEWFKPLAYALTLTREQGYPSVFYGDYYGIPTHGVPAMKSKIDPILEARQKYAYGRQNDYLDHHNIIGWTREGNTAHPNSGLATIMSDGAGGNKWMFVGRNKAGQVWTDITGNRAGTVTINADGWGNFSVNGGSVSIWVNK

SEQ ID NO: 21793 - protein, 485 aa, Bacillus subtilis
HHNGTNGTMMQYFEWYLPNDGNHWNRLRSDASNLKDKGISAVWIPPAWKGASQNDVGYGAYDLYDLGEFNQKGTIRTKYGTRNQLQAAVNALKSNGIQVYGDVVMNHKGGADATEMVRAVEVNPNNRNQEVSGEYTIEAWTKFDFPGRGNTHSNFKWRWYHFDGVDWDQSRKLNNRIYKFRGDGKGWDWEVDTENGNYDYLMYADIDMDHPEVVNELRNWGVWYTNTLGLDGFRIDAVKHIKYSFTRDWINHVRSATGKNMFAVAEFWKNDLGAIENYLNKTNWNHSVFDVPLHYNLYNASKSGGNYDMRRIFNGTVVQRHPMHAVTFVDNHDSQPEEALESFVEEWFKPLAYALTLTREQGYPSVFYGDYYGIPTHGVPAMKSKIDPILEARQKYAYGRQNDYLDHHNIIGWTREGNTAHPNSGLATIMSDGAGGNKWMFVGRNKAGQVWTDITGNRAGTVTINADGWGNFSVNGGSVSIWVNK

SEQ ID NO: 21794 - protein, 485 aa, Bacillus subtilis
HHNGTNGTMMQYFEWYLPNDGNHWNRLRSDASNLKDKGISAVWIPPAWKGASQNDVGYGAYDLYDLGEFNQKGTIRTKYGTRNQLQAAVNALKSNGIQVYGDVVMNHKGGADATEMVRAVEVNPNNRNQEVSGEYTIEAWTKFDFPGRGNTHSNFKWRWYHFDGVDWDQSRKLNNRIYKFRGDGKGWDWEVDTENGNYDYLMYADIDMDHPEVVNELRNWGVWYTNTLGLDGFRIDAVKHIKYSFTRDWINHVRSATGKNMFAVAEFWKNDLGAIENYLNKTNWNHSVFDVPLHYNLYNASKSGGNYDMRQIFNGTVVQRHPMHAVTFVDNHDSQPEEALESFVEEWFKPLAYALTLTREQGYPSVFYGDYYGIPTHGVPAMKSKIDPILEARQKYAYGRQNDYLDHHNIIGWTREGNTAHPNSGLATIMSDGDGGNKWMFVGRNKAGQVWTDITGNRAGTVTINADGWGNFSVNGGSVSIWVNK

SEQ ID NO: 21795 - protein, 485 aa, Synthetic construct
HHNGTNGTMMQYFEWYLPNDGNHWNRLRSDASNLKDKGITAVWIPPAWKGASQNDVGYGAYDLYDLGEFNQKGTVRTKYGTRNQLQAAVTALKSNGIQVYGDVVMNHKGGADATEWVRAVEVNPSNRNQEVSGDYTIEAWTKFDFPGRGNTHSNFKWRWYHFDGVDWDQSRQLQNRIYKFRGDGKEWDWEVDTENGNYDYLMYADIDMDHPEVVNELRNWGVWYTDTLGLDGFRIDAVKHIKYSFTRDWLTHVRNTTGKNMFAVAEFWKNDIGAIENYLSKTNWNHSVFDVPLHYNLYNASRSGGNYDMRQIFKGTVVQRHPTHAVTFVDNHDSQPEEALESFVEEWFKPLAYALTLTRDQGYPSVFYGDYYGIPTHGVPAMKSKIDPILEARQKYAYGKQNDYLDHHNMIGWTREGNTAHPNSGLATIMSDGPGGNKWMYVGRNKAGQVWRDITGNRSDTVTINADGWGEFSVNGGSVSIWVNR

SEQ ID NO: 21796 - protein, 485 aa, Bacillus subtilis
HHNGTNGTMMQYFEWYLPNDGNHWNRLRSDASNLKDKGISAVWIPPAWKGASQNDVGYGAYDLYDLGEFNQKGTIRTKYGTRNQLQAAVNALKSNGIQVYGDVVMNHKGGADATELVRAVEVNPNNRNQEVSGEYTIEAWTKFDFPGRGNTHSNFKWRWYHFDGVDWDQSRKLNNRIYKFRGDGKGWDWEVDTENGNYDYLMYADIDMDHPEVVNELRNWGVWYTNTLGLDGFRIDAVKHIKYSFTRDWINHVRSATGKNMFAVAEFWKNDLGAIENYLNKTNWNHSVFDVPLHYNLYNASKSGGNYDMRQIFNGTVVQRHPMHAVTFVDNHDSQPEEALESFVEEWFKPLAYALTLTREQGYPSVFYGDYYGIPTHGVPAMKSKIDPILEARQKYAYGRQNDYLDHHNIIGWTREGNTAHPNSGLATIMSDGAGGNKWMFVGRNKAGQVWTDITGNRAGTVTINADGWGNFSVNGGSVSIWVNK

SEQ ID NO: 21797 - protein, 483 aa, Synthetic construct
HHNGTNGTMMQYFEWYLPNDGNHWNRLRDDAANLKSKGITAVWIPPAWKGTSQNDVGYGAYDLYDLGEFNQKGTVRTKYGTRNQLQAAVTSLKNNGIQVYGDVVMNHKGGADGTEIVNAVEVNRSNRNQETSGEYAIEAWTKFDFPGRGNNHSSFKWRWYHFDGTDWDQSRQLQNKIYKFRGKAWDWEVDTENGNYDYLMYADVDMDHPEVIHELRNWGVWYTNTLNLDGFRIDAVKHIKFSFTRDWLTHVRNTTGKPMFAVAEFWKNDLGAIENYLNKTSWNHSVFDVPLHYNLYNASNSGGYYDMRNILNGSVVQKHPTHAVTFVDNHDSQPGEALESFVQQWFKPCAYALVLTREQGYPSVFYGDYYGIPTHGVPAMKSKIDPLLQARQTFAYGTQHDYFDHHDIIGWTREGNSSHPNSGLATICSDGPGGNKWMYVGKNKAGQVWRDITGNRTGTVTINADGWGNFSVNGGSVSVWVKQ

SEQ ID NO: 21798 - protein, 485 aa, Bacillus subtilis
HHNGTNGTMMQYFEWYLPNDGNHWNRLRSDASNLKDMGISAVWIPPAWKGASQNDVGYGAYDLYDLGEFNQKGTIRTKYGTRNQLQAAVNALKSNGIQVYGDVVMNHKGGADATEMVRAVEVNPNNRNQEVSGEYTIEAWTKFDFPGRGNTHSNFKWRWYHFDGVDWDQSRKLNNRIYKFRGDGKGWDWEVDTENGNYDYLMYADIDMDHPEVVNELRNWGVWYTNTLGLDGFRIDAVKHIKYSFTRDWINHVRSATGKNMFAVAEFWKNDLGAIENYLNKTNWNHSVFDVPLHYNLYNASKSGGNYDMRQIFNGTVVQRHPMHAVTFVDNHDSQPEEALESFVEEWFKPLAYALTLTREQGYPSVFYGDYYGIPTHGVPAMKSKIDPILEARQKYAYGRQNDYLDHHNIIGWTREGNTAHPNSGLATIMSDGAGGNKWMFVGRNKAGQVWTDITGNRAGTVTINADGWGNFSVNGGSVSIWVNK

SEQ ID NO: 21799 - protein, 485 aa, Bacillus subtilis
HHNGTNGTMMQYFEWYLPNDGNHWNRLRSDASNLKDKGISAVWIPPAWKGASQNDVGYGAYDLYDLGEFNQKGTIRTKYGTRNQLQAAVNALKSNGIQVYGDVVMNHKGGADATEMVRAVEVNPNNRNQEVSGEYTIEAWTKFDFPGRGNTHSNFKWRWYHFDGVDWDQSRKLNNRIYKFRGDGKGWDWEVDTENGNYDYLMYADIDMDHPEVVNELRNWGVWYTNTLGLDGFRIDAVKHIKYSFTRDWINHVRSATGKNMFAVAEFWKNDLGAIENYLNKTNWNHSVFDVPLHYNLYNASKSGGNYDMRHIFNGTVVQRHPMHAVTFVDNHDSQPEEALESFVEEWFKPLAYALTLTREQGYPSVFYGDYYGIPTHGVPAMKSKIDPILEARQKYAYGRQNDYLDHHNIIGWTREGNTAHPNSGLATIMSDGAGGNKWMFVGRNKAGQVWTDITGNRAGTVTINADGWGNFSVNGGSVSIWVNK

SEQ ID NO: 21800 - protein, 485 aa, Bacillus sp.
HHNGTNGTMMQYFEWYLPNDGNHWNRLRSDASNLKDKGISAVWIPPAWKGASQNDVGYGAYDLYDLGEFNQKGTIRTKYGTRNQLQAAVNALKSNGIQVYGDVVMNHKGGADATEMVRAVEVNPNNRNQEVSGEYTIEAWTKFDFPGRGNTHSNFKWRWYHFDGVDWDQSRKLNNRIYKFRGDGKGWDWEVDTENGNYDYLMYADIDMDHPEVVNELRNWGVWYTNTLGLDGFRIDAVKHIKYSFTRDWINHVRSATGKNMFAVAEFWKNDLGAIENYLNKTNWNHSVFDVPLHYNLYNASKSGGNYDMRQIFNGTVVQRHPMHAVTFVDNHDSQPEEALESFVEEWFKPLAYALTLTREQGYPSVFYGDYYGIPTHGVPAMKSKIDPILEARQKYAYGRQNDYLDHHNIIGWTREGNTAHPNSGLATIMSDGAGGNKWMFVGRNKAGQVWTDITGNRAGTVTINADGWGNFSVNGGSVSIWVNK

SEQ ID NO: 21801 - protein, 484 aa, Bacillus sp.
HHNGTNGTMMQYFEWHLPNDGQHWNRLRNDAANLKNLGINAVWIPPAWKGTSQNDVGYGAYDLYDLGEFNQKGTIRTKYGTRSQLQSAIARLQNNGIQVYGDVVMNHKGGADGTEWVQAVEVNPSNRNQEVTGEYTIEAWTKFDFPGRGNTHSSFKWRWYHFDGTDWDQSRQLNNRIYKFTGKAWDWEVDTENGNYDYLMYADVDMDHPEVINELRRWGVWYTNTLNLDGFRIDAVKHIKYSFERDWLNHVRSTTGKNNMFAVAEFWKNDLGAIENYLHKTNWNHSVFDVPLHYNLYNASKSGGNYDMRQILNGTVVSKHPIHAVTFVDNHDSQPAEALESFVEAWFKPLAYALILTREQGYPLVFYGDYYGIPTHGVAAMKGKIDPILEARQKYAYGTQHDYLDHHNIIGWTREGNSAHPNSGLATIMSDGPGGSKWMYVGRHKAGQVWRDITGNRTGTVTINADGWGNFSVNGGSVSIWVNK

SEQ ID NO: 21802 - protein, 485 aa, Bacillus sp.
HHNGTNGTMMQYFEWHLPNDGNHWNRLRDDAANLKSKGITAVWIPPAWKGTSQNDVGYGAYDLYDLGEFNQKGTVRTKYGTRSQLQGAVTSLKNNGIQVYGDVVMNHKGGADGTEMVNAVEVNRSNRNQEISGEYTIEAWTKFDFPGRGNTHSNFKWRWYHFDGTDWDQSRQLQNKIYKFRGTGKAWDWEVDIENGNYDYLMYADIDMDHPEVINELRNWGVWYTNTLNLDGFRIDAVKHIKYSYTRDWLTHVRNTTGKPMFAVAEFWKNDLAAIENYLNKTSWNHSVFDVPLHYNLYNASNSGGYFDMRNILNGSVVQKHPIHAVTFVDNHDSQPGEALESFVQSWFKPLAYALILTREQGYPSVFYGDYYGIPTHGVPSMKSKIDPLLQARQTYAYGTQHDYFDHHDIIGWTREGDSSHPNSGLATIMSDGPGGNKWMYVGKHKAGQVWRDITGNRSGTVTINADGWGNFTVNGGAVSVWVKQ

SEQ ID NO: 21803 - protein, 483 aa, Bacillus sp.
HHNGTNGTMMQYFEWHLPNDGNHWNRLRDDAANLKSKGITAVWIPPAWKGTSQNDVGYGAYDLYDLGEFNQKGTVRTKYGTRSQLQGAVTSLKNNGIQVYGDVVMNHKGGADGTEMVNAVEVNRSNRNQEISGEYTIEAWTKFDFPGRGNTHSNFKWRWYHFDGTDWDQSRQLQNKIYKFRGKAWDWEVDIENGNYDYLMYADIDMDHPEVINELRNWGVWYTNTLNLDGFRIDAVKHIKYSYTRDWLTHVRNTTGKPMFAVAEFWKNDLAAIENYLNKTSWNHSVFDVPLHYNLYNASNSGGYFDMRNILNGSVVQKHPIHAVTFVDNHDSQPGEALESFVQSWFKPLAYALILTREQGYPSVFYGDYYGIPTHGVPSMKSKIDPLLQARQTYAYGTQHDYFDHHDIIGWTREGDSSHPNSGLATIMSDGPGGNKWMYVGKHKAGQVWRDITGNRSGTVTINADGWGNFTVNGGAVSVWVKQ

SEQ ID NO: 21804 - protein, 484 aa, Bacillus sp.
HHNGTNGTMMQYFEWHLPNDGQHWNRLRNDAANLKNLGITAVWIPPAWKGTSQNDVGYGAYDLYDLGEFNQKGTIRTKYGTRSQLQSAIARLQNNGIQVYGDVVMNHKGGADGTEWVQAVEVNPSNRNQEVTGEYTIEAWTKFDFPGRGNTHSSFKWRWYHFDGTDWDQSRRLNNRIYKFTGKAWDWEVPTENGNYDYLMYADVDMDHPEVINELRRWGVWYTNTLNLDGFRIDAVKHIKYSFTRDWLNHVRSTTGKNNMFAVAEFWKNDLGAIENYLHKTNWNHSVFDVPLHYNLYNASKSGGNYDMRQILNGTVVSKHPIHMVTFVDNHDSQPAEALESFVEAWFKPLAYALILTREQGYPSVFYGDYYGIPTHGVAAMKGKIDPILEARQKYAYGTQHDYLDHHNIIGWTREGNSAHPNSGLATIMSDGPGGSKWMYVGRHKAGQVWRDITGNRTGTVTINADGWGNFSVNGGSVSIWVNK

SEQ ID NO: 21805 - protein, 485 aa, Bacillus subtilis
HHNGTNGTMMQYFEWYLPNDGNHWNRLRSDASNLKDLGISAVWIPPAWKGASQNDVGYGAYDLYDLGEFNQKGTIRTKYGTRNQLQAAVNALKSNGIQVYGDVVMNHKGGADATEMVRAVEVNPNNRNQEVSGEYTIEAWTKFDFPGRGNTHSNFKWRWYHFDGVDWDQSRKLNNRIYKFRGDGKGWDWEVDTENGNYDYLMYADIDMDHPEVVNELRNWGVWYTNTLGLDGFRIDAVKHIKYSFTRDWINHVRSATGKNMFAVAEFWKNDLGAIENYLNKTNWNHSVFDVPLHYNLYNASKSGGNYDMRQIFNGTVVQRHPMHAVTFVDNHDSQPEEALESFVEEWFKPLAYALTLTREQGYPSVFYGDYYGIPTHGVPAMKSKIDPILEARQKYAYGRQNDYLDHHNIIGWTREGNTAHPNSGLATIMSDGAGGNKWMFVGRNKAGQVWTDITGNRAGTVTINADGWGNFSVNGGSVSIWVNK

SEQ ID NO: 21806 - protein, 485 aa, Bacillus sp.
HHNGTNGTMMQYFEWYLPNDGNHWNRLRSDASNLKDKGISAVWIPPAWKGASQNDVGYGAYDLYDLGEFNQKGTIRTKYGTRNQLQAAVNALKSNGIQVYGDVVMNHKGGADATEMVRAVEVNPNNRNQEVSGEYTIEAWTKFDFPGRGNTHSNFKWRWYHFDGVDWDQSRKLNNRIYKFRGDGKGWDWEVDTENGNYDYLLYADIDMDHPEVVNELRNWGVWYTNTLGLDGFRIDAVKHIKYSFTRDWINHVRSATGKNMFAVAEFWKNDLGAIENYLNKTNWNHSVFDVPLHYNLYNASKSGGNYDMRQIFNGTVVQRHPMHAVTFVDNHDSQPEESLESFVEEWFKPLAYALTLTREQGYPSVFYGDYYGIPTHGVPAMKSKIDPILEARQKYAYGRQNDYLDHHNIIGWTREGNTAHPNSGLATIMSDGAGGNKWMFVGRNKAGQVWTDITGNRAGTVTINADGWGNFSVNGGSVSIWVNK

SEQ ID NO: 21807 - protein, 485 aa, Bacillus subtilis
HHNGTNGTMMQYFEWYLPNDGNHWNRLRSDASNLKDKGISAVWIPPAWKGASQNDVGYGAYDLYDLGEFNQKGTIRTKYGTRNQLQAAVNALKSNGIQVYGDVVMNHKGGADATEMVRAVEVNPNNRNQEVSGEYTIEAWTKFDFPGRGNTHSNFKWRWYHFDGVDWDQSRKLNNRIYKFRGDGKGWDWEVDTENGNYDYLMYADIDMDHPEVVNELRNWGVWYTNTLGLDGFRIDAVKHIKYSFTRDWVNHVRSATGKNMFAVAEFWKNDLGAIENYLNKTNWNHSVFDVPLHYNLYNASKSGGNYDMRQIFNGTVVQRHPMHAVTFVDNHDSQPEEALESFVEEWFKPLAYALTLTREQGYPSVFYGDYYGIPTHGVPAMKSKIDPILEARQKYAYGRQNDYLDHHNIIGWTREGNTAHPNSGLATIMSDGAGGNKWMFVGRNKAGQVWTDITGNRAGTVTINADGWGNFSVNGGSVSIWVNK

SEQ ID NO: 21808 - protein, 484 aa, Bacillus sp.
HHNGTNGTMMQYFEWHLPNDGQHWNRLRNDAANLKNLGITAVWIPPAWKGTSQNDVGYGAYDLYDLGEFNQKGTIRTKYGTRSQLQSAIARLQNNGIQVYGDVVMNHKGGADGTEWVQAVEVNPSNRNQEVTGEYTIEAWTKFDFPGRGNTHSSFKWRWYHFDGTDWDQSRRLNNRIYKFTGKAWDWEVPTENGNYDYLMYADVDMDHPEVINELRRWGVWYTNTLNLDGFRIDAVKHIKYSFTRDWLNHVRSTTGKNNMFAVAEFWKNDLGAIENYLHKTNWNHSVFDVPLHYNLYNASKSGGNYDMRQILNGTVVSKHPIHRVTFVDNHDSQPAEALESFVEAWFKPLAYALILTREQGYPSVFYGDYYGIPTHGVAAMKGKIDPILEARQKYAYGTQHDYLDHHNIIGWTREGNSAHPNSGLATIMSDGPGGSKWMYVGRHKAGQVWRDITGNRTGTVTINADGWGNFSVNGGSVSIWVNK

SEQ ID NO: 21809 - protein, 485 aa, Bacillus subtilis
HHNGTNGTMMQYFEWYLPNDGNHWNRLRSDASNLKDKGISAVWIPPAWKGASQNDVGYGAYDLYDLGEFNQKGTIRTKYGTRNQLQAAVNALKSNGIQVYGDVVMNHKGGADATEVVRAVEVNPNNRNQEVSGEYTIEAWTKFDFPGRGNTHSNFKWRWYHFDGVDWDQSRKLNNRIYKFRGDGKGWDWEVDTENGNYDYLMYADIDMDHPEVVNELRNWGVWYTNTLGLDGFRIDAVKHIKYSFTRDWINHVRSATGKNMFAVAEFWKNDLGAIENYLNKTNWNHSVFDVPLHYNLYNASKSGGNYDMRQIFNGTVVQRHPMHAVTFVDNHDSQPEEALESFVEEWFKPLAYALTLTREQGYPSVFYGDYYGIPTHGVPAMKSKIDPILEARQKYAYGRQNDYLDHHNIIGWTREGNTAHPNSGLATIMSDGAGGNKWMFVGRNKAGQVWTDITGNRAGTVTINADGWGNFSVNGGSVSIWVNK

SEQ ID NO: 21810 - protein, 483 aa, Bacillus sp.
HHNGTNGTMMQYFEWYLPNDGNHWNRLRSDASNLKDKGISAVWIPPAWKGASQNDVGYGAYDLYDLGEFNQKGTIRTKYGTRNQLQAAVNALKSNGIQVYGDVVMNHKGGADATEMVKAVEVNPNNRNQEVSGEYTIEAWTKFDEPGRGNTHSNFKWRWYHFDGVDWDQSRKLNNRIYKFRGKGWDWEVDTEFGNYDYLMYADIDMDHPEVVNELRNWGVWYTNTLGLDGFRIDAVKHIKYSFTRDWINHVRSATGKNMFAVAEFWKNDLGAIENYLNKTNWNHSVFDVPLHYNLYNASKSGGNYDMRQIFNGTVVQKHPMHAVTFVDNHDSQPEEALESFVEEWFKPLAYALTLTREQGYPSVFYGDYYGIPTHGVPAMKSKIDPILEARQKYAYGRQNDYLDHHNIIGWTREGNTAHPNSGLATIMSDGAGGNKWMFVGRNKAGQVWTDITGNKAGTVTINADGWGNFSVNGGSVSIWVNK

SEQ ID NO: 21811 - protein, 485 aa, Bacillus subtilis
HHNGTNGTMMQYFEWYLPNDGNHWNRLRSDASNLKDKGISAVWIPPAWKGASQNDVGYGAYDLYDLGEFNQKGTIRTKYGTRNQLQAAVNALKSNGIQVYGDVVMNHKGGADATEMVRAVEVNPNNRNQEVSGEYTIEAWTKFDFPGRGNTHSNFKWRWYHFDGVDWDQSRKLNNRIYKFRGDGKGWDWEVDTENGNYDYLMYADIDMDHPEVVNELRNWGVWYTNTLGLDGFRIDAVKHIKYSFTRDWINHVRSATGKNMFAVAEFWKNDLGAIENYLNKTNWNHSVFDVPLHYNLYNASKSGGNYDMRQIFNGTVVQRHPMHAVTFVDNHDSQPEEALESFVEEWFKPLAYALTLTREQGYPSVFYGDYYGIPTHGVPAMKEKIDPILEARQKYAYGRQNDYLDHHNIIGWTREGNTAHPNSGLATIMSDGAGGNKWMFVGRNKAGQVWTDITGNRAGTVTINADGWGNFSVNGGSVSIWVNK

SEQ ID NO: 21812 - protein, 483 aa, Bacillus sp.
HHNGTNGTLMQYFEWYLPNDGNHWNRLRSDASNLKDKGISAVWIPPAWKGASQNDVGYGAYDLYDLGEFNQKGTIRTKYGTRNQLQAAVNALKSNGIQVYGDVVMNHKGGADATEMVKAVEVNPNNRNQEVSGEYTIEAWTKFDFPGRGNTHSNFKWRWYHFDGVDWDQSRKLNNRIYKFRGKGWDWEVDTENGNYDYLMYADIDMDHPEVVNELRNWGVWYTNTLGLDGFRIDAVKHIKYSFTRDWINHVRSATGKNMFAVAEFWKNDLGAIENYLNKTNWNHSVFDVPLHYNLYNASKSGGNYDMRQIFNGTVVQKHPTHAVTFVDNHDSQPEEALESFVEEWFKPLAYALTLTREQGYPSVFYGDYYGIPTHGVPAMKSKIDPILEARQKYAYGRQNDYLDHHNIIGWTREGNTAHPNSGLATIMSDGAGGNKWMFVGRNKAGQVWTDITGNKAGTVTINADGWGNFSVNGGSVSIWVNK

SEQ ID NO: 21813 - protein, 485 aa, Bacillus sp.
HHNGTNGTMMQYFEWYLPNDGNHWNRLNSDASNLKSKGITAVWIPPAWKGASQNDVGYGAYDLYDLGEFNQKGTVRTKYGTRSQLQAAVTSLKNNGIQVYGDVVMNHKGGADATEMVRAVEVNPNNRNQEVTGEYTIEAWTRFDFPGRGNTHSSFKWRWYHFDGVDWDQSRRFQNRIYKFRGHGKAWDWEVDTENGNYDYLMYADIDMDHPEVVNELRNWGVWYTNTLGLDGFRIDAVKHIKYSFTRDWINHVRSATGKNMFAVAEFWKNDLGAIENYLQKTNWNHSVFDVPLHYNLYNASKSGGNYDMRNIFNGTVVQRHPSHAVTFVDNHDSQPEEALESFVEEWFKPLAYALTLTREQGYPSVFYGDYYGIPTHGVPAMRSKIDPILEARQKYAYGKQNDYLDHHNIIGWTREGNTAHPNSGLATIMSDGAGGSKWMFVGRNKAGQVWSDITGNRTGTVTINADGWGNFSVNGGSVSIWVNK

SEQ ID NO: 21814 - protein, 485 aa, Bacillus subtilis
HHNGTNGTMMQYFEWYLPNDGNHWNRLRSDASNLKDHGISAVWIPPAWKGASQNDVGYGAYDLYDLGEFNQKGTIRTKYGTRNQLQAAVNALKSNGIQVYGDVVMNHKGGADATEMVRAVEVNPNNRNQEVSGEYTIEAWTKFDFPGRGNTHSNFKWRWYHFDGVDWDQSRKLNNRIYKFRGDGKGWDWEVDTENGNYDYLMYADIDMDHPEVVNELRNWGVWYTNTLGLDGFRIDAVKHIKYSFTRDWINHVRSATGKNMFAVAEFWKNDLGAIENYLNKTNWNHSVFDVPLHYNLYNASKSGGNYDMRQIFNGTVVQRHPMHAVTFVDNHDSQPEEALESFVEEWFKPLAYALTLTREQGYPSVFYGDYYGIPTHGVPAMKSKIDPILEARQKYAYGRQNDYLDHHNIIGWTREGNTAHPNSGLATIMSDGAGGNKWMFVGRNKAGQVWTDITGNRAGTVTINADGWGNFSVNGGSVSIWVNK

SEQ ID NO: 21815 - protein, 485 aa, Bacillus subtilis
HHNGTNGTMMQYFEWYLPNDGNHWNRLRSDASNLKDKGISAVWIPPAWKGASQNDVGYGAYDLYDLGEFNQKGTIRTKYGTRNQLQAAVNALKSNGIQVYGDVVMNHKGGADATEFVRAVEVNPNNRNQEVSGEYTIEAWTKFDFPGRGNTHSNFKWRWYHFDGVDWDQSRKLNNRIYKFRGDGKGWDWEVDTENGNYDYLMYADIDMDHPEVVNELRNWGVWYTNTLGLDGFRIDAVKHIKYSFTRDWINHVRSATGKNMFAVAEFWKNDLGAIENYLNKTNWNHSVFDVPLHYNLYNASKSGGNYDMRQIFNGTVVQRHPMHAVTFVDNHDSQPEEALESFVEEWFKPLAYALTLTREQGYPSVFYGDYYGIPTHGVPAMKSKIDPILEARQKYAYGRQNDYLDHHNIIGWTREGNTAHPNSGLATIMSDGAGGNKWMFVGRNKAGQVWTDITGNRAGTVTINADGWGNFSVNGGSVSIWVNK

SEQ ID NO: 21816 - protein, 484 aa, Bacillus sp.
HHNGTNGTMMQYFEWHLPNDGQHWNRLRNDAANLKNLGINAVWIPPAWKGTSQNDVGYGAYDLYDLGEFNQKGTIRTKYGTRSQLQSAIARLQNNGIQVYGDVVMNHKGGADGTEWVQAVEVNPSNRNQEVTGEYTIEAWTKFDFPGRGNTHSSFKWRWYHFDGTDWDQSRQLNNRIYKFTGKAWDWEVPTENGNYDYLMYADVDMDHPEVINELRRWGVWYTNTLNLDGFRIDAVKHIKYSFTRDWLNHVRSTTGKNNMFAYAEFWKNDLGAIENYLHKTNWNHSVFDVPLHYNLYNASKSGGNYDMRQILNGTVVSKHPIHAVTFVDNHDSQPAEALESFVEAWFKPLAYALILTREQGYPSVFYGDYYGIPTHGVAAMKGKIDPILEARQKYAYGTQHDYLDHHNIIGWTREGNSAHPNSGLATIMSDGPGGSKWMYVGRHKAGQVWRDITGNRTGTVTINADGWGNFSVNGGSVSIWVNK

SEQ ID NO: 21817 - protein, 484 aa, Bacillus sp.
HHNGTNGTMMQYFEWHLPNDGQHWNRLRNDAANLKNLGITAVWIPPAWKGTSQNDVGYGAYDLYDLGEFNQKGTIRTKYGTRSQLQSAIASLQNNGIQVYGDVVMNHKGGADGTEWVQAVEVNPSNRNQEVTGEYTIEAWTKFDFPGRGNTHSSFKWRWYHFDGTDWDQSRRLNNRIYKFTGKAWDWEVPTENGNYDYLMYADVDMDHPEVINELRRWGVWYTNTLNLDGFRIDAVKHIKYSFTRDWLNHVRSTTGKNNMFAVAEFWKNDLGAIENYLHKTNWNHSVDDVPLHYNLYNASKSGGNYDMRQILNGTVVSKHPIHAVTFVDNHDSQPAEALESFVEAWFKPLAYALILTREQGYPSVFYGDYYGIPTHGVAAMKGKIDPILEARQKYAYGTQHDYLDHHNIIGWTREGNSAHPNSGLATIMSDGPGGSKWMYVGRHKAGQVWRDITGNRTGTVTINADGWGNFSVNGGSVSIWVNK

SEQ ID NO: 21818 - protein, 483 aa, Bacillus sp.
HHNGTNGTMMQYFEWYLPNDGNHWNRLRSDASNLKDKGISAVWIPPAWKGASQNDVGYGAYDLYDLGEFNQKGTIRTKYGTRNQLQAAVNALKSNGIQVYGDVVMNHKGGADATEMVKAVEVNPNNRNQEVSGEYTIEAWTKFDFPGRGNTHSNFKWRWYHFDGVDWDQSRKLNNRIYKFRGKGWDWEVDTEFGNYDYLMYADIDMDHPEVVNELRNWGVWYTNTLGLDGFRIDAVKHIKYSFTRDWINHVRSATGKNMFAVAEFWKNDLGAIENYLNKTNWNHSVFDVPLHYNLYNASKSGGNYDMRQIFNGTVVQRHPMHAVTFVDNHDSQPEEALESFVEEWFKPLAYALTLTREQGYPSVFYGDYYGIPTHGVPAMKSKIDPILEARQKYAYGRQNDYLDHHNIIGWTREGNTAHPNSGLATIMSDGAGGNKWMFVGRNKAGQVWTDITGNKAGTVTINADGWGNFSVNGGSVSIWVNK

SEQ ID NO: 21819 - protein, 485 aa, Bacillus subtilis
HHNGTNGTMMQYFEWYLPNDGNHWNRLRSDASNLKDKGISAVWIPPAWKGASQNDVGYGAYDLYDLGEFNQKGTIRTKYGTRNQLQAAVNALKSNGIQVYGDVVMNHKGGADATEMVRAVEVNPNNRNQEVSGEYTIEAWTKFDFPGRGNTHSNFKWRWYHFDGVDWDQSRKLNNRIYKFRGDGKGWDWEVDTENGNYDYLMYADIDMDHPEVVNELRNWGVWYTNTLGLDGFRIDAVKHIKYSFTRDWINHVRSATGKDMFAVAEFWKNDLGAIENYLNKTNWNHSVFDVPLHYNLYNASKSGGNYDMRQIFNGTVVQRHPMHAVTFVDNHDSQPEEALESFVEEWFKPLAYALTLTREQGYPSVFYGDYYGIPTHGVPAMKSKIDPILEARQKYAYGRQNDYLDHHNIIGWTREGNTAHPNSGLATIMSDGAGGNKWMFVGRNKAGQVWTDITGNRAGTVTINADGWGNFSVNGGSVSIWVNK

SEQ ID NO: 21820 - protein, 485 aa, Bacillus subtilis
HHNGTNGTMMQYFEWYLPNDGNHWNRLRSDASNLKDKGISAVWIPPAWKGTSQSDVGYGAYDLYDLGEFNQKGTIRTKYGTRNQLQAAVNALKSNGIQVYGDVVMNHKGGADATEMVRAVEVNPNNRNQEVSGEYTIEAWTKFDFPGRGNTHSNFKWRWYHFDGVDWDQSRKLNNRIYKFRGDGKGWDWEVDTENGNYDYLMYADIDMDHPEVVNELRNWGVWYTNTLGLDGFRIDAVKHIKYSFTRDWINHVRSATGKNMFAVAEFWKNDLGAIENYLNKTNWNHSVFDVPLHYNLYNASKSGGNYDMRQIFNGTVVQRHPMHAVTFVDNHDSQPEEALESFVEEWFKPLAYALTLTREQGYPSVFYGDYYGIPTHGVPAMKSKIDPILEARQKYAYGRQNDYLDHHNIIGWTREGNTAHPNSGLATIMSDGAGGNKWMFVGRNKAGQVWTDITGNRAGTVTINADGWGNFSVNGGSVSIWVNK

SEQ ID NO: 21821 - protein, 486 aa, Bacillus sp.
HHNGTNGTMMQYFEWHLPNDGQHWNRLRNDAANLKNLGINAVWIPPAWKGTSQNDVGYGAYDLYDLGEFNQKGTIRTKYGTRSQLQSAIARLQNNGIQVEGDVVMNHKGGADGTERVQAVEVNPSNRNQEVTGEYTIEAWTKFDFPGRGNTHSSFKWRWYHFDGTDWDQSRNLNNRIYKFRGTGKAWDWEVDTENGNYDYLMYADVDMDHPEVINELRRWGVWYTNTLNLDGFRIDAVKHIKYQFTRDWLNHVRSTTGKNNMFAVAEFWKNDLGAIENYLSKTNWNHSVFDVPLHYNLYNASKSGGNYDMRQILNGTVVSKHPIHAVTFVDNHDSQPAEALESFVEAWFKPLAYALILTREQGYPSVFYGDYYGIPTHGVAAMKGKIDPILEARQKYAYGTQHDYLDHHNIIGWTREGNSAHPNSGLATIMSDGPGGSKWMYVGRHKAGQVWRDITGNRTGTVTINADGWGNFSVNGGSVSIWVNK

SEQ ID NO: 21822 - protein, 485 aa, Bacillus sp.
HHNGTNGTMMQYFEWYLPNDGNHWNRLRSDASNLKDKGISAVWIPPAWKGASQNDVGYGAYDLYDLGEFNQKGTIRTKYGTRNQLQAAVNALKSNGIQVYGDVVMNHKGGADATEMVRAVEVNPNNRNQEVSGEYTIEAWTKFDFPGRGNTHSNFKWRWYHFDGVDWDQSRKLNNRIYKFRGDGKGWDWEVDTENGNYDYLTYADIDMDHPEVVNELRNWGVWYTNTLGLDGFRIDAVKHIKYSFTRDWINHVRSATGKNMFAVAEFWKNDLGAIENYLNKTNWNHSVFDVPLHYNLYNASKSGGNYDMRQIFNGTVVQRHPMHAVTFVDNHDSQPEESLESFVEEWFKPLAYALTLTREQGYPSVFYGDYYGIPTHGVPAMKSKIDPILEARQKYAYGRQNDYLDHHNIIGWTREGNTAHPNSGLATIMSDGAGGNKWMFVGRNKAGQVWTDITGNRAGTVTINADGWGNFSVNGGSVSIWVNK

SEQ ID NO: 21823 - protein, 484 aa, Bacillus sp.
HHNGTNGTMMQYFEWHLPNDGQHWNRLRNDAANLKNLGITAVWIPPAWKGTSQNDVGYGAYDLYDLGEFNQKGTIRTKYGTRSQLQSAIARLQNNGIQVYGDVVMNHKGGADGTEWVQAVEVNPSNRNQEVTGEYTIEAWTKFDFPGRGNTHSSFKWRWYHFDGTDWDQSRRLNNRIYKFTGKAWDWEVPTENGNYDYLMYADVDMDHPEVINELRRWGVWYTNTLNLDGFRIDAVKHIKYSFTRDWLNHVRSTTGKNNMFAVAEFWKNDLGAIENYLHKTNWNHSVFDVPLHYNLYNASKSGGNYDMRQILNGTVVSKHPIHNVTFVDNHDSQPAEALESFVEAWFKPLAYALILTREQGYPSVFYGDYYGIPTHGVAAMKGKIDPILEARQKYAYGTQHDYLDHHNIIGWTREGNSAHPNSGLATIMSDGPGGSKWMYVGRHKAGQVWRDITGNRTGTVTINADGWGNFSVNGGSVSIWVNK

SEQ ID NO: 21824 - protein, 485 aa, Bacillus subtilis
HHNGTNGTMMQYFEWYLPNDGNHWNRLRSDASNLKDKGISAVWIPPAWKGASQNDVGYGAYDLYDLGEFNQKGTIRTKYGTRNQLQAAVNALKSNGIQVYGDVVMNHKGGADATEMVRAVEVNPNNRNQEVSGEYTIEAWTKFDFPGRGNTHSNFKWRWYHFDGVDWDQSRKLNNRIYKFRGDGKGWDWEVDTENGNYDYLMYADIDMDHPEVVNELRNWGVWYTNTLGLDGFRIDAVKHIKYSFTRDWINHVRKATGKNMFAVAEFWKNDLGAIENYLNKTNWNHSVFDVPLHYNLYNASKSGGNYDMRQIFNGTVVQRHPMHAVTFVDNHDSQPEEALESFVEEWFKPLAYALTLTREQGYPSVFYGDYYGIPTHGVPAMKSKIDPILEARQKYAYGRQNDYLDHHNIIGWTREGNTAHPNSGLATIMSDGAGGNKWMFVGRNKAGQVWTDITGNRAGTVTINADGWGNFSVNGGSVSIWVNK

SEQ ID NO: 21825 - protein, 485 aa, Bacillus subtilis
HHNGTNGTMMQYFEWYLPNDGNHWNRLRSDASNLKDKGISAVWIPPAWKGTSQNDVGYGAYDLYDLGEFNQKGTIRTKYGTRNQLQAAVNALKSNGIQVYGDVVMNHRGGADATEMVRAVEVNPNNRNQEVSGEYTIEAWTKFDFPGRGNTHSNFKWRWYHFDGVDWDQSRKLNNRIYKFRGDGKGWDWEVDTENGNYDYLMYADIDMDHPEVVNELRNWGVWYTNTLGLDGFRIDAVKHIKYSFTRDWINHVRSATGKNMFAVAEFWKNDLGAIENYLNKTNWNHSVFDVPLHYNLYNASKSGGNYDMRQIFNGTVVQRHPMHAVTFVDNHDSQPEEALESFVEEWFKPLAYALTLTREQGYPSVFYGDYYGIPTHGVPAMKSKIDPILEARQKYAYGRQNDYLDHHNIIGWTREGNTAHPNSGLATIMSDGAGGNKWMFVGRNKAGQVWTDITGNRAGTVTINADGWGNFSVNGGSVSIWVNK

SEQ ID NO: 21826 - protein, 485 aa, Bacillus subtilis
HHNGTNGTMMQYFEWYLPNDGNHWNRLRSDASNLKDKGISAVWIPPAWKGASQNDVGYGAYDLYDLGEFNQKGTIRTKYGTRNQLQAAVNALKSNGIQVYGDVVMNHKGGADATEMVRAVEVNPNNRNQEVSGEYTIEAWTKFDFPGRGNTHSNFKWRWYHFDGVDWDQSRKLNNRIYKFRGDGKGWDWEVDTENGNYDYLMYADIDMDHPEVVNELRNWGVWYTNTLGLDGFRIDAVKHIKYSFTRDWINHVRSATGKNMFAVAEFWKNDLGAIENYLNKTNWNHSVFDVPLHYNLYNASKSGGNYDMRTIFNGTVVQRHPMHAVTFVDNHDSQPEEALESFVEEWFKPLAYALTLTREQGYPSVFYGDYYGIPTHGVPAMKSKIDPILEARQKYAYGRQNDYLDHHNIIGWTREGNTAHPNSGLATIMSDGAGGNKWMFVGRNKAGQVWTDITGNRAGTVTINADGWGNFSVNGGSVSIWVNK

SEQ ID NO: 21827 - protein, 485 aa, Bacillus subtilis
HHNGTNGTMMQYFEWYLPNDGNHWNRLRSDASNLKDKGISAVWIPPAWKGASQNDVGYGAYDLYDLGEFNQKGTIRTKYGTRNQLQAAVNALKSNGIQVYGDVVMNHKGGADATEIVRAVEVNPNNRNQEVSGEYTIEAWTKFDFPGRGNTHSNFKWRWYHFDGVDWDQSRKLNNRIYKFRGDGKGWDWEVDTENGNYDYLMYADIDMDHPEVVNELRNWGVWYTNTLGLDGFRIDAVKHIKYSFTRDWINHVRSATGKNMFAVAEFWKNDLGAIENYLNKTNWNHSVFDVPLHYNLYNASKSGGNYDMRQIFNGTVVQRHPMHAVTFVDNHDSQPEEALESFVEEWFKPLAYALTLTREQGYPSVFYGDYYGIPTHGVPAMKSKIDPILEARQKYAYGRQNDYLDHHNIIGWTREGNTAHPNSGLATIMSDGAGGNKWMFVGRNKAGQVWTDITGNRAGTVTINADGWGNFSVNGGSVSIWVNK

SEQ ID NO: 21828 - protein, 485 aa, Bacillus sp.
HHNGTNGTMMQYFEWHLPNDGNHWNRLRDDAANLKSKGITAVWIPPAWKGTSQNDVGYGAYDLYDLGEFNQKGTVRTKYGTRSQLQGAVTSLKNNGIQVYGDVVMNHKGGADGTEMVNAVEVNRSNRNQEISGEYTIEAWTKFDFPGRGNTHSNFKWRWYHFDGTDWDQSRQLQNKIYKFRGTGKAWDWEVDIENGNYDYLMYADIDMDHPEVINELRNWGVWYTNTLNLDGFRIDAVKHIKYSYTRDWLTHVRNTTGKPMFAVAEFWKNDLAAIENYLNKTSWNHSVFDVPLHYNLYNASNSGGYRDMRNILNGSVVQKHPIHAVTFVDNHDSQPGEALESFVQSWFKPLAYALILTREQGYPSVFYGDYYGIPTHGVPSMKSKIDPLLQARQTYAYGTQHDYFDHHDIIGWTREGDSSHPNSGLATIMSDGPGGNKWMYVGKHKAGQVWRDITGNRSGTVTINADGWGNFTVNGGAVSVWVKQ

SEQ ID NO: 21829 - protein, 484 aa, Bacillus
HHNGTNGTMMQYFEWYLPNDGNHWNRLRSDASNLKDKGISAVWIPPAWKGASQNDVGYGAYDLYDLGEFNQKGTIRTKYGTRNQLQAAVNALKSNGIQVYGDVVMNHKGGADATEMVRAVEVNPNNRNQEVSGEYTIEAWTKFDFPGRGNTHSNFKWRWYHFDGVDWDQSRKLNNRIYKFRGDKGWDWEVDTENGNYDYLMYADIDMDHPEVVNELRNWGVWYTNTLGLDGFRIDAVKHIKYSFTRDWINHVRSATGKNMFAVAEFWKNDLGAIENYLNKTNWNHSVFDVPLHYNLYNASKSGGNYDMRQIFNGTVVQRHPMHAVTFVDNHDSQPEEALESFVEEWFKPLAYALTLTREQGYPSVFYGDYYGIPTHGVPAMKSKIDPILEARQKYAYGRQNDYLDHHNIIGWTREGNTAHPNSGLATIMSDGAGGNKWMFVGRNKAGQVWTDITGNRAGTVTINADGWGNFSVNGGSVSIWVNK

SEQ ID NO: 21830 - protein, 483 aa, Bacillus sp.
HHNGTNGTMMQYFEWYLPNDGNHWNRLRSDASNLKDKGISAVWIPPAWKGASQNDVGYGAYDLYDLGEFNQKGTIRTKYGTRNQLQAAVNALKSNGIQVYGDVVMNHKGGADATEMVRAVEVNPNNRNQEVSGEYTIEAWTKFDFPGRGNTHSNFKWRWYHFDGVDWDQSRKLNNRIYKFRGKGWDWEVDTENGNYDYLMYADIDMDHPEVVNELRNWGVWYTNTLGLDGFRIDAVKHIKYSFTRDWINHVRSATGKNMFAVAEFWKNDLGAIENYLNKTNWNHSVFDVPLHYNLYNASKSGGNYDMRQIFNGTVVQRHPMHAVTFVDNHDSQPEEALESFVEEWFKPLAYALTLTREQGYPSVFYGDYYGIPTHGVPAMKSKIDPILEARQKYAYGRQNDYLDHHNIIGWTREGNTAHPNSGLATIMSDGAGGNKWMFVGRNKAGQVWTDITGNRAGTVTINADGWGNFSVNGGSVSIWVNK

SEQ ID NO: 21831 - protein, 485 aa, Bacillus subtilis
HHNGTNGTMMQYFEWYLPNDGNHWNRLRSDASNLKDKGISAVWIPPAWKGASQNDVGYGAYDLYDLGEFNQKGTIRTKYGTRNQLQAAVNALKSNGIQVYGDVVMNHKGGADATEAVRAVEVNPNNRNQEVSGEYTIEAWTKFDFPGRGNTHSNFKWRWYHFDGVDWDQSRKLNNRIYKFRGDGKGWDWEVDTENGNYDYLMYADIDMDHPEVVNELRNWGVWYTNTLGLDGFRIDAVKHIKYSFTRDWINHVRSATGKNMFAVAEFWKNDLGAIENYLNKTNWNHSVFDVPLHYNLYNASKSGGNYDMRQIFNGTVVQRHPMHAVTFVDNHDSQPEEALESFVEEWFKPLAYALTLTREQGYPSVFYGDYYGIPTHGVPAMKSKIDPILEARQKYAYGRQNDYLDHHNIIGWTREGNTAHPNSGLATIMSDGAGGNKWMFVGRNKAGQVWTDITGNRAGTVTINADGWGNFSVNGGSVSIWVNK

SEQ ID NO: 21832 - protein, 486 aa, Bacillus sp.
HHNGTNGTMMQYFEWHLPNDGQHWNRLRNDAANLKNLGITAVWIPPAWKGTSQNDVGYGAYDLYDLGEFNQKGTIRTKYGTRSQLQSAIASLQNNGIQVYGDVVMNHKGGADGTEWVQAVEVNPSNRNQEVTGEYTIEAWTKFDFPGRGNTHSSFKWRWYHFDGTDWDQSRRLNNRIYKFRGTGKAWDWEVDTENGNYDYLMYADVDMDHPEVINELRRWGVWYTNTLNLDGFRIDAVKHIKYEFTRDWLNHVRSTTGKNNMFAVAEFWKNDLGAIENYLHKTNWNHDVFDVPLHYNLYNASKSGGNYDMRQILNGTVVSKHPIHAVTFVDNHDSQPAEALESFVEAWFKPLAYALILTREQGYPSVFYGDYYGIPTHGVAAMKGKIDPILEARQKYAYGTQHDYLDHHNIIGWTREGNSAHPNSGLATIMSDGPGGSKWMYVGRHKAGQVWRDITGNRTGTVTINADGWGNFRVNGGSVSIWVNK

SEQ ID NO: 21833 - protein, 485 aa, Bacillus subtilis
HHNGTNGTMMQYFEWYLPNDGNHWNRLRSDASNLKDKGISAVWIPPAWKGASQNDVGYGAYDLYDLGEFNQKGTIRTKYGTRNQLQAAVNALKSNGIQVYGDVVMNHKGGADATEMVRAVEVNPNNRNQEVSGEYTIEAWTKFDFPGRGNTHSNFKWRWYHFDGVDWDQSRKLNNRIYKFRGDGKGWDWEVDTENGNYDYLMYADLDMDHPEVVNELRNWGVWYTNTLGLDGFRIDAVKHIKYSFTRDWINHVRSATGKNMFAVAEFWKNDLGAIENYLNKTNWNHSVFDVPLHYNLYNASKSGGNYDMRQIFNGTVVQRHPMHAVTFVDNHDSQPEEALESFVEEWFKPLAYALTLTREQGYPSVFYGDYYGIPTHGVPAMKSKIDPILEARQKYAYGRQNDYLDHHNIIGWTREGNTAHPNSGLATIMSDGAGGNKWMFVGRNKAGQVWTDITGNRAGTVTINADGWGNFSVNGGSVSIWVNK

SEQ ID NO: 21834 - protein, 483 aa, Synthetic construct
HHNQTNGTMMQYFEWYLPNDGNHWNRLRSDASNLKDKGITAVWIPPAWKGASQNDVGYGAYDLYDLGEFNQKGTVRTKYGTRNQLQAAVTALKSNGIQVYGDVVMNHKGGADATEWVRAVEVNPSNRNQEVSGDTTIEAWTKFDFPGRGNTHSNFKWRWYHFDGVDWDQSRQLQNKIYKFRGDGKEWDWEVDEENGNYDYLMYADYDMDHPEVVNELRNWGVWYTNTLGLDGFRIDAVKHIKYSFTRDWLEHVRNTTGKNMFAVAEFWKNDIGAIENYLSKTNWNHSVFDVPLHYNLYNASRSGGNYDMRQIFNGTVVQRHPTHAVTFVDNHDSQPEEALESFVEEWFKPLAYALTLTRDQGEPSVFYGDYYGIPTHGVPAMKSKIDPILEARQKYAYGKQNDYMDHHNMIGWTREGNTAHPNSGLATIMSDGPGGNKWMYVGRNKAGQVWRDITGNRSGTVTINADGWGNFSVNGGSVSIWV

SEQ ID NO: 21835 - protein, 483 aa, Synthetic construct
HHNQTNGTMMQYFEWYLPNDGNHWNRLRSDASNLKDKGITAVWIPPAWKGASQNDVGYGAYDLYDLGEFNQKGTVRTKYGTRNQLQAAVTALKSNGIQVYGDVVMNHKGGADATEWVRAVEVNPSNRNQEVSGDYTIEAWTKFDFPGRGNTHSNFKWRWYHFDGVDWDQSRQLQNKIYKFQGDGKEWDWEVDEENGNYDYLMYADYDMDHPEVVNELRNWGVWYTNTLGLDGFRIDAVKHIKYSFTRDWLEHVRNTTGKNMFAVAEFWKNDIGAIENYLSKTNWNHSVFDVPLHYNLYNASRSGGNYDMRQIFNGTVVQRHPTHAVTFVDNHDSQPEEALESFVEEWFKPLAYALTLTRDQGEPSVFYGDYYGIPTHGVPAMKSKIDPILEARQKYAYGKQNDYMDHHNMIGWTREGNTAHPNSGLATIMSDGPGGNKWMYVGRNKAGQVWRDITGNRSGTVTINADGWGNFSVNGGSVSIWV

SEQ ID NO: 21836 - protein, 483 aa, Synthetic construct
HHNGTNGTMMQYFEWYLPNDGNHWHRLRSDASNLKDKGITAVWIPPAWKGASQNDVGYGAYDLYDLGEFNQKGTVRTKYGTRNQLQAAVTALKSNGIQVYGDVVMNHKGGADATEWVRAVEVNPSNRNQEVSGDYTIEAWTKFDFPGRGNTHSNFKWRWWHFDGVDWDQSRQLQNKIYKFRGDGKEWDWEVDTENGNYDYLMYADIDMDHPEVVNELRNWGVWYTNTLGLDGFRIDAVKHIKYSFTRDWLEHVRNTTGKNMFAVAEFWKNDIGAIRNYLSKTNWNHSVFDVPLHYNLYNASRSGGNYDMRQIFNGTVVQRHPTHAVTFVDNHDSQPEEALESFVEEWFKPLAYALTLTRDQGYPSVFYGDYYGIPTHGVPAMKSKIDPILEARQKYAYGKQNDYLDHHNMIGWTREGNTAHPNSGLATIMSDGPGGNKWMYVGRNKAGQVWRDITGNRSGTVTINADGWGNFSVNGGSVSIWV

SEQ ID NO: 21837 - protein, 483 aa, Synthetic construct
HHNGTNGTMMQYFEWYLPNDGNHWHRLRSDASNLKDKGITAVWIPPAWKGASQNDVGYGAYDLYDLGEFNQKGTVRTKYGTRNQLQAAVTALKSNGIQVWGDVVMNHKGGADATEWVRAVEVNPSNRNQEVSGDYTIEAWTKFDFPGRGNTHSNFKWRWYHFDGVDWDQSRQLQNKIYKFQGDGKEWDWEVDEENGNYDYLMYADYDMDHPEVVNELRNWGVWYTNTLGLDGFRIDAVKHIKYSFTRDWLTHVRNTTGKNMFAVAEFWKNDIGAIENYLSKTNWNHSVFDVPLHYNLYNASRSGGNYDMRQIFNGTVVQRHPTHAVTFVDNHDSQPEEALESFVEEWFKPLAYALTLTRDQGEPSVFYGDYYGIPTHGVPAMKSKIDPILEARQKYAYGKQNDYLDHHNMIGWTREGNTAHPNSGLATIMSDGPGGNKWMYVGRNKAGQVWRDITGNRSGTVTINADGWGNFSVNGGSVSIWV

SEQ ID NO: 21838 - protein, 483 aa, Synthetic construct
HHNQTNGTMMQYFEWYLPNDGNHWHRLRSDASNLKDKGITAVWIPPAWKGASQNDVGYGAYDLYDLGEFNQKGTVRTKYGTRNQLQAAVTALKSNGIQVYGDVVMNHKGGADATEWVRAVEVNPSNRNQEVSGDYTIEAWTKFDFPGRGNTHSNFKWRWWHFDGVDWDQSRQLQNKIYKFRGDGKGWDWEVDTENGNYDYLMYADYDMDHPEVVNELRNWGVWYTNTLGLDGFRIDAVKHIKYSFTRDWLEHVRNTTGKNMFAVAEFWKNDIGAIENYLSKTNWNHSVFDVPLHYNLYNASRSGGNYDMRQIFNGTVVQRHPTHAVTFVDNHDSQPEEALESFVEEWFKPLAYALTLTRDQGYPSVFYGDYYGIPTHGVPAMKSKIDPILEARQKYAYGKQNDYLDHHNMIGWTREGNTAHPNSGLATIMSDGPGGNKWMYVGRNKAGQVWRDITGNRSGTVTINADGWGNFSVNGGSVSIWV

SEQ ID NO: 21839 - protein, 483 aa, Synthetic construct
HHNGTNGTMMQYFEWYLPNDGNHWHRLRSDASNLKDKGITAVWIPPAWKGASQNDVGYGAYDLYDLGEFNQKGTVRTKYGTRNQLQAAVTALKSNGIQVYGDVVMNHKGGADATEWVRAVEVNPSNRNQEVSGDYTIEAWTKFDFPGRGNTHSNFKWRWWHFDGVDWDQSRQLQNKIYKFRGDGKEWDWEVDTENGNYDYLMYADYDMDHPEVVNELRNWGVWYTNTLGLDGFRIDAVKHIKYSFTRDWLEHVRNTTGKNMFAVAEFWKNDIGAIRNYLSKTNWNHSVFDVPLHYNLYNASRSGGNYDMRQIFNGTVVQRHPGHAVTFVDNHDSQPEEALESFVEEWFKPLAYALTLTRDQGYPSVFYGDYYGIPTHGVPAMKSKIDPILEARQKYAYGKQNDYLDHHNMIGWTREGNTAHPNSGLATIMSDGPGGNKWMYVGRNKAGQVWRDITGNRSGTVTINADGWGNFSVNGGSVSIWV

SEQ ID NO: 21840 - protein, 483 aa, Synthetic construct
HHNQTNGTMMQYFEWYLPNDGNHWNRLRSDASNLKDKGITAVWIPPAWKGASQNDVGYGAYDLYDLGEFNQKGTVRTKYGTRNQLQAAVTALKSNGIQVYGDVVMNHKGGADATEWVRAVEVNPSNRNQEVSGDYTIEAWTKFDFPGRGNTHSNFKWRWWHFDGVDWDQSRQLQNKIYKFRGDGKEWDWEVDTENGNYDYLMYADIDMDHPEVVNELRNWGVWYTNTLGLDGFRIDAVKHIKYSFTRDWLEHVRNTTGKNMFAVAEFWKNDIGAIRNYLSKTNWNHSVFDVPLHYNLYNASRSGGNYDMRQIFNGTVVQRHPTHAVTFVDNHDSQPEEALESFVEEWFKPLAYALTLTRDQGYPSVFYGDYYGIPTHGVPAMKSKIDPILEARQKYAYGKQNDYMDHHNMIGWTREGNTAHPNSGLATIMSDGPGGNKWMYVGRNKAGQVWRDITGNRSGTVTINADGWGNFSVNGGSVSIWV

SEQ ID NO: 21841 - protein, 483 aa, Synthetic construct
HHNQTNGTMMQYFEWYLPNDGNHWHRLRSDASNLKDKGITAVWIPPAWKGASQNDVGYGAYDLYDLGEFNQKGTVRTKYGTRNQLQAAVTALKSNGIQVYGDVVMNHKGGADATEWVRAVEVNPSNRNQEVSGDYTIEAWTKFDFPGRGNTHSNFKWRWWHFDGVDWDQSRQLQNKIYKFRGDGKEWDWEVDTENGNYDYLMYADYDMDHPEVVNELRNWGVWYTNTLGLDGFRIDAVKHIKYSFTRDWLEHVRNTTGKNMFAVAEFWKNDIGAIENYLSKTNWNHSVFDVPLHYNLYNASRSGGNYDMRQIFNGTVVQRHPTHAVTFVDNHDSQPEEALESFVEEWFKPLAYALTLTRDQGYPSVFYGDYYGIPTHGVPAMKSKIDPILEARQKYAYGKQNDYMDHHNMIGWTREGNTAHPNSGLATIMSDGPGGNKWMYVGRNKAGQVWRDITGNRSGTVTINADGWGNFSVNGGSVSIWV

SEQ ID NO: 21842 - protein, 483 aa, Synthetic construct
HHNQTNGTMMQYFEWYLPNDGNHWNRLRSDASNLKDKGITAVWIPPAWKGASQNDVGYGAYDLYDLGEFNQKGTVRTKYGTRNQLQAAVTALKSNGIQVYGDVVMNHKGGADATEWVRAVEVNPSNRNQEVSGDTTIEAWTKFDFPGRGNTHSNFKWRWYHFDGVDWDQSRQLQNKIYKFRGDGKEWDWEVDEENGNYDYLMYADYDMDHPEVVNELRNWGVWYTNTLGLDGFRIDAVKHIKYSFTRDWLEHVRNTTQKNMFAVAEFWKNDIGAIENYLSKTNWNHSVFDVPLHYNLYNASRSGGNYDMRQIFNGTVVQRHPTHAVTFVDNHDSQPEEALESFVEEWFKPLAYALTLTRDQGYPSVFYGDYYGIPTHGVPAMKSKIDPILEARQKYAYGKQNDYMDHHNMIGWTREGNTAHPNSGLATIMSDGPGGNKWMYVGRNKAGQVWRDITGNRSGTVTINADGWGNFSVNGGSVSIWV

SEQ ID NO: 21843 - protein, 483 aa, Synthetic construct
HHNQTNGTMMQYFEWYLPNDGNHWNRLRSDASNLKDKGITAVWIPPAWKGASQNDVGYGAYDLYDLGEFNQKGTVRTKYGTRNQLQAAVTALKSNGIQVWGDVVMNHKGGADATEWVRAVEVNPSNRNQEVSGDYTIEAWTKFDFPGRGNTHSNFKWRWYHFDGVDWDQSRQLQNKIYKFRGDGKEWDWEVDEENGNYDYLMYADYDMDHPEVVNELRNWGVWYTNTLGLDGFRIDAVKHIKYSFTRDWLEHVRNTTGKNMFAVAEFWKNDIGAIENYLSKTNWNHSVFDVPLHYNLYNASRSGGNYDMRQIFNGTVVQRHPTHAVTFVDNHDSQPEEALESFVEEWFKPLAYALTLTRDQGEPSVFYGDYYGIPTHGVPAMKSKIDPILEARQKYAYGKQNDYMDHHNMIGWTREGNTAHPNSGLATIMSDGPGGNKWMYVGRNKAGQVWRDITGNRSGTVTINADGWGNFSVNGGSVSIWV

SEQ ID NO: 21844 - protein, 483 aa, Synthetic construct
HHNQTNGTMMQYFEWYLPNDGNHWNRLRSDASNLKDKGITAVWIPPAWKGASQNDVGYGAYDLYDLGEFNQKGTVRTKYGTRNQLQAAVTALKSNGIQVYGDVVMNHKGGADATEWVRAVEVNPSNRNQEVSGDYTIEAWTKFDFPGRGNTHSNFKWRWYHFDGVDWDQSRQLQNKIYKFRGDGKEWDWEVDEENGNYDYLMYADYDMDHPEVVNELRNWGVWYTNTLGLDGFRIDAVKHIKYSFTRDWLEHVRNTTQKNMFAVAEFWKNDIGAIENYLSNTNWNHSVFDVPLHYNLYNASRSGGNYDMRQIFNGTVVQRHPTHAVTFVDNHDSQPEEALESFVEEWFKPLAYALTLTRDQGYPSVFYGDYYGIPTHGVPAMKSKIDPILEARQKYAYGKQNDYMDHHNMIGWTREGNTAHPNSGLATIMSDGPGGNKWMYVGRNKAGQVWRDITGNRSGTVTINADGWGNFSVNGGSVSIWV

SEQ ID NO: 21845 - protein, 483 aa, Synthetic construct
HHNGTNGTMMQYFEWYLPNDGNHWHRLRSDASNLKDKGITAVWIPPAWKGASQNDVGYGAYDLYDLGEFNQKGTVRTKYGTRNQLQAAVTALKSNGIQVWGDVVMNHKGGADATEWVRAVEVNPSNRNQEVSGDYTIEAWTKFDFPGRGNTHSNFKWRWYHFDGVDWDQSRQLQNKIYKFRGDGKEWDWEVDEENGNYDYLMYADYDMDHPEVVNELRNWGVWYTNTLGLDGFRIDAVKHIKYSFTRDWLTHVRNTTQKNMFAVAEFWKNDIGAIENYLSKTNWNHSVFDVPLHYNLYNASRSGGNYDMRQIFNGTVVQRHPTHAVTFVDNHDSQPEEALESFVEEWFKPLAYALTLTRDQGEPSVFYGDYYGIPTHGVPAMKSKIDPILEARQKYAYGKQNDYLDHHNMIGWTREGNTAHPNSGLATIMSDGPGGNKWMYVGRNKAGQVWRDITGNRSGTVTINADGWGNFSVNGGSVSIWV

SEQ ID NO: 21846 - protein, 483 aa, Synthetic construct
HHNQTNGTMMQYFEWYLPNDGNHWNRLRSDASNLKDKGITAVWIPPAWKGASQNDVGYGAYDLYDLGEFNQKGTVRTKYGTRNQLQAAVTALKSNGIQVYGDVVMNHKGGADATEWVRAVEVNPSNRNQEVSGDTTIEAWTKFDFPGRGNTHSNFKWRWYHFDGVDWDQSRQLQNKIYKFRGDGKEWDWEVDEENGNYDYLMYADYDMDHPEVVNELRNWGVWYTNTLGLDGFRIDAVKHIKYSFTRDWLEHVRNTTGKNMFAVAEFWKNDIGAIENYLSKTNWNHSVFDVPLHYNLYNASRSGGNYDMRQIFNGTVVQRHPTHAVTFVDNHDSQPEEALESFVEEWFKPLAYALTLTRDQGHPSVFYGDYYGIPTHGVPAMKSKIDPILEARQKYAYGKQNDYMDHHNMIGWTREGNTAHPNSGLATIMSDGPGGNKWMYVGRNKAGQVWRDITGNRSGTVTINADGWGNFSVNGGSVSIWV

SEQ ID NO: 21847 - protein, 483 aa, Synthetic construct
HHNQTNGTMMQYFEWYLPNDGNHWNRLRSDASNLKDKGITAVWIPPAWKGASQNDVGYGAYDLYDLGEFNQKGTVRTKYGTRNQLQAAVTALKSNGIQVYGDVVMNHKGGADATEWVRAVEVNPSNRNQEVSGDYTIEAWTKFDFPGRGNTHSNFKWRWYHFDGVDWDQSRQLQNKIYKFQGDGKEWDWEVDEENGNYDYLMYADYDMDHPEVVNELRNWGVWYTNTLGLDGFRIDAVKHIKYSFTRDWLEHVRNTTGKNMFAVAEFWKNDIGAIENYLSNTNWNHSVFDVPLHYNLYNASRSGGNYDMRQIFNGTVVQRHPTHAVTFVDNHDSQPEEALESFVEEWFKPLAYALTLTRDQGYPSVFYGDYYGIPTHGVPAMKSKIDPILEARQKYAYGKQNDYMDHHNMIGWTREGNTAHPNSGLATIMSDGPGGNKWMYVGRNKAGQVWRDITGNRSGTVTINADGWGNFSVNGGSVSIWV

SEQ ID NO: 21848 - protein, 483 aa, Synthetic construct
HHNGTNGTMMQYFEWYLPNDGNHWHRLRSDASNLKDKGITAVWIPPAWKGASQNDVGYGAYDLYDLGEFNQKGTVRTKYGTRNQLQAAVTALKSNGIQVYGDVVMNHKGGADATEWVRAVEVNPSNRNQEVSGDTTIEAWTKFDFPGRGNTHSNFKWRWYHFDGVDWDQSRQLQNKIYKFRGDGKEWDWEVDTENGNYDYLMYADYDMDHPEVVNELRNWGVWYTNTLGLDGFRIDAVKHIKYSFTRDWLTHVRNTTGKNMFAVAEFWKNDIGAIENYLSNTNWNHSVFDVPLHYNLYNASRSGGNYDMRQIFNGTVVQRHPTHAVTFVDNHDSQPEEALESFVEEWFKPLAYALTLTRDQGEPSVFYGDYYGIPTHGVPAMKSKIDPILEARQKYAYGKQNDYLDHHNMIGWTREGNTAHPNSGLATIMSDGPGGNKWMYVGRNKAGQVWRDITGNRSGTVTINADGWGNFSVNGGSVSIWV

SEQ ID NO: 21849 - protein, 483 aa, Synthetic construct
HHNQTNGTMMQYFEWYLPNDGNHWNRLRSDASNLKDKGITAVWIPPAWKGASQNDVGYGAYDLYDLGEFNQKGTVRTKYGTRNQLQAAVTALKSNGIQVYGDVVMNHKGGADATEWVRAVEVNPSNRNQEVSGDYTIEAWTKFDFPGRGNTHSNFKWRWYHFDGVDWDQSRQLQNKIYKFRGDGKEWDWEVDEENGNYDYLMYADYDMDHPEVVNELRNWGVWYTNTLGLDGFRIDAVKHIKYSFTRDWLEHVRNTTGKNMFAVAEFWKNDIGAIENYLSNTNWNHSVFDVPLHYNLYNASRSGGNYDMRQIFNGTVVQRHPTHAVTFVDNHDSQPEEALESFVEEWFKPLAYALTLTRDQGHPSVFYGDYYGIPTHGVPAMKSKIDPILEARQKYAYGKQNDYMDHHNMIGWTREGNTAHPNSGLATIMSDGPGGNKWMYVGRNKAGQVWRDITGNRSGTVTINADGWGNFSVNGGSVSIWV

SEQ ID NO: 21850 - protein, 483 aa, Synthetic construct
HHNGTNGTMMQYFEWYLPNDGNHWHRLRSDASNLKDKGITAVWIPPAWKGASQNDVGYGAYDLYDLGEFNQKGTVRTKYGTRNQLQAAVTALKSNGIQVWGDVVMNHKGGADATEWVRAVEVNPSNRNQEVSGDYTIEAWTKFDFPGRGNTHSNFKWRWYHFDGVDWDQSRQLQNKIYKFRGDGKEWDWEVDTENGNYDYLMYADYDMDHPEVVNELRNWGVWYTNTLGLDGFRIDAVKHIKYSFTRDWLTHVRNTTQKNMFAVAEFWKNDIGAIENYLSKTNWNHSVFDVPLHYNLYNASRSGGNYDMRQIFNGTVVQRHPTHAVTFVDNHDSQPEEALESFVEEWFKPLAYALTLTRDQGEPSVFYGDYYGIPTHGVPAMKSKIDPILEARQKYAYGKQNDYLDHHNMIGWTREGNTAHPNSGLATIMSDGPGGNKWMYVGRNKAGQVWRDITGNRSGTVTINADGWGNFSVNGGSVSIWV

SEQ ID NO: 21851 - protein, 483 aa, Synthetic construct
HHNGTNGTMMQYFEWYLPNDGNHWHRLRSDASNLKDKGITAVWIPPAWKGASQNDVGYGAYDLYDLGEFNQKGTVRTKYGTRNQLQAAVTALKSNGIQVWGDVVMNHKGGADATEWVRAVEVNPSNRNQEVSGDTTIEAWTKFDFPGRGNTHSNFKWRWYHFDGVDWDQSRQLQNKIYKFQGDGKEWDWEVDTENGNYDYLMYADYDMDHPEVVNELRNWGVWYTNTLGLDGFRIDAVKHIKYSFTRDWLTHVRNTTGKNMFAVAEFWKNDIGAIENYLSKTNWNHSVFDVPLHYNLYNASRSGGNYDMRQIFNGTVVQRHPTHAVTFVDNHDSQPEEALESFVEEWFKPLAYALTLTRDQGYPSVFYGDYYGIPTHGVPAMKSKIDPILEARQKYAYGKQNDYLDHHNMIGWTREGNTAHPNSGLATIMSDGPGGNKWMYVGRNKAGQVWRDITGNRSGTVTINADGWGNFSVNGGSVSIWV

SEQ ID NO: 21852 - protein, 483 aa, Synthetic construct
HHNGTNGTMMQYFEWYLPNDGNHWHRLRSDASNLKDKGITAVWIPPAWKGASQNDVGYGAYDLYDLGEFNQKGTVRTKYGTRNQLQAAVTALKSNGIQVWGDVVMNHKGGADATEWVRAVEVNPSNRNQEVSGDTTIEAWTKFDFPGRGNTHSNFKWRWYHFDGVDWDQSRQLQNKIYKFRGDGKEWDWEVDTENGNYDYLMYADYDMDHPEVVNELRNWGVWYTNTLGLDGFRIDAVKHIKYSFTRDWLTHVRNTTGKNMFAVAEFWKNDIGAIENYLSNTNWNHSVFDVPLHYNLYNASRSGGNYDMRQIFNGTVVQRHPTHAVTFVDNHDSQPEEALESFVEEWFKPLAYALTLTRDQGYPSVFYGDYYGIPTHGVPAMKSKIDPILEARQKYAYGKQNDYLDHHNMIGWTREGNTAHPNSGLATIMSDGPGGNKWMYVGRNKAGQVWRDITGNRSGTVTINADGWGNFSVNGGSVSIWV

SEQ ID NO: 21853 - protein, 483 aa, Synthetic construct
HHNGTNGTMMQYFEWYLPNDGNHWHRLRSDASNLKDKGITAVWIPPAWKGASQNDVGYGAYDLYDLGEFNQKGTVRTKYGTRNQLQAAVTALKSNGIQVWGDVVMNHKGGADATEWVRAVEVNPSNRNQEVSGDTTIEAWTKFDFPGRGNTHSNFKWRWYHFDGVDWDQSRQLQNKIYKFRGDGKEWDWEVDTENGNYDYLMYADYDMDHPEVVNELRNWGVWYTNTLGLDGFRIDAVKHIKYSFTRDWLTHVRNTTQKNMFAVAEFWKNDIGAIENYLSKTNWNHSVFDVPLHYNLYNASRSGGNYDMRQIFNGTVVQRHPTHAVTFVDNHDSQPEEALESFVEEWFKPLAYALTLTRDQGYPSVFYGDYYGIPTHGVPAMKSKIDPILEARQKYAYGKQNDYLDHHNMIGWTREGNTAHPNSGLATIMSDGPGGNKWMYVGRNKAGQVWRDITGNRSGTVTINADGWGNFSVNGGSVSIWV

SEQ ID NO: 21854 - protein, 483 aa, Synthetic construct
HHNQTNGTMMQYFEWYLPNDGNHWNRLRSDASNLKDKGITAVWIPPAWKGASQNDVGYGAYDLYDLGEFNQKGTVRTKYGTRNQLQAAVTALKSNGIQVYGDVVMNHKGGADATEWVRAVEVNPSNRNQEVSGDYTIEAWTKFDFPGRGNTHSNFKWRWWHFDGVDWDQSRQLQNKIYKFRGDGKGWDWEVDTENGNYDYLMYADYDMDHPEVVNELRNWGVWYTNTLGLDGFRIDAVKHIKYSFTRDWLEHVRNTTGKNMFAVAEFWKNDIGAIRNYLSKTNWNHSVFDVPLHYNLYNASRSGGNYDMRQIFNGTVVQRHPTHAVTFVDNHDSQPEEALESFVEEWFKPLAYALTLTRDQGYPSVFYGDYYGIPTHGVPAMKSKIDPILEARQKYAYGKQNDYLDHHNMIGWTREGNTAHPNSGLATIMSDGPGGNKWMYVGRNKAGQVWRDITGNRSGTVTINADGWGNFSVNGGSVSIWV

SEQ ID NO: 21855 - protein, 483 aa, Synthetic construct
HHNGTNGTMMQYFEWYLPNDGNHWHRLRSDASNLKDKGITAVWIPPAWKGASQNDVGYGAYDLYDLGEFNQKGTVRTKYGTRNQLQAAVTALKSNGIQVWGDVVMNHKGGADATEWVRAVEVNPSNRNQEVSGDTTIEAWTKFDFPGRGNTHSNFKWRWYHFDGVDWDQSRQLQNKIYKFQGDGKEWDWEVDEENGNYDYLMYADYDMDHPEVVNELRNWGVWYTNTLGLDGFRIDAVKHIKYSFTRDWLTHVRNTTGKNMFAVAEFWKNDIGAIENYLSKTNWNHSVFDVPLHYNLYNASRSGGNYDMRQIFNGTVVQRHPTHAVTFVDNHDSQPEEALESFVEEWFKPLAYALTLTRDQGYPSVFYGDYYGIPTHGVPAMKSKIDPILEARQKYAYGKQNDYLDHHNMIGWTREGNTAHPNSGLATIMSDGPGGNKWMYVGRNKAGQVWRDITGNRSGTVTINADGWGNFSVNGGSVSIWV

SEQ ID NO: 21856 - protein, 483 aa, Synthetic construct
HHNQTNGTMMQYFEWYLPNDGNHWNRLRSDASNLKDKGITAVWIPPAWKGASQNDVGYGAYDLYDLGEFNQKGTVRTKYGTRNQLQAAVTALKSNGIQVWGDVVMNHKGGADATEWVRAVEVNPSNRNQEVSGDYTIEAWTKFDFPGRGNTHSNFKWRWYHFDGVDWDQSRQLQNKIYKFRGDGKEWDWEVDEENGNYDYLMYADYDMDHPEVVNELRNWGVWYTNTLGLDGFRIDAVKHIKYSFTRDWLEHVRNTTQKNMFAVAEFWKNDIGAIENYLSKTNWNHSVFDVPLHYNLYNASRSGGNYDMRQIFNGTVVQRHPTHAVTFVDNHDSQPEEALESFVEEWFKPLAYALTLTRDQGYPSVFYGDYYGIPTHGVPAMKSKIDPILEARQKYAYGKQNDYMDHHNMIGWTREGNTAHPNSGLATIMSDGPGGNKWMYVGRNKAGQVWRDITGNRSGTVTINADGWGNFSVNGGSVSIWV

SEQ ID NO: 21857 - protein, 483 aa, Synthetic construct
HHNQTNGTMMQYFEWYLPNDGNHWNRLRSDASNLKDKGITAVWIPPAWKGASQNDVGYGAYDLYDLGEFNQKGTVRTKYGTRNQLQAAVTALKSNGIQVWGDVVMNHKGGADATEWVRAVEVNPSNRNQEVSGDYTIEAWTKFDFPGRGNTHSNFKWRWYHFDGVDWDQSRQLQNKIYKFQGDGKEWDWEVDEENGNYDYLMYADYDMDHPEVVNELRNWGVWYTNTLGLDGFRIDAVKHIKYSFTRDWLEHVRNTTGKNMFAVAEFWKNDIGAIENYLSKTNWNHSVFDVPLHYNLYNASRSGGNYDMRQIFNGTVVQRHPTHAVTFVDNHDSQPEEALESFVEEWFKPLAYALTLTRDQGYPSVFYGDYYGIPTHGVPAMKSKIDPILEARQKYAYGKQNDYMDHHNMIGWTREGNTAHPNSGLATIMSDGPGGNKWMYVGRNKAGQVWRDITGNRSGTVTINADGWGNFSVNGGSVSIWV

SEQ ID NO: 21858 - protein, 483 aa, Synthetic construct
HHNQTNGTMMQYFEWYLPNDGNHWNRLRSDASNLKDKGITAVWIPPAWKGASQNDVGYGAYDLYDLGEFNQKGTVRTKYGTRNQLQAAVTALKSNGIQVYGDVVMNHKGGADATEWVRAVEVNPSNRNQEVSGDTTIEAWTKFDFPGRGNTHSNFKWRWYHFDGVDWDQSRQLQNKIYKFRGDGKEWDWEVDEENGNYDYLMYADYDMDHPEVVNELRNWGVWYTNTLGLDGFRIDAVKHIKYSFTRDWLEHVRNTTGKNMFAVAEFWKNDIGAIENYLSNTNWNHSVFDVPLHYNLYNASRSGGNYDMRQIFNGTVVQRHPTHAVTFVDNHDSQPEEALESFVEEWFKPLAYALTLTRDQGYPSVFYGDYYGIPTHGVPAMKSKIDPILEARQKYAYGKQNDYMDHHNMIGWTREGNTAHPNSGLATIMSDGPGGNKWMYVGRNKAGQVWRDITGNRSGTVTINADGWGNFSVNGGSVSIWV

SEQ ID NO: 21859 - protein, 483 aa, Synthetic construct
HHNGTNGTMMQYFEWYLPNDGNHWHRLRSDASNLKDKGITAVWIPPAWKGASQNDVGYGAYDLYDLGEFNQKGTVRTKYGTRNQLQAAVTALKSNGIQVWGDVVMNHKGGADATEWVRAVEVNPSNRNQEVSGDYTIEAWTKFDFPGRGNTHSNFKWRWYHFDGVDWDQSRQLQNKIYKFRGDGKEWDWEVDEENGNYDYLMYADYDMDHPEVVNELRNWGVWYTNTLGLDGFRIDAVKHIKYSFTRDWLTHVRNTTQKNMFAVAEFWKNDIGAIENYLSKTNWNHSVFDVPLHYNLYNASRSGGNYDMRQIFNGTVVQRHPTHAVTFVDNHDSQPEEALESFVEEWFKPLAYALTLTRDQGYPSVFYGDYYGIPTHGVPAMKSKIDPILEARQKYAYGKQNDYLDHHNMIGWTREGNTAHPNSGLATIMSDGPGGNKWMYVGRNKAGQVWRDITGNRSGTVTINADGWGNFRVNGGSVSIWV

SEQ ID NO: 21860 - protein, 483 aa, Synthetic construct
HHNQTNGTMMQYFEWYLPNDGNHWNRLRSDASNLKDKGITAVWIPPAWKGASQNDVGYGAYDLYDLGEFNQKGTVRTKYGTRNQLQAAVTALKSNGIQVYGDVVMNHKGGADATEWVRAVEVNPSNRNQEVSGDYTIEAWTKFDFPGRGNTHSNFKWRWYHFDGVDWDQSRQLQNKIYKFRGDGKEWDWEVDEENGNYDYLMYADYDMDHPEVVNELRNWGVWYTNTLGLDGFRIDAVKHIKYSFTRDWLEHVRNTTQKNMFAVAEFWKNDIGAIENYLSKTNWNHSVFDVPLHYNLYNASRSGGNYDMRQIFNGTVVQRHPTHAVTFVDNHDSQPEEALESFVEEWFKPLAYALTLTRDQGEPSVFYGDYYGIPTHGVPAMKSKIDPILEARQKYAYGKQNDYMDHHNMIGWTREGNTAHPNSGLATIMSDGPGGNKWMYVGRNKAGQVWRDITGNRSGTVTINADGWGNFSVNGGSVSIWV

SEQ ID NO: 21861 - protein, 483 aa, Synthetic construct
HHNGTNGTMMQYFEWYLPNDGNHWHRLRSDASNLKDKGITAVWIPPAWKGASQNDVGYGAYDLYDLGEFNQKGTVRTKYGTRNQLQAAVTALKSNGIQVYGDVVMNHKGGADATEWVRAVEVNPSNRNQEVSGDTTIEAWTKFDFPGRGNTHSNFKWRWYHFDGVDWDQSRQLQNKIYKFQGDGKEWDWEVDTENGNYDYLMYADYDMDHPEVVNELRNWGVWYTNTLGLDGFRIDAVKHIKYSFTRDWLTHVRNTTQKNMFAVAEFWKNDIGAIENYLSKTNWNHSVFDVPLHYNLYNASRSGGNYDMRQIFNGTVVQRHPTHAVTFVDNHDSQPEEALESFVEEWFKPLAYALTLTRDQGYPSVFYGDYYGIPTHGVPAMKSKIDPILEARQKYAYGKQNDYLDHHNMIGWTREGNTAHPNSGLATIMSDGPGGNKWMYVGRNKAGQVWRDITGNRSGTVTINADGWGNFSVNGGSVSIWV

SEQ ID NO: 21862 - protein, 483 aa, Synthetic construct
HHNGTNGTMMQYFEWYLPNDGNHWHRLRSDASNLKDKGITAVWIPPAWKGASQNDVGYGAYDLYDLGEFNQKGTVRTKYGTRNQLQAAVTALKSNGIQVWGDVVMNHKGGADATEWVRAVEVNPSNRNQEVSGDYTIEAWTKFDFPGRGNTHSNFKWRWYHFDGVDWDQSRQLQNKIYKFRGDGKEWDWEVDEENGNYDYLMYADYDMDHPEVVNELRNWGVWYTNTLGLDGFRIDAVKHIKYSFTRDWLTHVRNTTQKNMFAVAEFWKNDIGAIENYLSNTNWNHSVFDVPLHYNLYNASRSGGNYDMRQIFNGTVVQRHPTHAVTFVDNHDSQPEEALESFVEEWFKPLAYALTLTRDQGYPSVFYGDYYGIPTHGVPAMKSKIDPILEARQKYAYGKQNDYLDHHNMIGWTREGNTAHPNSGLATIMSDGPGGNKWMYVGRNKAGQVWRDITGNRSGTVTINADGWGNFSVNGGSVSIWV

SEQ ID NO: 21863 - protein, 483 aa, Synthetic construct
HHNGTNGTMMQYFEWYLPNDGNHWHRLRSDASNLKDKGITAVWIPPAWKGASQNDVGYGAYDLYDLGEFNQKGTVRTKYGTRNQLQAAVTALKSNGIQVWGDVVMNHKGGADATEWVRAVEVNPSNRNQEVSGDTTIEAWTKFDFPGRGNTHSNFKWRWYHFDGVDWDQSRQLQNKIYKFRGDGKEWDWEVDEENGNYDYLMYADYDMDHPEVVNELRNWGVWYTNTLGLDGFRIDAVKHIKYSFTRDWLTHVRNTTGKNMFAVAEFWKNDIGAIENYLSKTNWNHSVFDVPLHYNLYNASRSGGNYDMRQIFNGTVVQRHPTHAVTFVDNHDSQPEEALESFVEEWFKPLAYALTLTRDQGEPSVFYGDYYGIPTHGVPAMKSKIDPILEARQKYAYGKQNDYLDHHNMIGWTREGNTAHPNSGLATIMSDGPGGNKWMYVGRNKAGQVWRDITGNRSGTVTINADGWGNFSVNGGSVSIWV

SEQ ID NO: 21864 - protein, 483 aa, Synthetic construct
HHNQTNGTMMQYFEWYLPNDGNHWHRLRSDASNLKDKGITAVWIPPAWKGASQNDVGYGAYDLYDLGEFNQKGTVRTKYGTRNQLQAAVTALKSNGIQVYGDVVMNHKGGADATEWVRAVEVNPSNRNQEVSGDYTIEAWTKFDFPGRGNTHSNFKWRWWHFDGVDWDQSRQLQNKIYKFRGDGKEWDWEVDTENGNYDYLMYADIDMDHPEVVNELRNWGVWYTNTLGLDGFRIDAVKHIKYSFTRDWLTHVRNTTGKNMFAVAEFWKNDIGAIRNYLSKTNWNHSVFDVPLHYNLYNASRSGGNYDMRQIFNGTVVQRHPTHAVTFVDNHDSQPEEALESFVEEWFKPLAYALTLTRDQGYPSVFYGDYYGIPTHGVPAMKSKIDPILEARQKYAYGKQNDYMDHHNMIGWTREGNTAHPNSGLATIMSDGPGGNKWMYVGRNKAGQVWRDITGNRSGTVTINADGWGNFSVNGGSVSIWV

SEQ ID NO: 21865 - protein, 483 aa, Synthetic construct
HHNQTNGTMMQYFEWYLPNDGNHWHRLRSDASNLKDKGITAVWIPPAWKGASQNDVGYGAYDLYDLGEFNQKGTVRTKYGTRNQLQAAVTALKSNGIQVYGDVVMNHKGGADATEWVRAVEVNPSNRNQEVSGDYTIEAWTKFDFPGRGNTHSNFKWRWWHFDGVDWDQSRQLQNKIYKFRGDGKEWDWEVDTENGNYDYLMYADYDMDHPEVVNELRNWGVWYTNTLGLDGFRIDAVKHIKYSFTRDWLEHVRNTTGKNMFAVAEFWKNDIGAIENYLSKTNWNHSVFDVPLHYNLYNASRSGGNYDMRQIFNGTVVQRHPTHAVTFVDNHDSQPEEALESFVEEWFKPLAYALTLTRDQGYPSVFYGDYYGIPTHGVPAMKSKIDPILEARQKYAYGKQNDYLDHHNMIGWTREGNTAHPNSGLATIMSDGPGGNKWMYVGRNKAGQVWRDITGNRSGTVTINADGWGNFSVNGGSVSIWV

SEQ ID NO: 21866 - protein, 483 aa, Synthetic construct
HHNGTNGTMMQYFEWYLPNDGNHWHRLRSDASNLKDKGITAVWIPPAWKGASQNDVGYGAYDLYDLGEFNQKGTVRTKYGTRNQLQAAVTALKSNGIQVYGDVVMNHKGGADATEWVRAVEVNPSNRNQEVSGDTTIEAWTKFDFPGRGNTHSNFKWRWYHFDGVDWDQSRQLQNKIYKFRGDGKEWDWEVDTENGNYDYLMYADYDMDHPEVVNELRNWGVWYTNTLGLDGFRIDAVKHIKYSFTRDWLTHVRNTTQKNMFAVAEFWKNDIGAIENYLSKTNWNHSVFDVPLHYNLYNASRSGGNYDMRQIFNGTVVQRHPTHAVTFVDNHDSQPEEALESFVEEWFKPLAYALTLTRDQGEPSVFYGDYYGIPTHGVPAMKSKIDPILEARQKYAYGKQNDYLDHHNMIGWTREGNTAHPNSGLATIMSDGPGGNKWMYVGRNKAGQVWRDITGNRSGTVTINADGWGNFSVNGGSVSIWV

SEQ ID NO: 21867 - protein, 483 aa, Synthetic construct
HHNQTNGTMMQYFEWYLPNDGNHWNRLRSDASNLKDKGITAVWIPPAWKGASQNDVGYGAYDLYDLGEFNQKGTVRTKYGTRNQLQAAVTALKSNGIQVWGDVVMNHKGGADATEWVRAVEVNPSNRNQEVSGDTTIEAWTKFDFPGRGNTHSNFKWRWYHFDGVDWDQSRQLQNKIYKFRGDGKEWDWEVDEENGNYDYLMYADYDMDHPEVVNELRNWGVWYTNTLGLDGFRIDAVKHIKYSFTRDWLEHVRNTTGKNMFAVAEFWKNDIGAIENYLSKTNWNHSVFDVPLHYNLYNASRSGGNYDMRQIFNGTVVQRHPTHAVTFVDNHDSQPEEALESFVEEWFKPLAYALTLTRDQGYPSVFYGDYYGIPTHGVPAMKSKIDPILEARQKYAYGKQNDYMDHHNMIGWTREGNTAHPNSGLATIMSDGPGGNKWMYVGRNKAGQVWRDITGNRSGTVTINADGWGNFSVNGGSVSIWV

SEQ ID NO: 21868 - protein, 483 aa, Synthetic construct
HHNGTNGTMMQYFEWYLPNDGNHWHRLRSDASNLKDKGITAVWIPPAWKGASQNDVGYGAYDLYDLGEFNQKGTVRTKYGTRNQLQAAVTALKSNGIQVYGDVVMNHKGGADATEWVRAVEVDPSNRNQEVSGDYTIEAWTKFDFPGRGNTHSNFKWRWYHFDGVDWDQSRQLQNKIYKFRGDGKEWDWEVDTENGNYDYLMYADYDMDHPEVVNELRNWGVWYTNTLGLDGFRIDAVKHIKYSFTRDWLTHVRNTTQKNMFAVAEFWKNDIGAIENYLSKTNWNHSVFDVPLHYNLYNASRSGGNYDMRQIFNGTVVQRHPTHAVTFVDNHDSQPEEALESFVEEWFKPLAYALTLTRDQGEPSVFYGDYYGIPTHGVPAMKSKIDPILEARQKYAYGKQNDYLDHHNMIGWTREGNTAHPNSGLATIMSDGPGGNKWMYVGRNKAGQVWRDITGNRSGTVTINADGWGNFSVNGGSVSIWV

SEQ ID NO: 21869 - protein, 483 aa, Synthetic construct
HHNGTNGTMMQYFEWYLPNDGNHWNRLRSDASNLKDKGITAVWIPPAWKGASQNDVGYGAYDLYDLGEFNQKGTVRTKYGTRNQLQAAVTALKSNGIQVYGDVVMNHKGGADATEWVRAVEVNPSNRNQEVSGDYTIEAWTKFDFPGRGNTHSNFKWRWDHFDGVDWDQSRQLQNRIYKFRGDGKEWDWEVDTENGNYDYLMYADIDMDHPEVVNELRNWGVWYTDTLGLDGFRIDAVKHIKYSFTRDWLTHVRNTTGKNMFAVAEFWKNDIGAIENYLSKTNWNHSVFDVPLHYNLYNASRSGGNYDMRQIFKGTVVQRHPTHAVTFVDNHDSQPEEALESFVEEWFKPLAYALTLTRDQGYPSVFYGDYYGIPTHGVPAMKSKIDPILEARQKYAYGKQNDYLDHHNMIGWTREGNTAHPNSGLATIMSDGPGGNKWMYVGRNKAGQVWRDITGNRSDEVTINADGWGNFSVNGGSVSIWV

SEQ ID NO: 21870 - protein, 483 aa, Synthetic construct
HHNGTNGTMMQYFEWYLPNDGNHWHRLRSDASNLKDKGITAVWIPPAWKGASQNDVGYGAYDLYDLGEFNQKGTVRTKYGTRNQLQAAVTALKSNGIQVYGDVVMNHKGGADATEWVRAVEVNPSNRNQEVSGDYTIEAWTKFDFPGRGNTHSNFKWRWYHFDGVDWDQSRQLQNKIYKFRGDGKEWDWEVDTENGNYDYLMYADYDMDHPEVVNELRNWGVWYTNTLGLDGFRIDAVKHIKYSFTRDWLTHVRNTTQKNMFAVAEFWKNDIGAIENYLSNTNWNHSVFDVPLHYNLYNASRSGGNYDMRQIFNGTVVQRHPTHAVTFVDNHDSQPEEALESFVEEWFKPLAYALTLTRDQGEPSVFYGDYYGIPTHGVPAMKSKIDPILEARQKYAYGKQNDYLDHHNMIGWTREGNTAHPNSGLATIMSDGPGGNKWMYVGRNKAGQVWRDITGNRSGTVTINADGWGNFSVNGGSVSIWV

SEQ ID NO: 21871 - protein, 483 aa, Synthetic construct
HHNGTNGTMMQYFEWYLPNDGNHWHRLRSDASNLKDKGITAVWIPPAWKGASQNDVGYGAYDLYDLGEFNQKGTVRTKYGTRNQLQAAVTALKSNGIQVYGDVVMNHKGGADATEWVRAVEVNPSNRNQEVSGDTTIEAWTKFDFPGRGNTHSNFKWRWYHFDGVDWDQSRQLQNKIYKFRGDGKEWDWEVDTENGNYDYLMYADYDMDHPEVVNELRNWGVWYTNTLGLDGFRIDAVKHIKYSFTRDWLTHVRNTTQKNMFAVAEFWKNDIGAIENYLSNTNWNHSVFDVPLHYNLYNASRSGGNYDMRQIFNGTVVQRHPTHAVTFVDNHDSQPEEALESFVEEWFKPLAYALTLTRDQGYPSVFYGDYYGIPTHGVPAMKSKIDPILEARQKYAYGKQNDYLDHHNMIGWTREGNTAHPNSGLATIMSDGPGGNKWMYVGRNKAGQVWRDITGNRSGTVTINADGWGNFSVNGGSVSIWV

SEQ ID NO: 21872 - protein, 483 aa, Synthetic construct
HHNQTNGTMMQYFEWYLPNDGNHWHRLRSDASNLKDKGITAVWIPPAWKGASQNDVGYGAYDLYDLGEFNQKGTVRTKYGTRNQLQAAVTALKSNGIQVYGDVVMNHKGGADATEWVRAVEVNPSNRNQEVSGDYTIEAWTKFDFPGRGNTHSNFKWRWWHFDGVDWDRSRQLQNRIYKFRGDGKEWDWEVDTENGNYDYLMYADYDMDHPEVVNELRNWGVWYTNTLGLDGFRIDAVKHIKYSFTRDWLTHVRNTTGKNMFAVAEFWKNDIGAIRNYLSKTNWNHSVFDVPLHYNLYNASRSGGNYDMRQIFNGTVVQRHPTHAVTFVDNHDSQPEEALESFVEEWFKPLAYALTLTRDQGYPSVFYGDYYGIPTHGVPAMKSKIDPILEARQKYAYGKQNDYLDHHNMIGWTREGNTAHPNSGLATIMSDGPGGNKWMYVGRNKAGQVWRDITGNRSGTVTINADGWGNFSVNGGSVSIWV

SEQ ID NO: 21873 - protein, 483 aa, Synthetic construct
HHNGTNGTMMQYFEWYLPNDGNHWHRLRSDASNLKDKGITAVWIPPAWKGASQNDVGYGAYDLYDLGEFNQKGTVRTKYGTRNQLQAAVTALKSNGIQVWGDVVMNHKGGADATEWVRAVEVNPSNRNQEVSGDYTIEAWTKFDFPGRGNTHSNFKWRWYHFDGVDWDQSRQLQNKIYKFQGDGKEWDWEVDTENGNYDYLMYADYDMDHPEVVNELRNWGVWYTNTLGLDGFRIDAVKHIKYSFTRDWLTHVRNTTGKNMFAVAEFWKNDIGAIENYLSKTNWNHSVFDVPLHYNLYNASRSGGNYDMRQIFNGTVVQRHPTHAVTFVDNHDSQPEEALESFVEEWFKPLAYALTLTRDQGEPSVFYGDYYGIPTHGVPAMKSKIDPILEARQKYAYGKQNDYLDHHNMIGWTREGNTAHPNSGLATIMSDGPGGNKWMYVGRNKAGQVWRDITGNRSGTVTINADGWGNFSVNGGSVSIWV

SEQ ID NO: 21874 - protein, 483 aa, Synthetic construct
HHNQTNGTMMQYFEWYLPNDGNHWHRLRSDASNLKDKGITAVWIPPAWKGASQNDVGYGAYDLYDLGEFNQKGTVRTKYGTRNQLQAAVTALKSNGIQVYGDVVMNHKGGADATEWVRAVEVNPSNRNQEVSGDYTIEAWTKFDFPGRGNTHSNFKWRWYHFDGVDWDQSRQLQNKIYKFRGDGKGWDWEVDTENGNYDYLMYADYDMDHPEVVNELRNWGVWYTNTLGLDGFRIDAVKHIKYSFTRDWLEHVRNTTGKNMFAVAEFWKNDIGAIRNYLSKTNWNHSVFDVPLHYNLYNASRSGGNYDMRQIFNGTVVQRHPTHAVTFVDNHDSQPEEALESFVEEWFKPLAYALTLTRDQGYPSVFYGDYYGIPTHGVPAMKSKIDPILEARQKYAYGKQNDYMDHHNMIGWTREGNTAHPNSGLATIMSDGPGGNKWMYVGRNKAGQVWRDITGNRSGTVTINADGWGNFSVNGGSVSIWV

SEQ ID NO: 21875 - protein, 483 aa, Synthetic construct
HHNQTNGTMMQYFEWYLPNDGNHWNRLRSDASNLKDKGITAVWIPPAWKGASQNDVGYGAYDLYDLGEFNQKGTVRTKYGTRNQLQAAVTALKSNGIQVYGDVVMNHKGGADATEWVRAVEVNPSNRNQEVSGDYTIEAWTKFDFPGRGNTHSNFKWRWYHFDGVDWDQSRQLQNKIYKFRGDGKEWDWEVDEENGNYDYLMYADYDMDHPEVVNELRNWGVWYTNTLGLDGFRIDAVKHIKYSFTRDWLEHVRNTTGKNMFAVAEFWKNDIGAIENYLSNTNWNHSVFDVPLHYNLYNASRSGGNYDMRQIFNGTVVQRHPTHAVTFVDNHDSQPEEALESFVEEWFKPLAYALTLTRDQGEPSVFYGDYYGIPTHGVPAMKSKIDPILEARQKYAYGKQNDYMDHHNMIGWTREGNTAHPNSGLATIMSDGPGGNKWMYVGRNKAGQVWRDITGNRSGTVTINADGWGNFSVNGGSVSIWV

SEQ ID NO: 21876 - protein, 483 aa, Synthetic construct
HHNQTNGTMMQYFEWYLPNDGNHWHRLRSDASNLKDKGITAVWIPPAWKGASQNDVGYGAYDLYDLGEFNQKGTVRTKYGTRNQLQAAVTALKSNGIQVYGDVVMNHKGGADATEWVRAVEVNPSNRNQEVSGDYTIEAWTKFDFPGRGNTHSNFKWRWYHFDGVDWDQSRQLQNKIYKFRGDGKEWDWEVDTENGNYDYLMYADYDMDHPEVVNELRNWGVWYTNTLGLDGFRIDAVKHIKYSFTRDWLEHVRNTTGKNMFAVAEFWKNDIGAIRNYLSKTNWNHSVFDVPLHYNLYNASRSGGNYDMRQIFNGTVVQRHPTHAVTFVDNHDSQPEEALESFVEEWFKPLAYALTLTRDQGYPSVFYGDYYGIPTHGVPAMKSKIDPILEARQKYAYGKQNDYMDHHNMIGWTREGNTAHPNSGLATIMSDGPGGNKWMYVGRNKAGQVWRDITGNRSGTVTINADGWGNFSVNGGSVSIWV

SEQ ID NO: 21877 - protein, 483 aa, Synthetic construct
HHNQTNGTMMQYFEWYLPNDGNHWNRLRSDASNLKDKGITAVWIPPAWKGASQNDVGYGAYDLYDLGEFNQKGTVRTKYGTRNQLQAAVTALKSNGIQVYGDVVMNHKGGADATEWVRAVEVNPSNRNQEVSGDYTIEAWTKFDFPGRGNTHSNFKWRWYHFDGVDWDQSRQLQNKIYKFQGDGKEWDWEVDEENGNYDYLMYADYDMDHPEVVNELRNWGVWYTNTLGLDGFRIDAVKHIKYSFTRDWLEHVRNTTQKNMFAVAEFWKNDIGAIENYLSKTNWNHSVFDVPLHYNLYNASRSGGNYDMRQIFNGTVVQRHPTHAVTFVDNHDSQPEEALESFVEEWFKPLAYALTLTRDQGYPSVFYGDYYGIPTHGVPAMKSKIDPILEARQKYAYGKQNDYMDHHNMIGWTREGNTAHPNSGLATIMSDGPGGNKWMYVGRNKAGQVWRDITGNRSGTVTINADGWGNFSVNGGSVSIWV

SEQ ID NO: 21878 - protein, 483 aa, Synthetic construct
HHNGTNGTMMQYFEWYLPNDGNHWHRLRSDASNLKDKGITAVWIPPAWKGASQNDVGYGAYDLYDLGEFNQKGTVRTKYGTRNQLQAAVTALKSNGIQVWGDVVMNHKGGADATEWVRAVEVNPSNRNQEVSGDTTIEAWTKFDFPGRGNTHSNFKWRWYHFDGVDWDQSRQLQNKIYKFRGDGKEWDWEVDTENGNYDYLMYADYDMDHPEVVNELRNWGVWYTNTLGLDGFRIDAVKHIKYSFTRDWLTHVRNTTGKNMFAVAEFWKNDIGAIENYLSKTNWNHSVFDVPLHYNLYNASRSGGNYDMRQIFNGTVVQRHPTHAVTFVDNHDSQPEEALESFVEEWFKPLAYALTLTRDQGEPSVFYGDYYGIPTHGVPAMKSKIDPILEARQKYAYGKQNDYLDHHNMIGWTREGNTAHPNSGLATIMSDGPGGNKWMYVGRNKAGQVWRDITGNRSGTVTINADGWGNFSVNGGSVSIWV

SEQ ID NO: 21879 - protein, 483 aa, Synthetic construct
HHNQTNGTMMQYFEWYLPNDGNHWHRLRSDASNLKDKGITAVWIPPAWKGASQNDVGYGAYDLYDLGEFNQKGTVRTKYGTRNQLQAAVTALKSNGIQVYGDVVMNHKGGADATEWVRAVEVNPSNRNQEVSGDYTIEAWTKFDFPGRGNTHSNFKWRWWHFDGVDWDQSRQLQNKIYKFRGDGKEWDWEVDTENGNYDYLMYADIDMDHPEVVNELRNWGVWYTNTLGLDGFRIDAVKHIKYSFTRDWLEHVRNTTGKNMFAVAEFWKNDIGAIENYLSKTNWNHSVFDVPLHYNLYNASRSGGNYDMRQIFNGTVVQRHPTHAVTFVDNHDSQPEEALESFVEEWFKPLAYALTLTRDQGYPSVFYGDYYGIPTHGVPAMKSKIDPILEARQKYAYGKQNDYMDHHNMIGWTREGNTAHPNSGLATIMSDGPGGNKWMYVGRNKAGQVWRDITGNRSGTVTINADGWGNFSVNGGSVSIWV

SEQ ID NO: 21880 - protein, 483 aa, Synthetic construct
HHNQTNGTMMQYFEWYLPNDGNHWNRLRSDASNLKDKGITAVWIPPAWKGASQNDVGYGAYDLYDLGEFNQKGTVRTKYGTRNQLQAAVTALKSNGIQVWGDVVMNHKGGADATEWVRAVEVNPSNRNQEVSGDYTIEAWTKFDFPGRGNTHSNFKWRWYHFDGVDWDQSRQLQNKIYKFRGDGKEWDWEVDEENGNYDYLMYADYDMDHPEVVNELRNWGVWYTNTLGLDGFRIDAVKHIKYSFTRDWLEHVRNTTGKNMFAVAEFWKNDIGAIENYLSNTNWNHSVFDVPLHYNLYNASRSGGNYDMRQIFNGTVVQRHPTHAVTFVDNHDSQPEEALESFVEEWFKPLAYALTLTRDQGYPSVFYGDYYGIPTHGVPAMKSKIDPILEARQKYAYGKQNDYMDHHNMIGWTREGNTAHPNSGLATIMSDGPGGNKWMYVGRNKAGQVWRDITGNRSGTVTINADGWGNFSVNGGSVSIWV

SEQ ID NO: 21881 - protein, 483 aa, Synthetic construct
HHNQTNGTMMQYFEWYLPNDGNHWNRLRSDASNLKDKGITAVWIPPAWKGASQNDVGYGAYDLYDLGEFNQKGTVRTKYGTRNQLQAAVTALKSNGIQVYGDVVMNHKGGADATEWVRAVEVNPSNRNQEVSGDYTIEAWTKFDFPGRGNTHSNFKWRWYHFDGVDWDQSRQLQNKIYKFQGDGKEWDWEVDEENGNYDYLMYADYDMDHPEVVNELRNWGVWYTNTLGLDGFRIDAVKHIKYSFTRDWLEHVRNTTGKNMFAVAEFWKNDIGAIENYLSKTNWNHSVFDVPLHYNLYNASRSGGNYDMRQIFNGTVVQRHPTHAVTFVDNHDSQPEEALESFVEEWFKPLAYALTLTRDQGHPSVFYGDYYGIPTHGVPAMKSKIDPILEARQKYAYGKQNDYMDHHNMIGWTREGNTAHPNSGLATIMSDGPGGNKWMYVGRNKAGQVWRDITGNRSGTVTINADGWGNFSVNGGSVSIWV

SEQ ID NO: 21882 - protein, 483 aa, Bacillus sp. 707
HHNGTNGTMMQYFEWYLPNDGNHWNRLNSDASNLKSKGITAVWIPPAWKGASQNDVGYGAYDLYDLGEFNQKGTVRTKYGTRSQLQAAVTSLKNNGIQVYGDVVMNHKGGADATEMVRAVEVNPNNRNQEVTGEYTIEAWTRFDFPGRGNTHSSFKWRWYHFDGVDWDQSRRLNNRIYKFRGHGKAWDWEVDTENGNYDYLMYADIDMDHPEVVNELRNWGVWYTNTLGLDGFRIDAVKHIKYSFTRDWINHVRSATGKNMFAVAEFWKNDLGAIENYLQKTNWNHSVFDVPLHYNLYNASKSGGNYDMRNIFNGTVVQRHPSHAVTFVDNHDSQPEEALESFVEEWFKPLAYALTLTREQGYPSVFYGDYYGIPTHGVPAMRSKIDPILEARQKYAYGKQNDYLDHHNIIGWTREGNTAHPNSGLATIMSDGAGGSKWMFVGRNKAGQVWSDITGNRTGTVTINADGWGNFSVNGGSVSIWV

SEQ ID NO: 21883 - protein, 483 aa, Synthetic construct
HHNQTNGTMMQYFEWYLPNDGNHWHRLRSDASNLKDKGITAVWIPPAWKGASQNDVGYGAYDLYDLGEFNQKGTVRTKYGTRNQLQAAVTALKSNGIQVYGDVVMNHKGGADATEWVRAVEVNPSNRNQEVSGDYTIEAWTKFDFPGRGNTHSNFKWRWWHFDGVDWDQSRQLQNRIYKFRGDGKEWDWEVDTENGNYDYLMYADYDMDHPEVVNELRNWGVWYTNTLGLDGFRIDAVKHIKYSFTRDWLEHVRNTTGKNMFAVAEFWKNDIGAIRNYLSKTNWNHSVFDVPLHYNLYNASRSGGNYDMRQIFNGTVVQRHPTHAVTFVDNHDSQPEEALESFVEEWFKPLAYALTLTRDQGYPSVFYGDYYGIPTHGVPAMKSKIDPILEARQKYAYGKQNDYMDHHNMIGWTREGNTAHPNSGLATIMSDGPGGNKWMYVGRNKAGQVWRDITGNRSGTVTINADGWGNFSVNGGSVSIWV

SEQ ID NO: 21884 - protein, 483 aa, Synthetic construct
HHNQTNGTMMQYFEWYLPNDGNHWHRLRSDASNLKDKGITAVWIPPAWKGASQNDVGYGAYDLYDLGEFNQKGTVRTKYGTRNQLQAAVTALKSNGIQVYGDVVMNHKGGADATEWVRAVEVNPSNRNQEVSGDYTIEAWTKFDFPGRGNTHSNFKWRWWHFDGVDWDQSRQLQNKIYKFRGDGKEWDWEVDTENGNYDYLMYADYDMDHPEVVNELRNWGVWYTNTLGLDGFRIDAVKHIKYSFTRDWLTHVRNTTGKNMFAVAEFWKNDIGAIRNYLSKTNWNHSVFDVPLHYNLYNASRSGGNYDMRQIFNGTVVQRHPTHAVTFVDNHDSQPEEALESFVEEWFKPLAYALTLTRDQGYPSVFYGDYYGIPTHGVPAMKSKIDPILEARQKYAYGKQNDYLDHHNMIGWTREGNTAHPNSGLATIMSDGPGGNKWMYVGRNKAGQVWRDITGNRSGTVTINADGWGNFSVNGGSVSIWV

SEQ ID NO: 21885 - protein, 483 aa, Synthetic construct
HHNQTNGTMMQYFEWYLPNDGNHWNRLRSDASNLKDKGITAVWIPPAWKGASQNDVGYGAYDLYDLGEFNQKGTVRTKYGTRNQLQAAVTALKSNGIQVWGDVVMNHKGGADATEWVRAVEVNPSNRNQEVSGDYTIEAWTKFDFPGRGNTHSNFKWRWYHFDGVDWDQSRQLQNKIYKFRGDGKEWDWEVDEENGNYDYLMYADYDMDHPEVVNELRNWGVWYTNTLGLDGFRIDAVKHIKYSFTRDWLEHVRNTTGKNMFAVAEFWKNDIGAIENYLSKTNWNHSVFDVPLHYNLYNASRSGGNYDMRQIFNGTVVQRHPTHAVTFVDNHDSQPEEALESFVEEWFKPLAYALTLTRDQGHPSVFYGDYYGIPTHGVPAMKSKIDPILEARQKYAYGKQNDYMDHHNMIGWTREGNTAHPNSGLATIMSDGPGGNKWMYVGRNKAGQVWRDITGNRSGTVTINADGWGNFSVNGGSVSIWV

SEQ ID NO: 21886 - protein, 483 aa, Synthetic construct
HHNGTNGTMMQYFEWYLPNDGNHWHRLRSDASNLKDKGITAVWIPPAWKGASQNDVGYGAYDLYDLGEFNQKGTVRTKYGTRNQLQAAVTALKSNGIQVWGDVVMNHKGGADATEWVRAVEVNPSNRNQEVSGDYTIEAWTKFDFPGRGNTHSNFKWRWYHFDGVDWDQSRQLQNKIYKFRGDGKEWDWEVDTENGNYDYLMYADYDMDHPEVVNELRNWGVWYTNTLGLDGFRIDAVKHIKYSFTRDWLTHVRNTTGKNMFAVAEFWKNDIGAIENYLSNTNWNHSVFDVPLHYNLYNASRSGGNYDMRQIFNGTVVQRHPTHAVTFVDNHDSQPEEALESFVEEWFKPLAYALTLTRDQGEPSVFYGDYYGIPTHGVPAMKSKIDPILEARQKYAYGKQNDYLDHHNMIGWTREGNTAHPNSGLATIMSDGPGGNKWMYVGRNKAGQVWRDITGNRSGTVTINADGWGNFSVNGGSVSIWV

SEQ ID NO: 21887 - protein, 483 aa, Synthetic construct
HHNGTNGTMMQYFEWYLPNDGNHWHRLRSDASNLKDKGITAVWIPPAWKGASQNDVGYGAYDLYDLGEFNQKGTVRTKYGTRNQLQAAVTALKSNGIQVWGDVVMNHKGGADATEWVRAVEVNPSNRNQEVSGDYTIEAWTKFDFPGRGNTHSNFKWRWYHFDGVDWDQSRQLQNKIYKFRGDGKEWDWEVDTENGNYDYLMYADYDMDHPEVVNELRNWGVWYTNTLGLDGFRIDAVKHIKYSFTRDWLTHVRNTTQKNMFAVAEFWKNDIGAIENYLSNTNWNHSVFDVPLHYNLYNASRSGGNYDMRQIFNGTVVQRHPTHAVTFVDNHDSQPEEALESFVEEWFKPLAYALTLTRDQGYPSVFYGDYYGIPTHGVPAMKSKIDPILEARQKYAYGKQNDYLDHHNMIGWTREGNTAHPNSGLATIMSDGPGGNKWMYVGRNKAGQVWRDITGNRSGTVTINADGWGNFSVNGGSVSIWV

SEQ ID NO: 21888 - protein, 483 aa, Bacillus sp. TS-23
SVPVNGTMMQYFEWYLPDDGTLWTKVANNAQSLANLGITALWLPPAYKGTSSSDVGYGVYDLYDLGEFNQKGTVRTKYGTKTQYIQAIQAAHTAGMQVYADVVFNHKAGADGTELVDAVEVNPSDRNQEISGTYQIQAWTKFDFPGRGNTYSSFKWRWYHFDGTDWDESRKLNRIYKFRGTGKAWDWEVDTENGNYDYLMYADLDMDHPEVVSELKNWGKWYVTTTNIDGFRLDAVKHIKYSFFPDWLSYVRTQTQKPLFAVGEFWSYDISKLHNYITKTNGSMSLFDAPLHNNFYIASKSGGYFDMRTLLNNTLMKDQPTLAVTLVDNHDTEPGQSLQSWVEPWFKPLAYAFILTRQEGYPCVFYGDYYGIPKYNIPALKSKLDPLLIARRDYAYGTQHDYIDSADIIGWTREGVAEKANSGLAALITDGPGGSKWMYVGKQHAGKTFYDLTGNRSDTVTINADGWGEFKVNGGSVSIWVPK

SEQ ID NO: 21889 - protein, 400 aa, Bacillus sp.
NGTNGTMMQYFEWYLPNDGNHWNRLRSDASNLKDKGISAVWIPPAWKGASQNDVGYGAYDLYDLGEFNQKGTIRTKYGTRNQLQAAVNALKSNGIQVYGDVVMNHKGGADATEMVRAVEVNPNNRNQEVSGEYTIEAWTKFDFPGRGNTHSNFKWRWYHFDGVDWDQSRKLNNRIYKFRGDGKGWDWEVDTENGNYDYLMYADIDMDHPEVVNELRNWGVWYTNTLGLDGFRIDAVKHIKYSFTRDWSIHVRSATGKNMFAVAEFWKNDLGAIENYLNKTNWNHSVFDVPLHYNFYNASKSGGNYDMRQIFNGTVVQRHPMHAVTFVDNHDSQPEEALESFVEEWFKPLAYALTLTREQGYPSVFYGDYYGIPTHGVPAMKSKIDPILEARQKYAYGRQN

SEQ ID NO: 21890 - protein, 482 aa, Bacillus sp. 707
HHNGTNGTMMQYFEWYLPNDGNHWNRLNSDASNLKSKGITAVWIPPAWKGASQNDVGYGAYDLYDLGEFNQKGTVRTKYGTRSQLQAAVTSLKNNGIQVYGDVVMNHKGGADATEMVRAVEVNPNNRNQEVTGEYTIEAWTRFDFPGRGNTHSSFKWRWYHFDGVDWDQSRRLNNRIYKFRGHGKAWDWEVDTENGNYDYLMYADIDMDHPEVVNELRNWGVWYTNTLGLDGFRIDAVKHIKYSFTRDWINHVRSATGKNMFAVAEFWKNDLGAIENYLQKTNWNHSVFDVPLHYNLYNASKSGGNYDMRNIFNGTVVQRHPSHAVTFVDNHDSQPEEALESFVEEWFKPLAYALTLTREQGYPSVFYGDYYGIPTHGVPAMRSKIDPILEARQKYAYGKQNDYLDHHNIIGWTREGNTAHPNSGLATIMSDGAGGSKWMFVGRNKAGQVWSDITGNRTGTVTINADGWGNFSVNGGSVSIW

SEQ ID NO: 21891 - protein, 482 aa, Synthetic construct
APVNGTMMQYFEWDLPNDGTLWTKVKNEAANLSSLGITALWLPPAYKGTSQSDVGYGVYDLYDLGEFNQKGTVRTKYGTKDQYIQAIQAAKAAGMQVYADVVFNHKAGADGTELVDAVEVNPSDRNQEISGTYQIQAWTKFDFPGRGNTYSSFKWRWYHFDGTDWDESRKLNRIYKFRGTGKAWDWEVDTENGNYDYLMYADLDMDHPEVVTELKNWGKWYVNTTNVDGFRLDAVKHIKYSFFPDWLASVRSQTGKNLFAVGEFWSYDVNKLHNYITKTNGTMSLFDAPLHNNFYTASKSSGYFDMRYLLNNTLMKDQPVLAVTLVDNHDTQPGQSLQSWVEPWFKPLAYAFILTRQEGYPCVFYGDYYGIPKYNIPGLKSKIDPLLIARRDYAYGTQRDYIDHQDIIGWTREGIDSKPNSGLAALITDGPGGSKWMYVGKKHAGKVFYDLTGNRSDTVTINADGWGEFKVNGGSVSIWVAK

SEQ ID NO: 21892 - protein, 397 aa, Bacillus sp. 707
HHNGTNGTMMQYFEWYLPNDGNHWNRLNSDASNLKSKGITAVWIPPAWKGASQNDVGYGAYDLYDLGEFNQKGTVRTKYGTRSQLQAAVTSLKNNGIQVYGDVVMNHKGGADATEMVRAVEVNPNNRNQEVTGEYTIEAWTRFDFPGRGNTHSSFKWRWYHFDGVDWDQSRRLNNRIYKFGGKAWDWEVDTENGNYDYLMYADIDMDHPEVVNELRNWGVWYTNTLGLDGFRIDAVKHIKYSFTRDWINHVRSATGKNMFAVAEFWKNDLGAIENYLQKTNWNHSVFDVPLHYNLYNASKSGGNYDMRNIFNGTVVQRHPSHAVTFVDNHDSQPEEALESFVEEWFKPLAYALTLTREQGYPSVFYGDYYGIPTHGVPAMRSKIDPILEARQKYAYG

SEQ ID NO: 21893 - protein, 397 aa, Bacillus sp. 707
HHNGTNGTMMQYFEWYLPNDGNHWNRLNSDASNLKSKGITAVWIPPAWKGASQNDVGYGAYDLYDLGEFNQKGTVRTKYGTRSQLQAAVTSLKNNGIQVYGDVVMNHKGGADATEMVRAVEVNPNNRNQEVTGEYTIEAWTRFDFPGRGNTHSSFKWRWYHFDGVDWDQSRRLNNRIYKFRHKAWDWEVDTENGNYDYLMYADIDMDHPEVVNELRNWGVWYTNTLGLDGFRIDAVKHIKYSFTRDWINHVRSATGKNMFAVAEFWKNDLGAIENYLQKTNWNHSVFDVPLHYNLYNASKSGGNYDMRNIFNGTVVQRHPSHAVTFVDNHDSQPEEALESFVEEWFKPLAYALTLTREQGYPSVFYGDYYGIPTHGVPAMRSKIDPILEARQKYAYG

SEQ ID NO: 21894 - protein, 397 aa, Bacillus sp. 707
HHNGTNGTMMQYFEWYLPNDGNHWNRLNSDASNLKSKGITAVWIPPAWKGASQNDVGYGAYDLYDLGEFNQKGTVRTKYGTRSQLQAAVTSLKNNGIQVYGDVVMNHKGGADATEMVRAVEVNPNNRNQEVTGEYTIEAWTRFDFPGRGNTHSSFKWRWYHFDGVDWDQSRRLNNRIYKFHGKAWDWEVDTENGNYDYLMYADIDMDHPEVVNELRNWGVWYTNTLGLDGFRIDAVKHIKYSFTRDWINHVRSATGKNMFAVAEFWKNDLGAIENYLQKTNWNHSVFDVPLHYNLYNASKSGGNYDMRNIFNGTVVQRHPSHAVTFVDNHDSQPEEALESFVEEWFKPLAYALTLTREQGYPSVFYGDYYGIPTHGVPAMRSKIDPILEARQKYAYG

SEQ ID NO: 21895 - protein, 488 aa, Geobacillus stearothermophilus
AAPFNGTMMQYFXWXLPXXGXXWXXVANEAXXXXSLGITALWLPPAYXGTXRXXVGXGVXXLXDLGXFNQKGAVRTKYGTKAQYLQAIQAAHAAGMQVYADVVFDHKGGADGTEWYDAVEVNPSDXXQXISGTXQIXXWTKFDFPGRGNTYSSFKWRWYHFDGVDWDESRKLSRIYKFRGIGKAWDWEVDTENGNYDYLMYADLDMDHPEVVTELKSWGKWYVNTTMIDGFRLDAVKHIKFSFFPDWLSXVRSXXGXPLFXVGXXWSYDINKLHNYXMKTNGTMSLFDAPXHNKFYTASKSGGTFDMRTLMTNTLMKDQPTLAVTFVDNHXXXPXXXLXSWVXPWFXPLAXAFXLTRQEGYPCVFYGDXXGIPQYNIPSLKSKIDPLLIARRDYAYGTQHDYLDHSDIIGWTRXGVTEXPGSGLAALXTDGPGGXKWMXVGXXHAGKVFYDLTGNRSDTVTINSDGWGEFKVNGGSVSVWVPRKTTVS

SEQ ID NO: 21896 - protein, 480 aa, Bacillus sp. 707
HHNGTNGTMMQYFEWYLPNDGNHWNRLNSDASNLKSKGITAVWIPPAWKGASQNDVGYGAYDLYDLGEFNQKGTVRTKYGTRSQLQAAVTSLKNNGIQVYGDVVMNHKGGADATEMVRAVEVNPNNRNQEVTGEYTIEAWTRFDFPGRGNTHSSFKWRWYHFDGVDWDQSRRLNNRIYKFRGHGKAWDWEVDTENGNYDYLMYADIDMDHPEVVNELRNWGVWYTNTLGLDGFRIDAVKHIKYSFTRDWINHVRSATGKNMFAVAEFWKNDLGAIENYLQKTNWNHSVFDVPLHYNLYNASKSGGNYDMRNIFNGTVVQRHPSHAVTFVDNHDSQPEEALESFVEEWFKPLAYALTLTREQGYPSVFYGDYYGIPTHGVPAMRSKIDPILEARQKYAYGKQNDYLDHHNIIGWTREGNTAHPNSGLATIMSDGAGGSKWMFVGRNKAGQVWSDITGNRTGTVTINADGWGNFSVNGGSVS

SEQ ID NO: 21897 - protein, 515 aa, Geobacillus stearothermophilus
AAPFNGTMMQYFXWXLPXXGXXWXXVANEAXXXXSLGITALWLPPAYXGTXRXXVGXGVXXLXDLGXFNQKGAVRTKYGTKAQYLQAIQAAHAAGMQVYADVVFDHKGGADGTEWYDAVEVNPSDXXQXISGTXQIXXWTKFDFPGRGNTYSSFKWRWYHFDGVDWDESRKLSRIYKFRGIGKAWDWEVDTENGNYDYLMYADLDMDHPEVVTELKSWGKWYVNTTMIDGFRLDAVKHIKFSFFPDWLSXVRSXXGXPLFXVGXXWSYDINKLHNYXMKTNGTMSLFDAPXHNKFYTASKSGGTFDMRTLMTNTLMKDQPTLAVTFVDNHXXXPXXXLXSWVXPWFXPLAXAFXLTRQEGYPCVFYGDXXGIPQYNIPSLKSKIDPLLIARRDYAYGTQHDYLDHSDIIGWTRXGVTEXPGSGLAALXTDGPGGXKWMXVGXXHAGKVFYDLTGNRSDTVTINSDGWGEFKVNGGSVSVWVPRKTTVSXIAWSITTRPWTDEFVRWTEPRLVAWP

SEQ ID NO: 21898 - protein, 485 aa, Bacillus subtilis
HHNGTNGTMMQYFEWYLPNDGNHWNRLRSDASNLKDKGISAVWIPPAWKGASQNDVGYGAYDLYDLGEFNQKGTIRTKYGTRNQLQAAVNALKSNGIQVYGDVVMNHKGGADATEMVRAVEVNPNNRNQEVSGEYTIEAWTKFDFPGRGNTHSNFKWRWYHFDGVDWDQSRKLNNRIWKFRGDGKGWDWEVDTENGNYDYLMYADIDMDHPEVVNELRNWGVWYTNTLGLDGFRIDAVKHIKYSFTRDWINHVRSATGKNMFAVAEFWKNDLGAIENYLNKTNWNHSVFDVPLHYNLYNASKSGGNYDMRQIFNGTVVQRHPMHAVTFVDNHDSQPEEALESFVEEWFKPLAYALTLTREQGYPSVFYGDYYGIPTHGVPAMKSKIDPILEARQKYAYGRQNDYLDHHNIIGWTREGNTAHPNSGLATIMSDGAGGNKWMFVGRNKAGQVWTDITGNRAGTVTINADGWGNFSVNGGSVSIWVNK

SEQ ID NO: 21899 - protein, 485 aa, Bacillus subtilis
HHNGTNGTMMQYFEWYLPNDGNHWNRLRSNASNLKDKGISAVWIPPAWKGASQNDVGYGAYDLYDLGEFNQKGTIRTKYGTRNQLQAAVNALKSNGIQVYGDVVMNHKGGADATEMVRAVEVNPNNRNQEVSGEYTIEAWTKFDFPGRGNTHSNFKWRWYHFDGVDWDQSRKLNNRIYKFRGDGKGWDWEVDTENGNYDYLMYADIDMDHPEVVNELRNWGVWYTNTLGLDGFRIDAVKHIKYSFTRDWINHVRSATGKNMFAVAEFWKNDLGAIENYLNKTNWNHSVFDVPLHYNLYNASKSGGNYDMRQIFNGTVVQRHPMHAVTFVDNHDSQPEEALESFVEEWFKPLAYALTLTREQGYPSVFYGDYYGIPTHGVPAMKSKIDPILEARQKYAYGRQNDYLDHHNIIGWTREGNTAHPNSGLATIMSDGAGGNKWMFVGRNKAGQVWTDITGNRAGTVTINADGWGNFSVNGGSVSIWVNK

SEQ ID NO: 21900 - protein, 485 aa, Bacillus sp. 707
HHNGTNGTMMQYFEWYLPNDGNHWNRLNDDASNLKSKGITAVWIPPAWKGASQNDVGYGAYDLYDLGEFNQKGTVRTKYGTRSQLQAAVTSLKNNGIQVYGDVVMNHKGGADATEMVRAVEVNPNNRNQEVTGEYTIEAWTRFDFPGRGNTHSSFKWRWYHFDGVDWDQSRRLNNRIYKFRGHGKAWDWEVDTENGNYDYLMYADIDMDHPEVVNELRNWGVWYTNTLGLDGFRIDAVKHIKYSFTRDWINHVRSATGKNMFAVAEFWKNDLGAIENYLQKTNWNHSVFDVPLHYNLYNASKSGGNYDMRNIFNGTVVQRHPSHAVTFVDNHDSQPEEALESFVEEWFKPLAYALTLTREQGYPSVFYGDYYGIPTHGVPAMRSKIDPILEARQKYAYGKQNDYLDHHNIIGWTREGNTAHPNSGLATIMSDGAGGSKWMFVGRNKAGQVWSDITGNRTGTVTINADGWGNFSVNGGSVSIWVNK

SEQ ID NO: 21901 - protein, 483 aa, Synthetic construct
HHIGTNGTMMQYFEWYLPNDGNHWNRLRSDASNLKDKGISAVWIPPAWKGASQNDVGYGAYDLYDLGEFNQKGTIRTKYGTRNQLQAAVNALKSNGIQVYGDVVMNHKGGADATEMVKAVEVNPNNRNQEVSGEYTIEAWTKFDFPGRGNTHSNFKWRWYHFDGVDWDQSRKLNNRIYKFRGKGWDWEVDTEFGNYDYLMYADIDMDHPEVVNELRNWGVWYTNTLGLDGFRIDAVKHIKYSFTRDWINHVRSATGKNMFAVAEFWKNDLGAIENYLNKTNWNHSVFDVPLHYNLYNASKSGGNYDMRQIFNGTVVQKHPMHAVTFVDNHDSQPEEALESFVEEWFKPLAYALTLTREQGYPSVFYGDYYGIPTHGVPAMKSKIDPILEARQKYAYGRQNDYLDHHNIIGWTREGNTAHPNSGLATIMSDGAGGNKWMFVGRNKAGQVWTDITGNKAGTVTINADGWGNFSVXGGSVSIWVNK

SEQ ID NO: 21902 - protein, 485 aa, Bacillus subtilis
HHNGTNGTMMQYFEWYLPNDGNHWNRLRSDASNLKDKGISAVWIPPAWKGASQNDVGYGAYDLYDLGEFNQKGTIRTKYGTRNQLQAAVNALKSNGIQVYGDVVMNHKGGADATEMVRAVEVNPNNRNQEVSGEYTIEAWTKFDFPGRGNTHSNFKWRWYHFDGVDWDQSRKLNNRIYKFRGDGKGWDWEVDTENGNYDYLMYADIDMDHPEVVNELRNWGVWYTNTLGLDGFRIDAVKHIKYSFTRDWINHVRSATGKNMFAVAEFWKNDLGAIENYLNKTNWNHSVFDVPLHYNLYNASKSGGNYDMRQIFNGTVVQRHPMHAVTFVDNHDSQPEEALESFVEEWFKPLAYALTLTREQGYPSVFYGDYYGIPTHGVPAMQSKIDPILEARQKYAYGRQNDYLDHHNIIGWTREGNTAHPNSGLATIMSDGAGGNKWMFVGRNKAGQVWTDITGNRAGTVTINADGWGNFSVNGGSVSIWVNK

SEQ ID NO: 21903 - protein, 483 aa, Bacillus sp.
HHNGTNGTLMQYFEWYLPNDGNHWNRLRSDASNLKDKGISAVWIPPAWKGASQNDVGYGAYDLYDLGEFNQKGTIRTKYGTRNQLQAAVNALKSNGIQVYGDVVMNHKGGADATEMVKAVEVNPNNRNQEVSGEYTIEAWTKFDFPGRGNTHSNFKWRWYHFDGVDWDQSRKLNNRIYKFRGKGWDWEVDTENGNYDYLIYADIDMDHPEVVNELRNWGVWYTNTLGLDGFRIDAVKHIKYSFTRDWINHVRSATGKNMFAVAEFWKNDLGAIENYLNKTNWNHSVFDVPLHYNLYNASKSGGNYDMRQIFNGTVVQKHPTHAVTFVDNHDSQPEEALESFVEEWFKPLAYALTLTREQGYPSVFYGDYYGIPTHGVPAMKSKIDPILEARQKYAYGRQNDYLDHHNIIGWTREGNTAHPNSGLATIMSDGAGGNKWMFVGRNKAGQVWTDITGNKAGTVTINADGWGNFSVNGGSVSIWVNK

SEQ ID NO: 21904 - protein, 483 aa, Synthetic construct
HHYGTNGTMMQYFEWYLPNDGNHWNRLRSDASNLKDKGISAVWIPPAWKGASQNDVGYGAYDLYDLGEFNQKGTIRTKYGTRNQLQAAVNALKSNGIQVYGDVVMNHKGGADATEMVKAVEVNPNNRNQEVSGEYTIEAWTKFDFPGRGNTHSNFKWRWYHFDGVDWDQSRKLNNRIYKFRGKGWDWEVDTEFGNYDYLMYADIDMDHPEVVNELRNWGVWYTNTLGLDGFRIDAVKHIKYSFTRDWINHVRSATGKNMFAVAEFWKNDLGAIENYLNKTNWNHSVFDVPLHYNLYNASKSGGNYDMRQIFNGTVVQKHPMHAVTFVDNHDSQPEEALESFVEEWFKPLAYALTLTREQGYPSVFYGDYYGIPTHGVPAMKSKIDPILEARQKYAYGRQNDYLDHHNIIGWTREGNTAHPNSGLATIMSDGAGGNKWMFVGRNKAGQVWTDITGNKAGTVTINADGWGNFSVXGGSVSIWVNK

SEQ ID NO: 21905 - protein, 485 aa, Bacillus subtilis
HHNGTNGTMMQYFEWYLPNDGNHWNRLRSDASNLKDKGISAVWIPPAWKGASQNDVGYGAYDLYDLGEFNQKGTIRTKYGTRNQLQAAVNALKSNGIQVYGDVVMNHKGGADATEMVRAVEVNPNNRNQEVSGEYTIEAWTKFDFPGRGNTHSNFKWRWYHFDGVDWDQSRKLNNRIYKFRGDGKGWDWEVDTENGNYDYLMYADIDMDHPEVVNELRNWGVWYTNTLGLDGFRIDAVKHIKYSFIRDWINHVRSATGKNMFAVAEFWKNDLGAIENYLNKTNWNHSVFDVPLHYNLYNASKSGGNYDMRQIFNGTVVQRHPMHAVTFVDNHDSQPEEALESFVEEWFKPLAYALTLTREQGYPSVFYGDYYGIPTHGVPAMKSKIDPILEARQKYAYGRQNDYLDHHNIIGWTREGNTAHPNSGLATIMSDGAGGNKWMFVGRNKAGQVWTDITGNRAGTVTINADGWGNFSVNGGSVSIWVNK

SEQ ID NO: 21906 - protein, 485 aa, Bacillus sp. 707
HHNGTNGTMMQYFEWYLPNDGNHWNRLNSDASNLKSKGITAVWIPPAWKGASQNDVGYGAYDLYDLGEFNQKGTVRTKYGTRSQLQAAVTSLKNNGIQVYGDVVMNHKGGADATEMVRAVEVNPNNRNQEVTGEYTIEAWTRFDFPGRGNTHSSFKWRWYHFDGVDWDQSRRLNNRIYKFRGHGKAWDWEVDTENGNYDYLMYADIDMDHPEVVNELRNWGVWYTNTLGLDGFRIDAVKHIKYSFTRDWINHVRSATGKNMFAVAEFWKNDLGAIENYLQKTNWNHSVFDVPLHYNLYNASKSGGNYDMRNIFNGTVVQKHPSHAVTFVDNHDSQPEEALESFVEEWFKPLAYALTLTREQGYPSVFYGDYYGIPTHGVPAMRSKIDPILEARQKYAYGKQNDYLDHHNIIGWTREGNTAHPNSGLATIMSDGAGGSKWMFVGRNKAGQVWSDITGNRTGTVTINADGWGNFSVNGGSVSIWVNK

SEQ ID NO: 21907 - protein, 485 aa, Bacillus subtilis
HHNGTNGTMMQYFEWYLPNDGNHWNRLRSDASNLKDKGISAVWIPPAWKGASQNDVGYGAYDLYDLGEFNQKGTIRTKYGTRNQLQAAVNALKSNGIQVYGDVVMNHKGGADATEMVRAVEVNPNNRNQEVSGEYTIEAWTKFDFPGRGNTHSNFKWRWYHFDGVDWDQSRKLNNRIYKFRGDGKGWDWEVDTENGNYDYLMYADIDMDHPEVVNELRNWGVWYTNTLGLDGFRIDAVKHIKYSFTRDWINHVRSATGKNMFAVAEFWNNDLGAIENYLNKTNWNHSVFDVPLHYNLYNASKSGGNYDMRQIFNGTVVQRHPMHAVTFVDNHDSQPEEALESFVEEWFKPLAYALTLTREQGYPSVFYGDYYGIPTHGVPAMKSKIDPILEARQKYAYGRQNDYLDHHNIIGWTREGNTAHPNSGLATIMSDGAGGNKWMFVGRNKAGQVWTDITGNRAGTVTINADGWGNFSVNGGSVSIWVNK

SEQ ID NO: 21908 - protein, 485 aa, Bacillus sp. 707
HHNGTNGTMMQYFEWYLPNDGNHWNRLRSDASNLKSKGITAVWIPPAWKGASQNDVGYGAYDLYDLGEFNQKGTVRTKYGTRSQLQAAVTSLKNNGIQVYGDVVMNHKGGADATEMVRAVEVNPNNRNQEVTGEYTIEAWTRFDFPGRGNTHSSFKWRWYHFDGVDWDQSRRLNNRIYKFRGHGKAWDWEVDTENGNYDYLMYADIDMDHPEVVNELRNWGVWYTNTLGLDGFRIDAVKHIKYSFTRDWINHVRSATGKNMFAVAEFWKNDLGAIENYLQKTNWNHSVFDVPLHYNLYNASKSGGNYDMRNIFNGTVVQRHPSHAVTFVDNHDSQPEEALESFVEEWFKPLAYALTLTREQGYPSVFYGDYYGIPTHGVPAMRSKIDPILEARQKYAYGKQNDYLDHHNIIGWTREGNTAHPNSGLATIMSDGAGGSKWMFVGRNKAGQVWSDITGNRTGTVTINADGWGNFSVNGGSVSIWVNK

SEQ ID NO: 21909 - protein, 485 aa, Bacillus subtilis
HHNGTNGTMMQYFEWYLPNDGNHWNRLRSDASNLKDKGISAVWIPPAWKGASQNDVGYGAYDLYDLGEFNQKGTIRTKYGTRNQLQAAVNALKSNGIQVYGDVVMNHKGGADATEMVRAVEVNPNNRNQEVSGEYTIEAWTKFDFPGRGNTHSNFKWRWYHFDGVDWDQSRKLNNRIYKFRGDGKGWDWEVDTENGNYDYLMFADIDMDHPEVVNELRNWGVWYTNTLGLDGFRIDAVKHIKYSFTRDWINHVRSATGKNMFAVAEFWKNDLGAIENYLNKTNWNHSVFDVPLHYNLYNASKSGGNYDMRQIFNGTVVQRHPMHAVTFVDNHDSQPEEALESFVEEWFKPLAYALTLTREQGYPSVFYGDYYGIPTHGVPAMKSKIDPILEARQKYAYGRQNDYLDHHNIIGWTREGNTAHPNSGLATIMSDGAGGNKWMFVGRNKAGQVWTDITGNRAGTVTINADGWGNFSVNGGSVSIWVNK

SEQ ID NO: 21910 - protein, 485 aa, Bacillus subtilis
HHNGTNGTMMQYFEWYLPNDGNHWNRLRSDASNLKDKGISAVWIPPAWKGASQNDVGYGAYDLYDLGEFNQKGTIRTKYGTRNQLQAAVNALKSNGIQVYGDVVMNHKGGADATEMVRAVEVNPNNRNQEVSGEYTIEAWTKFDFPGRGNTHSNFKWRWYHFDGVDWDQSRKLNNRIYKFRGDGKGWDWEVDTENGNYDYLMYADIDMDHPEVVNELRNWGVWYTNTLGLDGFRIDAVKHIKYSFTRDWINHVRSATGKNMFAVGEFWKNDLGAIENYLNKTNWNHSVFDVPLHYNLYNASKSGGNYDMRQIFNGTVVQRHPMHAVTFVDNHDSQPEEALESFVEEWFKPLAYALTLTREQGYPSVFYGDYYGIPTHGVPAMKSKIDPILEARQKYAYGRQNDYLDHHNIIGWTREGNTAHPNSGLATIMSDGAGGNKWMFVGRNKAGQVWTDITGNRAGTVTINADGWGNFSVNGGSVSIWVNK

SEQ ID NO: 21911 - protein, 483 aa, Bacillus sp.
HHNGTNGTLMQYFEWYLPNDGNHWNRLRSDASNLKDKGISAVWIPPAWKGASQNDVGYGAYDLYDLGEFNQKGTIRTKYGTRNQLQAAVNALKSNGIQVYGDVVMNHKGGADATEMVKAVEVNPNNRNQEVSGEYTIEAWTKFDFPGRGNTHSNFKWRWYHFDGVDWDQSRKLNNRIYKFRGKGWDWEVDTENGNYDYLVYADIDMDHPEVVNELRNWGVWYTNTLGLDGFRIDAVKHIKYSFTRDWINHVRSATGKNMFAVAEFWKNDLGAIENYLNKTNWNHSVFDVPLHYNLYNASKSGGNYDMRQIFNGTVVQKHPTHAVTFVDNHDSQPEEALESFVEEWFKPLAYALTLTREQGYPSVFYGDYYGIPTHGVPAMKSKIDPILEARQKYAYGRQNDYLDHHNIIGWTREGNTAHPNSGLATIMSDGAGGNKWMFVGRNKAGQVWTDITGNKAGTVTINADGWGNFSVNGGSVSIWVNK

SEQ ID NO: 21912 - protein, 485 aa, Bacillus subtilis
HHNGTNGTMMQYFEWYLPNDGNHWNRLRSDASNLKDKGISAVWIPPAWKGASQNDVGYGAYDLYDLGEFNQKGTIRTKYGTRNQLQAAVNALKSNGIQVYGDVVMNHKGGADATEMVRAVEVNPNNRNQEVSGEYTIEAWTKFDFPGRGNTHSNFKWRWYHFDGVDWDQSRKLNNRIYKFRGDGKGWDWEVDTENGNYDYLMYADIDMDHPEVVNELRNWGVWYTNTLGLDGFRIDAVKHIKYSFTRDWINHVRSATGKNMFAVAEFWKNDLGAIENYLNKTNWNHSVFDVPLHYNLYNASKSGGNYDMRQIFNGTVVRRHPMHAVTFVDNHDSQPEEALESFVEEWFKPLAYALTLTREQGYPSVFYGDYYGIPTHGVPAMKSKIDPILEARQKYAYGRQNDYLDHHNIIGWTREGNTAHPNSGLATIMSDGAGGNKWMFVGRNKAGQVWTDITGNRAGTVTINADGWGNFSVNGGSVSIWVNK

SEQ ID NO: 21913 - protein, 485 aa, Bacillus subtilis
HHNGTNGTMMQYFEWYLPNDGNHWNRLRSDASNLKDKGISAVWIPPAWKGASQNDVGYGAYDLYDLGEFNQKGTIRTKYGTRNQLQAAVNALKSNGIQVYGDVVMNHKGGADATEMVRAVEVNPNNRNQEVSGEYTIEAWTKFDFPGRGNTHSNFKWRWYHFDGVDWDQSRKLNNRIYKFRGDGKGWDWEVDTENGNYDYLMYADIDMDNPEVVNELRNWGVWYTNTLGLDGFRIDAVKHIKYSFTRDWINHVRSATGKNMFAVAEFWKNDLGAIENYLNKTNWNHSVFDVPLHYNLYNASKSGGNYDMRQIFNGTVVQRHPMHAVTFVDNHDSQPEEALESFVEEWFKPLAYALTLTREQGYPSVFYGDYYGIPTHGVPAMKSKIDPILEARQKYAYGRQNDYLDHHNIIGWTREGNTAHPNSGLATIMSDGAGGNKWMFVGRNKAGQVWTDITGNRAGTVTINADGWGNFSVNGGSVSIWVNK

SEQ ID NO: 21914 - protein, 483 aa, Bacillus sp.
HHNGTNGTLMQYFEWYLPNDGNHWNRLRSDASNLKDKGISAVWIPPAWKGASQNDVGYGAYDLYDLGEFNQKGTIRTKYGTRNQLQAAVNALKSNGIQVYGDVVMNHKGGADATEMVKAVEVNPNNRNQEVSGEYTIEAWTKFDFPGRGNTHSNFKWRWYHFDGVDWDQSRKLNNRIYKFRGKGWDWEVDTENGNYDYLLYADIDMDHPEVVNELRNWGVWYTNTLGLDGFRIDAVKHIKYSFTRDWINHVRSATGKNMFAVAEFWKNDLGAIENYLNKTNWNHSVFDVPLHYNLYNASKSGGNYDMRQIFNGTVVQKHPTHAVTFVDNHDSQPEEALESFVEEWFKPLAYALTLTREQGYPSVFYGDYYGIPTHGVPAMKSKIDPILEARQKYAYGRQNDYLDHHNIIGWTREGNTAHPNSGLATIMSDGAGGNKWMFVGRNKAGQVWTDITGNKAGTVTINADGWGNFSVNGGSVSIWVNK

SEQ ID NO: 21915 - protein, 483 aa, Synthetic construct
HHGGTNGTMMQYFEWYLPNDGNHWNRLRSDASNLKDKGISAVWIPPAWKGASQNDVGYGAYDLYDLGEFNQKGTIRTKYGTRNQLQAAVNALKSNGIQVYGDVVMNHKGGADATEMVKAVEVNPNNRNQEVSGEYTIEAWTKFDFPGRGNTHSNFKWRWYHFDGVDWDQSRKLNNRIYKFRGKGWDWEVDTEFGNYDYLMYADIDMDHPEVVNELRNWGVWYTNTLGLDGFRIDAVKHIKYSFTRDWINHVRSATGKNMFAVAEFWKNDLGAIENYLNKTNWNHSVFDVPLHYNLYNASKSGGNYDMRQIFNGTVVQKHPMHAVTFVDNHDSQPEEALESFVEEWFKPLAYALTLTREQGYPSVFYGDYYGIPTHGVPAMKSKIDPILEARQKYAYGRQNDYLDHHNIIGWTREGNTAHPNSGLATIMSDGAGGNKWMFVGRNKAGQVWTDITGNKAGTVTINADGWGNFSVXGGSVSIWVNK

SEQ ID NO: 21916 - protein, 485 aa, Bacillus subtilis
HHNGTNGTMMQYFEWYLPNDGNHWNRLRSDASNLKDKGISAVWIPPAWKGASQNDVGYGAYDLYDLGEFNQKGTIRTKYGTRNQLQAAVNALKSNGIQVYGDVVMNHKGGADATEMVRAVEVNPNNRNQEVSGEYTIEAWTKFDFPGRGNTHSNFKWRWYHFDGVDWDQSRKLNNRIYKFRGDGKGWDWEVDTENGNYDYLMYADIDMDHPEVVNELRNWGVWYTNTLGLDGFRIDAVKHIKYSFTRDWINHVRSATGKNMFAVAEFWKNDLGAIENYLNKTNWNHSVFDVPLHYNLYNASKSGGNYDMRQIFNGTVVQRHPMHAVTFVDNHDSQPEEALESFVEEWFKPLAYALTLTREQGYPSVFYGDYYGIPTHGVPAMKSKIDPILEARQKYAYGRQNDYLDHHNIIGWTREGNTAHPNSGLATIMSDGAGGNKWMFVGRNKAGQVWTDITGNRAGTVTINADGFGNFSVNGGSVSIWVNK

SEQ ID NO: 21917 - protein, 485 aa, Bacillus sp. 707
HHNGTNGTMMQYFEWYLPNDGNHWNRLNSDASNLKSKGITAVWIPPAWKGASQNDVGYGAYDLYDLGEFNQKGTVRTKYGTRSQLQAAVTSLKNNGIQVYGDVVMNHKGGADATENVRAVEVNPNNRNQEVTGEYTIEAWTRFDFPGRGNTHSSFKWRWYHFDGVDWDQSRRLNNRIYKFRGHGKAWDWEVDTENGNYDYLMYADIDMDHPEVVNELRNWGVWYTNTLGLDGFRIDAVKHIKYSFTRDWINHVRSATGKNMFAVAEFWKNDLGAIENYLQKTNWNHSVFDVPLHYNLYNASKSGGNYDMRNIFNGTVVQRHPSHAVTFVDNHDSQPEEALESFVEEWFKPLAYALTLTREQGYPSVFYGDYYGIPTHGVPAMRSKIDPILEARQKYAYGKQNDYLDHHNIIGWTREGNTAHPNSGLATIMSDGAGGSKWMFVGRNKAGQVWSDITGNRTGTVTINADGWGNFSVNGGSVSIWVNK

SEQ ID NO: 21918 - protein, 485 aa, Bacillus subtilis
HHNGTNGTMMQYFEWYLPNDGNHWNRLRSDASNLKDKGISAVWIPPAWKGASQNDVGYGAYDLYDLGEFNQKGTIRTKYGTRNQLQAAVNALKSNGIQVYGDVVMNHKGGADATEMVRAVEVNPNNRNQEVSGEYTIEAWTKFDFPGRGNTHSNFKWRWYHFDGVDWDQSRKLNNRIYKFRGDGKGWDWEVDTENGNYDYLMYADIDMDHPEVVNELRNWGVWYTNTLGLDGFRIDAVKHIKYSFTRDWINHVRSATGNNMFAVAEFWKNDLGAIENYLNKTNWNHSVFDVPLHYNLYNASKSGGNYDMRQIFNGTVVQRHPMHAVTFVDNHDSQPEEALESFVEEWFKPLAYALTLTREQGYPSVFYGDYYGIPTHGVPAMKSKIDPILEARQKYAYGRQNDYLDHHNIIGWTREGNTAHPNSGLATIMSDGAGGNKWMFVGRNKAGQVWTDITGNRAGTVTINADGWGNFSVNGGSVSIWVNK

SEQ ID NO: 21919 - protein, 485 aa, Bacillus subtilis
HHNGTNGTMMQYFEWYLPNDGNHWNRLRSDASNLKDKGISAVWIPPAWKGASQNDVGYGAYDLYDLGEFNQKGTIRTKYGTRNQLQAAVNALHSNGIQVYGDVVMNHKGGADATEMVRAVEVNPNNRNQEVSGEYTIEAWTKFDFPGRGNTHSNFKWRWYHFDGVDWDQSRKLNNRIYKFRGDGKGWDWEVDTENGNYDYLMYADIDMDHPEVVNELRNWGVWYTNTLGLDGFRIDAVKHIKYSFTRDWINHVRSATGKNMFAVAEFWKNDLGAIENYLNKTNWNHSVFDVPLHYNLYNASKSGGNYDMRQIFNGTVVQRHPMHAVTFVDNHDSQPEEALESFVEEWFKPLAYALTLTREQGYPSVFYGDYYGIPTHGVPAMKSKIDPILEARQKYAYGRQNDYLDHHNIIGWTREGNTAHPNSGLATIMSDGAGGNKWMFVGRNKAGQVWTDITGNRAGTVTINADGWGNFSVNGGSVSIWVNK

SEQ ID NO: 21920 - protein, 485 aa, Bacillus subtilis
HHNGTNGTMMQYFEWYLPNDGNHWNRLRSDASNLKDKGISAVWIPPAWKGASQNDVGYGAYDLYDLGEFNQKGTIRTKYGSRNQLQAAVNALKSNGIQVYGDVVMNHKGGADATEMVRAVEVNPNNRNQEVSGEYTIEAWTKFDFPGRGNTHSNFKWRWYHFDGVDWDQSRKLNNRIYKFRGDGKGWDWEVDTENGNYDYLMYADIDMDHPEVVNELRNWGVWYTNTLGLDGFRIDAVKHIKYSFTRDWINHVRSATGKNMFAVAEFWKNDLGAIENYLNKTNWNHSVFDVPLHYNLYNASKSGGNYDMRQIFNGTVVQRHPMHAVTFVDNHDSQPEEALESFVEEWFKPLAYALTLTREQGYPSVFYGDYYGIPTHGVPAMKSKIDPILEARQKYAYGRQNDYLDHHNIIGWTREGNTAHPNSGLATIMSDGAGGNKWMFVGRNKAGQVWTDITGNRAGTVTINADGWGNFSVNGGSVSIWVNK

SEQ ID NO: 21921 - protein, 483 aa, Synthetic construct
HHLGTNGTMMQYFEWYLPNDGNHWNRLRSDASNLKDKGISAVWIPPAWKGASQNDVGYGAYDLYDLGEFNQKGTIRTKYGTRNQLQAAVNALKSNGIQVYGDVVMNHKGGADATEMVKAVEVNPNNRNQEVSGEYTIEAWTKFDFPGRGNTHSNFKWRWYHFDGVDWDQSRKLNNRIYKFRGKGWDWEVDTEFGNYDYLMYADIDMDHPEVVNELRNWGVWYTNTLGLDGFRIDAVKHIKYSFTRDWINHVRSATGKNMFAVAEFWKNDLGAIENYLNKTNWNHSVFDVPLHYNLYNASKSGGNYDMRQIFNGTVVQKHPMHAVTFVDNHDSQPEEALESFVEEWFKPLAYALTLTREQGYPSVFYGDYYGIPTHGVPAMKSKIDPILEARQKYAYGRQNDYLDHHNIIGWTREGNTAHPNSGLATIMSDGAGGNKWMFVGRNKAGQVWTDITGNKAGTVTINADGWGNFSVXGGSVSIWVNK

SEQ ID NO: 21922 - protein, 485 aa, Bacillus subtilis
HHNGTNGTMMQYFEWYLPNDGNHWNRLRSDASNLKDKGISAVWIPPAWKGASQNDVGYGAYDLYDLGEFNQKGTIRTKYGTRNQLQAAVNALKSNGIQVYGDVVMNHKGGADATEMVRAVEVNPNNRNQEVSGEYTIEAWTKFDFPGRGNTHSNFKWRWYHFDGVDWDQSRKLNQRIYKFRGDGKGWDWEVDTENGNYDYLMYADIDMDHPEVVNELRNWGVWYTNTLGLDGFRIDAVKHIKYSFTRDWINHVRSATGKNMFAVAEFWKNDLGAIENYLNKTNWNHSVFDVPLHYNLYNASKSGGNYDMRQIFNGTVVQRHPMHAVTFVDNHDSQPEEALESFVEEWFKPLAYALTLTREQGYPSVFYGDYYGIPTHGVPAMKSKIDPILEARQKYAYGRQNDYLDHHNIIGWTREGNTAHPNSGLATIMSDGAGGNKWMFVGRNKAGQVWTDITGNRAGTVTINADGWGNFSVNGGSVSIWVNK

SEQ ID NO: 21923 - protein, 483 aa, Synthetic construct
HHKGTNGTMMQYFEWYLPNDGNHWNRLRSDASNLKDKGISAVWIPPAWKGASQNDVGYGAYDLYDLGEFNQKGTIRTKYGTRNQLQAAVNALKSNGIQVYGDVVMNHKGGADATEMVKAVEVNPNNRNQEVSGEYTIEAWTKFDFPGRGNTHSNFKWRWYHFDGVDWDQSRKLNNRIYKFRGKGWDWEVDTEFGNYDYLMYADIDMDHPEVVNELRNWGVWYTNTLGLDGFRIDAVKHIKYSFTRDWINHVRSATGKNMFAVAEFWKNDLGAIENYLNKTNWNHSVFDVPLHYNLYNASKSGGNYDMRQIFNGTVVQKHPMHAVTFVDNHDSQPEEALESFVEEWFKPLAYALTLTREQGYPSVFYGDYYGIPTHGVPAMKSKIDPILEARQKYAYGRQNDYLDHHNIIGWTREGNTAHPNSGLATIMSDGAGGNKWMFVGRNKAGQVWTDITGNKAGTVTINADGWGNFSVXGGSVSIWVNK

SEQ ID NO: 21924 - protein, 485 aa, Bacillus subtilis
HHNGTNGTMMQYFEWYLPNDGNHWNRLRSDASNLKDKGISAVWIPPAWKGASQNDVGYGAYDLYDLGEFNQKGTIRTKYGTRNQLQAAVNALKSNGIQVYGDVVMNHKGGADATEMVRAVEVNPNNRNQEVSGEYTIEAWTKFDFPGRGNTHSNFKWRWYHFDGVDWDQSRKLNNRIYKFRGDGKGWDWEVDTENGNYDYLMYADIDMDHPEVVNELRNWGVWYTNTLGLDGFRIDAVKHIKYSFTRDWINHVRSATGKNMFAVAEFWKNDLGAIENYLNKTNWNHSVFDVPLHYNLYNASKSGGNYDMRQIFNGTVVQRHPMHAVTFVDNHDSQPEEALESFVEEWFKPLAYALTLTREQGYPSVFYGDYYGIPTHGVPAMKSKIDPILEARQKYAYGRQNDYLDHHNIIGWTRLGNTAHPNSGLATIMSDGAGGNKWMFVGRNKAGQVWTDITGNRAGTVTINADGWGNFSVNGGSVSIWVNK

SEQ ID NO: 21925 - protein, 483 aa, Synthetic construct
HHVGTNGTMMQYFEWYLPNDGNHWNRLRSDASNLKDKGISAVWIPPAWKGASQNDVGYGAYDLYDLGEFNQKGTIRTKYGTRNQLQAAVNALKSNGIQVYGDVVMNHKGGADATEMVKAVEVNPNNRNQEVSGEYTIEAWTKFDFPGRGNTHSNFKWRWYHFDGVDWDQSRKLNNRIYKFRGKGWDWEVDTEFGNYDYLMYADIDMDHPEVVNELRNWGVWYTNTLGLDGFRIDAVKHIKYSFTRDWINHVRSATGKNMFAVAEFWKNDLGAIENYLNKTNWNHSVFDVPLHYNLYNASKSGGNYDMRQIFXGTVVQKHPMHAVTFVDNHDSQPEEALESFVEEWFKPLAYALTLTREQGYPSVFYGDYYGIPTHGVPAMKSKIDPILEARQKYAYGRQNDYLDHHNIIGWTREGNTAHPNSGLATIMSDGAGGNKWMFVGRNKAGQVWTDITGNKAGTVTINADGWGNFSVNGGSVSIWVNK

SEQ ID NO: 21926 - protein, 484 aa, Bacillus sp.
HHNGTNGTMMQYFEWHLPNDGQHWNRLRNDAANLKNLGITAVWIPPAWKGTSQNDVGYGAYDLYDLGEFNQKGTIRTKYGTRSQLQSAIASLQNNGIQVYGDVVMNHKGGADGTEWVQAVEVNPSNRNQEVTGEYTIEAWTKFDFPGRGNTHSSFKWRWYHFDGTDWDQSRRLNNRIYKFTGKAWDWEVDTENGNYDYLMYADVDMDHPEVINELRRWGVWYTNTLNLDGFRIDAVKHIKYSFERDWLNHVRSTTGKNNMFAVAEFWKNDLGAIENYLHKTNWNHSVDDVPLHYNLYNASKSGGNYDMRQILNGTVVSKHPIHAVTFVDNHDSQPAEALESFVEAWFKPLAYALILTREQGYPSVFYGDYYGIPTHGVAAMKGKIDPILEARQKYAYGTQHDYLDHHNIIGWTREGNSAHPNSGLATIMSDGPGGSKWMYVGRHKAGQVWRDITGNRTGTVTINADGWGNFSVRGGSVSIWVNK

SEQ ID NO: 21927 - protein, 485 aa, Bacillus subtilis
HHNGTNGTMMQYFEWYLPNDGNHWNRLRSDASNLKDKGISAVWIPPAWKGASQNDVGYGAYDLYDLGEFNQKGTIRTKYGTRNQLQAAVNALKSNGIQVYGDVVMNHKGGADATEMVRAVEVNPNNRNQEVSGEYTIEAWTKFDFPGRGNTHSNFKWRWYHFDGVDWDQSRKLNNRIYKFRGDGKGWDWEVDTENGNYDYLMYADIDMDHPEVVNELRNWGVWYTNTLGLDGFRMDAVKHIKYSFTRDWINHVRSATGKNMFAVAEFWKNDLGAIENYLNKTNWNHSVFDVPLHYNLYNASKSGGNYDMRQIFNGTVVQRHPMHAVTFVDNHDSQPEEALESFVEEWFKPLAYALTLTREQGYPSVFYGDYYGIPTHGVPAMKSKIDPILEARQKYAYGRQNDYLDHHNIIGWTREGNTAHPNSGLATIMSDGAGGNKWMFVGRNKAGQVWTDITGNRAGTVTINADGWGNFSVNGGSVSIWVNK

SEQ ID NO: 21928 - protein, 485 aa, Bacillus subtilis
HHNGTNGTMMQYFEWYLPNDGNHWNRLRSDASNLKDKGISAVWIPPAWKGASQNDVGYGAYDLYDLGEFNQKGTIRTKYGTRNQLQAAVNALKSNGIQVYGDVVLNHKGGADATEMVRAVEVNPNNRNQEVSGEYTIEAWTKFDFPGRGNTHSNFKWRWYHFDGVDWDQSRKLNNRIYKFRGDGKGWDWEVDTENGNYDYLMYADIDMDHPEVVNELRNWGVWYTNTLGLDGFRIDAVKHIKYSFTRDWINHVRSATGKNMFAVAEFWKNDLGAIENYLNKTNWNHSVFDVPLHYNLYNASKSGGNYDMRQIFNGTVVQRHPMHAVTFVDNHDSQPEEALESFVEEWFKPLAYALTLTREQGYPSVFYGDYYGIPTHGVPAMKSKIDPILEARQKYAYGRQNDYLDHHNIIGWTREGNTAHPNSGLATIMSDGAGGNKWMFVGRNKAGQVWTDITGNRAGTVTINADGWGNFSVNGGSVSIWVNK

SEQ ID NO: 21929 - protein, 485 aa, Bacillus subtilis
HHNGTNGTMMQYFEWYLPNDGNHWNRLRSDASNLKDKGISAVWIPPAWKGASQNDVGYGAYDLYDLGEFNQKGTIRTKYGTRNQLQAAVNALKSNGIQVYGDVVMNHKGGADATEMVRAVEVNPNNRNQEVSGEYTIEAWTKFDFPGRGNTHSNFKWRWYHFDGVDWDQSRKLNNRIYKFRGDGKGWDWEVDTENGNYDYLMYADIDFDHPEVVNELRNWGVWYTNTLGLDGFRIDAVKHIKYSFTRDWINHVRSATGKNMFAVAEFWKNDLGAIENYLNKTNWNHSVFDVPLHYNLYNASKSGGNYDMRQIFNGTVVQRHPMHAVTFVDNHDSQPEEALESFVEEWFKPLAYALTLTREQGYPSVFYGDYYGIPTHGVPAMKSKIDPILEARQKYAYGRQNDYLDHHNIIGWTREGNTAHPNSGLATIMSDGAGGNKWMFVGRNKAGQVWTDITGNRAGTVTINADGWGNFSVNGGSVSIWVNK

SEQ ID NO: 21930 - protein, 483 aa, Synthetic construct
HHWGTNGTMMQYFEWYLPNDGNHWNRLRSDASNLKDKGISAVWIPPAWKGASQNDVGYGAYDLYDLGEFNQKGTIRTKYGTRNQLQAAVNALKSNGIQVYGDVVMNHKGGADATEMVKAVEVNPNNRNQEVSGEYTIEAWTKFDFPGRGNTHSNFKWRWYHFDGVDWDQSRKLNNRIYKFRGKGWDWEVDTEFGNYDYLMYADIDMDHPEVVNELRNWGVWYTNTLGLDGFRIDAVKHIKYSFTRDWINHVRSATGKNMFAVAEFWKNDLGAIENYLNKTNWNHSVFDVPLHYNLYNASKSGGNYDMRQIFXGTVVQKHPMHAVTFVDNHDSQPEEALESFVEEWFKPLAYALTLTREQGYPSVFYGDYYGIPTHGVPAMKSKIDPILEARQKYAYGRQNDYLDHHNIIGWTREGNTAHPNSGLATIMSDGAGGNKWMFVGRNKAGQVWTDITGNKAGTVTINADGWGNFSVNGGSVSIWVNK

SEQ ID NO: 21931 - protein, 485 aa, Bacillus subtilis
HHNGTNGTMMQYFEWYLPNDGNHWNRLRSDASNLKDKGISAVWIPPAWKGASQNDVGYGAYDLYDLGEFNQKGTIRTKYGTRNQLQAAVNALKSNGIQVYGDVVMNHKGGADATEMVRAVEVNPNNRNQEVSGEYTIEAWTKFDFPGRGNTHSNFKWRWYHFDGVDWDQSRKLNNRIYKFRGDGKGWDWEVDTENGNYDYLMYADIDMDHPEVTNELRNWGVWYTNTLGLDGFRIDAVKHIKYSFTRDWINHVRSATGKNMFAVAEFWKNDLGAIENYLNKTNWNHSVFDVPLHYNLYNASKSGGNYDMRQIFNGTVVQRHPMHAVTFVDNHDSQPEEALESFVEEWFKPLAYALTLTREQGYPSVFYGDYYGIPTHGVPAMKSKIDPILEARQKYAYGRQNDYLDHHNIIGWTREGNTAHPNSGLATIMSDGAGGNKWMFVGRNKAGQVWTDITGNRAGTVTINADGWGNFSVNGGSVSIWVNK

SEQ ID NO: 21932 - protein, 485 aa, Bacillus subtilis
HHNGTNGTMMQYFEWYLPNDGNHWNRLRSDASNLKDKGISAVWIPPAWKGASQNDVGYGAYDLYDLGEFNQKGTIRTKYGTRNQLQAAVNALKSNGIQVYGDVVMNHKGGADATEMVRAVEVNPNNRNQEVSGEYTIEAWTKFDFPGRGNTHSNFKWRWYHFDGVDWDQSRKLNNRIYKFRGDGKGWDWEVDTENGNYDYLMYADIDMDHPEVVNELRNWGVWYTNTLGLDGFRIDAVKHIKYSFTRDWINHVRSATGKNMFAVAEFWKNDLGAIENYLNKTNWNHSVFDVPLHYNLYNASKSGGNYDMRQIFNGTVVQRHPMHAVTFVDNHDSQPEEALESFVEEWFKPLAYALTLTREQGYPSVFYGDYYGIPTHGVPAMKSRIDPILEARQKYAYGRQNDYLDHHNIIGWTREGNTAHPNSGLATIMSDGAGGNKWMFVGRNKAGQVWTDITGNRAGTVTINADGWGNFSVNGGSVSIWVNK

SEQ ID NO: 21933 - protein, 485 aa, Bacillus subtilis
HHNGTNGTMMQYFEWYLPNDGNHWNRLRSDASNLKDKGISAVWIPPAFKGASQNDVGYGAYDLYDLGEFNQKGTIRTKYGTRNQLQAAVNALKSNGIQVYGDVVMNHKGGADATEMVRAVEVNPNNRNQEVSGEYTIEAWTKFDFPGRGNTHSNFKWRWYHFDGVDWDQSRKLNNRIYKFRGDGKGWDWEVDTENGNYDYLMYADIDMDHPEVVNELRNWGVWYTNTLGLDGFRIDAVKHIKYSFTRDWINHVRSATGKNMFAVAEFWKNDLGAIENYLNKTNWNHSVFDVPLHYNLYNASKSGGNYDMRQIFNGTVVQRHPMHAVTFVDNHDSQPEEALESFVEEWFKPLAYALTLTREQGYPSVFYGDYYGIPTHGVPAMKSKIDPILEARQKYAYGRQNDYLDHHNIIGWTREGNTAHPNSGLATIMSDGAGGNKWMFVGRNKAGQVWTDITGNRAGTVTINADGWGNFSVNGGSVSIWVNK

SEQ ID NO: 21934 - protein, 483 aa, Synthetic construct
HHVGTNGTMMQYFEWYLPNDGNHWNRLRSDASNLKDKGISAVWIPPAWKGASQNDVGYGAYDLYDLGEFNQKGTIRTKYGTRNQLQAAVNALKSNGIQVYGDVVMNHKGGADATEMVKAVEVNPNNRNQEVSGEYTIEAWTKFDFPGRGNTHSNFKWRWYHFDGVDWDQSRKLNNRIYKFRGKGWDWEVDTEFGNYDYLMYADIDMDHPEVVNELRNWGVWYTNTLGLDGFRIDAVKHIKYSFTRDWINHVRSATGKNMFAVAEFWKNDLGAIENYLNKTNWNHSVFDVPLHYNLYNASKSGGNYDMRQIFNGTVVQKHPMHAVTFVDNHDSQPEEALESFVEEWFKPLAYALTLTREQGYPSVFYGDYYGIPTHGVPAMKSKIDPILEARQKYAYGRQNDYLDHHNIIGWTREGNTAHPNSGLATIMSDGAGGNKWMFVGRNKAGQVWTDITGNKAGTVTINADGWGNFSVXGGSVSIWVNK

SEQ ID NO: 21935 - protein, 485 aa, Bacillus subtilis
HHNGTNGTMMQYFEWYLPNDGNHWNRLRSDASNLKDKGISAVWIPPAWKGASQNDVGYGAYDLYDLGEFNQKGTIRTKYGTRNQLQAAVNALKSNGIQVYGDVVMNHKGGADATEMVRAVEVNPNNRNQEVSGEYTIEAWTKFDFPGRGNTHSNFKWRWYHFDGVDWDQSRKLNNRIYKFRGDGKGWDWEVDTENGNYDYLMYADIDMDHPEVVNELRNWGVWYTNTLGLDGFRIDAVKHIKYSFTRDWINHVRSATGKNMFAVAEFWKNDLGAIQNYLNKTNWNHSVFDVPLHYNLYNASKSGGNYDMRQIFNGTVVQRHPMHAVTFVDNHDSQPEEALESFVEEWFKPLAYALTLTREQGYPSVFYGDYYGIPTHGVPAMKSKIDPILEARQKYAYGRQNDYLDHHNIIGWTREGNTAHPNSGLATIMSDGAGGNKWMFVGRNKAGQVWTDITGNRAGTVTINADGWGNFSVNGGSVSIWVNK

SEQ ID NO: 21936 - protein, 485 aa, Bacillus subtilis
HHNGTNGTMMQYFEWYLPNDGNHWNRLRSDASNLKDKGISAVWIPPAWKGASQNDVGYGAYDLYDLGEFNQKGTIRTKYGTRNQLQAAVNALKSNGIQVYGDVVMNHKGGADATEMVRAVEVNPNNRNQEVSGEYTIEAWTKFDFPGRGNTHSNFKWRWYHFDGVDWDQSRKLNNRIYKFRGDGKGWDWEVDTENGNYDYLMYADIDMDHPEVVNELRNWGVWYTNTLGLDGFRIDAVKHIKMSFTRDWINHVRSATGKNMFAVAEFWKNDLGAIENYLNKTNWNHSVFDVPLHYNLYNASKSGGNYDMRQIFNGTVVQRHPMHAVTFVDNHDSQPEEALESFVEEWFKPLAYALTLTREQGYPSVFYGDYYGIPTHGVPAMKSKIDPILEARQKYAYGRQNDYLDHHNIIGWTREGNTAHPNSGLATIMSDGAGGNKWMFVGRNKAGQVWTDITGNRAGTVTINADGWGNFSVNGGSVSIWVNK

SEQ ID NO: 21937 - protein, 484 aa, Bacillus sp.
HHNGTNGTMMQYFEWHLPNDGQHWNRLRNDAANLKNLGINAVWIPPAWKGTSQNDVGYGAYDLYDLGEFNQKGTIRTKYGTRSQLQSAIARLQNNGIQVYGDVVMNHKGGADGTEWVQAVEVNPSNRNQEVTGEYTIEAWTKFDFPGRGNTHSSFKWRWYHFDGTDWDHSRQLNNRIYKFTGMAWDWEVDTENGNYDYLMYADVDMDHPEVINELRRWGVWYTNTLNLDGFRIDAVKHIKYSFTRDWLNHVRSTTGKNNMFAVAEFWKNDLGAIENYLHKNNWNHSVFDVPLHYNLYNASKSGGNYDMRQILNGTVVSKHPIHAVTFVDNHDSQPAEALESFVEAWFKPLAYALILTREQGYPSVFYGDYYGIPTHGVAAMKGKIDPILEARQKYAYGTQHDYLDHHNIIGWTREGNSAHPNSGLATIMSDGPGGSKWMYVGRHKAGQVWRDITGNRTGTVTINADGWGNFSVNGGSVSIWVNK

SEQ ID NO: 21938 - protein, 485 aa, Bacillus subtilis
HHNGTNGTMMQYFEWYLPNDGNHWNRLRSDASNLKDKGISAVWIPPAWKGASQNDVGYGAYDLYDLGEFNQKGTIRTKYGTRNQLQAAVNALKSNGIQVYGDVVMNHKGGADATEMVRAVEVNPNNRNQEVSGEYTIEAWTKFDFPGRGNTHSNFKWRWYHFDGVDWDQSRKLNNRIYKFRGDGKGWDWEVDTENGNYDYLMYADIDMDHPEVVNELRNWGVWYTNTLGLDGFRIDAVKHIKYSFTRDWINHVRSATGKNMFAVAEFWKNDLGAIENYLNKTNWNHSVFDVPLHYNLYNASKSGGNYDMRQIFNGTVVQRHPMHAVTFVDNHDSQPEEALESFVEEWFKPLAYALTLTREQGYPSIFYGDYYGIPTHGVPAMKSKIDPILEARQKYAYGRQNDYLDHHNIIGWTREGNTAHPNSGLATIMSDGAGGNKWMFVGRNKAGQVWTDITGNRAGTVTINADGWGNFSVNGGSVSIWVNK

SEQ ID NO: 21939 - protein, 485 aa, Bacillus sp. 707
HHNGTNGTMMQYFEWYLPNDGNHWNRLNSDASNLKSKGITAVWIPPAWKGASQNDVGYGAYDLYDLGEFNQKGTVRTKYGTRSQLQAAVTSLKNNGIQVYGDVVMNHKGGADATEMVRAVEVNPNNRNQEVTGEYTIEAWTRFDFPGRGNTHSSFKWRWYHFDGVDWDQSRRLNNRIYKFRGHGKAWDWEVDTENGNYDYLMYADIDMDHPEVVNELRNWGVWYTNTLGLDGFRIDAVKHIKYSFTRDWINHVRSATGKNMFAVAEFWKNDLGAIENYLQKTNWNHSVFDVPLHYNLYNASKSGGNYDMRNIFNGTVVQRHPSHAVTFVDNHDSQPEEALESFVEEWFKPLAYALTLTREQGYPSVFYGDYYGIPTHGVPAMRSKIDPILEARQKYAYGKQNDYLDHHNIIGWTREGNTAHPNSGLATIMSDGAGGSKWMFVGRNKAGQVWSDITGNRPGTVTINADGWGNFSVNGGSVSIWVNK

SEQ ID NO: 21940 - protein, 485 aa, Bacillus subtilis
HHNGTNGTMMQYFEWYLPNDGNHWNRLRSDASNLKDKGISAVWIPPAWKGASQNDVGYGAYDLYDLGEFNQKGTIRTKYGTRNQLQAAVNALKSNGIQVYGDVVMNHKGGADATEMVRAVEVNPNNRNQEVSGEYTIEAWTKFDFPGRGNTHSNFKWRWYHFDGVDWDQSRKLNNRIYKFRGDGKGWDWEVDTENGNYDYLMHADIDMDHPEVVNELRNWGVWYTNTLGLDGFRIDAVKHIKYSFTRDWINHVRSATGKNMFAVAEFWKNDLGAIENYLNKTNWNHSVFDVPLHYNLYNASKSGGNYDMRQIFNGTVVQRHPMHAVTFVDNHDSQPEEALESFVEEWFKPLAYALTLTREQGYPSVFYGDYYGIPTHGVPAMKSKIDPILEARQKYAYGRQNDYLDHHNIIGWTREGNTAHPNSGLATIMSDGAGGNKWMFVGRNKAGQVWTDITGNRAGTVTINADGWGNFSVNGGSVSIWVNK

SEQ ID NO: 21941 - protein, 485 aa, Bacillus subtilis
HHNGTNGTMMQYFEWYLPNDGNHWNRLRSDASNLKDKGISAVWIPPAWKGASQNDVGYGAYDLYDLGEFNQKGTIRTKYGTRNQLQAAVNALKSNGIQVYGDVVMNHKGGADATEMVRAVEVNPNNRNQEVSGEYTIEAWTKFDFPGRGNTHSNFKWRWYHFDGVDWDQSRKLNNRIYKFRGDGKGWDWEVDTENGNYDYLMYADIDMDHPEVVNELRNWGVWYTNTLGLDGFRIDAVKHIKYSFTRDWINHVRSATGKNMFAVAEFWKNDLGAIENYLNKTNWNHSVFDVPLHYNLYNASKSGGNYDMRQIFNGTVVQRHPMHAVTFVDNHDTQPEEALESFVEEWFKPLAYALTLTREQGYPSVFYGDYYGIPTHGVPAMKSKIDPILEARQKYAYGRQNDYLDHHNIIGWTREGNTAHPNSGLATIMSDGAGGNKWMFVGRNKAGQVWTDITGNRAGTVTINADGWGNFSVNGGSVSIWVNK

SEQ ID NO: 21942 - protein, 485 aa, Bacillus subtilis
HHNGTNGTMMQYFEWYLPNDGNHWNRLRSDASNLKDKGISAVWIPPAWKGASQNDVGYGAYDLYDLGEFNQKGTIRTKYGTRNQLQAAVNALKSNGIQVYGDVVMNHKGGADATEMVRAVEVNPNNRNQEVSGEYTIEAWTKFDFPGRGNTHSNFKWRWYHFDGVDHDQSRKLNNRIYKFRGDGKGWDWEVDTENGNYDYLMYADIDMDHPEVVNELRNWGVWYTNTLGLDGFRIDAVKHIKYSFTRDWINHVRSATGKNMFAVAEFWKNDLGAIENYLNKTNWNHSVFDVPLHYNLYNASKSGGNYDMRQIFNGTVVQRHPMHAVTFVDNHDSQPEEALESFVEEWFKPLAYALTLTREQGYPSVFYGDYYGIPTHGVPAMKSKIDPILEARQKYAYGRQNDYLDHHNIIGWTREGNTAHPNSGLATIMSDGAGGNKWMFVGRNKAGQVWTDITGNRAGTVTINADGWGNFSVNGGSVSIWVNK

SEQ ID NO: 21943 - protein, 485 aa, Bacillus subtilis
HHNGTNGTMMQYFEWYLPNDGNHWNRLRSDASNLKDKGISAVWIPPAWKGASQNDVGYGAYDLYDLGEFNQKGTIRTKYGTRNQLQAAVNALKSNGIQVYGDVVMNHKGGADATEMVRAVEVNPNNRNQEVSGEYTIEAWTKFDFPGRGNTHSNFKWRWYHFDGVDWDQSRKLNNRIYKFRGDGKGWDHEVDTENGNYDYLMYADIDMDHPEVVNELRNWGVWYTNTLGLDGFRIDAVKHIKYSFTRDWINHVRSATGKNMFAVAEFWKNDLGAIENYLNKTNWNHSVFDVPLHYNLYNASKSGGNYDMRQIFNGTVVQRHPMHAVTFVDNHDSQPEEALESFVEEWFKPLAYALTLTREQGYPSVFYGDYYGIPTHGVPAMKSKIDPILEARQKYAYGRQNDYLDHHNIIGWTREGNTAHPNSGLATIMSDGAGGNKWMFVGRNKAGQVWTDITGNRAGTVTINADGWGNFSVNGGSVSIWVNK

SEQ ID NO: 21944 - protein, 483 aa, Synthetic construct
HHFGTNGTMMQYFEWYLPNDGNHWNRLRSDASNLKDKGISAVWIPPAWKGASQNDVGYGAYDLYDLGEFNQKGTIRTKYGTRNQLQAAVNALKSNGIQVYGDVVMNHKGGADATEMVKAVEVNPNNRNQEVSGEYTIEAWTKFDFPGRGNTHSNFKWRWYHFDGVDWDQSRKLNNRIYKFRGKGWDWEVDTEFGNYDYLMYADIDMDHPEVVNELRNWGVWYTNTLGLDGFRIDAVKHIKYSFTRDWINHVRSATGKNMFAVAEFWKNDLGAIENYLNKTNWNHSVFDVPLHYNLYNASKSGGNYDMRQIFXGTVVQKHPMHAVTFVDNHDSQPEEALESFVEEWFKPLAYALTLTREQGYPSVFYGDYYGIPTHGVPAMKSKIDPILEARQKYAYGRQNDYLDHHNIIGWTREGNTAHPNSGLATIMSDGAGGNKWMFVGRNKAGQVWTDITGNKAGTVTINADGWGNFSVNGGSVSIWVNK

SEQ ID NO: 21945 - protein, 485 aa, Bacillus licheniformis
HHNGTNGTMMQTFEWHLPNDGNHWNRLRDDAANLKSKGITAVWIPPAWKGTSQNDVGYGAYDLYDLGEFNQKGTVRTKYGTRSQLQGAVTSLKNNGIQVYGDVVMNHKGGADGTEMVNAVEVNRSNRNQEISGEYTIEAWTKFDFPGRGNTHSNFKWRWYHFDGTDWDQSRQLQNKIYKFRGTGKAWDWEVDIENGNYDYLMYADIDMDHPEVINELRNWGVWYTNTLNLDGFRIDAVKHIKYSYTRDWLTHVRNTTGKPMFAVAEFWKNDLAAIENYLNKTSWNHSVFDVPLHYNLYNASNSGGYFDMRNILNGSVVQKHPIHAVTFVDNHDSQPGEALESFVQSWFKPLAYALILTREQGYPSVFYGDYYGIPTHGVPSMKSKIDPLLQARQTYAYGTQHDYFDHHDIIGWTREGDSSHPNSGLATIMSDGPGGNKWMYVGKHKAGQVWRDITGNRSGTVTINADGWGNFTVNGGAVSVWVKQ

SEQ ID NO: 21946 - protein, 484 aa, Bacillus sp.
HHNGTNGTMMQYFEWHLPNDGQHWNRLRNDAANLKNLGITAVWIPPAWKGTSQNDVGYGAYDLYDLGEFNQKGTIRTKYGTRSQLQSAIARLQNNGIQVYGDVVMNHKGGADGTERVQAVEVNPSNRNQEVTGEYTIEAWTKFDFPGRGNTHSSFKWRWYHFDGTDWDQSRRLNNRIYKFTGKAWDWEVDTENGNYDYLMYADVDMDHPEVINELRRWGVWYTNTLNLDGFRIDAVKHIKYSFERDWLNHVRSTTGKNNMFAVAEFWKNDLGAIENYLHKSNWNHSVDDVPLHYNLYNASKSGGNYDMRQILNGTVVSKHPIHAVTFVDNHDSQPAEALESFVEAWFKPLAYALILTREQGYPSVFYGDYYGIPTHGVAAMKGKIDPILEARQKYAYGTQHDYLDHHNIIGWTREGNSAHPNSGLATIMSDGPGGSKWMYVGRHKAGQVWRDITGNRTGTVTINADGWGNFSVNGGSVSIWVNK

SEQ ID NO: 21947 - protein, 485 aa, Bacillus sp.
HHNGTNGTLMQYFEWYLPNDGNHWNRLRSDASNLKDKGISAVWIPPAWKGASQNDVGYGAYDLYDLGEFNQKGTIRTKYGTRNQLQAAVNALKSNGIQVYGDVVMNHKGGADATEMVRAVEVNPNNRNQEVSGEYTIEAWTKFDFPGRGNTHSNFKWRWYHFDGVDWDQSRKLNNRIYKFRGDGKGWDWEVDTENGNYDYLIYADIDMDHPEVVNELRNWGVWYTNTLGLDGFRIDAVKHIKYSFTRDWINHVRSATGKNMFAVAEFWKNDLGAIENYLNKTNWNHSVFDVPLHYNLYNASKSGGNYDMRQIFNGTVVQRHPMHAVTFVDNHDSQPEESLESFVEEWFKPLAYALTLTREQGYPSVFYGDYYGIPTHGVPAMKSKIDPILEARQKYAYGRQNDYLDHHNIIGWTREGNTAHPNSGLATIMSDGAGGNKWMFVGRNKAGQVWTDITGNRAGTVTINADGWGNFSVNGGSVSIWVNK

SEQ ID NO: 21948 - protein, 485 aa, Synthetic construct
HHNGTNGTMMQYFEWYLPNDGNHWNRLRSDASNLKDKGISAVWIPPAWKGASQNDVGYGAYDLYDLGEFNQKGTIRTKYGTRNQLQAAVNALKSNGIQVYGDVVMNHKGGADATEMVRAVEVNPNNRNQEVTGEYTIEAWTRFDFPGRGNTHSSFKWRWYHFDGVDWDQSRRLNNRIYKFRGHGKAWDWEVDTENGNYDYLMYADIDMDHPEVVNELRNWGVWYTNTLGLDGFRIDAVKHIKYSFTRDWINHVRSATGKNMFAVAEFWKNDLGAIENYLNKTNWNHSVFDVPLHYNLYNASKSGGNYDMRQIFNGTVVQRHPMHAVTFVDNHDSQPEEALESFVEEWFKPLAYALTLTREQGYPSVFYGDYYGIPTHGVPAMKSKIDPILEARQKYAYGRQNDYLDHHNIIGWTREGNTAHPNSGLATIMSDGAGGNKWMFVGRNKAGQVWTDITGNRAGTVTINADGWGNFSVNGGSVSIWVNK

SEQ ID NO: 21949 - protein, 485 aa, Synthetic construct
HHNGTNGTMMQYFEWYLPNDGNHWNRLNSDASNLKSKGITAVWIPPAWKGASQNDVGYGAYDLYDLGEFNQKGTVRTKYGTRSQLQAAVTSLKNNGIQVYGDVVMNHKGGADATEMVRAVEVNPNNRNQEVSGEYTIEAWTKFDFPGRGNTHSNFKWRWYHFDGVDWDQSRKLNNRIYKFRGDGKGWDWEVDTENGNYDYLMYADIDMDHPEVVNELRNWGVWYTNTLGLDGFRIDAVKHIKYSFTRDWINHVRSATGKNMFAVAEFWKNDLGAIENYLQKTNWNHSVFDVPLHYNLYNASKSGGNYDMRNIFNGTVVQRHPSHAVTFVDNHDSQPEEALESFVEEWFKPLAYALTLTREQGYPSVFYGDYYGIPTHGVPAMRSKIDPILEARQKYAYGKQNDYLDHHNIIGWTREGNTAHPNSGLATIMSDGAGGSKWMFVGRNKAGQVWSDITGNRTGTVTINADGWGNFSVNGGSVSIWVNK

SEQ ID NO: 21950 - protein, 485 aa, Bacillus subtilis
HHNGTNGTMMQYFEWYLPNDGNHWNRLRSDASNLKDKGISAVWIPPAWKGASQNDVGYGAYDLYDLGEFNQKGTIRTKYGTRNQLQAAVNALKSNGIQVYGDVVMNHKGGADATEMVRAVEVNPNNRNQEVSGEYTIEAWTRFDFPGRGNTHSNFKWRWYHFDGVDWDQSRKLNNRIYKFRGDGKGWDWEVDTENGNYDYLMYADIDMDHPEVVNELRNWGVWYTNTLGLDGFRIDAVKHIKYSFTRDWINHVRSATGKNMFAVAEFWKNDLGAIENYLNKTNWNHSVFDVPLHYNLYNASKSGGNYDMRQIFNGTVVQRHPMHAVTFVDNHDSQPEEALESFVEEWFKPLAYALTLTREQGYPSVFYGDYYGIPTHGVPAMKSKIDPILEARQKYAYGRQNDYLDHHNIIGWTREGNTAHPNSGLATIMSDGAGGNKWMFVGRNKAGQVWTDITGNRAGTVTINADGWGNFSVNGGSVSIWVNK

SEQ ID NO: 21951 - protein, 485 aa, Bacillus subtilis
HHNGTNGTMMQYFEWYLPNDGNHWNRLRSDASNLKDKGISAVWIPPAWKGASQNDVGYGAYDLYDLGEFNQKGTIRTKYGTRNQLQAAVNALKSNGIQVYGDVVMNHKGGADATEMVRAVEVNPNNRNQEVSGEYTIEAWTKFDFPGRGNTHSNFKWRWYHFDGVDWDQSRKLNNRIYKFRGDGKGWDWEVDTENGNYDYLMYADIDMDHPEVVNELRNWGVWYTNTLGLDGFRIDAVKHIKYSFTRDWINHVRSATGKNMFAVAEFWKNDLGAIENYLNKTNWNHSVFDVPLHYNLWNASKSGGNYDMRQIFNGTVVQRHPMHAVTFVDNHDSQPEEALESFVEEWFKPLAYALTLTREQGYPSVFYGDYYGIPTHGVPAMKSKIDPILEARQKYAYGRQNDYLDHHNIIGWTREGNTAHPNSGLATIMSDGAGGNKWMFVGRNKAGQVWTDITGNRAGTVTINADGWGNFSVNGGSVSIWVNK

SEQ ID NO: 21952 - protein, 485 aa, Bacillus subtilis
HHNGTNGTMMQYFEWYLPNDGNHWNRLRSDASNLKDKGISAVWIPPAWKGASQNDVGYGAYDLYDLGEFNQKGTIRTKYGTRNQLQAAVNALKSNGIQVYGDVVMNHKGGADATEMVRAVEVNPNNRNQEVSGEYTIEAWTKFDFPGRGNTHSNFKWRWYHFDGVDWDQSRKLNNRIYKFRGDGKGWDWEVDTENGNYDYLMYADIDMDHPEVVNELRNWGVWYTNTLGLDGFRIDAVKHIKYSFTRDWINHVRSATGKNMFAVAEFWKNDLGAIENYLNKTNWNHSVFDVPLHYNLFNASKSGGNYDMRQIFNGTVVQRHPMHAVTFVDNHDSQPEEALESFVEEWFKPLAYALTLTREQGYPSVFYGDYYGIPTHGVPAMKSKIDPILEARQKYAYGRQNDYLDHHNIIGWTREGNTAHPNSGLATIMSDGAGGNKWMFVGRNKAGQVWTDITGNRAGTVTINADGWGNFSVNGGSVSIWVNK

SEQ ID NO: 21953 - protein, 485 aa, Bacillus subtilis
HHNGTNGTMMQYFEWYLPNDGNHWNRLRSDASNLKDKGISAVWIPPAWKGASQNDVGYGAYDLYDLGEFNQKGTIRTKYGTRNQLQAAVNALKSNGIQVYGDVVMNHRGGADATEMVRAVEVNPNNRNQEVSGEYTIEAWTKFDFPGRGNTHSNFKWRWYHFDGVDWDQSRKLNNRIYKFRGDGKGWDWEVDTENGNYDYLMYADIDMDHPEVVNELRNWGVWYTNTLGLDGFRIDAVKHIKYSFTRDWINHVRSATGKNMFAVAEFWKNDLGAIENYLNKTNWNHSVFDVPLHYNLYNASKSGGNYDMRQIFNGTVVQRHPMHAVTFVDNHDSQPEEALESFVEEWFKPLAYALTLTREQGYPSVFYGDYYGIPTHGVPAMKSKIDPILEARQKYAYGRQNDYLDHHNIIGWTREGNTAHPNSGLATIMSDGAGGNKWMFVGRNKAGQVWTDITGNRAGTVTINADGWGNFSVNGGSVSIWVNK

SEQ ID NO: 21954 - protein, 485 aa, Bacillus sp. 707
HHNGTNGTMMQYFEWYLPNDGNHWNRLNSDASNLKSKGITAVWIPPAWKGASQNDVGYGAYDLYDLGEFNQKGTVRTKYGTRSQLQAAVTSLKNNGIQVYGDVVMNHKGGADATEMVRAVEVNPNNRNQEVTGEYTIEAWTRFDFPGRGNTHSSFKWRWYHFDGVDWDQSRRLNNRIYKFRGHGKAWDWEVDTENGNYDYLMYADIDMDHPEVVNELRRWGVWYTNTLGLDGFRIDAVKHIKYSFTRDWINHVRSATGKNMFAVAEFWKNDLGAIENYLQKTNWNHSVFDVPLHYNLYNASKSGGNYDMRNIFNGTVVQRHPSHAVTFVDNHDSQPEEALESFVEEWFKPLAYALTLTREQGYPSVFYGDYYGIPTHGVPAMRSKIDPILEARQKYAYGKQNDYLDHHNIIGWTREGNTAHPNSGLATIMSDGAGGSKWMFVGRNKAGQVWSDITGNRTGTVTINADGWGNFSVNGGSVSIWVNK

SEQ ID NO: 21955 - protein, 485 aa, Bacillus subtilis
HHNGTNGTMMQYFEWYLPNDGNHWNRLRSDASNLKDKGISAVWIPPAWKGASQNDVGYGAYDLYDLGEFNQKGTIRTKYGTRNQLQAAVNALKSNGIQVYGDVVMNHKGGADATEMVRAVEVNPNNRNQEVSGEYTIEAWTKFDFPGRGNTHSNFKWRWYHFDGVDWDQSRKLNNRIYKFRGDGKGWDWEVDTENGNYDYLMYADIDMDHPEVVNELRNWGVWYTNTLGLDGFRIDAVKHIKYSFLRDWINHVRSATGKNMFAVAEFWKNDLGAIENYLNKTNWNHSVFDVPLHYNLYNASKSGGNYDMRQIFNGTVVQRHPMHAVTFVDNHDSQPEEALESFVEEWFKPLAYALTLTREQGYPSVFYGDYYGIPTHGVPAMKSKIDPILEARQKYAYGRQNDYLDHHNIIGWTREGNTAHPNSGLATIMSDGAGGNKWMFVGRNKAGQVWTDITGNRAGTVTINADGWGNFSVNGGSVSIWVNK

SEQ ID NO: 21956 - protein, 483 aa, Synthetic construct
HHSGTNGTMMQYFEWYLPNDGNHWNRLRSDASNLKDKGISAVWIPPAWKGASQNDVGYGAYDLYDLGEFNQKGTIRTKYGTRNQLQAAVNALKSNGIQVYGDVVMNHKGGADATEMVKAVEVNPNNRNQEVSGEYTIEAWTKFDFPGRGNTHSNFKWRWYHFDGVDWDQSRKLNNRIYKFRGKGWDWEVDTEFGNYDYLMYADIDMDHPEVVNELRNWGVWYTNTLGLDGFRIDAVKHIKYSFTRDWINHVRSATGKNMFAVAEFWKNDLGAIENYLNKTNWNHSVFDVPLHYNLYNASKSGGNYDMRQIFXGTVVQKHPMHAVTFVDNHDSQPEEALESFVEEWFKPLAYALTLTREQGYPSVFYGDYYGIPTHGVPAMKSKIDPILEARQKYAYGRQNDYLDHHNIIGWTREGNTAHPNSGLATIMSDGAGGNKWMFVGRNKAGQVWTDITGNKAGTVTINADGWGNFSVNGGSVSIWVNK

SEQ ID NO: 21957 - protein, 483 aa, Synthetic construct
HHLGTNGTMMQYFEWYLPNDGNHWNRLRSDASNLKDKGISAVWIPPAWKGASQNDVGYGAYDLYDLGEFNQKGTIRTKYGTRNQLQAAVNALKSNGIQVYGDVVMNHKGGADATEMVKAVEVNPNNRNQEVSGEYTIEAWTKFDFPGRGNTHSNFKWRWYHFDGVDWDQSRKLNNRIYKFRGKGWDWEVDTEFGNYDYLMYADIDMDHPEVVNELRNWGVWYTNTLGLDGFRIDAVKHIKYSFTRDWINHVRSATGKNMFAVAEFWKNDLGAIENYLNKTNWNHSVFDVPLHYNLYNASKSGGNYDMRQIFXGTVVQKHPMHAVTFVDNHDSQPEEALESFVEEWFKPLAYALTLTREQGYPSVFYGDYYGIPTHGVPAMKSKIDPILEARQKYAYGRQNDYLDHHNIIGWTREGNTAHPNSGLATIMSDGAGGNKWMFVGRNKAGQVWTDITGNKAGTVTINADGWGNFSVNGGSVSIWVNK

SEQ ID NO: 21958 - protein, 485 aa, Bacillus subtilis
HHNGTNGTMMQYFEWYLPNDGNHWNRLRSDASNLKDKGISAVWIPPAWKGASQNDVGYGAYDLYDLGEFNQKGTIRTKYGTRNQLQAAVNALKSNGIQVYGDVVMNHKGGADATEMVRAVEVNPNNRNQEVSGEYTIEAWTKFDFPGRGNTHSNFKWRWYHFDGVDWDQSRKLNNRIYKFRGDGKGWDWEVDTENGNYDYLMYADIDMDHPEVVNELRNWGVWYTNTLGLDGFRIDAVKHIPYSFTRDWINHVRSATGKNMFAVAEFWKNDLGAIENYLNKTNWNHSVFDVPLHYNLYNASKSGGNYDMRQIFNGTVVQRHPMHAVTFVDNHDSQPEEALESFVEEWFKPLAYALTLTREQGYPSVFYGDYYGIPTHGVPAMKSKIDPILEARQKYAYGRQNDYLDHHNIIGWTREGNTAHPNSGLATIMSDGAGGNKWMFVGRNKAGQVWTDITGNRAGTVTINADGWGNFSVNGGSVSIWVNK

SEQ ID NO: 21959 - protein, 485 aa, Bacillus sp. 707
HHNGTNGTMMQYFEWYLPNDGNHWNRLNSDASNLKSKGITAVWIPPAWKGASQNDVGYGAYDLYDLGEFNQKGTVRTKYGTRSQLQAAVTSLKNNGIQVYGDVVMNHKGGADATEMVRAVEVNPNNRNQEVTGEYTIEAWTRFDFPGRGNTHSSFKWRWYHFDGVDWDQSRRLNNRIYKFRGHGKAWDWEVDTENGNYDYLMYADIDMDHPEVVNELRNWGVWYTNTLGLDGFRIDAVKHIKYSFTRDWINHVRSATGKNMFAVAEFWKNDLGAIENYLQKTNWNHSVFDVPLHYNLYNASKSGGNYDMRNIFNGTVVQRHPSHAVTFVDNHDSQPEEALESFVEEWFKPLAYALTLTREQGYPSVFYGDYYGIPTHGVPAMRSKIDPILEARQKYAYGKQNDYLDHHNIIGWTREGNTAHPNSGLATIMSDGAGGSKWMFVGRNKAGQVWSDITGNKTGTVTINADGWGNFSVNGGSVSIWVNK

SEQ ID NO: 21960 - protein, 485 aa, Bacillus subtilis
HHNGTNGTMMQYFEWYLPNDGNHWNRLRSDASNLKDKGISAVWIPPAWKGASQNDVGYGAYDLYDLGEFNQKGTIRTKYGTRNQLQAAVNALKSNGIQVYGDVVMNHKGGADATEMVRAVEVNPNNRNQEVSGEHTIEAWTKFDFPGRGNTHSNFKWRWYHFDGVDWDQSRKLNNRIYKFRGDGKGWDWEVDTENGNYDYLMYADIDMDHPEVVNELRNWGVWYTNTLGLDGFRIDAVKHIKYSFTRDWINHVRSATGKNMFAVAEFWKNDLGAIENYLNKTNWNHSVFDVPLHYNLYNASKSGGNYDMRQIFNGTVVQRHPMHAVTFVDNHDSQPEEALESFVEEWFKPLAYALTLTREQGYPSVFYGDYYGIPTHGVPAMKSKIDPILEARQKYAYGRQNDYLDHHNIIGWTREGNTAHPNSGLATIMSDGAGGNKWMFVGRNKAGQVWTDITGNRAGTVTINADGWGNFSVNGGSVSIWVNK

SEQ ID NO: 21961 - protein, 485 aa, Bacillus sp. 707
HHNGTNGTMMQYFEWYLPNDGNHWNRLNSDASNLKSKGITAVWIPPAWKGASQNDVGYGAYDLYDLGEFNQKGTVRTKYGTRSQLQAAVTSLKNNGIQVYGDVVMNHKGGADATEMVRAVEVNPNNRNQEVTGEYTIEAWTRFDFPGRGNTHSSFKWRWYHFDGVDWDQSRQLNNRIYKFRGHGKAWDWEVDTENGNYDYLMYADIDMDHPEVVNELRNWGVWYTNTLGLDGFRIDAVKHIKYSFTRDWINHVRSATGKNMFAVAEFWKNDLGAIENYLQKTNWNHSVFDVPLHYNLYNASKSGGNYDMRNIFNGTVVQRHPSHAVTFVDNHDSQPEEALESFVEEWFKPLAYALTLTREQGYPSVFYGDYYGIPTHGVPAMRSKIDPILEARQKYAYGKQNDYLDHHNIIGWTREGNTAHPNSGLATIMSDGAGGSKWMFVGRNKAGQVWSDITGNRTGTVTINADGWGNFSVNGGSVSIWVNK

SEQ ID NO: 21962 - protein, 485 aa, Bacillus subtilis
HHNGTNGTMMQYFEWYLPNDGNHWNRLRSDASNLKDKGISAVWIPPAWKGASQNDVGYGAYDLYDLGEFNQKGTIRTKYGTRNQLQAAVNALKSNGIQVYGDVVMNHKGGADATEMVRAVEVNPNNRNQEVSGEYTIEAWTKFDFPGRGNTHSNFKWRWYHFDGVDWDQSRKLNNRIYKFRGDGKGWDWEVDTENGNYDYLMYADIDMDHPEVVNELRNWGVWYTNTLGLDGFRLDAVKHIKYSFTRDWINHVRSATGKNMFAVAEFWKNDLGAIENYLNKTNWNHSVFDVPLHYNLYNASKSGGNYDMRQIFNGTVVQRHPMHAVTFVDNHDSQPEEALESFVEEWFKPLAYALTLTREQGYPSVFYGDYYGIPTHGVPAMKSKIDPILEARQKYAYGRQNDYLDHHNIIGWTREGNTAHPNSGLATIMSDGAGGNKWMFVGRNKAGQVWTDITGNRAGTVTINADGWGNFSVNGGSVSIWVNK

SEQ ID NO: 21963 - protein, 485 aa, Bacillus subtilis
HHNGTNGTMMQYFEWYLPNDGNHWNRLRSDASNLKDKGISAVWIPPAWKGTSQNDVGYGAYDLYDLGEFNQKGTIRTKYGTRNQLQAAVNALKSNGIQVYGDVVMNHKGGADATEMVRAVEVNPNNRNQEVSGEYTIEAWTKFDFPGRGNTHSNFKWRWYHFDGVDWDQSRKLNNRIYKFRGDGKGWDWEVDTENGNYDYLMYADIDMDHPEVVNELRNWGVWYTNTLGLDGFRIDAVKHIKYSFIRDWINHVRSATGKNMFAVAEFWKNDLGAIENYLNKTNWNHSVFDVPLHYNLYNASKSGGNYDMRQIFNGTVVQRHPMHAVTFVDNHDTQPEEALESFVEEWFKPLAYALTLTREQGYPSVFYGDYYGIPTHGVPAMKSKIDPILEARQKYAYGRQNDYLDHHNIIGWTREGNTAHPNSGLATIMSDGAGGNKWMFVGRNKAGQVWTDITGNRAGTVTINADGWGNFSVNGGSVSIWVNK

SEQ ID NO: 21964 - protein, 483 aa, Synthetic construct
HHGGTNGTMMQYFEWYLPNDGNHWNRLRSDASNLKDKGISAVWIPPAWKGASQNDVGYGAYDLYDLGEFNQKGTIRTKYGTRNQLQAAVNALKSNGIQVYGDVVMNHKGGADATEMVKAVEVNPNNRNQEVSGEYTIEAWTKFDFPGRGNTHSNFKWRWYHFDGVDWDQSRKLNNRIYKFRGKGWDWEVDTEFGNYDYLMYADIDMDHPEVVNELRNWGVWYTNTLGLDGFRIDAVKHIKYSFTRDWINHVRSATGKNMFAVAEFWKNDLGAIENYLNKTNWNHSVFDVPLHYNLYNASKSGGNYDMRQIFXGTVVQKHPMHAVTFVDNHDSQPEEALESFVEEWFKPLAYALTLTREQGYPSVFYGDYYGIPTHGVPAMKSKIDPILEARQKYAYGRQNDYLDHHNIIGWTREGNTAHPNSGLATIMSDGAGGNKWMFVGRNKAGQVWTDITGNKAGTVTINADGWGNFSVNGGSVSIWVNK

SEQ ID NO: 21965 - protein, 485 aa, Bacillus sp. 707
HHNGTNGTMMQYFEWYLPNDGNHWNRLNSDASNLKSKGITAVWIPPAWKGASQNDVGYGAYDLYDLGEFNQKGTVRTKYGTRSQLQAAVTSLKNNGIQVYGDVVMNHKGGADATEMVRAVEVNPNNRNQEVTGEYTIEAWTRFDFPGRGNTHSSFKWRWYHFDGVDWDQSRRLNNRIYKFRGHGKAWDWEVDTENGNYDYLMYADIDMDHPEVVNELRNWGVWYTNTLGLDGFRIDAVKHIKYSFTRDWINHVRSATGKNMFAVAEFWKNDLGAIENYLQKTNWNHSVFDVPLHYNLYNASKSGGNYDMRKIFNGTVVQRHPSHAVTFVDNHDSQPEEALESFVEEWFKPLAYALTLTREQGYPSVFYGDYYGIPTHGVPAMRSKIDPILEARQKYAYGKQNDYLDHHNIIGWTREGNTAHPNSGLATIMSDGAGGSKWMFVGRNKAGQVWSDITGNRTGTVTINADGWGNFSVNGGSVSIWVNK

SEQ ID NO: 21966 - protein, 485 aa, Bacillus subtilis
HHNGTNGTMMQYFEWYLPNDGNHWNRLRSDASNLKDKGISAVWIPPAWKGASQNDVGYGAYDLYDLGEFNQKGTIRTKYGTRNQLQAAVNALKSNGIQVYGDVVMNHKGGADATEMVRAVEVNPNNRNQEVSGEYTIEAWTKFDFPGRGNTHSNFKWRWYHFDGVDWDQSRKLNNRIYKFRGDGKGWDWEVDTENGNYDYLMYADIDMDHPEVVNELRNWGVWYTNTLGLDGFRIDAVKHIKYSFTRDWINHVRSATGKNLFAVAEFWKNDLGAIENYLNKTNWNHSVFDVPLHYNLYNASKSGGNYDMRQIFNGTVVQRHPMHAVTFVDNHDSQPEEALESFVEEWFKPLAYALTLTREQGYPSVFYGDYYGIPTHGVPAMKSKIDPILEARQKYAYGRQNDYLDHHNIIGWTREGNTAHPNSGLATIMSDGAGGNKWMFVGRNKAGQVWTDITGNRAGTVTINADGWGNFSVNGGSVSIWVNK

SEQ ID NO: 21967 - protein, 485 aa, Bacillus subtilis
HHNGTNGTMMQYFEWYLPNDGNHWNRLRSDASNLKDKGISAVWIPPAWKGASQNDVGYGAYDLYDLGEFNQKGTIRTKYGTRNQLQAAVNALKSNGIQVYGDVVMNHKGGADATEMVRAVEVNPNNRNQEVSGEYTIEAWTKFDFPGRGNTHSNFKWRWYHFDGVDWDQSRKLNNRIYKFRGDGKGWDWEVDTENGNYDYLMYADIDMDHPEVVNELRNWGVWYTNTLGLDGFRIDAVKHIKYSFTRDWINHVRSATGKNMFAVAEFWKNDLGAIENYLNKTNWNHSVFDVPLHYNLYNASKSGGNYDMRQIFNGTVVQRHPMHAVTFVDNHDSQPEEALESFVEEWFKPLAYALTLTREQGYPMVFYGDYYGIPTHGVPAMKSKIDPILEARQKYAYGRQNDYLDHHNIIGWTREGNTAHPNSGLATIMSDGAGGNKWMFVGRNKAGQVWTDITGNRAGTVTINADGWGNFSVNGGSVSIWVNK

SEQ ID NO: 21968 - protein, 485 aa, Bacillus subtilis
HHNGTNGTMMQYFEWYLPNDGNHWNRLRSDASNLKDKGISAVWIPPAWKGASQNDVGYGAYDLYDLGEFNQKGTIRTKYGTRNQLQAAVNALKSNGIQVYGDVVINHKGGADATEMVRAVEVNPNNRNQEVSGEYTIEAWTKFDFPGRGNTHSNFKWRWYHFDGVDWDQSRKLNNRIYKFRGDGKGWDWEVDTENGNYDYLMYADIDMDHPEVVNELRNWGVWYTNTLGLDGFRIDAVKHIKYSFTRDWINHVRSATGKNMFAVAEFWKNDLGAIENYLNKTNWNHSVFDVPLHYNLYNASKSGGNYDMRQIFNGTVVQRHPMHAVTFVDNHDSQPEEALESFVEEWFKPLAYALTLTREQGYPSVFYGDYYGIPTHGVPAMKSKIDPILEARQKYAYGRQNDYLDHHNIIGWTREGNTAHPNSGLATIMSDGAGGNKWMFVGRNKAGQVWTDITGNRAGTVTINADGWGNFSVNGGSVSIWVNK

SEQ ID NO: 21969 - protein, 485 aa, Bacillus sp.
HHNGTNGTMMQYFEWYLPNDGNHWNRLRSDASNLKDKGISAVWIPPAWKGASQNDVGYGAYDLYDLGEFNQKGTIRTKYGTRNQLQAAVNALKSNGIQVYGDVVMNHKGGADATEMVRAVEVNPNNRNQEVSGEYTIEAWTKFDFPGRGNTHSNFKWRWYHFDGVDWDQSRKLNNRIYKFRGDGKGWDWEVDTENGNYDYLTYADIDMDHPEVVNELRNWGVWYTNTLGLDGFRIDAVKHIKYSFTRDWINHVRSATGKNMFAVAEFWKNDLGAIENYLNKTNWNHSVFDVPLHYNLYNASKSGGNYDMRQIFNGTVVQRHPMHAVTFVDNHDSQPEEALESFVEEWFKPLAYALTLTREQGYPSVFYGDYYGIPTHGVPAMKSKIDPILEARQKYAYGRQNDYLDHHNIIGWTREGNTAHPNSGLATIMSDGAGGNKWMFVGRNKAGQVWTDITGNRAGTVTINADGWGNFSVNGGSVSIWVQK

SEQ ID NO: 21970 - protein, 483 aa, Synthetic construct
HHIGTNGTMMQYFEWYLPNDGNHWNRLRSDASNLKDKGISAVWIPPAWKGASQNDVGYGAYDLYDLGEFNQKGTIRTKYGTRNQLQAAVNALKSNGIQVYGDVVMNHKGGADATEMVKAVEVNPNNRNQEVSGEYTIEAWTKFDFPGRGNTHSNFKWRWYHFDGVDWDQSRKLNNRIYKFRGKGWDWEVDTEFGNYDYLMYADIDMDHPEVVNELRNWGVWYTNTLGLDGFRIDAVKHIKYSFTRDWINHVRSATGKNMFAVAEFWKNDLGAIENYLNKTNWNHSVFDVPLHYNLYNASKSGGNYDMRQIFXGTVVQKHPMHAVTFVDNHDSQPEEALESFVEEWFKPLAYALTLTREQGYPSVFYGDYYGIPTHGVPAMKSKIDPILEARQKYAYGRQNDYLDHHNIIGWTREGNTAHPNSGLATIMSDGAGGNKWMFVGRNKAGQVWTDITGNKAGTVTINADGWGNFSVNGGSVSIWVNK

SEQ ID NO: 21971 - protein, 483 aa, Synthetic construct
HHFGTNGTMMQYFEWYLPNDGNHWNRLRSDASNLKDKGISAVWIPPAWKGASQNDVGYGAYDLYDLGEFNQKGTIRTKYGTRNQLQAAVNALKSNGIQVYGDVVMNHKGGADATEMVKAVEVNPNNRNQEVSGEYTIEAWTKFDFPGRGNTHSNFKWRWYHFDGVDWDQSRKLNNRIYKFRGKGWDWEVDTEFGNYDYLMYADIDMDHPEVVNELRNWGVWYTNTLGLDGFRIDAVKHIKYSFTRDWINHVRSATGKNMFAVAEFWKNDLGAIENYLNKTNWNHSVFDVPLHYNLYNASKSGGNYDMRQIFNGTVVQKHPMHAVTFVDNHDSQPEEALESFVEEWFKPLAYALTLTREQGYPSVFYGDYYGIPTHGVPAMKSKIDPILEARQKYAYGRQNDYLDHHNIIGWTREGNTAHPNSGLATIMSDGAGGNKWMFVGRNKAGQVWTDITGNKAGTVTINADGWGNFSVXGGSVSIWVNK

SEQ ID NO: 21972 - protein, 483 aa, Synthetic construct
HHKGTNGTMMQYFEWYLPNDGNHWNRLRSDASNLKDKGISAVWIPPAWKGASQNDVGYGAYDLYDLGEFNQKGTIRTKYGTRNQLQAAVNALKSNGIQVYGDVVMNHKGGADATEMVKAVEVNPNNRNQEVSGEYTIEAWTKFDFPGRGNTHSNFKWRWYHFDGVDWDQSRKLNNRIYKFRGKGWDWEVDTEFGNYDYLMYADIDMDHPEVVNELRNWGVWYTNTLGLDGFRIDAVKHIKYSFTRDWINHVRSATGKNMFAVAEFWKNDLGAIENYLNKTNWNHSVFDVPLHYNLYNASKSGGNYDMRQIFXGTVVQKHPMHAVTFVDNHDSQPEEALESFVEEWFKPLAYALTLTREQGYPSVFYGDYYGIPTHGVPAMKSKIDPILEARQKYAYGRQNDYLDHHNIIGWTREGNTAHPNSGLATIMSDGAGGNKWMFVGRNKAGQVWTDITGNKAGTVTINADGWGNFSVNGGSVSIWVNK

SEQ ID NO: 21973 - protein, 485 aa, Bacillus sp.
HHNGTNGTLMQYFEWYLPNDGNHWNRLRSDASNLKDKGISAVWIPPAWKGASQNDVGYGAYDLYDLGEFNQKGTIRTKYGTRNQLQAAVNALKSNGIQVYGDVVMNHKGGADATEMVRAVEVNPNNRNQEVSGEYTIEAWTKFDFPGRGNTHSNFKWRWYHFDGVDWDQSRKLNNRIYKFRGDGKGWDWEVDTENGNYDYLTYADIDMDHPEVVNELRNWGVWYTNTLGLDGFRIDAVKHIKYSFTRDWINHVRSATGKNMFAVAEFWKNDLGAIENYLNKTNWNHSVFDVPLHYNLYNASKSGGNYDMRQIFNGTVVQRHPMHAVTFVDNHDSQPEESLESFVEEWFKPLAYALTLTREQGYPSVFYGDYYGIPTHGVPAMKSKIDPILEARQKYAYGRQNDYLDHHNIIGWTREGNTAHPNSGLATIMSDGAGGNKWMFVGRNKAGQVWTDITGNRAGTVTINADGWGNFSVNGGSVSIWVNK

SEQ ID NO: 21974 - protein, 485 aa, Bacillus sp. 707
HHNGTNGTMMQYFEWYLPNDGNHWNRLNSDASNLKSKGITAVWIPPAWKGASQNDVGYGAYDLYDLGEFNQKGTVRTKYGTRSQLQAAVTSLKNNGIQVYGDVVMNHKGGADATEMVRAVEVNPNNRNQEVTGEYTIEAWTRFDFPGRGNTHSSFKWRWYHFDGVDWDQSRRLNNRIYKFRGHGKAWDWEVDTENGNYDYLMYADIDMDHPEVVNELRNWGVWYTNTLGLDGFRIDAVKHIKYSFTRDWINHVRSATGKNMFAVAEFWKNDLGAIENYLQKTNWNHSVFDVPLHYNLYNASKSGGNYDMRNIFNGTVVQRHPSHAVTFVDNHDSQPEEALESFVQEWFKPLAYALTLTREQGYPSVFYGDYYGIPTHGVPAMRSKIDPILEARQKYAYGKQNDYLDHHNIIGWTREGNTAHPNSGLATIMSDGAGGSKWMFVGRNKAGQVWSDITGNRTGTVTINADGWGNFSVNGGSVSIWVNK

SEQ ID NO: 21975 - protein, 483 aa, Synthetic construct
HHDGTNGTMMQYFEWYLPNDGNHWNRLRSDASNLKDKGISAVWIPPAWKGASQNDVGYGAYDLYDLGEFNQKGTIRTKYGTRNQLQAAVNALKSNGIQVYGDVVMNHKGGADATEMVKAVEVNPNNRNQEVSGEYTIEAWTKFDFPGRGNTHSNFKWRWYHFDGVDWDQSRKLNNRIYKFRGKGWDWEVDTEFGNYDYLMYADIDMDHPEVVNELRNWGVWYTNTLGLDGFRIDAVKHIKYSFTRDWINHVRSATGKNMFAVAEFWKNDLGAIENYLNKTNWNHSVFDVPLHYNLYNASKSGGNYDMRQIFNGTVVQKHPMHAVTFVDNHDSQPEEALESFVEEWFKPLAYALTLTREQGYPSVFYGDYYGIPTHGVPAMKSKIDPILEARQKYAYGRQNDYLDHHNIIGWTREGNTAHPNSGLATIMSDGAGGNKWMFVGRNKAGQVWTDITGNKAGTVTINADGWGNFSVXGGSVSIWVNK

SEQ ID NO: 21976 - protein, 483 aa, Synthetic construct
HHAGTNGTMMQYFEWYLPNDGNHWNRLRSDASNLKDKGISAVWIPPAWKGASQNDVGYGAYDLYDLGEFNQKGTIRTKYGTRNQLQAAVNALKSNGIQVYGDVVMNHKGGADATEMVKAVEVNPNNRNQEVSGEYTIEAWTKFDFPGRGNTHSNFKWRWYHFDGVDWDQSRKLNNRIYKFRGKGWDWEVDTEFGNYDYLMYADIDMDHPEVVNELRNWGVWYTNTLGLDGFRIDAVKHIKYSFTRDWINHVRSATGKNMFAVAEFWKNDLGAIENYLNKTNWNHSVFDVPLHYNLYNASKSGGNYDMRQIFXGTVVQKHPMHAVTFVDNHDSQPEEALESFVEEWFKPLAYALTLTREQGYPSVFYGDYYGIPTHGVPAMKSKIDPILEARQKYAYGRQNDYLDHHNIIGWTREGNTAHPNSGLATIMSDGAGGNKWMFVGRNKAGQVWTDITGNKAGTVTINADGWGNFSVNGGSVSIWVNK

SEQ ID NO: 21977 - protein, 483 aa, Synthetic construct
HHTGTNGTMMQYFEWYLPNDGNHWNRLRSDASNLKDKGISAVWIPPAWKGASQNDVGYGAYDLYDLGEFNQKGTIRTKYGTRNQLQAAVNALKSNGIQVYGDVVMNHKGGADATEMVKAVEVNPNNRNQEVSGEYTIEAWTKFDFPGRGNTHSNFKWRWYHFDGVDWDQSRKLNNRIYKFRGKGWDWEVDTEFGNYDYLMYADIDMDHPEVVNELRNWGVWYTNTLGLDGFRIDAVKHIKYSFTRDWINHVRSATGKNMFAVAEFWKNDLGAIENYLNKTNWNHSVFDVPLHYNLYNASKSGGNYDMRQIFXGTVVQKHPMHAVTFVDNHDSQPEEALESFVEEWFKPLAYALTLTREQGYPSVFYGDYYGIPTHGVPAMKSKIDPILEARQKYAYGRQNDYLDHHNIIGWTREGNTAHPNSGLATIMSDGAGGNKWMFVGRNKAGQVWTDITGNKAGTVTINADGWGNFSVNGGSVSIWVNK

SEQ ID NO: 21978 - protein, 485 aa, Bacillus subtilis
HHNGTNGTMMQYFEWYLPNDGNHWNRLRSDASNLKDKGISAVWIPPAWKGASQNDVGYGAYDLYDLGEFNQKGTIRTKYGTRNQLQAAVNALKSNGIQVYGDVVMNHKGGADATEMVRAVEVNPNNRNQEVSGEYTIEAWTKFDFPGRGNTHSNFKWRWYHFDGVDWDQSRKLNNRIYKFRGDGKGWDWEVDTENGNYDYLMYADIDMDHPEVVNELRNWGVWYTNTLGLDGFRIDAVKHIKYSFTRDWINHVRSATGKNMFAVAEFWKNDLGAIENYLNKTNWNHSVFDVPLHYNLYNASKSGGNYDMRQIFNGTVVQRHPMHAVTFVDNHDSQPEEALESFVEEWFKPLAYALTLTREQGYPSVFYGDYYGIPTHGVPAMKSKIDPILEARQKYAWGRQNDYLDHHNIIGWTREGNTAHPNSGLATIMSDGAGGNKWMFVGRNKAGQVWTDITGNRAGTVTINADGWGNFSVNGGSVSIWVNK

SEQ ID NO: 21979 - protein, 485 aa, Bacillus sp. 707
HHNGTNGTMMQYFEWHLPNDGNHWNRLNSDASNLKSKGITAVWIPPAWKGASQNDVGYGAYDLYDLGEFNQKGTVRTKYGTRSQLQAAVTSLKNNGIQVYGDVVMNHKGGADATEMVRAVEVNPNNRNQEVTGEYTIEAWTRFDFPGRGNTHSSFKWRWYHFDGVDWDQSRRLNNRIYKFRGHGKAWDWEVDTENGNYDYLMYADIDMDHPEVVNELRNWGVWYTNTLGLDGFRIDAVKHIKYSFTRDWINHVRSATGKNMFAVAEFWKNDLGAIENYLQKTNWNHSVFDVPLHYNLYNASKSGGNYDMRNIFNGTVVQRHPSHAVTFVDNHDSQPEEALESFVEEWFKPLAYALTLTREQGYPSVFYGDYYGIPTHGVPAMRSKIDPILEARQKYAYGKQNDYLDHHNIIGWTREGNTAHPNSGLATIMSDGAGGSKWMFVGRNKAGQVWSDITGNRTGTVTINADGWGNFSVNGGSVSIWVNK

SEQ ID NO: 21980 - protein, 485 aa, Bacillus subtilis
HHNGTNGTMMQYFEWYLPNDGNHWNRLRSDASNLKDKGISAVWIPPAWKGASQNDVGYGAYDLYDLGEFNQKGTIRTKYGTRNQLQAAVNALKSNGIQVYGDVVMNHKGGADATEMVRAVEVNPNNRNQEVSGEYTIEAWTKFDFPGRGNTHSNFKWRWYHFDGVDWDQSRKLNNRIYKFRGDGKGWDWEVDTENGNYDYLMYADIDMDHPEVVNELRNWGVWYTNTLGLDGFRIDAVKHIKYSFTRDWINHVRSATGKNMFAVAEFWKNDLGAIENYLNHTNWNHSVFDVPLHYNLYNASKSGGNYDMRQIFNGTVVQRHPMHAVTFVDNHDSQPEEALESFVEEWFKPLAYALTLTREQGYPSVFYGDYYGIPTHGVPAMKSKIDPILEARQKYAYGRQNDYLDHHNIIGWTREGNTAHPNSGLATIMSDGAGGNKWMFVGRNKAGQVWTDITGNRAGTVTINADGWGNFSVNGGSVSIWVNK

SEQ ID NO: 21981 - protein, 485 aa, Bacillus sp. 707
HHNGTNGTMMQYFEWYLPNDGNHWNRLNSDASNLKSKGITAVWIPPAWKGASQNDVGYGAYDLYDLGEFNQKGTVRTKYGTRSQLQAAVTALKNNGIQVYGDVVMNHKGGADATEMVRAVEVNPNNRNQEVTGEYTIEAWTRFDFPGRGNTHSSFKWRWYHFDGVDWDQSRRLNNRIYKFRGHGKAWDWEVDTENGNYDYLMYADIDMDHPEVVNELRNWGVWYTNTLGLDGFRIDAVKHIKYSFTRDWINHVRSATGKNMFAVAEFWKNDLGAIENYLQKTNWNHSVFDVPLHYNLYNASKSGGNYDMRNIFNGTVVQRHPSHAVTFVDNHDSQPEEALESFVEEWFKPLAYALTLTREQGYPSVFYGDYYGIPTHGVPAMRSKIDPILEARQKYAYGKQNDYLDHHNIIGWTREGNTAHPNSGLATIMSDGAGGSKWMFVGRNKAGQVWSDITGNRTGTVTINADGWGNFSVNGGSVSIWVNK

SEQ ID NO: 21982 - protein, 485 aa, Bacillus sp. 707
HHNGTNGTMMQYFEWYLPNDGNHWNRLNSDASNLKSKGITAVWIPPAWKGASQNDVGYGAYDLYDLGEFNQKGTVRTKYGTRSQLQAAVTSLKNNGIQVYGDVVMNHKGGADATEMVRAVEVNPNNRNQEVTGEYTIEAWTRFDFPGRGNTHSSFKWRWYHFDGVDWDQSRQLNNRIYKFRGHGKAWDWEVDTENGNYDYLXYADIDMDHPEVVNELRNWGVWYTNTLGLDGFRIDAVKHIKYSFTRDWINHVRNATGKNMFAVAEFWKNDLGAIENYLQKTNWNHSVFDVPLHYNLYNASKSGGNYDMRNIFNGTVVQRHPSHAVTFVDNHDSQPEEALESFVEEWFKPLAYALTLTREQGYPSVFYGDYYGIPTHGVPAMRSKIDPILEARQKYAYGKQNDYLDHHNIIGWTREGNTAHPNSGLATIMSDGAGGSKWMFVGRNKAGQVWSDITGNRTGTVTINADGWGNFSVNGGSVSIWVNK

SEQ ID NO: 21983 - protein, 485 aa, Bacillus subtilis
HHNGTNGTMMQYFEWYLPNDGNHWNRLRSDASNLKDKGISAVWIPPAWKGASQNDVGYGAYDLYDLGEFNQKGTIRTKYGTRNQLQAAVNALKSNGIQVYGDVVMNHKGGADATEMVRAVEVNPNNRNQEVSGEYTIEAWTKFDFPGRGNTHSNFKWRWYHFDGVDWDQSRKLNNRIYKFRGDGKGWDWEVDTENGNYDYLMYADIDMDHPEVVNELRNWGVWYTNTLGLDGFRIDAVKHIKYSFTRDWINHVRSATGKNMFAVAEFWKNDLGAIENYLNKTNWNHSVFDVPLHYNLYNASKSGGNYDMRQIFNGTVVQRHPMHAVTFVDNHDSQPEEALESFVEEWFKPLAYALTLTREQGYPSVFYGDYYGIPTHGVPAMKSKIDPILEARQKYAYGRQNDYLDHHNIIGWTREGNTAHPNSGLATIMSDGAGGNKWMFVGRNKAGQVWTDITGNRAETVTINADGWGNFSVNGGSVSIWVNK

SEQ ID NO: 21984 - protein, 485 aa, Bacillus subtilis
HHNGTNGTMMQYFEWYLPNDGNHWNRLRSDASNLKDKGISAVWIPPAWKGASQNDVGYGAYDLYDLGEFNQKGTIRTKYGTRNQLQAAVNALKSNGIQVYGDVVMNHKGGADATEMVRAVEVNPNNRNQEVSGEYTIEAWTKFDFPGRGNTHSNFKWRWYHFDGVDWDQSRKLNNRIYKFRGDGKGWDWEVDTENGNYDYLMYADIDVDHPEVVNELRNWGVWYTNTLGLDGFRIDAVKHIKYSFTRDWINHVRSATGKNMFAVAEFWKNDLGAIENYLNKTNWNHSVFDVPLHYNLYNASKSGGNYDMRQIFNGTVVQRHPMHAVTFVDNHDSQPEEALESFVEEWFKPLAYALTLTREQGYPSVFYGDYYGIPTHGVPAMKSKIDPILEARQKYAYGRQNDYLDHHNIIGWTREGNTAHPNSGLATIMSDGAGGNKWMFVGRNKAGQVWTDITGNRAGTVTINADGWGNFSVNGGSVSIWVNK

SEQ ID NO: 21985 - protein, 485 aa, Bacillus sp. 707
HHNGTNGTMMQYFEWYLPNDGNHWNRLNSDASNLKSKGITAVWIPPAWKGASQNDVGYGAYDLYDLGEFNQKGTVRTKYGTRSQLQAAVTSLKNNGIQVYGDVVMNHKGGADATEMVRAVEVNPNNRNQEVTGEYTIEAWTKFDFPGRGNTHSSFKWRWYHFDGVDWDQSRRLNNRIYKFRGHGKAWDWEVDTENGNYDYLMYADIDMDHPEVVNELRNWGVWYTNTLGLDGFRIDAVKHIKYSFTRDWINHVRSATGKNMFAVAEFWKNDLGAIENYLQKTNWNHSVFDVPLHYNLYNASKSGGNYDMRNIFNGTVVQRHPSHAVTFVDNHDSQPEEALESFVEEWFKPLAYALTLTREQGYPSVFYGDYYGIPTHGVPAMRSKIDPILEARQKYAYGKQNDYLDHHNIIGWTREGNTAHPNSGLATIMSDGAGGSKWMFVGRNKAGQVWSDITGNRTGTVTINADGWGNFSVNGGSVSIWVNK

SEQ ID NO: 21986 - protein, 485 aa, Bacillus subtilis
HHNGTNGTMMQYFEWYLPNDGNHWNRLRSDASNLKDKGISAVWIPPAWKGASQNDVGYGAYDLYDLGEFNQKGTIRTKYGTRNQLQAAVNALKSNGIQVYGDVVMNHKGGADATEMVRAVEVNPNNRNQEVSGEYTIEAWTKFDFPGRGNTHSNFKWRWYHFDGVDWDQSRKLNNRIYKFRGDGKGWDWEVDTENGNYDYLMYADIDMDHPEVVNELRNWGVWYTNTLGLDGFRIDAVKHIKYSFTRDWINHVRSATGKNAFAVAEFWKNDLGAIENYLNKTNWNHSVFDVPLHYNLYNASKSGGNYDMRQIFNGTVVQRHPMHAVTFVDNHDSQPEEALESFVEEWFKPLAYALTLTREQGYPSVFYGDYYGIPTHGVPAMKSKIDPILEARQKYAYGRQNDYLDHHNIIGWTREGNTAHPNSGLATIMSDGAGGNKWMFVGRNKAGQVWTDITGNRAGTVTINADGWGNFSVNGGSVSIWVNK

SEQ ID NO: 21987 - protein, 485 aa, Bacillus subtilis
HHNGTNGTMMQYFEWYLPNDGNHWNRLRSDASNLKDKGISAVWIPPAWKGASQNDVGYGAYDLYDLGEFNQKGTIRTKYGTRNQLQAAVNALKSNGIQVYGDVVMNHKGGADATEMVRAVEVNPNNRNQEVSGEYTIEAWTKFDFPGRGNTHSNFKWRWYHFDGVDWDQSRKLNNRIYKFRGDGKGWDWEVDTENGNYDYLMYADIDMDHPEVVNELRNWGVWYTNTLGLDGFRIDAVKHIKYSFMRDWINHVRSATGKNMFAVAEFWKNDLGAIENYLNKTNWNHSVFDVPLHYNLYNASKSGGNYDMRQIFNGTVVQRHPMHAVTFVDNHDSQPEEALESFVEEWFKPLAYALTLTREQGYPSVFYGDYYGIPTHGVPAMKSKIDPILEARQKYAYGRQNDYLDHHNIIGWTREGNTAHPNSGLATIMSDGAGGNKWMFVGRNKAGQVWTDITGNRAGTVTINADGWGNFSVNGGSVSIWVNK

SEQ ID NO: 21988 - protein, 485 aa, Bacillus subtilis
HHNGTNGTMMQYFEWYLPNDGNHWNRLRSDASNLKDKGISAVWIPPAWKGASQNDVGYGAYDLYDLGEFNQKGTIRTKYGTRNQLQAAVNALKSNGIQVYGDVVMNHKGGADATEMVRAVEVNPNNRNQEVSGEYTIEAWTKFDFPGRGNTHSNFKWRWYHFDGVDWDQSRKLNNRIYKFRGDGKGWDWEVDTENGNYDYLMYADIDLDHPEVVNELRNWGVWYTNTLGLDGFRIDAVKHIKYSFTRDWINHVRSATGKNMFAVAEFWKNDLGAIENYLNKTNWNHSVFDVPLHYNLYNASKSGGNYDMRQIFNGTVVQRHPMHAVTFVDNHDSQPEEALESFVEEWFKPLAYALTLTREQGYPSVFYGDYYGIPTHGVPAMKSKIDPILEARQKYAYGRQNDYLDHHNIIGWTREGNTAHPNSGLATIMSDGAGGNKWMFVGRNKAGQVWTDITGNRAGTVTINADGWGNFSVNGGSVSIWVNK

SEQ ID NO: 21989 - protein, 485 aa, Bacillus subtilis
HHNGTNGTMMQYFEWYLPNDGNHWNRLRSDASNLKDKGISAVWIPPAWKGASQNDVGYGAYDLYDLGEFNQKGTIRTKYGTRNQLQAAVNALKSNGIQVYGDVVMNHKGGADATEMVRAVEVNPNNRNQEVSGEYTIEAWTKFDFPGRGNTHSNFKWRWYHFDGVDWDQSRKLNNRIYKFRGDGKGWDWEVDTENGNYDYLMGADIDMDHPEVVNELRNWGVWYTNTLGLDGFRIDAVKHIKYSFTRDWINHVRSATGKNMFAVAEFWKNDLGAIENYLNKTNWNHSVFDVPLHYNLYNASKSGGNYDMRQIFNGTVVQRHPMHAVTFVDNHDSQPEEALESFVEEWFKPLAYALTLTREQGYPSVFYGDYYGIPTHGVPAMKSKIDPILEARQKYAYGRQNDYLDHHNIIGWTREGNTAHPNSGLATIMSDGAGGNKWMFVGRNKAGQVWTDITGNRAGTVTINADGWGNFSVNGGSVSIWVNK

SEQ ID NO: 21990 - protein, 485 aa, Bacillus sp.
HHNGTNGTMMQYFEWHLPNDGNHWNRLRDDAANLKSKGITAVWIPPAWKGTSQNDVGYGAYDLYDLGEFNQKGTVRTKYGTRSQLQGAVTSLKNNGIQVYGDVVMNHKGGADGTEMVNAVEVNRSNRNQEISGEYTIEAWTKFDFPGRGNTHSNFKWRWYHFDGTDWDQSRQLQNKIYKFRGTGKAWDWEVDIGNGNYDYLMYADIDMDHPEVINELRNWGVWYTNTLNLDGFRIDAVKHIKYSYTRDWLTHVRNTTGKPMFAVAEFWKNDLAAIENYLNKTSWNHSVFDVPLHYNLYNASNSGGYFDMRNILNGSVVQKHPIHAVTFVDNHDSQPGEALESFVQSWFKPLAYALILTREQGYPSVFYGDYYGIPTHGVPSMKSKIDPLLQARQTYAYGTQHDYFDHHDIIGWTREGDSSHPNSGLATIMSDGPGGNKWMYVGKHKAGQVWRDITGNRSGTVTINADGWGNFTVNGGAVSVWVKQ

SEQ ID NO: 21991 - protein, 485 aa, Bacillus sp.
HHNGTNGTMMQYFEWYLPNDGNHWNRLRSDASNLKDKGISAVWIPPAWKGASQNDVGYGAYDLYDLGEFNQKGTIRTKYGTRNQLQAAVNALKSNGIQVYGDVVMNHKGGADATEMVRAVEVNPNNRNQEVSGEYTIEAWTKFDFPGRGNTHSNFKWRWYHFDGVDWDQSRKLNNRIYKFRGDGKGWDWEVDTEFGNYDYLMYADIDMDHPEVVNELRNWGVWYTNTLGLDGFRIDAVKHIKYSFTRDWINHVRSATGKNMFAVAEFWKNDLGAIENYLNKTNWNHSVFDVPLHYNLYNASKSGGNYDMRQIFNGTVVQRHPMHAVTFVDNHDSQPEEALESFVEEWFKPLAYALTLTREQGYPSVFYGDYYGIPTHGVPAMKSKIDPILEARQKYAYGRQNDYLDHHNIIGWTREGNTAHPNSGLATIMSDGAGGNKWMFVGRNKAGQVWTDITGNRAGTVTINADGWGNFSVNGGSVSIWVNK

SEQ ID NO: 21992 - protein, 485 aa, Bacillus subtilis
HHNGTNGTMMQYFEWYLPNDGNHWNRLRSDASNLKDKGISAVWIPPAWKGASQNDVGYGAYDLYDLGEFNQKGTIRTKYGTRNQLQAAVNALKSNGIRVYGDVVMNHKGGADATEMVRAVEVNPNNRNQEVSGEYTIEAWTKFDFPGRGNTHSNFKWRWYHFDGVDWDQSRKLNNRIYKFRGDGKGWDWEVDTENGNYDYLMYADIDMDHPEVVNELRNWGVWYTNTLGLDGFRIDAVKHIKYSFTRDWINHVRSATGKNMFAVAEFWKNDLGAIENYLNKTNWNHSVFDVPLHYNLYNASKSGGNYDMRQIFNGTVVQRHPMHAVTFVDNHDSQPEEALESFVEEWFKPLAYALTLTREQGYPSVFYGDYYGIPTHGVPAMKSKIDPILEARQKYAYGRQNDYLDHHNIIGWTREGNTAHPNSGLATIMSDGAGGNKWMFVGRNKAGQVWTDITGNRAGTVTINADGWGNFSVNGGSVSIWVNK

SEQ ID NO: 21993 - protein, 485 aa, Bacillus subtilis
HHNGTNGTMMQYFEWYLPNDGNHWNRLRSDASNLKDKGISAVWIPPAWKGASQNDVGYGAYDLYDLGEFNQKGTIRTKYGTRNQLQAAVNALKSNGIQVYGDVVMNHKGGADATEMVRAVEVNPNNRNQQVSGEYTIEAWTKFDFPGRGNTHSNFKWRWYHFDGVDWDQSRKLNNRIYKFRGDGKGWDWEVDTENGNYDYLMYADIDMDHPEVVNELRNWGVWYTNTLGLDGFRIDAVKHIKYSFTRDWINHVRSATGKNMFAVAEFWKNDLGAIENYLNKTNWNHSVFDVPLHYNLYNASKSGGNYDMRQIFNGTVVQRHPMHAVTFVDNHDSQPEEALESFVEEWFKPLAYALTLTREQGYPSVFYGDYYGIPTHGVPAMKSKIDPILEARQKYAYGRQNDYLDHHNIIGWTREGNTAHPNSGLATIMSDGAGGNKWMFVGRNKAGQVWTDITGNRAGTVTINADGWGNFSVNGGSVSIWVNK

SEQ ID NO: 21994 - protein, 483 aa, Bacillus sp.
HHNGTNGTLMQYFEWYLPNDGNHWNRLRSDASNLKDKGISAVWIPPAWKGASQNDVGYGAYDLYDLGEFNQKGTIRTKYGTRNQLQAAVNALKSNGIQVYGDVVMNHKGGADATEMVKAVEVNPNNRNQEVSGEYTIEAWTKFDFPGRGNTHSNFKWRWYHFDGVDWDQSRKLNNRIYKFRGKGWDWEVDTENGNYDYLTYADIDMDHPEVVNELRNWGVWYTNTLGLDGFRIDAVKHIKYSFTRDWINHVRSATGKNMFAVAEFWKNDLGAIENYLNKTNWNHSVFDVPLHYNLYNASKSGGNYDMRQIFNGTVVQKHPTHAVTFVDNHDSQPEEALESFVEEWFKPLAYALTLTREQGYPSVFYGDYYGIPTHGVPAMKSKIDPILEARQKYAYGRQNDYLDHHNIIGWTREGNTAHPNSGLATIMSDGAGGNKWMFVGRNKAGQVWTDITGNKAGTVTINADGWGNFSVNGGSVSIWVNK

SEQ ID NO: 21995 - protein, 485 aa, Bacillus sp. 707
HHNGTNGTMMQYFEWYLPNDGNHWNRLNSDASNLKSKGITAVWIPPAWKGASQNDVGYGAYDLYDLGEFNQKGTVRTKYGTRSQLQAAVTSLKNNGIQVYGDVVMNHKGGADATEMVRAVEVNPNNRNQEVTGEYTIEAWTRFDFPGRGNTHSSFKWRWYHFDGVDWDQSRRLNNRIYKFRGHGKAWDWEVDTENGNYDYLMYADIDMDHPEVVNELRNWGVWYTNTLGLDGFRIDAVKHIKYSFTRDWINHVRSATGKNMFAVAEFWKNDLGAIENYLQKTNWNHSVFDVPLHYNLYNASKSGGNYDMRNIFNGTVVQRHPMHAVTFVDNHDSQPEEALESFVEEWFKPLAYALTLTREQGYPSVFYGDYYGIPTHGVPAMRSKIDPILEARQKYAYGKQNDYLDHHNIIGWTREGNTAHPNSGLATIMSDGAGGSKWMFVGRNKAGQVWSDITGNRTGTVTINADGWGNFSVNGGSVSIWVNK

SEQ ID NO: 21996 - protein, 485 aa, Bacillus sp. 707
HHNGTNGTMMQYFEWYLPNDGNHWNRLNSDASNLKSKGITAVWIPPAWKGASQNDVGYGAYDLYDLGEFNQKGTVRTKYGTRSQLQAAVTSLKNNGIQVYGDVVMNHKGGADATEMVRAVEVNPNNRNQEVTGEYTIEAWTRFDFPGRGNTHSSFKWRWYHFDGVDWDQSRRLNNRIYKFRGHGKAWDWEVDTENGNYDYLMYADIDMDHPEVVNELRNWGVWYTNTLGLDGFRIDAVKHIKYSFTRDWINHVRSATGKNMFAVAEFWKNDLGAIENYLQKTNWNHSVFDVPLHYNLYNASKSGGNYDMRNIFNGTVVQRHPSHAVTFVDNHDSQPEEALESFVEEWFKPLAYALTLTREQGYPSVFYGDYYGIPTHGVPAMRSKIDPILEARQKYAYGKQNDYLDHHNIIGWTREGNTTHPNSGLATIMSDGAGGSKWMFVGRNKAGQVWSDITGNRTGTVTINADGWGNFSVNGGSVSIWVNK

SEQ ID NO: 21997 - protein, 485 aa, Bacillus subtilis
HHNGTNGTMMQYFEWYLPNDGNHWNRLRSDASNLKDKGISAVWIPPAWKGASQNDVGYGAYDLYDLGEFNQKGTIRTKYGTRNQLQAAVNALKSNGIQVYGDVVMNHKGGADATEMVRAVEVNPNNRNQEVSGEYTIEAWTKFDFPGRGNTHSNFKWRWYHFDGVDWDQSRKLNNRIYKFRGDGKGYDWEVDTENGNYDYLMYADIDMDHPEVVNELRNWGVWYTNTLGLDGFRIDAVKHIKYSFTRDWINHVRSATGKNMFAVAEFWKNDLGAIENYLNKTNWNHSVFDVPLHYNLYNASKSGGNYDMRQIFNGTVVQRHPMHAVTFVDNHDSQPEEALESFVEEWFKPLAYALTLTREQGYPSVFYGDYYGIPTHGVPAMKSKIDPILEARQKYAYGRQNDYLDHHNIIGWTREGNTAHPNSGLATIMSDGAGGNKWMFVGRNKAGQVWTDITGNRAGTVTINADGWGNFSVNGGSVSIWVNK

SEQ ID NO: 21998 - protein, 485 aa, Bacillus subtilis
HHNGTNGTMMQYFEWYLPNDGNHWNRLRSDASNLKDKGISAVWIPPAWKGASQNDVGYGAYDLYDLGEFNQKGTIRTKYGTRNQLQAAVNALKSNGIQVYGDVVYNHKGGADATEMVRAVEVNPNNRNQEVSGEYTIEAWTKFDFPGRGNTHSNFKWRWYHFDGVDWDQSRKLNNRIYKFRGDGKGWDWEVDTENGNYDYLMYADIDMDHPEVVNELRNWGVWYTNTLGLDGFRIDAVKHIKYSFTRDWINHVRSATGKNMFAVAEFWKNDLGAIENYLNKTNWNHSVFDVPLHYNLYNASKSGGNYDMRQIFNGTVVQRHPMHAVTFVDNHDSQPEEALESFVEEWFKPLAYALTLTREQGYPSVFYGDYYGIPTHGVPAMKSKIDPILEARQKYAYGRQNDYLDHHNIIGWTREGNTAHPNSGLATIMSDGAGGNKWMFVGRNKAGQVWTDITGNRAGTVTINADGWGNFSVNGGSVSIWVNK

SEQ ID NO: 21999 - protein, 485 aa, Bacillus subtilis
HHNGTNGTMMQYFEWYLPNDGNHWNRLRSDASNLKDKGISAVWIPPAWKGASQNDVGYGAYDLYDLGEFNQKGTIRTKYGTRNQLQAAVNALKSNGIQVYGDVVMNHKGGADATEMVRAVEVNPNNRNQEVSGEYTIQAWTKFDFPGRGNTHSNFKWRWYHFDGVDWDQSRKLNNRIYKFRGDGKGWDWEVDTENGNYDYLMYADIDMDHPEVVNELRNWGVWYTNTLGLDGFRIDAVKHIKYSFTRDWINHVRSATGKNMFAVAEFWKNDLGAIENYLNKTNWNHSVFDVPLHYNLYNASKSGGNYDMRQIFNGTVVQRHPMHAVTFVDNHDSQPEEALESFVEEWFKPLAYALTLTREQGYPSVFYGDYYGIPTHGVPAMKSKIDPILEARQKYAYGRQNDYLDHHNIIGWTREGNTAHPNSGLATIMSDGAGGNKWMFVGRNKAGQVWTDITGNRAGTVTINADGWGNFSVNGGSVSIWVNK

SEQ ID NO: 22000 - protein, 485 aa, Bacillus subtilis
HHNGTNGTMMQYFEWYLPNDGNHWNRLRSDASNLKDKGISAVWIPPAWKGASQNDVGYGAYDLYDLGEFNQKGTIRTKYGTRNQLQAAVNALKSNGIQVYGDVVMNHKGGADATEMVRAVEVNPNNRNQEVSGEYTIEAWTKFDFPGRGNTHSNFKWRWYHFDGVDWDQSRKLNNRIYKFRGDGKGWDWEVDTENGNYDYLMYADIDMDHPEVVNELRNWGVWYTNTLGLDGFRIDATKHIKYSFTRDWINHVRSATGKNMFAVAEFWKNDLGAIENYLNKTNWNHSVFDVPLHYNLYNASKSGGNYDMRQIFNGTVVQRHPMHAVTFVDNHDSQPEEALESFVEEWFKPLAYALTLTREQGYPSVFYGDYYGIPTHGVPAMKSKIDPILEARQKYAYGRQNDYLDHHNIIGWTREGNTAHPNSGLATIMSDGAGGNKWMFVGRNKAGQVWTDITGNRAGTVTINADGWGNFSVNGGSVSIWVNK

SEQ ID NO: 22001 - protein, 485 aa, Bacillus subtilis
HHNGTNGTMMQYFEWYLPNDGNHWNRLRSDASNLKDKGISAVWIPPAWKGASQNDVGYGAYDLYDLGEFNQKGTIRTKYGTRNQLQAAVNALKSNGIQVYGDVVMNHKGGADATEMVRAVEVNPNNRNQEVSGEYTIEAWTKFDFPGRGNTHSNFKWRWYHFDGVDWDQSRKLNNRIYKFRGDGKGWDWEVDTENGNYDYLMYADIDMDHPEVVNELRNWGVWYTNTLGLDGFRIDAVKHIKYSFTRDWINHVRSATGKNMFAVAEFWKNDLGAIENYLNKTNWNHSVFDVPLHYNLYNASKSGGNYDMRQIFNGTVVQRHPMHAVTFVDNHDSQPEEALESFVEEWFKPLAYALTLTREQGYPSVFYGDYYGIPTHGVPAMKSKIDPILEARQKYAYGRQNDYLDHHNIIGWTREGNTAHPNSGLATIMSDGAGGNKWMFVGRNKAGQVWTDITGNRAGTVTINADGWGNFSVNGGSVSIYVNK

SEQ ID NO: 22002 - protein, 485 aa, Bacillus subtilis
HHNGTNGTMMQYFEWYLPNDGNHWNRLRSDASNLKDKGISAVWIPPAWKGASQNDVGYGAYDLYDLGEFNQKGTIRTKYGTRNQLQAAVNALKSNGIQVYGDVVMNHKGGADATEMVRAVEVNPNNRNQEVSGEYTIEAWTQFDFPGRGNTHSNFKWRWYHFDGVDWDQSRKLNNRIYKFRGDGKGWDWEVDTENGNYDYLMYADIDMDHPEVVNELRNWGVWYTNTLGLDGFRIDAVKHIKYSFTRDWINHVRSATGKNMFAVAEFWKNDLGAIENYLNKTNWNHSVFDVPLHYNLYNASKSGGNYDMRQIFNGTVVQRHPMHAVTFVDNHDSQPEEALESFVEEWFKPLAYALTLTREQGYPSVFYGDYYGIPTHGVPAMKSKIDPILEARQKYAYGRQNDYLDHHNIIGWTREGNTAHPNSGLATIMSDGAGGNKWMFVGRNKAGQVWTDITGNRAGTVTINADGWGNFSVNGGSVSIWVNK

SEQ ID NO: 22003 - protein, 485 aa, Bacillus subtilis
HHNGTNGTMMQYFEWYLPNDGNHWNRLRSDASNLKDKGISAVWIPPAWKGASQNDVGYGAYDLYDLGEFNQKGTIRTKYGTRNQLQAAVNALKSNGIQVYGDVVFNHKGGADATEMVRAVEVNPNNRNQEVSGEYTIEAWTKFDFPGRGNTHSNFKWRWYHFDGVDWDQSRKLNNRIYKFRGDGKGWDWEVDTENGNYDYLMYADIDMDHPEVVNELRNWGVWYTNTLGLDGFRIDAVKHIKYSFTRDWINHVRSATGKNMFAVAEFWKNDLGAIENYLNKTNWNHSVFDVPLHYNLYNASKSGGNYDMRQIFNGTVVQRHPMHAVTFVDNHDSQPEEALESFVEEWFKPLAYALTLTREQGYPSVFYGDYYGIPTHGVPAMKSKIDPILEARQKYAYGRQNDYLDHHNIIGWTREGNTAHPNSGLATIMSDGAGGNKWMFVGRNKAGQVWTDITGNRAGTVTINADGWGNFSVNGGSVSIWVNK

SEQ ID NO: 22004 - protein, 485 aa, Bacillus subtilis
HHNGTNGTMMQYFEWYLPNDGNHWNRLRSDASNLKDKGISAVWIPPAWKGASQNDVGYGAYDLWDLGEFNQKGTIRTKYGTRNQLQAAVNALKSNGIQVYGDVVMNHKGGADATEMVRAVEVNPNNRNQEVSGEYTIEAWTKFDFPGRGNTHSNFKWRWYHFDGVDWDQSRKLNNRIYKFRGDGKGWDWEVDTENGNYDYLMYADIDMDHPEVVNELRNWGVWYTNTLGLDGFRIDAVKHIKYSFTRDWINHVRSATGKNMFAVAEFWKNDLGAIENYLNKTNWNHSVFDVPLHYNLYNASKSGGNYDMRQIFNGTVVQRHPMHAVTFVDNHDSQPEEALESFVEEWFKPLAYALTLTREQGYPSVFYGDYYGIPTHGVPAMKSKIDPILEARQKYAYGRQNDYLDHHNIIGWTREGNTAHPNSGLATIMSDGAGGNKWMFVGRNKAGQVWTDITGNRAGTVTINADGWGNFSVNGGSVSIWVNK

SEQ ID NO: 22005 - protein, 483 aa, Synthetic construct
HHPGTNGTMMQYFEWYLPNDGNHWNRLRSDASNLKDKGISAVWIPPAWKGASQNDVGYGAYDLYDLGEFNQKGTIRTKYGTRNQLQAAVNALKSNGIQVYGDVVMNHKGGADATEMVKAVEVNPNNRNQEVSGEYTIEAWTKFDFPGRGNTHSNFKWRWYHFDGVDWDQSRKLNNRIYKFRGKGWDWEVDTEFGNYDYLMYADIDMDHPEVVNELRNWGVWYTNTLGLDGFRIDAVKHIKYSFTRDWINHVRSATGKNMFAVAEFWKNDLGAIENYLNKTNWNHSVFDVPLHYNLYNASKSGGNYDMRQIFXGTVVQKHPMHAVTFVDNHDSQPEEALESFVEEWFKPLAYALTLTREQGYPSVFYGDYYGIPTHGVPAMKSKIDPILEARQKYAYGRQNDYLDHHNIIGWTREGNTAHPNSGLATIMSDGAGGNKWMFVGRNKAGQVWTDITGNKAGTVTINADGWGNFSVNGGSVSIWVNK

SEQ ID NO: 22006 - protein, 483 aa, Synthetic construct
HHHGTNGTMMQYFEWYLPNDGNHWNRLRSDASNLKDKGISAVWIPPAWKGASQNDVGYGAYDLYDLGEFNQKGTIRTKYGTRNQLQAAVNALKSNGIQVYGDVVMNHKGGADATEMVKAVEVNPNNRNQEVSGEYTIEAWTKFDFPGRGNTHSNFKWRWYHFDGVDWDQSRKLNNRIYKFRGKGWDWEVDTEFGNYDYLMYADIDMDHPEVVNELRNWGVWYTNTLGLDGFRIDAVKHIKYSFTRDWINHVRSATGKNMFAVAEFWKNDLGAIENYLNKTNWNHSVFDVPLHYNLYNASKSGGNYDMRQIFNGTVVQKHPMHAVTFVDNHDSQPEEALESFVEEWFKPLAYALTLTREQGYPSVFYGDYYGIPTHGVPAMKSKIDPILEARQKYAYGRQNDYLDHHNIIGWTREGNTAHPNSGLATIMSDGAGGNKWMFVGRNKAGQVWTDITGNKAGTVTINADGWGNFSVXGGSVSIWVNK

SEQ ID NO: 22007 - protein, 483 aa, Synthetic construct
HHRGTNGTMMQYFEWYLPNDGNHWNRLRSDASNLKDKGISAVWIPPAWKGASQNDVGYGAYDLYDLGEFNQKGTIRTKYGTRNQLQAAVNALKSNGIQVYGDVVMNHKGGADATEMVKAVEVNPNNRNQEVSGEYTIEAWTKFDFPGRGNTHSNFKWRWYHFDGVDWDQSRKLNNRIYKFRGKGWDWEVDTEFGNYDYLMYADIDMDHPEVVNELRNWGVWYTNTLGLDGFRIDAVKHIKYSFTRDWINHVRSATGKNMFAVAEFWKNDLGAIENYLNKTNWNHSVFDVPLHYNLYNASKSGGNYDMRQIFNGTVVQKHPMHAVTFVDNHDSQPEEALESFVEEWFKPLAYALTLTREQGYPSVFYGDYYGIPTHGVPAMKSKIDPILEARQKYAYGRQNDYLDHHNIIGWTREGNTAHPNSGLATIMSDGAGGNKWMFVGRNKAGQVWTDITGNKAGTVTINADGWGNFSVXGGSVSIWVNK

SEQ ID NO: 22008 - protein, 485 aa, Bacillus sp. 707
HHNGTNGTMMQYFEWYLPNDGNHWNRLNSDASNLKSKGITAVWIPPAWKGASQNDVGYGAYDLYDLGEFNQKGTVRTKYGTRSQLQAAVTSLKNNGIQVYGDVVMNHKGGADATEMVRAVEVNPNNRNQEVTGEYTIEAWTRFDFPGRGNTHSSFKWRWYHFDGVDWDQSRRLNNRIYKFRGHGKAWDWEVDTENGNYDYLMYADIDMDHPEVVNELRNWGVWYTNTLGLDGFRIDAVKHIKYSFTRDWINHVRSATGKNMFAVAEFWKNDLGAIENYLQKTNWNHSVFDVPLHYNLYNASKSGGNYDMRNIFNGTVVQRHPSHAVTFVDNHDSQPEEALESFVEEWFKPLAYALTLTREQGYPSVFYGDYYGIPTHGVPAMRSKIDPILEARQKYAYGKQNDYLDHHNIIGWTREGNTAHPNSGLATIMSDGPGGSKWMFVGRNKAGQVWSDITGNRTGTVTINADGWGNFSVNGGSVSIWVNK

SEQ ID NO: 22009 - protein, 483 aa, Synthetic construct
HHEGTNGTMMQYFEWYLPNDGNHWNRLRSDASNLKDKGISAVWIPPAWKGASQNDVGYGAYDLYDLGEFNQKGTIRTKYGTRNQLQAAVNALKSNGIQVYGDVVMNHKGGADATEMVKAVEVNPNNRNQEVSGEYTIEAWTKFDFPGRGNTHSNFKWRWYHFDGVDWDQSRKLNNRIYKFRGKGWDWEVDTEFGNYDYLMYADIDMDHPEVVNELRNWGVWYTNTLGLDGFRIDAVKHIKYSFTRDWINHVRSATGKNMFAVAEFWKNDLGAIENYLNKTNWNHSVFDVPLHYNLYNASKSGGNYDMRQIFXGTVVQKHPMHAVTFVDNHDSQPEEALESFVEEWFKPLAYALTLTREQGYPSVFYGDYYGIPTHGVPAMKSKIDPILEARQKYAYGRQNDYLDHHNIIGWTREGNTAHPNSGLATIMSDGAGGNKWMFVGRNKAGQVWTDITGNKAGTVTINADGWGNFSVNGGSVSIWVNK

SEQ ID NO: 22010 - protein, 483 aa, Synthetic construct
HHEGTNGTMMQYFEWYLPNDGNHWNRLRSDASNLKDKGISAVWIPPAWKGASQNDVGYGAYDLYDLGEFNQKGTIRTKYGTRNQLQAAVNALKSNGIQVYGDVVMNHKGGADATEMVKAVEVNPNNRNQEVSGEYTIEAWTKFDFPGRGNTHSNFKWRWYHFDGVDWDQSRKLNNRIYKFRGKGWDWEVDTEFGNYDYLMYADIDMDHPEVVNELRNWGVWYTNTLGLDGFRIDAVKHIKYSFTRDWINHVRSATGKNMFAVAEFWKNDLGAIENYLNKTNWNHSVFDVPLHYNLYNASKSGGNYDMRQIFNGTVVQKHPMHAVTFVDNHDSQPEEALESFVEEWFKPLAYALTLTREQGYPSVFYGDYYGIPTHGVPAMKSKIDPILEARQKYAYGRQNDYLDHHNIIGWTREGNTAHPNSGLATIMSDGAGGNKWMFVGRNKAGQVWTDITGNKAGTVTINADGWGNFSVXGGSVSIWVNK

SEQ ID NO: 22011 - protein, 485 aa, Bacillus subtilis
HHNGTNGTMMQYFEWYLPNDGNHWNRLRSDASNLKDKGISAVWIPPAWKGASQNDVGYGAYDLYDLGEFNQKGTIRTKYGTRNQLQAAVNALKSNGIQVYGDVVMNHKGGADATEMVRAVEVNPNNRNQEVSGEYTIEAWTKFDFPGRGNTHSNFKWRWYHFDGVDWDQSRKLNNRIYKFRGDGKGWDWEVDTENGNYDYLMYADIDMDHPEVVNELRNWGVWYTNTLGLDGFRIDAVKHIKYSFTRDWINHVRSATGKNMFAVAEFWKNDLGAIENYLNKTNWNHSVFDVPLHYNLYNASKSGGNYDMRQIFNGTVVQRHPMHAVTFVDNHDSQPEEALESFVEEWFKPLAYALTLTREQGYPSVFYGDYYGIPTHGVPAMKSKIDPILEARKKYAYGRQNDYLDHHNIIGWTREGNTAHPNSGLATIMSDGAGGNKWMFVGRNKAGQVWTDITGNRAGTVTINADGWGNFSVNGGSVSIWVNK

SEQ ID NO: 22012 - protein, 485 aa, Bacillus subtilis
HHNGTNGTMMQYFEWYLPNDGNHWNRLRSDASNLKDKGISAVWIPPAWKGASQNDVGYGAYDLYDLGEFNQKGTIRTKYGTRNQLQAAVNALKSNGIQVYGDVVMNHKGGADATEMVRAVEVNPNNRNQEVSGEYTIEAWTKFDFPGRGNTHSNFKWRWYHFDGVDWDQSRKLNNRIYKFRGDGKGWDWEVDTENGNYDYLMYADIDMDHPEVVNELRNWGVWYTNTLGLDGFRVDAVKHIKYSFTRDWINHVRSATGKNMFAVAEFWKNDLGAIENYLNKTNWNHSVFDVPLHYNLYNASKSGGNYDMRQIFNGTVVQRHPMHAVTFVDNHDSQPEEALESFVEEWFKPLAYALTLTREQGYPSVFYGDYYGIPTHGVPAMKSKIDPILEARQKYAYGRQNDYLDHHNIIGWTREGNTAHPNSGLATIMSDGAGGNKWMFVGRNKAGQVWTDITGNRAGTVTINADGWGNFSVNGGSVSIWVNK

SEQ ID NO: 22013 - protein, 485 aa, Bacillus subtilis
HHNGTNGTMMQYFEWYLPNDGNHWNRLRSDASNLKDKGISAVWIPPAWKGASQNDVGYGAYDLYDLGEFNQKGTIRTKYGTRNQLQAAVNALKSNGIQVYGDVVMNHKGGADATEMVRAVEVNPNNRNQEVSGEYTIEAWTKFDFPGRGNTHSNFKWRWYHFDGVDWDQSRKLNNRIYKFRGDGKGWDWEVDTENGNYDYLMYADIDMDHPEVVNELRNWGVWYTNTLGLDGFRIDAVKHIKYSFTRDWINHVRSATGKNMFAVAEFWKNDLGAIENYLNKTNWNHSVFDVPLHYNLYNASKSGGNYDMRQIFNGTVVQRHPMHAVTFVDNHDSQPEEALESFVEEWFKPLAYALTLTREQGYPSVFYGDYYGIPTHGVPAMKSKIDPILEARQKYAYGRQNDWLDHHNIIGWTREGNTAHPNSGLATIMSDGAGGNKWMFVGRNKAGQVWTDITGNRAGTVTINADGWGNFSVNGGSVSIWVNK

SEQ ID NO: 22014 - protein, 485 aa, Bacillus subtilis
HHNGTNGTMMQYFEWYLPNDGNHWNRLRSDASNLKDKGISAVWIPPAWKGASQNDVGYGAYDLYDLGEFNQKGTIRTKYGTRNQLQAAVNALKSNGIQVYGDVVMNHKGGADATEMVRAVEVNPNNRNQEVSGEYTIEAWTKFDFPGRGNTHSNFKWRWYHFDGVDWDQSRKLNNRIYKFRGDGKGWDWEVDTENGNYDYLMYADIDMDHPEVINELRNWGVWYTNTLGLDGFRIDAVKHIKYSFTRDWINHVRSATGKNMFAVAEFWKNDLGAIENYLNKTNWNHSVFDVPLHYNLYNASKSGGNYDMRQIFNGTVVQRHPMHAVTFVDNHDSQPEEALESFVEEWFKPLAYALTLTREQGYPSVFYGDYYGIPTHGVPAMKSKIDPILEARQKYAYGRQNDYLDHHNIIGWTREGNTAHPNSGLATIMSDGAGGNKWMFVGRNKAGQVWTDITGNRAGTVTINADGWGNFSVNGGSVSIWVNK

SEQ ID NO: 22015 - protein, 483 aa, Synthetic construct
HHHGTNGTMMQYFEWYLPNDGNHWNRLRSDASNLKDKGISAVWIPPAWKGASQNDVGYGAYDLYDLGEFNQKGTIRTKYGTRNQLQAAVNALKSNGIQVYGDVVMNHKGGADATEMVKAVEVNPNNRNQEVSGEYTIEAWTKFDFPGRGNTHSNFKWRWYHFDGVDWDQSRKLNNRIYKFRGKGWDWEVDTEFGNYDYLMYADIDMDHPEVVNELRNWGVWYTNTLGLDGFRIDAVKHIKYSFTRDWINHVRSATGKNMFAVAEFWKNDLGAIENYLNKTNWNHSVFDVPLHYNLYNASKSGGNYDMRQIFXGTVVQKHPMHAVTFVDNHDSQPEEALESFVEEWFKPLAYALTLTREQGYPSVFYGDYYGIPTHGVPAMKSKIDPILEARQKYAYGRQNDYLDHHNIIGWTREGNTAHPNSGLATIMSDGAGGNKWMFVGRNKAGQVWTDITGNKAGTVTINADGWGNFSVNGGSVSIWVNK

SEQ ID NO: 22016 - protein, 485 aa, Bacillus subtilis
HHNGTNGTMMQYFEWYLPNDGNHWKRLRSDASNLKDKGISAVWIPPAWKGASQNDVGYGAYDLYDLGEFNQKGTIRTKYGTRNQLQAAVNALKSNGIQVYGDVVMNHKGGADATEMVRAVEVNPNNRNQEVSGEYTIEAWTKFDFPGRGNTHSNFKWRWYHFDGVDWDQSRKLNNRIYKFRGDGKGWDWEVDTENGNYDYLMYADIDMDHPEVVNELRNWGVWYTNTLGLDGFRIDAVKHIKYSFTRDWINHVRSATGKNMFAVAEFWKNDLGAIENYLNKTNWNHSVFDVPLHYNLYNASKSGGNYDMRQIFNGTVVQRHPMHAVTFVDNHDSQPEEALESFVEEWFKPLAYALTLTREQGYPSVFYGDYYGIPTHGVPAMKSKIDPILEARQKYAYGRQNDYLDHHNIIGWTREGNTAHPNSGLATIMSDGAGGNKWMFVGRNKAGQVWTDITGNRAGTVTINADGWGNFSVNGGSVSIWVNK

SEQ ID NO: 22017 - protein, 485 aa, Bacillus subtilis
HHNGTNGTMMQYFEWYLPNDGNHWNRLRSDASNLKDKGISAVWIPPAWKGASQNDVGYGAYDLYDLGEFNQKGTIRTKYGTRNQLQAAVNALKSNGIQVYGDVVMNHKGGADATEMVRAVEVNPNNRNQEVSGEYTIEAWTKFDFPGRGNTHSNFKWRWYHFDGVDWDQSRKLNNRIYKFRGDGKGWDWEVDTENGNYDYLMYADIDMDHPEVRNELRNWGVWYTNTLGLDGFRIDAVKHIKYSFTRDWINHVRSATGKNMFAVAEFWKNDLGAIENYLNKTNWNHSVFDVPLHYNLYNASKSGGNYDMRQIFNGTVVQRHPMHAVTFVDNHDSQPEEALESFVEEWFKPLAYALTLTREQGYPSVFYGDYYGIPTHGVPAMKSKIDPILEARQKYAYGRQNDYLDHHNIIGWTREGNTAHPNSGLATIMSDGAGGNKWMFVGRNKAGQVWTDITGNRAGTVTINADGWGNFSVNGGSVSIWVNK

SEQ ID NO: 22018 - protein, 483 aa, Synthetic construct
HHTGTNGTMMQYFEWYLPNDGNHWNRLRSDASNLKDKGISAVWIPPAWKGASQNDVGYGAYDLYDLGEFNQKGTIRTKYGTRNQLQAAVNALKSNGIQVYGDVVMNHKGGADATEMVKAVEVNPNNRNQEVSGEYTIEAWTKFDFPGRGNTHSNFKWRWYHFDGVDWDQSRKLNNRIYKFRGKGWDWEVDTEFGNYDYLMYADIDMDHPEVVNELRNWGVWYTNTLGLDGFRIDAVKHIKYSFTRDWINHVRSATGKNMFAVAEFWKNDLGAIENYLNKTNWNHSVFDVPLHYNLYNASKSGGNYDMRQIFNGTVVQKHPMHAVTFVDNHDSQPEEALESFVEEWFKPLAYALTLTREQGYPSVFYGDYYGIPTHGVPAMKSKIDPILEARQKYAYGRQNDYLDHHNIIGWTREGNTAHPNSGLATIMSDGAGGNKWMFVGRNKAGQVWTDITGNKAGTVTINADGWGNFSVXGGSVSIWVNK

SEQ ID NO: 22019 - protein, 485 aa, Bacillus subtilis
HHNGTNGTMMQYFEWYLPNDGNHWNRLRSDASNLKDKGISAVWIPPAWKGASQNDVGYGAYDLYDLGEFNQKGTIRTKYGTRNQLQAAVNALKSNGIQVYGDVVMNHKGGADATEMVRAVEVNPNNRNQEVSGEYTIEAWTKFDFPGRGNTHSNFKWRWYHFDGVDWDQSRKLNNRIYKFRGDGKGWDWEVDTENGNFDYLMYADIDMDHPEVVNELRNWGVWYTNTLGLDGFRIDAVKHIKYSFTRDWINHVRSATGKNMFAVAEFWKNDLGAIENYLNKTNWNHSVFDVPLHYNLYNASKSGGNYDMRQIFNGTVVQRHPMHAVTFVDNHDSQPEEALESFVEEWFKPLAYALTLTREQGYPSVFYGDYYGIPTHGVPAMKSKIDPILEARQKYAYGRQNDYLDHHNIIGWTREGNTAHPNSGLATIMSDGAGGNKWMFVGRNKAGQVWTDITGNRAGTVTINADGWGNFSVNGGSVSIWVNK

SEQ ID NO: 22020 - protein, 485 aa, Bacillus subtilis
HHNGTNGTMMQYFEWYLPNDGNHWNRLRSDASNLKDKGISAVWIPPAWKGASQNDVGYGAYDLYDLGEFNQKGTIRTKYGTRNQLQAAVNALKSNGIQVYGDVVMNHKGGADATEMVRAVEVNPNNRNQEVSGEYTIEAWTKFDFPGRGNTHSNFKWRWYHFDGVDWDQSRKLNNRIYKFRGDGKGWDWEVDTENGNYDYLMYADIDMDHPEVVNELRNWGVWYTNTLGLDGFRIDAVKHIKYSFVRDWINHVRSATGKNMFAVAEFWKNDLGAIENYLNKTNWNHSVFDVPLHYNLYNASKSGGNYDMRQIFNGTVVQRHPMHAVTFVDNHDSQPEEALESFVEEWFKPLAYALTLTREQGYPSVFYGDYYGIPTHGVPAMKSKIDPILEARQKYAYGRQNDYLDHHNIIGWTREGNTAHPNSGLATIMSDGAGGNKWMFVGRNKAGQVWTDITGNRAGTVTINADGWGNFSVNGGSVSIWVNK

SEQ ID NO: 22021 - protein, 485 aa, Bacillus sp. 707
HHNGTNGTMMQYFEWYLPNDGNHWNRLNSDASNLKSKGITAVWIPPAWKGASQNDVGYGAYDLYDLGEFNQKGTVRTKYGTRSQLEAAVTSLKNNGIQVYGDVVMNHKGGADATEMVRAVEVNPNNRNQEVTGEYTIEAWTRFDFPGRGNTHSSFKWRWYHFDGVDWDQSRRLNNRIYKFRGHGKAWDWEVDTENGNYDYLMYADIDMDHPEVVNELRNWGVWYTNTLGLDGFRIDAVKHIKYSFTRDWINHVRSATGKNMFAVAEFWKNDLGAIENYLQKTNWNHSVFDVPLHYNLYNASKSGGNYDMRNIFNGTVVQRHPSHAVTFVDNHDSQPEEALESFVEEWFKPLAYALTLTREQGYPSVFYGDYYGIPTHGVPAMRSKIDPILEARQKYAYGKQNDYLDHHNIIGWTREGNTAHPNSGLATIMSDGAGGSKWMFVGRNKAGQVWSDITGNRTGTVTINADGWGNFSVNGGSVSIWVNK

SEQ ID NO: 22022 - protein, 483 aa, Synthetic construct
HHWGTNGTMMQYFEWYLPNDGNHWNRLRSDASNLKDKGISAVWIPPAWKGASQNDVGYGAYDLYDLGEFNQKGTIRTKYGTRNQLQAAVNALKSNGIQVYGDVVMNHKGGADATEMVKAVEVNPNNRNQEVSGEYTIEAWTKFDFPGRGNTHSNFKWRWYHFDGVDWDQSRKLNNRIYKFRGKGWDWEVDTEFGNYDYLMYADIDMDHPEVVNELRNWGVWYTNTLGLDGFRIDAVKHIKYSFTRDWINHVRSATGKNMFAVAEFWKNDLGAIENYLNKTNWNHSVFDVPLHYNLYNASKSGGNYDMRQIFNGTVVQKHPMHAVTFVDNHDSQPEEALESFVEEWFKPLAYALTLTREQGYPSVFYGDYYGIPTHGVPAMKSKIDPILEARQKYAYGRQNDYLDHHNIIGWTREGNTAHPNSGLATIMSDGAGGNKWMFVGRNKAGQVWTDITGNKAGTVTINADGWGNFSVXGGSVSIWVNK

SEQ ID NO: 22023 - protein, 485 aa, Bacillus subtilis
HHNGTNGTMMQYFEWYLPNDGNHWNRLRSDASNLKDKGISAVWIPPAWKGASQNDVGYGAYDLYDLGEFNQKGTIRTKYGTRNQLQAAVNALKSNGIQVYGDVVMNHKGGADATEMVRAVEVNPNNRNQEVSGEYTIEAWTKFDFPGRGNTHSNFKWRWYHFDGVDWDQSRKLNNRIYKFRGDGKGWDWEVDTENGNYDYLMYADIDMDHPEVVNELRNWGVWYTNTLGLDGFRIDAVKHIKFSFTRDWINHVRSATGKNMFAVAEFWKNDLGAIENYLNKTNWNHSVFDVPLHYNLYNASKSGGNYDMRQIFNGTVVQRHPMHAVTFVDNHDSQPEEALESFVEEWFKPLAYALTLTREQGYPSVFYGDYYGIPTHGVPAMKSKIDPILEARQKYAYGRQNDYLDHHNIIGWTREGNTAHPNSGLATIMSDGAGGNKWMFVGRNKAGQVWTDITGNRAGTVTINADGWGNFSVNGGSVSIWVNK

SEQ ID NO: 22024 - protein, 485 aa, Bacillus subtilis
HHNGTNGTMMQYFEWYLPNDGNHWNRLRSDASNLKDKGISAVWIPPAWKGASQNDVGYGAYDLYDLGEFNQKGTIRTKYGTRNQLQAAVNALKSNGIQVYGDVVMNHKGGADATEMVRAVEVNPNNRNQEVSGEYTIEAWTKFDFPGRGNTHSNFKWRWYHFDGVDWDQSRKLNNRIYKFRGDGKGWDWEVDTENGNYDYLMYADIDMDHPEVVNELRNWGVWYTNTLGLDGFRIDAVKHIKYSFTRDWINHVRSATGKNMFAVAEFWKNDLGAIENYLNKTNWNHSVFDVPLHYNLYNASKSGGNYDMRQIFNGTVVQRHPMHAVTFVDNHDSQPEEALESFVEEWFKPLAYALTLTREQGYPSVFYGDYYGIPTHGVPAMKSKIDPILEARQKYAYGRQNDYLDHHNIIGWTREGNTAHPNSGLATIMSDGAGGNKWMFVGRNKAGQVWTDITGNRAGTVTINADGWGNFSCNGGSVSIWVNK

SEQ ID NO: 22025 - protein, 483 aa, Synthetic construct
HHYGTNGTMMQYFEWYLPNDGNHWNRLRSDASNLKDKGISAVWIPPAWKGASQNDVGYGAYDLYDLGEFNQKGTIRTKYGTRNQLQAAVNALKSNGIQVYGDVVMNHKGGADATEMVKAVEVNPNNRNQEVSGEYTIEAWTKFDFPGRGNTHSNFKWRWYHFDGVDWDQSRKLNNRIYKFRGKGWDWEVDTEFGNYDYLMYADIDMDHPEVVNELRNWGVWYTNTLGLDGFRIDAVKHIKYSFTRDWINHVRSATGKNMFAVAEFWKNDLGAIENYLNKTNWNHSVFDVPLHYNLYNASKSGGNYDMRQIFXGTVVQKHPMHAVTFVDNHDSQPEEALESFVEEWFKPLAYALTLTREQGYPSVFYGDYYGIPTHGVPAMKSKIDPILEARQKYAYGRQNDYLDHHNIIGWTREGNTAHPNSGLATIMSDGAGGNKWMFVGRNKAGQVWTDITGNKAGTVTINADGWGNFSVNGGSVSIWVNK

SEQ ID NO: 22026 - protein, 485 aa, Bacillus subtilis
HHNGTNGTMMQYFEWYLPNDGNHWNRLRSDASNLKDKGISAVWIPPAWKGASQNDVGYGAYDLYDLGEFNQKGTIRTKYGTRNQLQAAVNALKSNGIQVYGDVVMNHKGGADATEMVRAVEVNPNNRNQEVSGEYTIEAWTKFDFPGRGNTHSNFKWRWYHFDGVDYDQSRKLNNRIYKFRGDGKGWDWEVDTENGNYDYLMYADIDMDHPEVVNELRNWGVWYTNTLGLDGFRIDAVKHIKYSFTRDWINHVRSATGKNMFAVAEFWKNDLGAIENYLNKTNWNHSVFDVPLHYNLYNASKSGGNYDMRQIFNGTVVQRHPMHAVTFVDNHDSQPEEALESFVEEWFKPLAYALTLTREQGYPSVFYGDYYGIPTHGVPAMKSKIDPILEARQKYAYGRQNDYLDHHNIIGWTREGNTAHPNSGLATIMSDGAGGNKWMFVGRNKAGQVWTDITGNRAGTVTINADGWGNFSVNGGSVSIWVNK

SEQ ID NO: 22027 - protein, 483 aa, Synthetic construct
HHRGTNGTMMQYFEWYLPNDGNHWNRLRSDASNLKDKGISAVWIPPAWKGASQNDVGYGAYDLYDLGEFNQKGTIRTKYGTRNQLQAAVNALKSNGIQVYGDVVMNHKGGADATEMVKAVEVNPNNRNQEVSGEYTIEAWTKFDFPGRGNTHSNFKWRWYHFDGVDWDQSRKLNNRIYKFRGKGWDWEVDTEFGNYDYLMYADIDMDHPEVVNELRNWGVWYTNTLGLDGFRIDAVKHIKYSFTRDWINHVRSATGKNMFAVAEFWKNDLGAIENYLNKTNWNHSVFDVPLHYNLYNASKSGGNYDMRQIFXGTVVQKHPMHAVTFVDNHDSQPEEALESFVEEWFKPLAYALTLTREQGYPSVFYGDYYGIPTHGVPAMKSKIDPILEARQKYAYGRQNDYLDHHNIIGWTREGNTAHPNSGLATIMSDGAGGNKWMFVGRNKAGQVWTDITGNKAGTVTINADGWGNFSVNGGSVSIWVNK

SEQ ID NO: 22028 - protein, 485 aa, Bacillus sp. 707
HHNGTNGTMMQYFEWYLPNDGNHWNRLNSDASNLKSKGITAVWIPPAWKGASQNDVGYGAYDLYDLGEFNQKGTVRTKYGTRSQLQAAVTSLKNNGIQVYGDVVMNHKGGADATEMVRAVEVNPNNRNQEVTGEYTIEAWTRFDFPGRGNTHSSFKWRWYHFDGVDWDQSRRLNNRIYKFRGHGKAWDWEVDTENGNYDYLMYADIDMDHPEVVNELRNWGVWYTNTLGLDGFRIDAVKHIKYSFTRDWINHVRNATGKNMFAVAEFWKNDLGAIENYLQKTNWNHSVFDVPLHYNLYNASKSGGNYDMRNIFNGTVVQRHPSHAVTFVDNHDSQPEEALESFVEEWFKPLAYALTLTREQGYPSVFYGDYYGIPTHGVPAMRSKIDPILEARQKYAYGKQNDYLDHHNIIGWTREGNTAHPNSGLATIMSDGAGGSKWMFVGRNKAGQVWSDITGNRTGTVTINADGWGNFSVNGGSVSIWVNK

SEQ ID NO: 22029 - protein, 485 aa, Bacillus subtilis
HHNGTNGTMMQYFEWYLPNDGNHWNRLRSDASNLKDKGISAVWIPPAWKGASQNDVGYGAYDLYDLGEFNQKGTIRTKYGTRNQLQAAVNALRSNGIQVYGDVVMNHKGGADATEMVRAVEVNPNNRNQEVSGEYTIEAWTKFDFPGRGNTHSNFKWRWYHFDGVDWDQSRKLNNRIYKFRGDGKGWDWEVDTENGNYDYLMYADIDMDHPEVVNELRNWGVWYTNTLGLDGFRIDAVKHIKYSFTRDWINHVRSATGKNMFAVAEFWKNDLGAIENYLNKTNWNHSVFDVPLHYNLYNASKSGGNYDMRQIFNGTVVQRHPMHAVTFVDNHDSQPEEALESFVEEWFKPLAYALTLTREQGYPSVFYGDYYGIPTHGVPAMKSKIDPILEARQKYAYGRQNDYLDHHNIIGWTREGNTAHPNSGLATIMSDGAGGNKWMFVGRNKAGQVWTDITGNRAGTVTINADGWGNFSVNGGSVSIWVNK

SEQ ID NO: 22030 - protein, 483 aa, Synthetic construct
HHDGTNGTMMQYFEWYLPNDGNHWNRLRSDASNLKDKGISAVWIPPAWKGASQNDVGYGAYDLYDLGEFNQKGTIRTKYGTRNQLQAAVNALKSNGIQVYGDVVMNHKGGADATEMVKAVEVNPNNRNQEVSGEYTIEAWTKFDFPGRGNTHSNFKWRWYHFDGVDWDQSRKLNNRIYKFRGKGWDWEVDTEFGNYDYLMYADIDMDHPEVVNELRNWGVWYTNTLGLDGFRIDAVKHIKYSFTRDWINHVRSATGKNMFAVAEFWKNDLGAIENYLNKTNWNHSVFDVPLHYNLYNASKSGGNYDMRQIFXGTVVQKHPMHAVTFVDNHDSQPEEALESFVEEWFKPLAYALTLTREQGYPSVFYGDYYGIPTHGVPAMKSKIDPILEARQKYAYGRQNDYLDHHNIIGWTREGNTAHPNSGLATIMSDGAGGNKWMFVGRNKAGQVWTDITGNKAGTVTINADGWGNFSVNGGSVSIWVNK

SEQ ID NO: 22031 - protein, 485 aa, Bacillus subtilis
HHNGTNGTMMQYFEWYLPNDGNHWNRLRSDASNLKDKGISAVWIPPAWKGASQNDVGYGAYDLYDLGEFNQKGTIRTKYGTRNQLQAAVNALKSNGIQVYGDVVMNHKGGADATEMVRAVEVNPNNRNQEVSGEYTIEAWTKFDFPGRGNTHSNFKWRWYHFDGVDWDQSRKLNNRIYKFRGDGKGWDWEVDTENGNYDYLMYADIDMDHPEVVNELRNWGVWYTNTLGLDGFRIDAVKHIKYSFTRDWINHVRSATGKNMFAVAEFWKNDLGAIENYLNKTNWNHSVFDVPLHYNLYNASKSGGNYDMRQIFNGTVVQRHPMHAVTFVDNHDSQPEEALESFVEEWFKPLAYALTLTREQGYPSVFYGDYYGIPTHGVPAMKSQIDPILEARQKYAYGRQNDYLDHHNIIGWTREGNTAHPNSGLATIMSDGAGGNKWMFVGRNKAGQVWTDITGNRAGTVTINADGWGNFSVNGGSVSIWVNK

SEQ ID NO: 22032 - protein, 485 aa, Bacillus sp. 707
HHNGTNGTMMQYFEWYLPNDGNHWNRLNSDASNLKSKGITAVWIPPAWKGASQNDVGYGAYDLYDLGEFNQKGTVRTKYGTRSQLQAAVTSLKNNGIQVYGDVVMNHKGGADATEMVRAVEVNPNNRNQEVTGEYTIEAWTRFDFPGRGNTHSSFKWRWYHFDGVDWDQSRRLNNRIYKFRGHGKAWDWEVDTENGNYDYLMYADIDMDHPEVVNELRNWGVWYTNTLGLDGFRIDAVKHIKYSFTRDWINHVRSATGKNMFAVAEFWKNDLGAIENYLQKTNWNHSVFDVPLHYNLYNASKSGGNYDMRNIFNGTVVQRHPSHAVTFVDNHDSQPEEALESFVEEWFKPLAYALTLTREQGYPSVFYGDYYGIPTHGVPAMRSKIDPILEARQKYAYGTQNDYLDHHNIIGWTREGNTAHPNSGLATIMSDGAGGSKWMFVGRNKAGQVWSDITGNRTGTVTINADGWGNFSVNGGSVSIWVNK

SEQ ID NO: 22033 - protein, 485 aa, Bacillus subtilis
HHNGTNGTMMQYFEWYLPNDGNHWNRLRSDASNLKDKGISAVWIPPAWKGASQNDVGYGAYDLYDLGEFNQKGTIRTKYGTRNQLQAAVNALKSNGIQVYGDVVMNHKGGADATEMVRAVEVNPNNRNQEVSGEYTIEAWTKFDFPGRGNTHSNFKWRWYHFDGVDWDQSRKLNNRIYKFRGDGKGWDWEVDTENGNYDYLMYADIDMDHPEVVNELRNWGVWYTNTLGLDGFRIDAVKHIKYSFTRDWINHVRSATGKNMFAVAEFWKNDLGAIENYLNKTNWNHSVFDVPLHYNLYNASKSGGNYDMRQIFNGTVVQRHPMHAVTFVDNHDSQPEEALESFVEEWFKPLAYALTLTREQGYPSVFYGDYYGIPTHGVPAMKSHIDPILEARQKYAYGRQNDYLDHHNIIGWTREGNTAHPNSGLATIMSDGAGGNKWMFVGRNKAGQVWTDITGNRAGTVTINADGWGNFSVNGGSVSIWVNK

SEQ ID NO: 22034 - protein, 485 aa, Bacillus subtilis
HHNGTNGTMMQYFEWYLPNDGNHWNRLRSDASNLKDKGISAVWIPPAWKGASQNDVGYGAYDLYDLGEFNQKGTIRTKYGTRNQLQAAVNALKSNGIQVYGDVVMNHKGGADATEMVRAVEVNPNNRNQEVSGEYTIEAWTKFDFPGRGNTHSNFKWRWYHFDGVDWDQSRKLNNRIYKFRGDGKGWDWEVDTENGNYDYLMYADIDMDHPEVVNELRNWGVWYTNTLGLDGFRLDAVKHIKYSFMRDWLNHVRSATGKNMFAVAEFWKNDLGAIENYLNKTNWNHSVFDVPLHYNLYNASKSGGNYDMRQIFNGTVVQRHPMHAVTFVDNHDSQPEEALESFVEEWFKPLAYALTLTREQGYPSVFYGDYYGIPTHGVPAMKSKIDPILEARQKYAYGRQNDYLDHHNIIGWTREGNTAHPNSGLATIMSDGAGGNKWMFVGRNKAGQVWTDITGNRAGTVTINADGWGNFSVNGGSVSIWVNK

SEQ ID NO: 22035 - protein, 485 aa, Bacillus sp. 707
HHNGTNGTMMQYFEWYLPNDGNHWNRLNSDASNLKSKGITAVWIPPAWKGASQNDVGYGAYDLYDLGEFNQKGTVRTKYGTRSQLQAAVTSLKNNGIQVYGDVVMNHKGGADATEMVRAVEVNPNNRNQEVTGEYTIEAWTRFDFPGRGNTHSSFKWRWYHFDGVDWDQSRRFNNRIYKFRGHGKAWDWEVDTENGNYDYLMYADIDMDHPEVVNELRNWGVWYTNTLGLDGFRIDAVKHIKYSFTRDWINHVRSATGKNMFAVAEFWKNDLGAIENYLQKTNWNHSVFDVPLHYNLYNASKSGGNYDMRNIFNGTVVQRHPSHAVTFVDNHDSQPEEALESFVEEWFKPLAYALTLTREQGYPSVFYGDYYGIPTHGVPAMRSKIDPILEARQKYAYGKQNDYLDHHNIIGWTREGNTAHPNSGLATIMSDGAGGSKWMFVGRNKAGQVWSDITGNRTGTVTINADGWGNFSVNGGSVSIWVNK

SEQ ID NO: 22036 - protein, 485 aa, Bacillus sp. 707
HHNGTNGTMMQYFEWYLPNDGNHWNRLNSDASNLKSKGITAVWIPPAWKGASQNDVGYGAYDLYDLGEFNQKGTVRTKYGTRSQLQAAVTSLKNNGIQVYGDVVMNHKGGADATEMVLAVEVNPNNRNQEVTGEYTIEAWTRFDFPGRGNTHSSFKWRWYHFDGVDWDQSRRLNNRIYKFRGHGKAWDWEVDTENGNYDYLMYADIDMDHPEVVNELRNWGVWYTNTLGLDGFRIDAVKHIKYSFTRDWINHVRSATGKNMFAVAEFWKNDLGAIENYLQKTNWNHSVFDVPLHYNLYNASKSGGNYDMRNIFNGTVVQRHPSHAVTFVDNHDSQPEEALESFVEEWFKPLAYALTLTREQGYPSVFYGDYYGIPTHGVPAMRSKIDPILEARQKYAYGKQNDYLDHHNIIGWTREGNTAHPNSGLATIMSDGAGGSKWMFVGRNKAGQVWSDITGNRTGTVTINADGWGNFSVNGGSVSIWVNK

SEQ ID NO: 22037 - protein, 485 aa, Bacillus subtilis
HHNGTNGTMMQYFEWYLPNDGNHWNRLRSDASNLKDKGISAVWIPPAWKGASQNDVGYGAYDLYDLGEFNQKGTIRTKYGTRNQLQAAVNALKSNGIQVYGDVVMNHKGGADATEMVRAVEVNPNNRNQHVSGEYTIEAWTKFDFPGRGNTHSNFKWRWYHFDGVDWDQSRKLNNRIYKFRGDGKGWDWEVDTENGNYDYLMYADIDMDHPEVVNELRNWGVWYTNTLGLDGFRIDAVKHIKYSFTRDWINHVRSATGKNMFAVAEFWKNDLGAIENYLNKTNWNHSVFDVPLHYNLYNASKSGGNYDMRQIFNGTVVQRHPMHAVTFVDNHDSQPEEALESFVEEWFKPLAYALTLTREQGYPSVFYGDYYGIPTHGVPAMKSKIDPILEARQKYAYGRQNDYLDHHNIIGWTREGNTAHPNSGLATIMSDGAGGNKWMFVGRNKAGQVWTDITGNRAGTVTINADGWGNFSVNGGSVSIWVNK

SEQ ID NO: 22038 - protein, 485 aa, Bacillus subtilis
HHNGTNGTMMQYFEWYLPNDGNHWNRLRSDASNLKDKGISAVWIPPAWKGASQNDVGYGAYDLYDLGEFNQKGTIRTKYGTRNQLQAAVNALKSNGIQVYGDVVMNHKGGADATEMVRAVEVNPNNRNQEVSGEYTIEAWTKFDFPGRGNTHSNFKWRWYHFDGVDWDQSRKLNNRIYKFRGDGKGWDWEVDTENGNYDYLMYADIDMDHPEVVNELRNWGVWYTNTLGLDGFRIDAVKHIKYSFTKDWINHVRSATGKNMFAVAEFWKNDLGAIENYLNKTNWNHSVFDVPLHYNLYNASKSGGNYDMRQIFNGTVVQRHPMHAVTFVDNHDSQPEEALESFVEEWFKPLAYALTLTREQGYPSVFYGDYYGIPTHGVPAMKSKIDPILEARQKYAYGRQNDYLDHHNIIGWTREGNTAHPNSGLATIMSDGAGGNKWMFVGRNKAGQVWTDITGNRAGTVTINADGWGNFSVNGGSVSIWVNK

SEQ ID NO: 22039 - protein, 485 aa, Bacillus subtilis
HHNGTNGTMMQYFEWYLPNDGNHWNRLRSDASNLKDKGISAVWIPPAWKGASQNDVGYGAYDLYDLGEFNQKGTIRTKYGTRNQLQAAVNALKSNGIQVYGDVVMNHKGGADATEMVRAVEVNPNNRNQEVSGEYTIEAWTKFDFPGRGNTHSNFKWRWYHFDGVDWDQSRKLNNRIYKFRGDGKGWDWEVDTENGNYDYLMNADIDMDHPEVVNELRNWGVWYTNTLGLDGFRIDAVKHIKYSFTRDWINHVRSATGKNMFAVAEFWKNDLGAIENYLNKTNWNHSVFDVPLHYNLYNASKSGGNYDMRQIFNGTVVQRHPMHAVTFVDNHDSQPEEALESFVEEWFKPLAYALTLTREQGYPSVFYGDYYGIPTHGVPAMKSKIDPILEARQKYAYGRQNDYLDHHNIIGWTREGNTAHPNSGLATIMSDGAGGNKWMFVGRNKAGQVWTDITGNRAGTVTINADGWGNFSVNGGSVSIWVNK

SEQ ID NO: 22040 - protein, 485 aa, Bacillus sp. 707
HHNGTNGTMMQYFEWYLPNDGNHWNRLNSDASNLKSKGITAVWIPPAWKGASQNDVGYGAYDLYDLGEFNQKGTVRTKYGTRSQLQAAVTSLKNNGIQVYGDVVMNHKGGADATEMVRAVEVNPNNRNQEVTGEYTIEAWTRFDFPGRGNTHSSFKWRWYHFDGVDWDQSRRLNNRIYKFRGHGKAWDWEVDTENGNYDYLMYADIDMDHPEVVNELRNWGVWYTNTLGLDGFRIDAVKHIKYSFTRDWITHVRSATGKNMFAVAEFWKNDLGAIENYLQKTNWNHSVFDVPLHYNLYNASKSGGNYDMRNIFNGTVVQRHPSHAVTFVDNHDSQPEEALESFVEEWFKPLAYALTLTREQGYPSVFYGDYYGIPTHGVPAMRSKIDPILEARQKYAYGKQNDYLDHHNIIGWTREGNTAHPNSGLATIMSDGAGGSKWMFVGRNKAGQVWSDITGNRTGTVTINADGWGNFSVNGGSVSIWVNK

SEQ ID NO: 22041 - protein, 485 aa, Bacillus sp. 707
HHNGTNGTMMQYFEWYLPNDGNHWNRLNSDASNLKSKGITAVWIPPAWKGASQNDVGYGAYDLYDLGEFNQKGTVRTKYGTRSQLQAAVTSLKNNGIQVYGDVVMNHKGGADATEMVRAVEVNPNNRNQEVTGEYTIEAWTRFDFPGRGNTHSSFKWRWYHFDGVDWDQSRQLNNRIYKFRGHGKAWDWEVDTENGNYDYLLYADIDMDHPEVVNELRNWGVWYTNTLGLDGFRIDAVKHIKYSFTRDWINHVRNATGKNMFAVAEFWKNDLGAIENYLQKTNWNHSVFDVPLHYNLYNASKSGGNYDMRNIFNGTVVQRHPSHAVTFVDNHDSQPEEALESFVEEWFKPLAYALTLTREQGYPSVFYGDYYGIPTHGVPAMRSKIDPILEARQKYAYGKQNDYLDHHNIIGWTREGNTAHPNSGLATIMSDGAGGSKWMFVGRNKAGQVWSDITGNRTGTVTINADGWGNFSVNGGSVSIWVNK

SEQ ID NO: 22042 - protein, 483 aa, Synthetic construct
HHAGTNGTMMQYFEWYLPNDGNHWNRLRSDASNLKDKGISAVWIPPAWKGASQNDVGYGAYDLYDLGEFNQKGTIRTKYGTRNQLQAAVNALKSNGIQVYGDVVMNHKGGADATEMVKAVEVNPNNRNQEVSGEYTIEAWTKFDFPGRGNTHSNFKWRWYHFDGVDWDQSRKLNNRIYKFRGKGWDWEVDTEFGNYDYLMYADIDMDHPEVVNELRNWGVWYTNTLGLDGFRIDAVKHIKYSFTRDWINHVRSATGKNMFAVAEFWKNDLGAIENYLNKTNWNHSVFDVPLHYNLYNASKSGGNYDMRQIFNGTVVQKHPMHAVTFVDNHDSQPEEALESFVEEWFKPLAYALTLTREQGYPSVFYGDYYGIPTHGVPAMKSKIDPILEARQKYAYGRQNDYLDHHNIIGWTREGNTAHPNSGLATIMSDGAGGNKWMFVGRNKAGQVWTDITGNKAGTVTINADGWGNFSVXGGSVSIWVNK

SEQ ID NO: 22043 - protein, 483 aa, Bacillus sp.
HHNGTNGTLMQYFEWYLPNDGNHWNRLRSDASNLKDKGISAVWIPPAWKGASQNDVGYGAYDLYDLGEFNQKGTIRTKYGTRNQLQAAVNALKSNGIQVYGDVVMNHKGGADATEMVKAVEVNPNNRNQEVSGEYTIEAWTKFDFPGRGNTHSNFKWRWYHFDGVDWDQSRKLNNRIYKFRGKGWDWEVDTENGNYDYLXYADIDMDHPEVVNELRNWGVWYTNTLGLDGFRIDAVKHIKYSFTRDWINHVRSATGKNMFAVAEFWKNDLGAIENYLNKTNWNHSVFDVPLHYNLYNASKSGGNYDMRQIFNGTVVQKHPTHAVTFVDNHDSQPEEALESFVEEWFKPLAYALTLTREQGYPSVFYGDYYGIPTHGVPAMKSKIDPILEARQKYAYGRQNDYLDHHNIIGWTREGNTAHPNSGLATIMSDGAGGNKWMFVGRNKAGQVWTDITGNKAGTVTINADGWGNFSVNGGSVSIWVNK

SEQ ID NO: 22044 - protein, 485 aa, Bacillus subtilis
HHNGTNGTMMQYFEWYLPNDGNHWNRLRSDASNLKDKGISAVWIPPAWKGASQNDVGYGAYDLYDLGEFNQKGTIRTKYGTRNQLQAAVNALKSNGIQVYGDVVMNHKAGADATEMVRAVEVNPNNRNQEVSGEYTIEAWTKFDFPGRGNTHSNFKWRWYHFDGVDWDQSRKLNNRIYKFRGDGKGWDWEVDTENGNYDYLMYADIDMDHPEVVNELRNWGVWYTNTLGLDGFRIDAVKHIKYSFTRDWINHVRSATGKNMFAVAEFWKNDLGAIENYLNKTNWNHSVFDVPLHYNLYNASKSGGNYDMRQIFNGTVVQRHPMHAVTFVDNHDSQPEEALESFVEEWFKPLAYALTLTREQGYPSVFYGDYYGIPTHGVPAMKSKIDPILEARQKYAYGRQNDYLDHHNIIGWTREGNTAHPNSGLATIMSDGAGGNKWMFVGRNKAGQVWTDITGNRAGTVTINADGWGNFSVNGGSVSIWVNK

SEQ ID NO: 22045 - protein, 485 aa, Bacillus sp. 707
HHNGTNGTMMQYFEWYLPNDGNHWNRLNSDASNLKSKGITAVWIPPAWKGASQNDVGYGAYDLYDLGEFNQKGTVRTKYGTRSQLQAAVTSLKNNGIQVYGDVVMNHKGGADATEMVRAVEVNPNNRNQEVTGEYTIEAWTRFDFPGRGNTHSSFKWRWYHFDGVDWDQSRRLNNRIYKFRGHGKAWDWEVDTENGNYDYLMYADIDMDHPEVVNELRNWGEWYTNTLGLDGFRIDAVKHIKYSFTRDWINHVRSATGKNMFAVAEFWKNDLGAIENYLQKTNWNHSVFDVPLHYNLYNASKSGGNYDMRNIFNGTVVQRHPSHAVTFVDNHDSQPEEALESFVEEWFKPLAYALTLTREQGYPSVFYGDYYGIPTHGVPAMRSKIDPILEARQKYAYGKQNDYLDHHNIIGWTREGNTAHPNSGLATIMSDGAGGSKWMFVGRNKAGQVWSDITGNRTGTVTINADGWGNFSVNGGSVSIWVNK

SEQ ID NO: 22046 - protein, 483 aa, Synthetic construct
HHSGTNGTMMQYFEWYLPNDGNHWNRLRSDASNLKDKGISAVWIPPAWKGASQNDVGYGAYDLYDLGEFNQKGTIRTKYGTRNQLQAAVNALKSNGIQVYGDVVMNHKGGADATEMVKAVEVNPNNRNQEVSGEYTIEAWTKFDFPGRGNTHSNFKWRWYHFDGVDWDQSRKLNNRIYKFRGKGWDWEVDTEFGNYDYLMYADIDMDHPEVVNELRNWGVWYTNTLGLDGFRIDAVKHIKYSFTRDWINHVRSATGKNMFAVAEFWKNDLGAIENYLNKTNWNHSVFDVPLHYNLYNASKSGGNYDMRQIFNGTVVQKHPMHAVTFVDNHDSQPEEALESFVEEWFKPLAYALTLTREQGYPSVFYGDYYGIPTHGVPAMKSKIDPILEARQKYAYGRQNDYLDHHNIIGWTREGNTAHPNSGLATIMSDGAGGNKWMFVGRNKAGQVWTDITGNKAGTVTINADGWGNFSVXGGSVSIWVNK

SEQ ID NO: 22047 - protein, 485 aa, Bacillus subtilis
HHNGTNGTMMQYFEWYLPNDGNHWNRLRSDASNLKDKGISAVWIPPAWKGASQNDVGYGAYDLYDLGEFNQKGTIRTKYGTRNQLQAAVNALKSNGIQVYGDVVMNHKGGADATEMVRAVEVNPNNRNQEVSGEYTIEAWTKFDFPGRGNTHSNFKWRWYHFDGVDWDQSRKLNNRIYKFRGDGKGWDWEVDTENGNYDYLMYADIDMDHPEVVNELRNWGVWYTNTLGLDGFRIDAVKHIKYSFTRDWINHVRSATGKNMFAVAEFWKNDLGAIENYLNKTNWNHSVFDVPLHYNLYNASKSGGNYDMRQIFNGTVVHRHPMHAVTFVDNHDSQPEEALESFVEEWFKPLAYALTLTREQGYPSVFYGDYYGIPTHGVPAMKSKIDPILEARQKYAYGRQNDYLDHHNIIGWTREGNTAHPNSGLATIMSDGAGGNKWMFVGRNKAGQVWTDITGNRAGTVTINADGWGNFSVNGGSVSIWVNK

SEQ ID NO: 22048 - protein, 485 aa, Bacillus sp.
HHNGTNGTLMQYFEWYLPNDGNHWNRLRSDASNLKDKGISAVWIPPAWKGASQNDVGYGAYDLYDLGEFNQKGTIRTKYGTRNQLQAAVNALKSNGIQVYGDVVMNHKGGADATEMVRAVEVNPNNRNQEVSGEYTIEAWTKFDFPGRGNTHSNFKWRWYHFDGVDWDQSRKLNNRIYKFRGDGKGWDWEVDTENGNYDYLLYADIDMDHPEVVNELRNWGVWYTNTLGLDGFRIDAVKHIKYSFTRDWINHVRSATGKNMFAVAEFWKNDLGAIENYLNKTNWNHSVFDVPLHYNLYNASKSGGNYDMRQIFNGTVVQRHPMHAVTFVDNHDSQPEESLESFVEEWFKPLAYALTLTREQGYPSVFYGDYYGIPTHGVPAMKSKIDPILEARQKYAYGRQNDYLDHHNIIGWTREGNTAHPNSGLATIMSDGAGGNKWMFVGRNKAGQVWTDITGNRAGTVTINADGWGNFSVNGGSVSIWVNK

SEQ ID NO: 22049 - protein, 483 aa, Synthetic construct
HHPGTNGTMMQYFEWYLPNDGNHWNRLRSDASNLKDKGISAVWIPPAWKGASQNDVGYGAYDLYDLGEFNQKGTIRTKYGTRNQLQAAVNALKSNGIQVYGDVVMNHKGGADATEMVKAVEVNPNNRNQEVSGEYTIEAWTKFDFPGRGNTHSNFKWRWYHFDGVDWDQSRKLNNRIYKFRGKGWDWEVDTEFGNYDYLMYADIDMDHPEVVNELRNWGVWYTNTLGLDGFRIDAVKHIKYSFTRDWINHVRSATGKNMFAVAEFWKNDLGAIENYLNKTNWNHSVFDVPLHYNLYNASKSGGNYDMRQIFNGTVVQKHPMHAVTFVDNHDSQPEEALESFVEEWFKPLAYALTLTREQGYPSVFYGDYYGIPTHGVPAMKSKIDPILEARQKYAYGRQNDYLDHHNIIGWTREGNTAHPNSGLATIMSDGAGGNKWMFVGRNKAGQVWTDITGNKAGTVTINADGWGNFSVXGGSVSIWVNK

SEQ ID NO: 22050 - protein, 485 aa, Bacillus sp. 707
HHNGTNGTMMQYFEWYLPNDGNHWNRLNSDASNLKSKGITAVWIPPAWKGASQNDVGYGAYDLYDLGEFNQKGTVRTKYGTRSQLQAAVTSLKNNGIQVYGDVVMNHKGGADATEMVRAVEVNPNNRNQEVTGEYTIEAWTRFDFPGRGNTHSSFKWRWYHFDGVDWDQSRRLNNRIYKFRGHGKAWDWEVDTENGNYDYLMYADIDMDHPEVVNELRNWGVWYTNTLGLDGFRIDAVKHIKYSFTRDWINHVRSATGKNMFAVAEFWKNDLGAIENYLQKTNWNHSVFDVPLHYNLYNASKSGGNYDMRNIFNGTVVQRHPSHAVTFVDNHDSQPEEALESFVEEWFKPLAYALTLTREQGYPSVFYGDYYGIPTHGVPAMRSKIDPILEARQKYAYGKQNDYLDHHNIIGWTREGNTAHPNSGLATIMSDGAGGSKWMFVGRNKAGQVWHDITGNRTGTVTINADGWGNFSVNGGSVSIWVNK

SEQ ID NO: 22051 - protein, 482 aa, Bacillus subtilis
HHNGTNGTMQYFEWYLPNDGNHWNRLRSDASNLKDKGISAVWIPPAWKGASQNDVGYGAYDLYDLGEFNQKGTIRTKYGTRNQLQAAVNALKSNGIQVYGDVVMNHKGGADATEMVKAVEVNPNNRNQEVSGEYTIEAWTKFDFPGRGNTHSNFKWRWYHFDGVDWDQSRKLNNRIYKFRGKGWDWEVDTEFGNYDYLLYADIDMDHPEVVNELRNWGVWYTNTLGLDGFRIDAVKHIKYSFTRDWINHVRSATGKNMFAVAEFWKNDLGAIENYLNKTNWNHSVFDVPLHYNLYNASKSGGNYDMRQIFNGTVVQKHPTHAVTFVDNHDSQPEEALESFVEEWFKPLAYALTLTREQGYPSVFYGDYYGIPTHGVPAMKSKIDPILEARQKYAYGRQNDYLDHHNIIGWTREGNTAHPNSGLATIMSDGAGGNKWMFVGRNKAGQVWTDITGNKAGTVTINADGWGNFSVNGGSVSIWVNK

SEQ ID NO: 22052 - protein, 483 aa, Synthetic construct
HHNGTNGTMMQYFEWYLPNDGNHWHRLRSDASNLKDKGITAVWIPPAWKGASQNDVGYGAYDLYDLGEFNQKGTVRTKYGTRNQLQAAVTALKSNGIQVWGDVVMNHKGGADATEWVRAVEVNPSNRNQEVSGDYTIEAWTKFDFPGRGNTHSNFKWRWYHFDGVDWDQSRQLQNKIYKFRGDGKEWDWEVDTENGNYDYLMYADYDMDHPEVVNELRNWGVWYTNTLGLDGFRIDAVKHIKYSFTRDWLTHVRNTTQKNMFAVAEFWKNDIGAIENYLSNTNWNHSVFDVPLHYNLYNASRSGGNYDMRQIFNGTVVQRHPTHAVTFVDNHDSQPEEALESFVEEWFKPLAYALTLTRDQGEPSVFYGDYYGIPTHGVPAMKSKIDPILEARQKYAYGKQNDYLDHHNMIGWTREGNTAHPNSGLATIMSDGPGGNKWMYVGRNKAGQVWRDITGNRSGTVTINADGWGNFSVNGGSVSIWV

SEQ ID NO: 22053 - protein, 483 aa, Synthetic construct
HHNGTNGTMMQYFEWYLPNDGNHWHRLRSDASNLKDKGITAVWIPPAWKGASQNDVGYGAYDLYDLGEFNQKGTVRTKYGTRNQLQAAVTALKSNGIQVWGDVVMNHKGGADATEWVRAVEVNPSNRNQEVSGDYTIEAWTKFDFPGRGNTHSNFKWRWYHFDGVDWDQSRQLQNKIYKFQGDGKEWDWEVDEENGNYDYLMYADYDMDHPEVVNELRNWGVWYTNTLGLDGFRIDAVKHIKYSFTRDWLTHVRNTTQKNMFAVAEFWKNDIGAIENYLSKTNWNHSVFDVPLHYNLYNASRSGGNYDMRQIFNGTVVQRHPTHAVTFVDNHDSQPEEALESFVEEWFKPLAYALTLTRDQGEPSVFYGDYYGIPTHGVPAMKSKIDPILEARQKYAYGKQNDYLDHHNMIGWTREGNTAHPNSGLATIMSDGPGGNKWMYVGRNKAGQVWRDITGNRSGTVTINADGWGNFSVNGGSVSIWV

SEQ ID NO: 22054 - protein, 483 aa, Synthetic construct
HHNGTNGTMMQYFEWYLPNDGNHWHRLRSDASNLKDKGITAVWIPPAWKGASQNDVGYGAYDLYDLGEFNQKGTVRTKYGTRNQLQAAVTALKSNGIQVWGDVVMNHKGGADATEWVRAVEVNPSNRNQEVSGDYTIEAWTKFDFPGRGNTHSNFKWRWYHFDGVDWDQSRQLQNKIYKFQGDGKEWDWEVDEENGNYDYLMYADYDMDHPEVVNELRNWGVWYTNTLGLDGFRIDAVKHIKYSFTRDWLTHVRNTTGKNMFAVAEFWKNDIGAIENYLSNTNWNHSVFDVPLHYNLYNASRSGGNYDMRQIFNGTVVQRHPTHAVTFVDNHDSQPEEALESFVEEWFKPLAYALTLTRDQGEPSVFYGDYYGIPTHGVPAMKSKIDPILEARQKYAYGKQNDYLDHHNMIGWTREGNTAHPNSGLATIMSDGPGGNKWMYVGRNKAGQVWRDITGNRSGTVTINADGWGNFSVNGGSVSIWV

SEQ ID NO: 22055 - protein, 483 aa, Synthetic construct
HHNQTNGAMMQYFEWYLPNDGNHWNRLRSDASNLKDKGITAVWIPPAWKGASQNDVGYGAYDLYDLGEFNQKGTVRTKYGTRNQLQAAVTALKSNGIQVYGDVVMNHKGGADATEWVRAVEVNPSNRNQEVSGDTTIEAWTKFDFPGRGNTHSNFKWRWYHFDGVDWDQSRQLQNKIYKFRGDGKEWDWEVDEENGNYDYLMYADYDMDHPEVVNELRNWGVWYTNTLGLDGFRIDAVKHIKYSFTRDWLEHVRNTTQKNMFAVAEFWKNDIGAIENYLSKTNWNHSVFDVPLHYNLYNASRSGGNYDMRQIFNGTVVQRHPTHAVTFVDNHDSQPEEALESFVEEWFKPLAYALTLTRDQGYPSVFYGDYYGIPTHGVPAMKSKIDPILEARQKYAYGKQNDYMDHHNMIGWTREGNTAHPNSGLATIMSDGPGGNKWMYVGRNKAGQVWRDITGNRSGTVTINADGWGNFSVNGGSVSIWV

SEQ ID NO: 22056 - protein, 483 aa, Synthetic construct
HHNQTNGTMMQYFEWYLPNDGNHWNRLRSDASNLKDKGITAVWIPPAWKGASQNDVGYGAYDLYDLGEFNQKGTVRTKYGTRNQLQAAVTALKSNGIQVWGDVVMNHKGGADATEWVRAVEVNPSNRNQEVSGDYTIEAWTKFDFPGRGNTHSNFKWRWYHFDGVDWDQSRQLQNKIYKFRGDGKEWDWEVDEENGNYDYLMYADYDMDHPEVVNELRNWGVWYTNTLGLDGFRIDAVKHIKYSFTRDWLEHVRNTTQKNMFAVAEFWKNDIGAIENYLSNTNWNHSVFDVPLHYNLYNASRSGGNYDMRQIFNGTVVQRHPTHAVTFVDNHDSQPEEALESFVEEWFKPLAYALTLTRDQGYPSVFYGDYYGIPTHGVPAMKSKIDPILEARQKYAYGKQNDYMDHHNMIGWTREGNTAHPNSGLATIMSDGPGGNKWMYVGRNKAGQVWRDITGNRSGTVTINADGWGNFSVNGGSVSIWV

SEQ ID NO: 22057 - protein, 483 aa, Synthetic construct
HHNGTNGTMMQYFEWYLPNDGNHWHRLRSDASNLKDKGITAVWIPPAWKGASQNDVGYGAYDLYDLGEFNQKGTVRTKYGTRNQLQAAVTALKSNGIQVYGDVVMNHKGGADATEWVRAVEVNPSNRNQEVSGDTTIEAWTKFDFPGRGNTHSNFKWRWYHFDGVDWDQSRQLQNKIYKFRGDGKEWDWEVDTENGNYDYLMYADYDMDHPEVVNELRNWGVWYTNTLGLDGFRIDAVKHIKYSFTRDWLTHVRNTTQKNMFAVAEFWKNDIGAIENYLSNTNWNHSVFDVPLHYNLYNASRSGGNYDMRQIFNGTVVQRHPTHAVTFVDNHDSQPEEALESFVEEWFKPLAYALTLTRDQGEPSVFYGDYYGIPTHGVPAMKSKIDPILEARQKYAYGKQNDYLDHHNMIGWTREGNTAHPNSGLATIMSDGPGGNKWMYVGRNKAGQVWRDITGNRSGTVTINADGWGNFSVNGGSVSIWV

SEQ ID NO: 22058 - protein, 483 aa, Synthetic construct
HHNQTNGTMMQYFEWYLPNDGNHWNRLRSDASNLKDKGITAVWIPPAWKGASQNDVGYGAYDLYDLGEFNQKGTVRTKYGTRNQLQAAVTALKSNGIQVWGDVVMNHKGGADATEWVRAVEVNPSNRNQEVSGDTTIEAWTKFDFPGRGNTHSNFKWRWYHFDGVDWDQSRQLQNKIYKFQGDGKEWDWEVDEENGNYDYLMYADYDMDHPEVVNELRNWGVWYTNTLGLDGFRIDAVKHIKYSFTRDWLEHVRNTTGKNMFAVAEFWKNDIGAIENYLSKTNWNHSVFDVPLHYNLYNASRSGGNYDMRQIFNGTVVQRHPTHAVTFVDNHDSQPEEALESFVEEWFKPLAYALTLTRDQGYPSVFYGDYYGIPTHGVPAMKSKIDPILEARQKYAYGKQNDYMDHHNMIGWTREGNTAHPNSGLATIMSDGPGGNKWMYVGRNKAGQVWRDITGNRSGTVTINADGWGNFSVNGGSVSIWV

SEQ ID NO: 22059 - protein, 483 aa, Synthetic construct
HHNGTNGTMMQYFEWYLPNDGNHWHRLRSDASNLKDKGITAVWIPPAWKGASQNDVGYGAYDLYDLGEFNQKGTVRTKYGTRNQLQAAVTALKSNGIQVWGDVVMNHKGGADATEWVRAVEVNPSNRNQEVSGDYTIEAWTKFDFPGRGNTHSNFKWRWYHFDGVDWDQSRQLQNKIYKFQGDGKEWDWEVDEENGNYDYLMYADYDMDHPEVVNELRNWGVWYTNTLGLDGFRIDAVKHIKYSFTRDWLTHVRNTTQKNMFAVAEFWKNDIGAIENYLSNTNWNHSVFDVPLHYNLYNASRSGGNYDMRQIFNGTVVQRHPTHAVTFVDNHDSQPEEALESFVEEWFKPLAYALTLTRDQGYPSVFYGDYYGIPTHGVPAMKSKIDPILEARQKYAYGKQNDYLDHHNMIGWTREGNTAHPNSGLATIMSDGPGGNKWMYVGRNKAGQVWRDITGNRSGTVTINADGWGNFSVNGGSVSIWV

SEQ ID NO: 22060 - protein, 483 aa, Synthetic construct
HHNQTNGTMMQYFEWYLPNDGNHWNRLRSDASNLKDKGITAVWIPPAWKGASQNDVGYGAYDLYDLGEFNQKGTVRTKYGTRNQLQAAVTALKSNGIQVWGDVVMNHKGGADATEWVRAVEVNPSNRNQEVSGDTTIEAWTKFDFPGRGNTHSNFKWRWYHFDGVDWDQSRQLQNKIYKFRGDGKEWDWEVDEENGNYDYLMYADYDMDHPEVVNELRNWGVWYTNTLGLDGFRIDAVKHIKYSFTRDWLEHVRNTTGKNMFAVAEFWKNDIGAIENYLSKTNWNHSVFDVPLHYNLYNASRSGGNYDMRQIFNGTVVQRHPTHAVTFVDNHDSQPEEALESFVEEWFKPLAYALTLTRDQGHPSVFYGDYYGIPTHGVPAMKSKIDPILEARQKYAYGKQNDYMDHHNMIGWTREGNTAHPNSGLATIMSDGPGGNKWMYVGRNKAGQVWRDITGNRSGTVTINADGWGNFSVNGGSVSIWV

SEQ ID NO: 22061 - protein, 483 aa, Synthetic construct
HHNQTNGTMMQYFEWYLPNDGNHWNRLRSDASNLKDKGITAVWIPPAWKGASQNDVGYGAYDLYDLGEFNQKGTVRTKYGTRNQLQAAVTALKSNGIQVYGDVVMNHKGGADATEWVRAVEVNPSNRNQEVSGDYTIEAWTKFDFPGRGNTHSNFKWRWYHFDGVDWDQSRQLQNKIYKFQGDGKEWDWEVDEENGNYDYLMYADYDMDHPEVVNELRNWGVWYTNTLGLDGFRIDAVKHIKYSFTRDWLEHVRNTTQKNMFAVAEFWKNDIGAIENYLSNTNWNHSVFDVPLHYNLYNASRSGGNYDMRQIFNGTVVQRHPTHAVTFVDNHDSQPEEALESFVEEWFKPLAYALTLTRDQGYPSVFYGDYYGIPTHGVPAMKSKIDPILEARQKYAYGKQNDYMDHHNMIGWTREGNTAHPNSGLATIMSDGPGGNKWMYVGRNKAGQVWRDITGNRSGTVTINADGWGNFSVNGGSVSIWV

SEQ ID NO: 22062 - protein, 483 aa, Synthetic construct
HHNQTNGTMMQYFEWYLPNDGNHWNRLRSDASNLKDKGITAVWIPPAWKGASQNDVGYGAYDLYDLGEFNQKGTVRTKYGTRNQLQAAVTALKSNGIQVWGDVVMNHKGGADATEWVRAVEVNPSNRNQEVSGDYTIEAWTKFDFPGRGNTHSNFKWRWYHFDGVDWDQSRQLQNKIYKFQGDGKEWDWEVDEENGNYDYLMYADYDMDHPEVVNELRNWGVWYTNTLGLDGFRIDAVKHIKYSFTRDWLEHVRNTTGKNMFAVAEFWKNDIGAIENYLSKTNWNHSVFDVPLHYNLYNASRSGGNYDMRQIFNGTVVQRHPTHAVTFVDNHDSQPEEALESFVEEWFKPLAYALTLTRDQGHPSVFYGDYYGIPTHGVPAMKSKIDPILEARQKYAYGKQNDYMDHHNMIGWTREGNTAHPNSGLATIMSDGPGGNKWMYVGRNKAGQVWRDITGNRSGTVTINADGWGNFSVNGGSVSIWV

SEQ ID NO: 22063 - protein, 483 aa, Synthetic construct
HHNQTNGTMMQYFEWYLPNDGNHWNRLRSDASNLKDKGITAVWIPPAWKGASQNDVGYGAYDLYDLGEFNQKGTVRTKYGTRNQLQAAVTALKSNGIQVWGDVVMNHKGGADATEWVRAVEVNPSNRNQEVSGDYTIEAWTKFDFPGRGNTHSNFKWRWYHFDGVDWDQSRQLQNKIYKFRGDGKEWDWEVDEENGNYDYLMYADYDMDHPEVVNELRNWGVWYTNTLGLDGFRIDAVKHIKYSFTRDWLEHVRNTTGKNMFAVAEFWKNDIGAIENYLSNTNWNHSVFDVPLHYNLYNASRSGGNYDMRQIFNGTVVQRHPTHAVTFVDNHDSQPEEALESFVEEWFKPLAYALTLTRDQGEPSVFYGDYYGIPTHGVPAMKSKIDPILEARQKYAYGKQNDYMDHHNMIGWTREGNTAHPNSGLATIMSDGPGGNKWMYVGRNKAGQVWRDITGNRSGTVTINADGWGNFSVNGGSVSIWV

SEQ ID NO: 22064 - protein, 483 aa, Synthetic construct
HHNQTNGTMMQYFEWYLPNDGNHWNRLRSDASNLKDKGITAVWIPPAWKGASQNDVGYGAYDLYDLGEFNQKGTVRTKYGTRNQLQAAVTALKSNGIQVWGDVVMNHKGGADATEWVRAVEVNPSNRNQEVSGDTTIEAWTKFDFPGRGNTHSNFKWRWYHFDGVDWDQSRQLQNKIYKFRGDGKEWDWEVDEENGNYDYLMYADYDMDHPEVVNELRNWGVWYTNTLGLDGFRIDAVKHIKYSFTRDWLEHVRNTTGKNMFAVAEFWKNDIGAIENYLSKTNWNHSVFDVPLHYNLYNASRSGGNYDMRQIFNGTVVQRHPTHAVTFVDNHDSQPEEALESFVEEWFKPLAYALTLTRDQGEPSVFYGDYYGIPTHGVPAMKSKIDPILEARQKYAYGKQNDYMDHHNMIGWTREGNTAHPNSGLATIMSDGPGGNKWMYVGRNKAGQVWRDITGNRSGTVTINADGWGNFSVNGGSVSIWV

SEQ ID NO: 22065 - protein, 483 aa, Synthetic construct
HHNGTNGTMMQYFEWYLPNDGNHWHRLRSDASNLKDKGITAVWIPPAWKGASQNDVGYGAYDLYDLGEFNQKGTVRTKYGTRNQLQAAVTALKSNGIQVWGDVVMNHKGGADATEWVRAVEVNPSNRNQEVSGDYTIEAWTKFDFPGRGNTHSNFKWRWYHFDGVDWDQSRQLQNKIYKFQGDGKEWDWEVDTENGNYDYLMYADYDMDHPEVVNELRNWGVWYTNTLGLDGFRIDAVKHIKYSFTRDWLTHVRNTTGKNMFAVAEFWKNDIGAIENYLSNTNWNHSVFDVPLHYNLYNASRSGGNYDMRQIFNGTVVQRHPTHAVTFVDNHDSQPEEALESFVEEWFKPLAYALTLTRDQGEPSVFYGDYYGIPTHGVPAMKSKIDPILEARQKYAYGKQNDYLDHHNMIGWTREGNTAHPNSGLATIMSDGPGGNKWMYVGRNKAGQVWRDITGNRSGTVTINADGWGNFSVNGGSVSIWV

SEQ ID NO: 22066 - protein, 483 aa, Synthetic construct
HHNQTNGTMMQYFEWYLPNDGNHWNRLRSDASNLKDKGITAVWIPPAWKGASQNDVGYGAYDLYDLGEFNQKGTVRTKYGTRNQLQAAVTALKSNGIQVWGDVVMNHKGGADATEWVRAVEVNPSNRNQEVSGDYTIEAWTKFDFPGRGNTHSNFKWRWYHFDGVDWDQSRQLQNKIYKFQGDGKEWDWEVDEENGNYDYLMYADYDMDHPEVVNELRNWGVWYTNTLGLDGFRIDAVKHIKYSFTRDWLEHVRNTTGKNMFAVAEFWKNDIGAIENYLSNTNWNHSVFDVPLHYNLYNASRSGGNYDMRQIFNGTVVQRHPTHAVTFVDNHDSQPEEALESFVEEWFKPLAYALTLTRDQGYPSVFYGDYYGIPTHGVPAMKSKIDPILEARQKYAYGKQNDYMDHHNMIGWTREGNTAHPNSGLATIMSDGPGGNKWMYVGRNKAGQVWRDITGNRSGTVTINADGWGNFSVNGGSVSIWV

SEQ ID NO: 22067 - protein, 483 aa, Synthetic construct
HHNQTNGTMMQYFEWYLPNDGNHWNRLRSDASNLKDKGITAVWIPPAWKGASQNDVGYGAYDLYDLGEFNQKGTVRTKYGTRNQLQAAVTALKSNGIQVYGDVVMNHKGGADATEWVRAVEVNPSNRNQEVSGDTTIEAWTKFDFPGRGNTHSNFKWRWYHFDGVDWDQSRQLQNKIYKFRGDGKEWDWEVDEENGNYDYLMYADYDMDHPEVVNELRNWGVWYTNTLGLDGFRIDAVKHIKYSFTRDWLEHVRNTTQKNMFAVAEFWKNDIGAIENYLSKTNWNHSVFDVPLHYNLYNASRSGGNYDMRQIFNGTVVQRHPTHAVTFVDNHDSQPEEALESFVEEWFKPLAYALTLTRDQGHPSVFYGDYYGIPTHGVPAMKSKIDPILEARQKYAYGKQNDYMDHHNMIGWTREGNTAHPNSGLATIMSDGPGGNKWMYVGRNKAGQVWRDITGNRSGTVTINADGWGNFSVNGGSVSIWV

SEQ ID NO: 22068 - protein, 483 aa, Synthetic construct
HHNQTNGTMMQYFEWYLPNDGNHWHRLRSDASNLKDKGITAVWIPPAWKGASQNDVGYGAYDLYDLGEFNQKGTVRTKYGTRNQLQAAVTALKSNGIQVYGDVVMNHKGGADATEWVRAVEVNPSNRNQEVSGDYTIEAWTKFDFPGRGNTHSNFKWRWWHFDGVDWDQSRQLQNKIYKFRGDGKEWDWEVDTENGNYDYLMYADIDMDHPEVVNELRNWGVWYTNTLGLDGFRIDAVKHIKYSFTRDWLEHVRNTTGKNMFAVAEFWKNDIGAIRNYLSKTNWNHSVFDVPLHYNLYNASRSGGNYDMRQIFNGTVVQRHPTHAVTFVDNHDSQPEEALESFVEEWFKPLAYALTLTRDQGYPSVFYGDYYGIPTHGVPAMKSKIDPILEARQKYAYGKQNDYMDHHNMIGWTREGNTAHPNSGLATIMSDGPGGNKWMYVGRNKAGQVWRDITGNRSGTVTINADGWGNFSVNGGSVSIWV

SEQ ID NO: 22069 - protein, 483 aa, Synthetic construct
HHNGTNGTMMQYFEWYLPNDGNHWHRLRSDASNLKDKGITAVWIPPAWKGASQNDVGYGAYDLYDLGEFNQKGTVRTKYGTRNQLQAAVTALKSNGIQVWGDVVMNHKGGADATEWVRAVEVNPSNRNQEVSGDTTIEAWTKFDFPGRGNTHSNFKWRWYHFDGVDWDQSRQLQNKIYKFRGDGKEWDWEVDEENGNYDYLMYADYDMDHPEVVNELRNWGVWYTNTLGLDGFRIDAVKHIKYSFTRDWLTHVRNTTQKNMFAVAEFWKNDIGAIENYLSKTNWNHSVFDVPLHYNLYNASRSGGNYDMRQIFNGTVVQRHPTHAVTFVDNHDSQPEEALESFVEEWFKPLAYALTLTRDQGEPSVFYGDYYGIPTHGVPAMKSKIDPILEARQKYAYGKQNDYLDHHNMIGWTREGNTAHPNSGLATIMSDGPGGNKWMYVGRNKAGQVWRDITGNRSGTVTINADGWGNFSVNGGSVSIWV

SEQ ID NO: 22070 - protein, 483 aa, Synthetic construct
HHNQTNGTMMQYFEWYLPNDGNHWNRLRSDASNLKDKGITAVWIPPAWKGASQNDVGYGAYDLYDLGEFNQKGTVRTKYGTRNQLQAAVTALKSNGIQVYGDVVMNHKGGADATEWVRAVEVNPSNRNQEVSGDYTIEAWTKFDFPGRGNTHSNFKWRWYHFDGVDWDQSRQLQNKIYKFQGDGKEWDWEVDEENGNYDYLMYADYDMDHPEVVNELRNWGVWYTNTLGLDGFRIDAVKHIKYSFTRDWLEHVRNTTGKNMFAVAEFWKNDIGAIENYLSNTNWNHSVFDVPLHYNLYNASRSGGNYDMRQIFNGTVVQRHPTHAVTFVDNHDSQPEEALESFVEEWFKPLAYALTLTRDQGEPSVFYGDYYGIPTHGVPAMKSKIDPILEARQKYAYGKQNDYMDHHNMIGWTREGNTAHPNSGLATIMSDGPGGNKWMYVGRNKAGQVWRDITGNRSGTVTINADGWGNFSVNGGSVSIWV

SEQ ID NO: 22071 - protein, 483 aa, Synthetic construct
HHNQTNGTMMQYFEWYLPNDGNHWNRLRSDASNLKDKGITAVWIPPAWKGASQNDVGYGAYDLYDLGEFNQKGTVRTKYGTRNQLQAAVTALKSNGIQVWGDVVMNHKGGADATEWVRAVEVNPSNRNQEVSGDYTIEAWTKFDFPGRGNTHSNFKWRWYHFDGVDWDQSRQLQNKIYKFRGDGKEWDWEVDEENGNYDYLMYADYDMDHPEVVNELRNWGVWYTNTLGLDGFRIDAVKHIKYSFTRDWLEHVRNTTQKNMFAVAEFWKNDIGAIENYLSKTNWNHSVFDVPLHYNLYNASRSGGNYDMRQIFNGTVVQRHPTHAVTFVDNHDSQPEEALESFVEEWFKPLAYALTLTRDQGHPSVFYGDYYGIPTHGVPAMKSKIDPILEARQKYAYGKQNDYMDHHNMIGWTREGNTAHPNSGLATIMSDGPGGNKWMYVGRNKAGQVWRDITGNRSGTVTINADGWGNFSVNGGSVSIWV

SEQ ID NO: 22072 - protein, 483 aa, Synthetic construct
HHNGTNGTMMQYFEWYLPNDGNHWHRLRSDASNLKDKGITAVWIPPAWKGASQNDVGYGAYDLYDLGEFNQKGTVRTKYGTRNQLQAAVTALKSNGIQVYGDVVMNHKGGADATEWVRAVEVNPSNRNQEVSGDTTIEAWTKFDFPGRGNTHSNFKWRWYHFDGVDWDQSRQLQNKIYKFQGDGKEWDWEVDTENGNYDYLMYADYDMDHPEVVNELRNWGVWYTNTLGLDGFRIDAVKHIKYSFTRDWLTHVRNTTQKNMFAVAEFWKNDIGAIENYLSKTNWNHSVFDVPLHYNLYNASRSGGNYDMRQIFNGTVVQRHPTHAVTFVDNHDSQPEEALESFVEEWFKPLAYALTLTRDQGEPSVFYGDYYGIPTHGVPAMKSKIDPILEARQKYAYGKQNDYLDHHNMIGWTREGNTAHPNSGLATIMSDGPGGNKWMYVGRNKAGQVWRDITGNRSGTVTINADGWGNFSVNGGSVSIWV

SEQ ID NO: 22073 - protein, 483 aa, Synthetic construct
HHNQTNGTMMQYFEWYLPNDGNHWNRLRSDASNLKDKGITAVWIPPAWKGASQNDVGYGAYDLYDLGEFNQKGTVRTKYGTRNQLQAAVTALKSNGIQVWGDVVMNHKGGADATEWVRAVEVNPSNRNQEVSGDYTIEAWTKFDFPGRGNTHSNFKWRWYHFDGVDWDQSRQLQNKIYKFRGDGKEWDWEVDEENGNYDYLMYADYDMDHPEVVNELRNWGVWYTNTLGLDGFRIDAVKHIKYSFTRDWLEHVRNTTGKNMFAVAEFWKNDIGAIENYLSNTNWNHSVFDVPLHYNLYNASRSGGNYDMRQIFNGTVVQRHPTHAVTFVDNHDSQPEEALESFVEEWFKPLAYALTLTRDQGHPSVFYGDYYGIPTHGVPAMKSKIDPILEARQKYAYGKQNDYMDHHNMIGWTREGNTAHPNSGLATIMSDGPGGNKWMYVGRNKAGQVWRDITGNRSGTVTINADGWGNFSVNGGSVSIWV

SEQ ID NO: 22074 - protein, 483 aa, Synthetic construct
HHNGTNGTMMQYFEWYLPNDGNHWHRLRSDASNLKDKGITAVWIPPAWKGASQNDVGYGAYDLYDLGEFNQKGTVRTKYGTRNQLQAAVTALKSNGIQVWGDVVMNHKGGADATEWVRAVEVNPSNRNQEVSGDTTIEAWTKFDFPGRGNTHSNFKWRWYHFDGVDWDQSRQLQNKIYKFRGDGKEWDWEVDTENGNYDYLMYADYDMDHPEVVNELRNWGVWYTNTLGLDGFRIDAVKHIKYSFTRDWLTHVRNTTQKNMFAVAEFWKNDIGAIENYLSNTNWNHSVFDVPLHYNLYNASRSGGNYDMRQIFNGTVVQRHPTHAVTFVDNHDSQPEEALESFVEEWFKPLAYALTLTRDQGYPSVFYGDYYGIPTHGVPAMKSKIDPILEARQKYAYGKQNDYLDHHNMIGWTREGNTAHPNSGLATIMSDGPGGNKWMYVGRNKAGQVWRDITGNRSGTVTINADGWGNFSVNGGSVSIWV

SEQ ID NO: 22075 - protein, 483 aa, Synthetic construct
HHNQTNGTMMQYFEWYLPNDGNHWNRLRSDASNLKDKGITAVWIPPAWKGASQNDVGYGAYDLYDLGEFNQKGTVRTKYGTRNQLQAAVTALKSNGIQVWGDVVMNHKGGADATEWVRAVEVNPSNRNQEVSGDYTIEAWTKFDFPGRGNTHSNFKWRWYHFDGVDWDQSRQLQNKIYKFRGDGKEWDWEVDEENGNYDYLMYADYDMDHPEVVNELRNWGVWYTNTLGLDGFRIDAVKHIKYSFTRDWLEHVRNTTQKNMFAVAEFWKNDIGAIENYLSKTNWNHSVFDVPLHYNLYNASRSGGNYDMRQIFNGTVVQRHPTHAVTFVDNHDSQPEEALESFVEEWFKPLAYALTLTRDQGEPSVFYGDYYGIPTHGVPAMKSKIDPILEARQKYAYGKQNDYMDHHNMIGWTREGNTAHPNSGLATIMSDGPGGNKWMYVGRNKAGQVWRDITGNRSGTVTINADGWGNFSVNGGSVSIWV

SEQ ID NO: 22076 - protein, 483 aa, Synthetic construct
HHNGTNGTMMQYFEWYLPNDGNHWHRLRSDASNLKDKGITAVWIPPAWKGASQNDVGYGAYDLYDLGEFNQKGTVRTKYGTRNQLQAAVTALKSNGIQVWGDVVMNHKGGADATEWVRAVEVNPSNRNQEVSGDTTIEAWTKFDFPGRGNTHSNFKWRWYHFDGVDWDQSRQLQNKIYKFQGDGKEWDWEVDEENGNYDYLMYADYDMDHPEVVNELRNWGVWYTNTLGLDGFRIDAVKHIKYSFTRDWLTHVRNTTGKNMFAVAEFWKNDIGAIENYLSKTNWNHSVFDVPLHYNLYNASRSGGNYDMRQIFNGTVVQRHPTHAVTFVDNHDSQPEEALESFVEEWFKPLAYALTLTRDQGEPSVFYGDYYGIPTHGVPAMKSKIDPILEARQKYAYGKQNDYLDHHNMIGWTREGNTAHPNSGLATIMSDGPGGNKWMYVGRNKAGQVWRDITGNRSGTVTINADGWGNFSVNGGSVSIWV

SEQ ID NO: 22077 - protein, 483 aa, Synthetic construct
HHNQTNGTMMQYFEWYLPNDGNHWNRLRSDASNLKDKGITAVWIPPAWKGASQNDVGYGAYDLYDLGEFNQKGTVRTKYGTRNQLQAAVTALKSNGIQVYGDVVMNHKGGADATEWVRAVEVNPSNRNQEVSGDYTIEAWTKFDFPGRGNTHSNFKWRWYHFDGVDWDQSRQLQNKIYKFRGDGKEWDWEVDEENGNYDYLMYADYDMDHPEVVNELRNWGVWYTNTLGLDGFRIDAVKHIKYSFTRDWLEHVRNTTQKNMFAVAEFWKNDIGAIENYLSNTNWNHSVFDVPLHYNLYNASRSGGNYDMRQIFNGTVVQRHPTHAVTFVDNHDSQPEEALESFVEEWFKPLAYALTLTRDQGHPSVFYGDYYGIPTHGVPAMKSKIDPILEARQKYAYGKQNDYMDHHNMIGWTREGNTAHPNSGLATIMSDGPGGNKWMYVGRNKAGQVWRDITGNRSGTVTINADGWGNFSVNGGSVSIWV

SEQ ID NO: 22078 - protein, 483 aa, Synthetic construct
HHNGTNGTMMQYFEWYLPNDGNHWHRLRSDASNLKDKGITAVWIPPAWKGASQNDVGYGAYDLYDLGEFNQKGTVRTKYGTRNQLQAAVTALKSNGIQVWGDVVMNHKGGADATEWVRAVEVNPSNRNQEVSGDTTIEAWTKFDFPGRGNTHSNFKWRWYHFDGVDWDQSRQLQNKIYKFRGDGKEWDWEVDTENGNYDYLMYADYDMDHPEVVNELRNWGVWYTNTLGLDGFRIDAVKHIKYSFTRDWLTHVRNTTGKNMFAVAEFWKNDIGAIENYLSNTNWNHSVFDVPLHYNLYNASRSGGNYDMRQIFNGTVVQRHPTHAVTFVDNHDSQPEEALESFVEEWFKPLAYALTLTRDQGEPSVFYGDYYGIPTHGVPAMKSKIDPILEARQKYAYGKQNDYLDHHNMIGWTREGNTAHPNSGLATIMSDGPGGNKWMYVGRNKAGQVWRDITGNRSGTVTINADGWGNFSVNGGSVSIWV

SEQ ID NO: 22079 - protein, 483 aa, Synthetic construct
HHNGTNGTMMQYFEWYLPNDGNHWHRLRSDASNLKDKGITAVWIPPAWKGASQNDVGYGAYDLYDLGEFNQKGTVRTKYGTRNQLQAAVTALKSNGIQVWGDVVMNHKGGADATEWVRAVEVNPSNRNQEVSGDCTIEAWTKFDFPGRGNTHSNFKWRWYHFDGVDWDQSRQLQNKIYKFRGDGKEWDWEVDTENGNYDYLMYADYDMDHPEVVNELRNWGVWYTNTLGLDGFRIDAVKHIKYSFTRDWLTHVRNTTQKNMFAVAEFWKNDIGAIENYLSKTNWNHSVFDVPLHYNLYNASRSGGNYDMRQIFNGTVVQRHPTHAVTFVDNHDSQPEEALESFVEEWFKPLAYALTLTRDQGEPSVFYGDYYGIPTHGVPAMKSKIDPILEARQKYAYGKQNDYLDHHNMIGWTREGNTAHPNSGLATIMSDGPGGNKWMYVGRNKAGQVWRDITGNRSGTVTINADGWGNFSVNGGSVSIWV

SEQ ID NO: 22080 - protein, 483 aa, Synthetic construct
HHNQTNGTMMQYFEWYLPNDGNHWNRLRSDASNLKDKGITAVWIPPAWKGASQNDVGYGAYDLYDLGEFNQKGTVRTKYGTRNQLQAAVTALKSNGIQVYGDVVMNHKGGADATEWVRAVEVNPSNRNQEVSGDTTIEAWTKFDFPGRGNTHSNFKWRWYHFDGVDWDQSRQLQNKIYKFQGDGKEWDWEVDEENGNYDYLMYADYDMDHPEVVNELRNWGVWYTNTLGLDGFRIDAVKHIKYSFTRDWLEHVRNTTQKNMFAVAEFWKNDIGAIENYLSKTNWNHSVFDVPLHYNLYNASRSGGNYDMRQIFNGTVVQRHPTHAVTFVDNHDSQPEEALESFVEEWFKPLAYALTLTRDQGYPSVFYGDYYGIPTHGVPAMKSKIDPILEARQKYAYGKQNDYMDHHNMIGWTREGNTAHPNSGLATIMSDGPGGNKWMYVGRNKAGQVWRDITGNRSGTVTINADGWGNFSVNGGSVSIWV

SEQ ID NO: 22081 - protein, 483 aa, Synthetic construct
HHNGTNGTMMQYFEWYLPNDGNHWHRLRSDASNLKDKGITAVWIPPAWKGASQNDVGYGAYDLYDLGEFNQKGTVRTKYGTRNQLQAAVTALKSNGIQVWGDVVMNHKGGADATEWVRAVEVNPSNRNQEVSGDYTIEAWTKFDFPGRGNTHSNFKWRWYHFDGVDWDQSRQLQNKIYKFRGDGKEWDWEVDEENGNYDYLMYADYDMDHPEVVNELRNWGVWYTNTLGLDGFRIDAVKHIKYSFTRDWLTHVRNTTQKNMFAVAEFWKNDIGAIENYLSNTNWNHSVFDVPLHYNLYNASRSGGNYDMRQIFNGTVVQRHPTHAVTFVDNHDSQPEEALESFVEEWFKPLAYALTLTRDQGEPSVFYGDYYGIPTHGVPAMKSKIDPILEARQKYAYGKQNDYLDHHNMIGWTREGNTAHPNSGLATIMSDGPGGNKWMYVGRNKAGQVWRDITGNRSGTVTINADGWGNFSVNGGSVSIWV

SEQ ID NO: 22082 - protein, 483 aa, Synthetic construct
HHNQTNGTMMQYFEWYLPNDGNHWNRLRSDASNLKDKGITAVWIPPAWKGASQNDVGYGAYDLYDLGEFNQKGTVRTKYGTRNQLQAAVTALKSNGIQVWGDVVMNHKGGADATEWVRAVEVNPSNRNQEVSGDYTIEAWTKFDFPGRGNTHSNFKWRWYHFDGVDWDQSRQLQNKIYKFQGDGKEWDWEVDEENGNYDYLMYADYDMDHPEVVNELRNWGVWYTNTLGLDGFRIDAVKHIKYSFTRDWLEHVRNTTQKNMFAVAEFWKNDIGAIENYLSKTNWNHSVFDVPLHYNLYNASRSGGNYDMRQIFNGTVVQRHPTHAVTFVDNHDSQPEEALESFVEEWFKPLAYALTLTRDQGYPSVFYGDYYGIPTHGVPAMKSKIDPILEARQKYAYGKQNDYMDHHNMIGWTREGNTAHPNSGLATIMSDGPGGNKWMYVGRNKAGQVWRDITGNRSGTVTINADGWGNFSVNGGSVSIWV

SEQ ID NO: 22083 - protein, 483 aa, Synthetic construct
HHNQTNGTMMQYFEWYLPNDGNHWNRLRSDASNLKDKGITAVWIPPAWKGASQNDVGYGAYDLYDLGEFNQKGTVRTKYGTRNQLQAAVTALKSNGIQVWGDVVMNHKGGADATEWVRAVEVNPSNRNQEVSGDTTIEAWTKFDFPGRGNTHSNFKWRWYHFDGVDWDQSRQLQNKIYKFRGDGKEWDWEVDEENGNYDYLMYADYDMDHPEVVNELRNWGVWYTNTLGLDGFRIDAVKHIKYSFTRDWLEHVRNTTQKNMFAVAEFWKNDIGAIENYLSKTNWNHSVFDVPLHYNLYNASRSGGNYDMRQIFNGTVVQRHPTHAVTFVDNHDSQPEEALESFVEEWFKPLAYALTLTRDQGYPSVFYGDYYGIPTHGVPAMKSKIDPILEARQKYAYGKQNDYMDHHNMIGWTREGNTAHPNSGLATIMSDGPGGNKWMYVGRNKAGQVWRDITGNRSGTVTINADGWGNFSVNGGSVSIWV

SEQ ID NO: 22084 - protein, 483 aa, Synthetic construct
HHNGTNGTMMQYFEWYLPNDGNHWHRLRSDASNLKDKGITAVWIPPAWKGASQNDVGYGAYDLYDLGEFNQKGTVRTKYGTRNQLQAAVTALKSNGIQVWGDVVMNHKGGADATEWVRAVEVNPSNRNQEVSGDTTIEAWTKFDFPGRGNTHSNFKWRWYHFDGVDWDQSRQLQNKIYKFRGDGKEWDWEVDTENGNYDYLMYADYDMDHPEVVNELRNWGVWYTNTLGLDGFRIDAVKHIKYSFTRDWLTHVRNTTQKNMFAVAEFWKNDIGAIENYLSKTNWNHSVFDVPLHYNLYNASRSGGNYDMRQIFNGTVVQRHPTHAVTFVDNHDSQPEEALESFVEEWFKPLAYALTLTRDQGEPSVFYGDYYGIPTHGVPAMKSKIDPILEARQKYAYGKQNDYLDHHNMIGWTREGNTAHPNSGLATIMSDGPGGNKWMYVGRNKAGQVWRDITGNRSGTVTINADGWGNFSVNGGSVSIWV

SEQ ID NO: 22085 - protein, 483 aa, Synthetic construct
HHNGTNGTMMQYFEWYLPNDGNHWHRLRSDASNLKDKGITAVWIPPAWKGASQNDVGYGAYDLYDLGEFNQKGTVRTKYGTRNQLQAAVTALKSNGIQVYGDVVMNHKGGADATEWVRAVEVNPSNRNQEVSGDTTIEAWTKFDFPGRGNTHSNFKWRWYHFDGVDWDQSRQLQNKIYKFRGDGKEWDWEVDTENGNYDYLMYADYDMDHPEVVNELRNWGVWYTNTLGLDGFRIDAVKHIKYSFTRDWLTHVRNTTGKNMFAVAEFWKNDIGAIENYLSNTNWNHSVFDVPLHYNLYNASRSGGNYDMRQIFNGTVVQRHPTHAVTFVDNHDSQPEEALESFVEEWFKPLAYALTLTRDQGEPSVFYGDYYGIPTHGVPAMKSKIDPILEARQKYAYGKQNDYLDHHNMIGWTSEGNTAHPNSGLATIMSDGPGGNKWMYVGRNKAGQVWRDITGNRSGTVTINADGWGNFSVNGGSVSIWV

SEQ ID NO: 22086 - protein, 483 aa, unidentified
SVPVNGTMMQYFEWYLPDDGTLWTKVANNAQSLANLGITALWLPPAYKGTSSSDVGYGVYDLYDLGEFNQKGTVRTKYGTKTQYIQAIQAAHTAGMQVYADVVFNHKAGADGTELVDAVEVNPSDRNQEISGTYQIQAWTKFDFPGRGNTYSSFKWRWYHFDGTDWDESRKLNRIYKFRGTGKAWDWEVDTENGNYDYLMYADLDMDHPEVVSELKNWGKWYVTTTNIDGFRLDAVKHIKYSFFPDWLSYVRTQTQKPLFAVGEFWSYDINKLHNYITKTNGSMSLFDAPLHNNFYIASKSGGYFDMRTLLNNTLMKDQPTLSVTLVDNHDTEPGQSLQSWVEPWFKPLAYAFILTRQEGYPCIFYGDYYGIPKYNIPALKSKLDPLLIARRDYAYGTQHDYIDNADIIGWTREGVAEKANSGLAALITDGPGGSKWMYVGKQHAGKTFYDLTGNRSDTVTINADGWGEFKVNGGSVSIWVPK

SEQ ID NO: 22087 - protein, 482 aa, Synthetic construct
APVNGTMMQYFEWDLPNDGTLWTKVKNEASSLSALGITALWLPPAYKGTSQADVGYGVYDLYDLGEFNQKGTIRTKYGTKTQYLQAIQAAKSAGMQVYADVVFDHKGGADGTEWVDAVEVNPSDRNQEISGTYQIQAWTKFDFPGRGNTYSSFKWRWYHFDGVDWDESRKLSRIYKFRGIGKAWDWEVDTENGNYDYLMYADLDMDHPEVVAELKNWGKWYVNTTNVDGFRLDAVKHIKYSFFPDWLSYVRNQTGKNLFAVGEFWGYDVNKLHNYITKTNGAMSLFDAPLHNNFYIASKSSGYFDMRYLLNNTLMKDQPALAVTLVDNHDTQPGQSLQSWVEPWFKPLAYAFILTRQEGYPCVFYGDYYGIPKYNIPGLKSKIDPLLIARRDYAYGTQRDYIDHQDIIGWTREGIDAKPNSGLAALITDGPGGSKWMYVGKRHAGKVFYDLTGNRSDTVTINADGWGEFKVNGGSVSIWVAK

SEQ ID NO: 22088 - protein, 488 aa, Anoxybacillus flavithermus
PVNGTMMQYFEWYLPDDGTLWTKVANNAQSLANLGITALWLPPAYKGTSSSDVGYGVYDLYDLGEFNQKGTVRTKYGTKTQYIQAIQAAHTAGMQVYADVVFNHKAGADGTELVDAVEVNPSDRNQEISGTYQIQAWTKFDFPGRGNTYSSFKWRWYHFDGTDWDESRKLNRIYKFRGTGKAWDWEVDTENGNYDYLMYADLDMDHPEVVSELKNWGKWYVTTTNIDGFRLDAVKHIKYSFFPDWLSYVRTQTQKPLFAVGEFWSYDISKLHNYITKTNGSMSLFDAPLHNNFYIASKSGGYFDMRTLLNNTLMKDQPTLAVTLVDNHDTEPGQSLQSWVEPWFKPLAYAFILTRQEGYPCVFYGDYYGIPKYNIPALKSKLDPLLIARRDYAYGTQHDYIDSADIIGWTREGVAEKANSGLAALITDGPGGSKWMYVGKQHAGKTFYDLTGNRSDTVTINADGWGEFKVNGGSVSIWVPKISTTSQI

SEQ ID NO: 22089 - protein, 397 aa, Bacillus sp. 707
HHNGTNGTMMQYFEWYLPNDGNHWNRLNSDASNLKSKGITAVWIPPAWKGASQNDVGYGAYDLYDLGEFNQKGTVRTKYGTRSQLQAAVTSLKNNGIQVYGDVVMNHKGGADATEMVRAVEVNPNNRNQEVTGEYTIEAWTRFDFPGRGNTHSSFKWRWYHFDGVDWDQSRRLNNRIYKFGHKAWDWEVDTENGNYDYLMYADIDMDHPEVVNELRNWGVWYTNTLGLDGFRIDAVKHIKYSFTRDWINHVRSATGKNMFAVAEFWKNDLGAIENYLQKTNWNHSVFDVPLHYNLYNASKSGGNYDMRNIFNGTVVQRHPSHAVTFVDNHDSQPEEALESFVEEWFKPLAYALTLTREQGYPSVFYGDYYGIPTHGVPAMRSKIDPILEARQKYAYG

SEQ ID NO: 22090 - protein, 485 aa, Bacillus sp. 707
HHNGTNGTMMQYFEWYLPNDGNHWNRLNSDASNLKSKGITAVWIPPAWKGASQNDVGYGAYDLYDLGEFNQKGTVRTKYGTRSQLQAAVTSLKNNGIQVYGDVVMNHKGGADATEMVRAVEVNPNNRNQEVTGEYTIEAWTRFDFPGRGNTHSSFKWRWYHFDGVDWDQSRRLDNRIYKFRGHGKAWDWEVDTENGNYDYLMYADIDMDHPEVVNELRNWGVWYTNTLGLDGFRIDAVKHIKYSFTRDWINHVRSATGKNMFAVAEFWKNDLGAIENYLQKTNWNHSVFDVPLHYNLYNASKSGGNYDMRNIFNGTVVQRHPSHAVTFVDNHDSQPEEALESFVEEWFKPLAYALTLTREQGYPSVFYGDYYGIPTHGVPAMRSKIDPILEARQKYAYGKQNDYLDHHNIIGWTREGNTAHPNSGLATIMSDGAGGSKWMFVGRNKAGQVWSDITGNRTGTVTINADGWGNFSVNGGSVSIWVNK

SEQ ID NO: 22091 - protein, 485 aa, Bacillus sp.
HHNGTNGTLMQYFEWYLPNDGNHWNRLRSDASNLKDKGISAVWIPPAWKGASQNDVGYGAYDLYDLGEFNQKGTIRTKYGTRNQLQAAVNALKSNGIQVYGDVVMNHKGGADATEMVRAVEVNPNNRNQEVSGEYTIEAWTKFDFPGRGNTHSNFKWRWYHFDGVDWDQSRKLNNRIYKFRGDGKGWDWEVDTENGNYDYLTYADIDMDHPEVVNELRNWGVWYTNTLGLDGFRIDAVKHIKYSFTRDWINHVRSATGKNMFAVAEFWKNDLGAIENYLNKTNWNHSVFDVPLHYNLYNASKSGGNYDMRQIFNGTVVQRHPMHAVTFVDNHDSQPEEALESFVEEWFKPLAYALTLTREQGYPSVFYGDYYGIPTHGVPAMKSKIDPILEARQKYAYGRQNDYLDHHNIIGWTREGNTAHPNSGLATIMSDGAGGNKWMFVGRNKAGQVWTDITGNRAGTVTINADGWGNFSVNGGSVSIWVNK

SEQ ID NO: 22092 - protein, 485 aa, Bacillus sp. 707
HHNGTNGTMMQYFEWYLPNDGNHWNRLNTDASNLKSKGITAVWIPPAWKGASQNDVGYGAYDLYDLGEFNQKGTVRTKYGTRSQLQAAVTSLKNNGIQVYGDVVMNHKGGADATEMVRAVEVNPNNRNQEVTGEYTIEAWTRFDFPGRGNTHSSFKWRWYHFDGVDWDQSRRLNNRIYKFRGHGKAWDWEVDTENGNYDYLMYADIDMDHPEVVNELRNWGVWYTNTLGLDGFRIDAVKHIKYSFTRDWINHVRSATGKNMFAVAEFWKNDLGAIENYLQKTNWNHSVFDVPLHYNLYNASKSGGNYDMRNIFNGTVVQRHPSHAVTFVDNHDSQPEEALESFVEEWFKPLAYALTLTREQGYPSVFYGDYYGIPTHGVPAMRSKIDPILEARQKYAYGKQNDYLDHHNIIGWTREGNTAHPNSGLATIMSDGAGGSKWMFVGRNKAGQVWSDITGNRTGTVTINADGWGNFSVNGGSVSIWVNK

SEQ ID NO: 22093 - protein, 485 aa, Bacillus sp. 707
HHNGTNGTMMQYFEWYLPNDGNHWNRLNSDASNLNSKGITAVWIPPAWKGASQNDVGYGAYDLYDLGEFNQKGTVRTKYGTRSQLQAAVTSLKNNGIQVYGDVVMNHKGGADATEMVRAVEVNPNNRNQEVTGEYTIEAWTRFDFPGRGNTHSSFKWRWYHFDGVDWDQSRRLNNRIYKFRGHGKAWDWEVDTENGNYDYLMYADIDMDHPEVVNELRNWGVWYTNTLGLDGFRIDAVKHIKYSFTRDWINHVRSATGKNMFAVAEFWKNDLGAIENYLQKTNWNHSVFDVPLHYNLYNASKSGGNYDMRNIFNGTVVQRHPSHAVTFVDNHDSQPEEALESFVEEWFKPLAYALTLTREQGYPSVFYGDYYGIPTHGVPAMRSKIDPILEARQKYAYGKQNDYLDHHNIIGWTREGNTAHPNSGLATIMSDGAGGSKWMFVGRNKAGQVWSDITGNRTGTVTINADGWGNFSVNGGSVSIWVNK

SEQ ID NO: 22094 - protein, 485 aa, Bacillus sp.
HHNGTNGTMMQYFEWYLPNDGNHWNRLRSDASNLKDKGISAVWIPPAWKGASQNDVGYGAYDLYDLGEFNQKGTIRTKYGTRNQLQAAVNALKSNGIQVYGDVVMNHKGGADATEMVRAVEVNPNNRNQEVSGEYTIEAWTKFDFPGRGNTHSNFKWRWYHFDGVDWDQSRKLNNRIYKFRGDGKGWDWEVDTENGNYDYLMYADINMSHPEVVNELRNWGVWYTNTLGLDGFRIDAVKHIKYSFTRDWINHVRSATGKNMFAVAEFWKNDLGAIENYLNKTNWNHSVFDVPLHYNLYNASKSGGNYDMRQIFNGTVVQRHPMHAVTFVDNHDSQPEEALESFVEEWFKPLAYALTLTREQGYPSVFYGDYYGIPTHGVPAMKSKIDPILEARQKYAYGRQNDYLDHHNIIGWTREGNTAHPNSGLATIMSDGAGGNKWMFVGRNKAGQVWTDITGNRAGTVTINADGWGNFSVNGGSVSIWVNK

SEQ ID NO: 22095 - protein, 485 aa, Bacillus sp. 707
HHNGTNGTMMQYFEWYLPNDGNHWNRLNSDASNLKSKGITAVWIPPAWKGASQNDVGYGAYDLYDLGEFNQKGTVRTKYGTRSQLQAAVTSLKNNGIQVYGDVVMNHKGGADATEMVRAVEVNPNNRNQEVTGEYTIEAWTRFDFPGRGNTHSSFKWRWYHFDGVDWDQSRRLNNRIYKFRGHGKAWDWEVDTENGNYDYLMYADIDMDHPEVVNELRNWGVWYTNTLGLDGFRIDAVKHIKYSFTRDWINHVRSATGKNMFAVAEFWKNDLGAIENYLQKTNWNHSVFDVPLHYNLYNASKSGGNYDMRNIFNGTVVQRHPSHAVTFVDNHDSQPEEALESFVEEWFKPLAYALTLTREQGYPSVFYGDYYGIPTHGVPAMRSKIDPILEARQKYAYGKQLDYLDHHNIIGWTREGNTAHPNSGLATIMSDGAGGSKWMFVGRNKAGQVWSDITGNRTGTVTINADGWGNFSVNGGSVSIWVNK

SEQ ID NO: 22096 - protein, 485 aa, Bacillus sp.
HHNGTNGTLMQYFEWYLPNDGNHWNRLRSDASNLKDKGISAVWIPPAWKGASQNDVGYGAYDLYDLGEFNQKGTIRTKYGTRNQLQAAVNALKSNGIQVYGDVVMNHKGGADATEMVRAVEVNPNNRNQEVSGEYTIEAWTKFDFPGRGNTHSNFKWRWYHFDGVDWDQSRKLNNRIYKFRGDGKGWDWEVDTENGNYDYLIYADIDMDHPEVVNELRNWGVWYTNTLGLDGFRIDAVKHIKYSFTRDWINHVRSATGKNMFAVAEFWKNDLGAIENYLNKTNWNHSVFDVPLHFNLYNASKSGGNYDMRQIFNGTVVQRHPMHAVTFVDNHDSQPEESLESFVREWFKPLAYALTLTREQGYPSVFYGDYYGIPTHGVPAMKSKIDPILEARQKYAYGRQNDYLDHHNIIGWTREGNTAHPNSGLATIMSDGAGGNKWMFVGRNKAGQVWTDITGNRAGTVTINADGWGNFSVNGGSVSIWVNK

SEQ ID NO: 22097 - protein, 485 aa, Bacillus sp. 707
HHNGTNGTMMQYFEWYLPNDGNHWNRLNSDASNLKSKGITAVWIPPAWKGASQNDVGYGAYDLYDLGEFNQKGTVRTKYGTRSQLQAAVTSLKNNGIQVYGDVVMNHKGGADATEMVRAVEVNPNNRNQEVTGEYTIEAWTRFDFPGRGNTHSSFKWRWYHFDGVDWDQSRRLNNRIYKFRGHGKAWDWEVDTENGNYDYLMYADIDMDHPEVVNELRNWGVWYTNTLGLDGFRIDAVKHIKYSFTRDWINHVRSATGKNMFAVAEFWKNDLGAIENYLQKTNWNHSVFDVPLHYNLYNASKSGGNYDMRNIFNGTVVQRHPSHAVTFVDNHDSQPEEALESFVEEWFKPLAYALTLTREQGYPSVFYGDYYGIPTHGVPAMRSKIDPILEARQKYAYGKQNDYLDHHNIIGWTREGNTAHPNSGLATIMSDGAGGSKWMFVGRNKAGQVWNDITGNRTGTVTINADGWGNFSVNGGSVSIWVNK

SEQ ID NO: 22098 - protein, 485 aa, Bacillus sp. 707
HHNGTNGTMMQYFEWYLPNDGNHWNRLNSDASNLKSKGITAVWIPPAWKGASQNDVGYGAYDLYDLGEFNQKGTVRTKYGTRSQLQAAVTSLKNNGIQVYGDVVMNHKGGADATEMVRAVEVNPNNRNQEVTGEYTIEAWTRFDFPGRGNTHSSFKWRWYHFDGVDWDQSRRLNNRIYKFRGHGKAWDWEVDTENGNYDYLMYADIDMDHPEVVNELRNWGVWYTNTLGLDGFRIDAVKHIKYSFTRDWINHVRSATGKNMFAVAEFWKNDLGAIENYLQKTNWNHSVFDVPLHYNLYNASKSGGNYDMRNIFNGTVVQRHPSHAVTFVDNHDSQPEEALESFVEEWFKPLAYALTLTREQGYPSVFYGDYYGIPTHGVPAMRSKIDPILEARQKYAYGKQNDYLDHHNIIGWTREGNTAHPNSGLATIMSDGAGGSKWMFVGRNKAGQVWSDITGNCTGTVTINADGWGNFSVNGGSVSIWVNK

SEQ ID NO: 22099 - protein, 485 aa, Bacillus sp. 707
HHNGTNGTMMQYFEWYLPNDGNHWNRLNSDASNLKSKGITAVWIPPAWKGASQNDVGYGAYDLYDLGEFNQKGTVRTKYGTRSQLQAAVTSLKNNGIQVYGDVVMNHKGGADATEMVRAVEVNPNNRNQEVTGEYTIEAWTRFDFPGRGNTHSSFKWRWYHFDGVDWDQSRRLNNRIYKFRGHGKAWDWEVDTENGNYDYLMYADIDMDHPEVVNELRNWGVWYTNTLGLDGFRIDAVKHIKYSFTRDWINHVRSATGKNMFAVAEFWKNDLGAIENYLQKTNWNHSVFDVPLHYNLYNASKSGGNYDMRNIFNGTVVQRHPSHAVTFVDNHDSQPEEALESFVEEWFKPLAYALTLTREQGYPSVFYGDYYGIPTHGVPAMRSKIDPILEARQKYAYGMQNDYLDHHNIIGWTREGNTAHPNSGLATIMSDGAGGSKWMFVGRNKAGQVWSDITGNRTGTVTINADGWGNFSVNGGSVSIWVNK

SEQ ID NO: 22100 - protein, 485 aa, Bacillus sp.
HHNGTNGTMMQYFEWYLPNDGNHWNRLRSDASNLKDKGISAVWIPPAWKGASQNDVGYGAYDLYDLGEFNQKGTIRTKYGTRNQLQAAVNALKSNGIQVYGDVVMNHKGGADATEMVRAVEVNPNNRNQEVSGEYTIEAWTKFDFPGRGNTHSNFKWRWYHFDGVDWDQSRKLNNRIYKFRGDGKGWDWEVDTENGNYDYLLYADIDMDHPEVVNELRNWGVWYTNTLGLDGFRIDAVKHIKYSFTRDWINHVRSATGKNMFAVAEFWKNDLGAIENYLNKTNWNHSVFDVPLHYNLYNASKSGGNYDMRQIFNGTVVQRHPTHAVTFVDNHDSQPEEALESFVEEWFKPLAYALTLTREQGYPSVFYGDYYGIPTHGVPAMKSKIDPILEARQKYAYGRQNDYLDHHNIIGWTREGNTAHPNSGLATIMSDGAGGNKWMFVGRNKAGQVWTDITGNRAGTVTINADGWGNFSVNGGSVSIWVNK

SEQ ID NO: 22101 - protein, 485 aa, Bacillus sp. 707
HHNGTNGTMMQYFEWYLPNDGNHWNRLNSDASNLKSKGITAVWIPPAWKGASQNDVGYGAYDLYDLGEFNQKGTVRTKYGTRSQLQAAVTSLKNNGIQVYGDVVMNHKGGADATEMVRAVEVNPNNRNQEVTGEYTIEAWTRFDFPGRGNTHSSFKWRWYHFDGVDWDQSRRLNNRIYKFRGHGKAWDWEVDTENGNYDYLMYADIDMDHPEVVNELRNWGVWYTNTLGLDGFRIDAVKHIKYSFTRDWINHVRSATGKNMFAVAEFWKNDLGAIENYLQKTNWNHSVFDVPLHYNLYNASKSGGNYDMRNIFNGTVVQRHPSHAVTFVDNHDSQPEEALESFVEEWFKPLAYALTLTREQGYPSVFYGDYYGIPTHGVPAMRSKIDPILEARQSYAYGKQNDYLDHHNIIGWTREGNTAHPNSGLATIMSDGAGGSKWMFVGRNKAGQVWSDITGNRTGTVTINADGWGNFSVNGGSVSIWVNK

SEQ ID NO: 22102 - protein, 483 aa, Bacillus sp. SP70
HHNGTNGTMMQYFEWYLPNDGNHWNRLNSDASNLKSKGITAVWIPPAWKGASQNDVGYGAYDLYDLGEFNQKGTVRTKYGTRSQLQAAVTSLKNNGIQVYGDVVMNHKGGADATEMVRAVEVNPNNRNQEVTGEYTIEAWTRFDFPGRGNTHSSFKWRWYHFDGVDWDQSRRLNNRIYKFRGKAWDWEVDTENGNYDYLMYADIDMDHPEVVNELRNWGVWYTNTLGLDGFRIDAVKHIKYSFTRDWINHVRSATGKNMFAVAEFWKNDLGAIENYLQKTNWNHSVFDVPLHYNLYNASKSGGNYDMRNIFNGTVVQRHPSHAVTFVDNHDSQPEEALESFVEEWFKPLAYALTLTREQGYPSVFYGDYYGIPTHGVPAMRSKIDPILEARQKYAYGKQNDYLDHHNIIGWTREGNTAHPNSGLATIMSDGAGGSKRMFVGRNKAGQVWSDITGNRTGTVTINADGWGNFSVNGGSVSIWVNR

SEQ ID NO: 22103 - protein, 484 aa, Bacillus sp.
HHNGTNGTMMQYFEWYLPNDGNHWNRLNSDASNLKSKGITAVWIPPAWKGASQNDVGYGAYDLYDLGEFNQKGTVRTKYGTRSQLQAAVTSLKNNGIQVYGDVVMNHKGGADATEMVRAVEVNPNNRNQEVTGEYTIEAWTRFDFPGRGNTHSSFKWRWYHFDGVDWDQSRRLNNRIYKFRGHKAWDWEVDTENGNYDYLMYADIDMDHPEVVNELRNWGVWYTNTLGLDGFRIDAVKHIKYSFTRDWINHVRSATGKNMFAVAEFWKNDLGAIENYLQKTNWNHSVFDVPLHYNLYNASKSGGNYDMRNIFNGTVVQRHPSHAVTFVDNHDSQPEEALESFVEEWFKPLAYALTLTREQGYPSVFYGDYYGIPTHGVPAMRSKIDPILEARQKYAYGKQNDYLDHHNIIGWTREGNTAHPNSGLATIMSDGAGGSKWMFVGRNKAGQVWSDITGNRTGTVTINADGWGNFSVNGGSVSIWVNK

SEQ ID NO: 22104 - protein, 485 aa, Bacillus sp. 707
HHNGTNGTMMQYFEWYLPNDGNHWNRLNSDASNLASKGITAVWIPPAWKGASQNDVGYGAYDLYDLGEFNQKGTVRTKYGTRSQLQAAVTSLKNNGIQVYGDVVMNHKGGADATEMVRAVEVNPNNRNQEVTGEYTIEAWTRFDFPGRGNTHSSFKWRWYHFDGVDWDQSRRLNNRIYKFRGHGKAWDWEVDTENGNYDYLMYADIDMDHPEVVNELRNWGVWYTNTLGLDGFRIDAVKHIKYSFTRDWINHVRSATGKNMFAVAEFWKNDLGAIENYLQKTNWNHSVFDVPLHYNLYNASKSGGNYDMRNIFNGTVVQRHPSHAVTFVDNHDSQPEEALESFVEEWFKPLAYALTLTREQGYPSVFYGDYYGIPTHGVPAMRSKIDPILEARQKYAYGKQNDYLDHHNIIGWTREGNTAHPNSGLATIMSDGAGGSKWMFVGRNKAGQVWSDITGNRTGTVTINADGWGNFSVNGGSVSIWVNK

SEQ ID NO: 22105 - protein, 485 aa, Bacillus sp.
HHNGTNGTMMQYFEWYLPNDGNHWNRLNSDASNLKSKGITAVWIPPAWKGASQNDVGYGAYDLYDLGEFNQKGTVRTKYGTRSQLQAAVTSLKNNGIQVYGDVVMNHKGGADATEMVRAVEVNPNNRNQEVTGEYTIEAWTRFDFPGRGNTHSSFKWRWYHFDGVDWDQSRRYSNRIYKFRGHGKAWDWEVDTENGNYDYLMYADIDMDHPEVVNELRNWGVWYTNTLGLDGFRIDAVKHIKYSFTRDWINHVRSATGKNMFAVAEFWKNDLGAIENYLQKTNWNHSVFDVPLHYNLYNASKSGGNYDMRNIFNGTVVQRHPSHAVTFVDNHDSQPEEALESFVEEWFKPLAYALTLTREQGYPSVFYGDYYGIPTHGVPAMRSKIDPILEARQKYAYGKQNDYLDHHNIIGWTREGNTAHPNSGLATIMSDGAGGSKWMFVGRNKAGQVWSDITGNRTGTVTINADGWGNFSVNGGSVSIWVNK

SEQ ID NO: 22106 - protein, 485 aa, Bacillus sp. 707
HHNGTNGTMMQYFEWYLPNDGNHWNRLNSDASNLLSKGITAVWIPPAWKGASQNDVGYGAYDLYDLGEFNQKGTVRTKYGTRSQLQAAVTSLKNNGIQVYGDVVMNHKGGADATEMVRAVEVNPNNRNQEVTGEYTIEAWTRFDFPGRGNTHSSFKWRWYHFDGVDWDQSRRLNNRIYKFRGHGKAWDWEVDTENGNYDYLMYADIDMDHPEVVNELRNWGVWYTNTLGLDGFRIDAVKHIKYSFTRDWINHVRSATGKNMFAVAEFWKNDLGAIENYLQKTNWNHSVFDVPLHYNLYNASKSGGNYDMRNIFNGTVVQRHPSHAVTFVDNHDSQPEEALESFVEEWFKPLAYALTLTREQGYPSVFYGDYYGIPTHGVPAMRSKIDPILEARQKYAYGKQNDYLDHHNIIGWTREGNTAHPNSGLATIMSDGAGGSKWMFVGRNKAGQVWSDITGNRTGTVTINADGWGNFSVNGGSVSIWVNK

SEQ ID NO: 22107 - protein, 484 aa, Bacillus sp.
HHNGTNGTMMQYFEWHLPNDGQHWNRLRNDAANLKNLGINAVWIPPAWKGTSQNDVGYGAYDLYDLGEFNQKGTIRTKYGTRSQLQSAIARLQNNGIQVEGDVVMNHKGGADGTERVQAVEVNPSNRNQEVTGEYTIEAWTKFDFPGRGNTHSSFKWRWYHFDGTDWDQSRNLNNRIYKFTGKAWDWEVDTENGNYDYLMYADVDMDHPEVINELRRWGVWYTNTLNLDGFRIDAVKHIKYSFQRDWLNHVRSTTGKNNMFAVAEFWKNDLGAIENYLHKSNWNHSVFDVPLHYNLYNASKSGGNYDMRQILNGTVVSKHPIHAVTFVDNHDSQPAEALESFVEAWFKPLAYALILTREQGYPSVFYGDYYGIPTHGVAAMKGKIDPILEARQKYAYGTQHDYLDHHNIIGWTREGNSAHPNSGLATIMSDGPGGSKWMYVGRHKAGQVWRDITGNRTGTVTINADGWGNFSVNGGSVSIWVNK

SEQ ID NO: 22108 - protein, 485 aa, Bacillus sp.
HHNGTNGTMMQYFEWYLPNDGNHWNRLRSDASNLKDKGISAVWIPPAWKGASQNDVGYGAYDLYDLGEFNQKGTIRTKYGTRNQLQAAVNALKSNGIQVYGDVVMNHKGGADATEMVRAVEVNPNNRNQEVSGEYTIEAWTKFDFPGRGNTHSNFKWRWYHFDGVDWDQSRKLNNRIYKFRGDGKGWDWEVDTENGNYDYLLYADIDMDHPEVTNELRNWGVWYTNTLGLDGFRIDAVKHIKYSFTRDWINHVRSATGKNMFAVAEFWKNDLGAIENYLNKTNWNHSVFDVPLHYNLYNASKSGGNYDMRQIFNGTVVQRHPMHAVTFVDNHDSQPEEALESFVEEWFKPLAYALTLTREQGYPSVFYGDYYGIPTHGVPAMKSKIDPILEARQKYAYGRQNDYLDHHNIIGWTREGNTAHPNSGLATIMSDGAGGNKWMFVGYNKAGQVWTDITGNRAGTVTINADGWGNFSVNGGSVSIWVNK

SEQ ID NO: 22109 - protein, 483 aa, Bacillus sp. 707
HHNGTNGTMMQYFEWYLPNDGNHWNRLNSDASNLKSKGITAVWIPPAWKGASQNDVGYGAYDLYDLGEFNQKGTVRTKYGTRSQLQAAVTSLKNNGIQVYGDVVMNHKGGADATEMVRAVEVNPNNRNQEVTGEYTIEAWTRFDFPGRGNTHSSFKWRWYHFDGVDWDQSRRLNNRIYKFRGKAWDWEVDTENGNYDYLMYADIDMDHPEVVNELRNWGVWYTNTLGLDGFRIDAVKHIKYSFTRDWINHVRSATGKNMFAVAEFWKNDLGAIENYLQKTNWNHSVFDVPLHYNLYNASKSGGNYDMRNIFNGTVVQRHPSHAVTFVDNHDSQPEEALESFVEEWFKPLAYALTLTREQGYPSVFYGDYYGIPTHGVPAMRSKIDPILEARQKYAYGKQNDYLDHHNIIGWTREGNTAHPNSGLATIMSDGAGGSKWMFVGRNKAGQVWSDITGNRTGTVTINADGWGNFSVNGGSVSIWVNK

SEQ ID NO: 22110 - protein, 485 aa, Bacillus sp. 707
HHNGTNGTMMQYFEWYLPNDGNHWNRLNSDASNLKSKGITAVWIPPAWKGASQNDVGYGAYDLYDLGEFNQKGTVRTKYGTRSQLQAAVTSLKNNGIQVYGDVVMNHKGGADATEDVRAVEVNPNNRNQEVTGEYTIEAWTRFDFPGRGNTHSSFKWRWYHFDGVDWDQSRRLNNRIYKFRGHGKAWDWEVDTENGNYDYLMYADIDMDHPEVVNELRNWGVWYTNTLGLDGFRIDAVKHIKYSFTRDWINHVRSATGKNMFAVAEFWKNDLGAIENYLQKTNWNHSVFDVPLHYNLYNASKSGGNYDMRNIFNGTVVQRHPSHAVTFVDNHDSQPEEALESFVEEWFKPLAYALTLTREQGYPSVFYGDYYGIPTHGVPAMRSKIDPILEARQKYAYGKQNDYLDHHNIIGWTREGNTAHPNSGLATIMSDGAGGSKWMFVGRNKAGQVWSDITGNRTGTVTINADGWGNFSVNGGSVSIWVNK

SEQ ID NO: 22111 - protein, 485 aa, Bacillus sp. 707
HHNGTNGTMMQYFEWYLPNDGNHWNRLNSDASNLKSKGITAVWIPPAWKGASQNDVGYGAYDLYDLGEFNQKGTVRTKYGTRSQLQAAVTSLKNNGIQVYGDVVMNHKGGADATEMVRAVEVNPNNRNQEVTGEYTIEAWTRFDFPGRGNTHSSFKWRWYHFDGVDWDQSRRLNNRIYKFRGLGKAWDWEVDTENGNYDYLMYADIDMDHPEVVNELRNWGVWYTNTLGLDGFRIDAVKHIKYSFTRDWINHVRSATGKNMFAVAEFWKNDLGAIENYLQKTNWNHSVFDVPLHYNLYNASKSGGNYDMRNIFNGTVVQRHPSHAVTFVDNHDSQPEEALESFVEEWFKPLAYALTLTREQGYPSVFYGDYYGIPTHGVPAMRSKIDPILEARQKYAYGKQNDYLDHHNIIGWTREGNTAHPNSGLATIMSDGAGGSKWMFVGRNKAGQVWSDITGNRTGTVTINADGWGNFSVNGGSVSIWVNK

SEQ ID NO: 22112 - protein, 485 aa, Bacillus sp. 707
HHNGTNGTMMQYFEWYLPNDGNHWNRLNSDASNLKSKGITAVWIPPAWKGASQNDVGYGAYDLYDLGEFNQKGTVRTKYGTRSQLQAAVTSLKNNGIQVYGDVVMNHKGGADATEMVRAVEVNPNNRNQEVTGEYTIEAWTRFDFPGRGNTHSSFKWRWYHFDGVDWDQSRRLNNRIYKFRGHGKAWDWEVDTENGNYDYLMYADIDMDHPEVVNELRNWGVWYTNTLGLDGFRIDAVKHIKYSFTRDWINHVRSATGKNMFAVAEFWKNDLGAIENYLQKTNWNHSVFDVPLHYNLYNASKSGGNYDMRNIFNGTVVQRHPSHAVTFVDNHDSQPEEALESFVEEWFKPLAYALTLTREQGYPSVFYGDYYGIPTHGVPAMRSKIDPILEARQKYAYGKQNDYLDHHNIIGWTREGNTAHPNSGLATIMSDGRGGSKWMFVGRNKAGQVWSDITGNRTGTVTINADGWGNFSVNGGSVSIWVNK

SEQ ID NO: 22113 - protein, 485 aa, Bacillus sp. 707
HHNGTNGTMMQYFEWYLPNDGNHWNRLNSDASNLKSKGITAVWIPPAWKGASQNDVGYGAYDLYDLGEFNQKGTVRTKYGTRSQLQAAVTSLKNNGIQVYGDVVMNHKGGADATEMVRAVEVNPNNRNQEVTGEYTIEAWTRFDFPGRGNTHSSFKWRWYHFDGVDWDQSRRLNNRIYKFRGHGKAWDWEVDTENGNYDYLMYADIDMDHPEVVNELRNWGVWYTNTLGLDGFRIDAVKHIKYSFTRDWINHVRSATGKNMFAVAEFWKNDLGAIENYLQKTNWNHSVFDVPLHYNLYNASKSGGNYDMRNIFNGTVVQRHPSHAVTFVDNHDSQPEEALESFVEEWFKPLAYALTLTREQGYPSVFYGDYYGIPTHGVPAMRSKIDPILEARQKYAYGKQNDYLDHHNIIGWTREGNTAHPNSGLATIMSDGAGGSKWMFVGRNKAGQVWSDITGNTTGTVTINADGWGNFSVNGGSVSIWVNK

SEQ ID NO: 22114 - protein, 485 aa, Bacillus sp. 707
HHNGTNGTMMQYFEWYLPNDGNHWNRLNSDASNLQSKGITAVWIPPAWKGASQNDVGYGAYDLYDLGEFNQKGTVRTKYGTRSQLQAAVTSLKNNGIQVYGDVVMNHKGGADATEMVRAVEVNPNNRNQEVTGEYTIEAWTRFDFPGRGNTHSSFKWRWYHFDGVDWDQSRRLNNRIYKFRGHGKAWDWEVDTENGNYDYLMYADIDMDHPEVVNELRNWGVWYTNTLGLDGFRIDAVKHIKYSFTRDWINHVRSATGKNMFAVAEFWKNDLGAIENYLQKTNWNHSVFDVPLHYNLYNASKSGGNYDMRNIFNGTVVQRHPSHAVTFVDNHDSQPEEALESFVEEWFKPLAYALTLTREQGYPSVFYGDYYGIPTHGVPAMRSKIDPILEARQKYAYGKQNDYLDHHNIIGWTREGNTAHPNSGLATIMSDGAGGSKWMFVGRNKAGQVWSDITGNRTGTVTINADGWGNFSVNGGSVSIWVNK

SEQ ID NO: 22115 - protein, 485 aa, Bacillus sp. 707
HHNGTNGTMMQYFEWYLPNDGNHWNRLNSDASNLKSKGITAVWIPPAWKGASQNDVGYGAYDLYDLGEFNQKGTVRTKYGTRSQLQAAVTSLKNNGIQVYGDVVMNHKGGADATEMVRAVEVNPNNRNQEVTGEYTIEAWTRFDFPGRGNTHSSFKWRWYHFDGVDWDQSRRLNNRIYKFRGHGKAWDWEVDTENGNYDYLMYADIDMDHPEVVNELRNWGFWYTNTLGLDGFRIDAVKHIKYSFTRDWINHVRSATGKNMFAVAEFWKNDLGAIENYLQKTNWNHSVFDVPLHYNLYNASKSGGNYDMRNIFNGTVVQRHPSHAVTFVDNHDSQPEEALESFVEEWFKPLAYALTLTREQGYPSVFYGDYYGIPTHGVPAMRSKIDPILEARQKYAYGKQNDYLDHHNIIGWTREGNTAHPNSGLATIMSDGAGGSKWMFVGRNKAGQVWSDITGNRTGTVTINADGWGNFSVNGGSVSIWVNK

SEQ ID NO: 22116 - protein, 485 aa, Bacillus sp. 707
HHNGTNGTMMQYFEWYLPNDGNHWNRLNSDASNLKSKGITAVWIPPAWKGASQNDVGYGAYDLYDLGEFNQKGTVRTKYGTRSQLQAAVTSLKNNGIQVYGDVVMNHKGGADATEMVEAVEVNPNNRNQEVTGEYTIEAWTRFDFPGRGNTHSSFKWRWYHFDGVDWDQSRRLNNRIYKFRGHGKAWDWEVDTENGNYDYLMYADIDMDHPEVVNELRNWGVWYTNTLGLDGFRIDAVKHIKYSFTRDWINHVRSATGKNMFAVAEFWKNDLGAIENYLQKTNWNHSVFDVPLHYNLYNASKSGGNYDMRNIFNGTVVQRHPSHAVTFVDNHDSQPEEALESFVEEWFKPLAYALTLTREQGYPSVFYGDYYGIPTHGVPAMRSKIDPILEARQKYAYGKQNDYLDHHNIIGWTREGNTAHPNSGLATIMSDGAGGSKWMFVGRNKAGQVWSDITGNRTGTVTINADGWGNFSVNGGSVSIWVNK

SEQ ID NO: 22117 - protein, 485 aa, Bacillus sp. 707
HHNGTNGTMMQYFEWYLPNDGNHWNRLNADASNLKSKGITAVWIPPAWKGASQNDVGYGAYDLYDLGEFNQKGTVRTKYGTRSQLQAAVTSLKNNGIQVYGDVVMNHKGGADATEMVRAVEVNPNNRNQEVTGEYTIEAWTRFDFPGRGNTHSSFKWRWYHFDGVDWDQSRRLNNRIYKFRGHGKAWDWEVDTENGNYDYLMYADIDMDHPEVVNELRNWGVWYTNTLGLDGFRIDAVKHIKYSFTRDWINHVRSATGKNMFAVAEFWKNDLGAIENYLQKTNWNHSVFDVPLHYNLYNASKSGGNYDMRNIFNGTVVQRHPSHAVTFVDNHDSQPEEALESFVEEWFKPLAYALTLTREQGYPSVFYGDYYGIPTHGVPAMRSKIDPILEARQKYAYGKQNDYLDHHNIIGWTREGNTAHPNSGLATIMSDGAGGSKWMFVGRNKAGQVWSDITGNRTGTVTINADGWGNFSVNGGSVSIWVNK

SEQ ID NO: 22118 - protein, 485 aa, Bacillus sp. 707
HHNGTNGTMMQYFEWYLPNDGNHWNRLNSDASNLKSKGITAVWIPPAWKGASQNDVGYGAYDLYDLGEFNQKGTVRTKYGTRSQLQAAVTSLKNNGIQVYGDVVMNHKGGADATEMVRAVEVNPNNRNQEVTGEYTIEAWTRFDFPGRGNTHSSFKWRWYHFDGVDWDQSRRLNNRIYKFRGHGKAWDWEVDTENGNYDYLMYADIDMDHPEVVNELRNWGVWYTNTLGLDGFRIDAVKHIKYSFTRDWINHVRSATGKNMFAVAEFWKNDLGAIENYLQKTNWNHSVFDVPLHYNLYNASKSGGNYDMRNIFNGTVVQRHPDHAVTFVDNHDSQPEEALESFVEEWFKPLAYALTLTREQGYPSVFYGDYYGIPTHGVPAMRSKIDPILEARQKYAYGKQNDYLDHHNIIGWTREGNTAHPNSGLATIMSDGAGGSKWMFVGRNKAGQVWSDITGNRTGTVTINADGWGNFSVNGGSVSIWVNK

SEQ ID NO: 22119 - protein, 485 aa, Bacillus subtilis
HHNGTNGTMMQYFEWYLPNDGNHWNRLRSDASNLKDKGISAVWIPPAWKGASQNDVGYGAYDLYDLGEFNQKGTIRTKYGTRNQLQAAVNALKSNGIQVYGDVVMNHKGGADATEMVRAVEVNPNNRNQEVSGEYTIEAWTKFDFPGRGNTHSNFKWRWYHFDGVDWDQSRKLNNRIYKFRGDGKGWDWEVDTENGNYDYLMYADIDMDHPEVVNELRNWGVWYTNTLGLDGFRIDAVKHIKYSFLRDWINHVRSATGKNMFAVAEFWKNDLGAIENYLNKTNWNHSVFDVPLHYNLYNASKSGGNYDMRQIFNGTVVQRHPMHAVTFVDNHDTQPEEALESFVEEWFKPLAYALTLTREQGYPSVFYGDYYGIPTHGVPAMKSKIDPILEARQKYAYGRQNDYLDHHNIIGWTREGNTAHPNSGLATIMSDGAGGNKWMFVGRNKAGQVWTDITGNRAGTVTINADGWGNFSVNGGSVSIWVNK

SEQ ID NO: 22120 - protein, 485 aa, Bacillus sp. 707
HHNGTNGTMMQYFEWYLPNDGNHWNRLNSDASNLKSKGITAVWIPPAWKGASQNDVGYGAYDLYDLGEFNQKGTVRTKYGTRSQLQAAVTMLKNNGIQVYGDVVMNHKGGADATEMVRAVEVNPNNRNQEVTGEYTIEAWTRFDFPGRGNTHSSFKWRWYHFDGVDWDQSRRLNNRIYKFRGHGKAWDWEVDTENGNYDYLMYADIDMDHPEVVNELRNWGVWYTNTLGLDGFRIDAVKHIKYSFTRDWINHVRSATGKNMFAVAEFWKNDLGAIENYLQKTNWNHSVFDVPLHYNLYNASKSGGNYDMRNIFNGTVVQRHPSHAVTFVDNHDSQPEEALESFVEEWFKPLAYALTLTREQGYPSVFYGDYYGIPTHGVPAMRSKIDPILEARQKYAYGKQNDYLDHHNIIGWTREGNTAHPNSGLATIMSDGAGGSKWMFVGRNKAGQVWSDITGNRTGTVTINADGWGNFSVNGGSVSIWVNK

SEQ ID NO: 22121 - protein, 485 aa, Bacillus sp. 707
HHNGTNGTMMQYFEWYLPNDGNHWNRLNSDASNLKSKGITAVWIPPAWKGASQNDVGYGAYDLYDLGEFNQKGTVRTKYGTRSQLQAAVTSLKNNGIQVYGDVVMNHKGGADATEMVRAVEVNPNNRNQEVTGEYTIEAWTRFDFPGRGNTHSSFKWRWYHFDGVDWDQSRRLNNRIYKFRGHGKAWDWEVDTENGNYDYLMYADIDMDHPEVVNELRNWGVWYTNTLGLDGFRIDAVKHIKYSFTRDWIKHVRSATGKNMFAVAEFWKNDLGAIENYLQKTNWNHSVFDVPLHYNLYNASKSGGNYDMRNIFNGTVVQRHPSHAVTFVDNHDSQPEEALESFVEEWFKPLAYALTLTREQGYPSVFYGDYYGIPTHGVPAMRSKIDPILEARQKYAYGKQNDYLDHHNIIGWTREGNTAHPNSGLATIMSDGAGGSKWMFVGRNKAGQVWSDITGNRTGTVTINADGWGNFSVNGGSVSIWVNK

SEQ ID NO: 22122 - protein, 485 aa, Bacillus sp. 707
HHNGTNGTMMQYFEWYLPNDGNHWNRLNSDASNLKSKGITAVWIPPAWKGASQNDVGYGAYDLYDLGEFNQKGTVRTKYGTRSQLQAAVTSLKNNGIQVYGDVVMNHKGGADATEMVRAVEVNPNNRNQEVTGEYTIEAWTRFDFPGRGNTHSSFKWRWYHFDGVDWDQSRRLNNRIYKFRGHGKAWDWEVDTENGNYDYLMYADIDMDHPEVVNELRNWGLWYTNTLGLDGFRIDAVKHIKYSFTRDWINHVRSATGKNMFAVAEFWKNDLGAIENYLQKTNWNHSVFDVPLHYNLYNASKSGGNYDMRNIFNGTVVQRHPSHAVTFVDNHDSQPEEALESFVEEWFKPLAYALTLTREQGYPSVFYGDYYGIPTHGVPAMRSKIDPILEARQKYAYGKQNDYLDHHNIIGWTREGNTAHPNSGLATIMSDGAGGSKWMFVGRNKAGQVWSDITGNRTGTVTINADGWGNFSVNGGSVSIWVNK

SEQ ID NO: 22123 - protein, 485 aa, Bacillus sp. 707
HHNGTNGTMMQYFEWELPNDGNHWNRLNSDASNLKSKGITAVWIPPAWKGASQNDVGYGAYDLYDLGEFNQKGTVRTKYGTRSQLQAAVTSLKNNGIQVYGDVVMNHKGGADATEMVRAVEVNPNNRNQEVTGEYTIEAWTRFDFPGRGNTHSSFKWRWYHFDGVDWDQSRRLNNRIYKFRGHGKAWDWEVDTENGNYDYLMYADIDMDHPEVVNELRNWGVWYTNTLGLDGFRIDAVKHIKYSFTRDWINHVRSATGKNMFAVAEFWKNDLGAIENYLQKTNWNHSVFDVPLHYNLYNASKSGGNYDMRNIFNGTVVQRHPSHAVTFVDNHDSQPEEALESFVEEWFKPLAYALTLTREQGYPSVFYGDYYGIPTHGVPAMRSKIDPILEARQKYAYGKQNDYLDHHNIIGWTREGNTAHPNSGLATIMSDGAGGSKWMFVGRNKAGQVWSDITGNRTGTVTINADGWGNFSVNGGSVSIWVNK

SEQ ID NO: 22124 - protein, 485 aa, Bacillus sp. 707
HHNGTNGTMMQYFEWYLPNDGNHWNRLNSDASNLKSKGITAVWIPPAWKGASQNDVGYGAYDLYDLGEFNQKGTVRTKYGTRSQLQAAVTSLKNNGIQVYGDVVMNHKGGADATEMVRAVEVNPNNRNQEVTGEYTIEAWTRFDFPGRGNTHSSFKWRWYHFDGVDWDQSRRLNNRIYKFRGHGKAWDWEVDTENGNYDYLMYADIDMDHPEVVNELRNWGVWYTNTLGLDGFRIDAVKHIKYSFTRDWINHVRSATGKNMFAVAEFWKNDLGAIENYLQKTNWNHSVFDVPLHYNLYNASKSGGNYDMRNIFNGTVVQRHPSHAVTFVDNHDSQPEEALESFVEEWFKPLAYALTLTREQGYPSVFYGDYYGIPTHGVPAMRSKIDPILEARQKYAYGKQNDYLDHHNIIGWTREGNTAHPNSGLATIMSDGAGGSKWMFVGRNKAGQVWEDITGNRTGTVTINADGWGNFSVNGGSVSIWVNK

SEQ ID NO: 22125 - protein, 485 aa, Bacillus sp. 707
HHNGTNGTMMQYFEWYLPNDGNHWNRLNSDASNLKSKGITAVWIPPAWKGASQNDVGYGAYDLYDLGEFNQKGTVRTKYGTRSQLQAAVTSLKNNGIQVYGDVVMNHKGGADATEMVQAVEVNPNNRNQEVTGEYTIEAWTRFDFPGRGNTHSSFKWRWYHFDGVDWDQSRRLNNRIYKFRGHGKAWDWEVDTENGNYDYLMYADIDMDHPEVVNELRNWGVWYTNTLGLDGFRIDAVKHIKYSFTRDWINHVRSATGKNMFAVAEFWKNDLGAIENYLQKTNWNHSVFDVPLHYNLYNASKSGGNYDMRNIFNGTVVQRHPSHAVTFVDNHDSQPEEALESFVEEWFKPLAYALTLTREQGYPSVFYGDYYGIPTHGVPAMRSKIDPILEARQKYAYGKQNDYLDHHNIIGWTREGNTAHPNSGLATIMSDGAGGSKWMFVGRNKAGQVWSDITGNRTGTVTINADGWGNFSVNGGSVSIWVNK

SEQ ID NO: 22126 - protein, 485 aa, Bacillus sp. 707
HHNGTNGTMMQYFEWYLPNDGNHWNRLNSDASNLKSKGITAVWIPPAWKGASQNDVGYGAYDLYDLGEFNQKGTVRTKYGTRSQLQAAVTSLKNNGIQVYGDVVMNHKGGADATEMVRAVEVNPNNRNQEVTGEYTIEAWTRFDFPGRGNTHSSFKWRWYHFDGVDWDQSRRLNNRIYKFRGHGKAWDWEVDTENGNYDYLMYADIDMDHPEVVNELRNWGAWYTNTLGLDGFRIDAVKHIKYSFTRDWINHVRSATGKNMFAVAEFWKNDLGAIENYLQKTNWNHSVFDVPLHYNLYNASKSGGNYDMRNIFNGTVVQRHPSHAVTFVDNHDSQPEEALESFVEEWFKPLAYALTLTREQGYPSVFYGDYYGIPTHGVPAMRSKIDPILEARQKYAYGKQNDYLDHHNIIGWTREGNTAHPNSGLATIMSDGAGGSKWMFVGRNKAGQVWSDITGNRTGTVTINADGWGNFSVNGGSVSIWVNK

SEQ ID NO: 22127 - protein, 485 aa, Bacillus sp.
HHNGTNGTMMQYFEWYLPNDGNHWNRLNSDASNLKSKGITAVWIPPAWKGASQNDVGYGAYDLYDLGEFNQKGTVRTKYGTRSQLQAAVTSLKNNGIQVYGDVVMNHKGGADATEMVRAVEVNPNNRNQEVTGEYTIEAWTRFDFPGRGNTHSSFKWRWYHFDGVDWDQSRRLNNRIYKFRGHGKAWDWEVDTENGNYDYLMYADIDMDHPEVVNELRNWGVWYTNTLGLDGFRIDAVKHIKYSFTRDWINHVRSATGKNMFAVAEFWKNDLGAIENYLQKTNWNHSVFDVPLHYNLYNASKSGGNYDMRNIFNGTVVQRHPSHAVTFVDNHDSQPEEALESFVEEWFKPLAYALALTREQGYPSVFYGDYYGIPTHGVPAMRSKIDPILEARQKYAYGKQNDYLDHHNIIGWTREGNTAHPNSGLATIMSDGAGGSKWMFVGRNKAGQVWSDITGNRTGTVTINADGWGNFSVNGGSVSIWVNK

SEQ ID NO: 22128 - protein, 485 aa, Bacillus sp. 707
HHNGTNGTMMQYFEWYLPNDGNHWNRLNSDASNLKSKGITAVWIPPAWKGASQNDVGYGAYDLYDLGEFNQKGTVRTKYGTRSQLQAAVTSLKNNGIQVYGDVVMNHKGGADATEMVRAVEVNPNNRNQEVTGEYTIEAWTRFDFPGRGNTHSSFKWRWYHFDGVDWDQSRRLNNRIYKFRGHGKAWDWEVDTENGNYDYLMYADIDMDHPEVVNELRNWGRWYTNTLGLDGFRIDAVKHIKYSFTRDWINHVRSATGKNMFAVAEFWKNDLGAIENYLQKTNWNHSVFDVPLHYNLYNASKSGGNYDMRNIFNGTVVQRHPSHAVTFVDNHDSQPEEALESFVEEWFKPLAYALTLTREQGYPSVFYGDYYGIPTHGVPAMRSKIDPILEARQKYAYGKQNDYLDHHNIIGWTREGNTAHPNSGLATIMSDGAGGSKWMFVGRNKAGQVWSDITGNRTGTVTINADGWGNFSVNGGSVSIWVNK

SEQ ID NO: 22129 - protein, 485 aa, Bacillus sp. 707
HHNGTNGTMMQYFEWYLPNDGNHWNRLNSDASNLKSKGITAVWIPPAWKGASQNDVGYGAYDLYDLGEFNQKGTVRTKYGTRSQLQAAVTSLKNNGIQVYGDVVMNHKGGADATEMVRAVEVNPNNRNQEVTGEYTIEAWTRFDFPGRGNTHSSFKWRWYHFDGVDWDQSRRLNNRIYKFRGHGKAWDWEVDTENGNYDYLMYADIDMDHPEVVNELRNWGVWYTNTLGLDGFRIDAVKHIKYSFTRDWINHVRSATGKNMFAVAEFWKNDLGAIENYLQKTNWNHSVFDVPLHYNLYNASKSGGNYDMRNIFNGTVVQRHPSHAVTFVDNHDSQPEEALESFVEEWFKPLAYALTLTREQGYPSVFYGDYYGIPTHGVPAMRSKIDPILEARQKYAYGKQNDYLDHHNIIGWTREGNTAHPNSGLATIMSDGAGGSKWMFVGRNKAGQVWSDITGNLTGTVTINADGWGNFSVNGGSVSIWVNK

SEQ ID NO: 22130 - protein, 485 aa, Bacillus sp. 707
HHNGTNGTMMQYFEWYLPNDGNHWNRLNSDASNLKSKGITAVWIPPAWKGASQNDVGYGAYDLYDLGEFNQKGTVRTKYGTRSQLQTAVTSLKNNGIQVYGDVVMNHKGGADATEMVRAVEVNPNNRNQEVTGEYTIEAWTRFDFPGRGNTHSSFKWRWYHFDGVDWDQSRRLNNRIYKFRGHGKAWDWEVDTENGNYDYLMYADIDMDHPEVVNELRNWGVWYTNTLGLDGFRIDAVKHIKYSFTRDWINHVRSATGKNMFAVAEFWKNDLGAIENYLQKTNWNHSVFDVPLHYNLYNASKSGGNYDMRNIFNGTVVQRHPSHAVTFVDNHDSQPEEALESFVEEWFKPLAYALTLTREQGYPSVFYGDYYGIPTHGVPAMRSKIDPILEARQKYAYGKQNDYLDHHNIIGWTREGNTAHPNSGLATIMSDGAGGSKWMFVGRNKAGQVWSDITGNRTGTVTINADGWGNFSVNGGSVSIWVNK

SEQ ID NO: 22131 - protein, 485 aa, Bacillus sp. 707
HHNGTNGTMMQYFEWYLPNDGNHWNRLNSDASNLKSKGITAVWIPPAWKGASQNDVGYGAYDLYDLGEFNQKGTVRTKYGTRSQLQAAVTSLKNNGIQVYGDVVMNHKGGADATEMVRAVEVNPNNRNQEVTGEYTIEAWTRFDFPGRGNTHSSFKWRWYHFDGVDWDQSRRLNNRIYKFRGHGKAWDWEVDTENGNYDYLMYADIDMDHPEVVNELRNWGVWYTNTLGLDGFRIDAVKHIKYSFTRDWINHVRSATGKNMFAVAEFWKNDLGAIENYLQKTNWNHSVFDVPLHYNLYNASKSGGNYDMRNIFNGTVVQRHPSHAVTFVDNHDSQPEEALESFVEEWFKPLAYALTLTREQGYPSVFYGDYYGIPTHGVPAMRSKIDPILEARQKYAYGKQNDYLDHHNIIGWTREGNTAHPNSGLATIMSDGAGGDKWMFVGRNKAGQVWSDITGNRTGTVTINADGWGNFSVNGGSVSIWVNK

SEQ ID NO: 22132 - protein, 485 aa, Bacillus sp. 707
HHNGTNGTMMQYFEWYLPNDGNHWNRLNSDASNLKSKGITAVWIPPAWKGASQNDVGYGAYDLYDLGEFNQKGTVRTKYGTRSQLQAAVTSLKNNGIQVYGDVVMNHKGGADATEMVRAVEVNPNNRNQEVTGEYTIEAWTRFDFPGRGNTHSSFKWRWYHFDGVDWDQSRRLNNRIYKFRGHGKAWDWEVDTENGNYDYLMYADIDMDHPEVVNELRNWGVWYTNTLGLDGFRIDAVKHIKYSFTRDWINHVRSATGKNMFAVAEFWKNDLGAIENYLQKTNWNHSVFDVPLHYNLYNASKSGGNYDMRNIFNGTVVQRHPSHAVTFVDNHDSQPEEALESFVEEWFKPLAYALTLTREQGYPSVFYGDYYGIPTHGVPAMRSKIDPILEARQKYAYGKQNDYLDHHNIIGWTREGNTAHPNSGLATIMSDGVGGSKWMFVGRNKAGQVWSDITGNRTGTVTINADGWGNFSVNGGSVSIWVNK

SEQ ID NO: 22133 - protein, 485 aa, Bacillus sp.
HHNGTNGTMMQYYEWYLPNDGNHWNRLNSDASNLKSKGITAVWIPPAWKGASQNDVGYGAYDLYDLGEFNQKGTVRTKYGTRSQLQAAVTSLKNNGIQVYGDVVMNHKGGADATEMVRAVEVNPNNRNQEVTGEYTIEAWTRFDFPGRGNTHSSFKWRWYHFDGVDWDQSRRLNNRIYKFRGHGKAWDWEVDTENGNYDYLMYADIDMDHPEVVNELRNWGVWYTNTLGLDGFRIDAVKHIKYSFTRDWINHVRSATGKNMFAVAEFWKNDLGAIENYLQKTNWNHSVFDVPLHYNLYNASKSGGNYDMRNIFNGTVVQRHPSHAVTFVDNHDSQPEEALESFVEEWFKPLAYALTLTREQGYPSVFYGDYYGIPTHGVPAMRSKIDPILEARQKYAYGKQNDYLDHHNIIGWTREGNTAHPNSGLATIMSDGAGGSKWMFVGRNKAGQVWSDITGNRTGTVTINADGWANFSVNGGSVSIWVNK

SEQ ID NO: 22134 - protein, 485 aa, Bacillus sp. 707
HHNGTNGTMMQYFEWYLPNDGNHWNRLNKDASNLKSKGITAVWIPPAWKGASQNDVGYGAYDLYDLGEFNQKGTVRTKYGTRSQLQAAVTSLKNNGIQVYGDVVMNHKGGADATEMVRAVEVNPNNRNQEVTGEYTIEAWTRFDFPGRGNTHSSFKWRWYHFDGVDWDQSRRLNNRIYKFRGHGKAWDWEVDTENGNYDYLMYADIDMDHPEVVNELRNWGVWYTNTLGLDGFRIDAVKHIKYSFTRDWINHVRSATGKNMFAVAEFWKNDLGAIENYLQKTNWNHSVFDVPLHYNLYNASKSGGNYDMRNIFNGTVVQRHPSHAVTFVDNHDSQPEEALESFVEEWFKPLAYALTLTREQGYPSVFYGDYYGIPTHGVPAMRSKIDPILEARQKYAYGKQNDYLDHHNIIGWTREGNTAHPNSGLATIMSDGAGGSKWMFVGRNKAGQVWSDITGNRTGTVTINADGWGNFSVNGGSVSIWVNK

SEQ ID NO: 22135 - protein, 484 aa, Bacillus sp. 707
HHNGTNGTMMQYFEWYLPNDGNHWNRLNSDASNLKSKGITAVWIPPAWKGASQNDVGYGAYDLYDLGEFNQKGTVRTKYGTRSQLQAAVTSLKNNGIQVYGDVVMNHKGGADATEMVRAVEVNPNNRNQEVTGEYTIEAWTRFDFPGRGNTHSSFKWRWYHFDGVDWDQSRRLNNRIYKFRHGKAWDWEVDTENGNYDYLMYADIDMDHPEVVNELRNWGVWYTNTLGLDGFRIDAVKHIKYSFTRDWINHVRSATGKNMFAVAEFWKNDLGAIENYLQKTNWNHSVFDVPLHYNLYNASKSGGNYDMRNIFNGTVVQRHPSHAVTFVDNHDSQPEEALESFVEEWFKPLAYALTLTREQGYPSVFYGDYYGIPTHGVPAMRSKIDPILEARQKYAYGKQNDYLDHHNIIGWTREGNTAHPNSGLATIMSDGAGGSKWMFVGRNKAGQVWSDITGNRTGTVTINADGWGNFSVNGGSVSIWVNK

SEQ ID NO: 22136 - protein, 485 aa, Bacillus sp. 707
HHNGTNGTMMQYFEWYLPNDGNHWNRLNSDASNLKSKGITAVWIPPAWKGASQNDVGYGAYDLYDLGEFNQKGTVRTKYGTRSQLQAAVTSLKNNGIQVYGDVVMNHKGGADATEMVRAVEVNPNNRNQEVTGEYTIEAWTRFDFPGRGNTHSSFKWRWYHFDGVDWDQSRRLNNRIYKFRGHGKAWDWEVDTENGNYDYLMYADIDMDHPEVVNELRNWGVWYTNTLGLDGFRIDAVKHIKYSFTRDWINHVRSATGKNMFAVAEFWKNDLGAIENYLQKTNWNHSVFDVPLHYNLYNASKSGGNYDMRNIFNGTVVQRHPSHAVTFVDNHDSQPEEALESFVEEWFKPLAYALTLTREQGYPSVFYGDYYGIPTHGVPAMRSKIDPILEARQKYAYGKQKDYLDHHNIIGWTREGNTAHPNSGLATIMSDGAGGSKWMFVGRNKAGQVWSDITGNRTGTVTINADGWGNFSVNGGSVSIWVNK

SEQ ID NO: 22137 - protein, 485 aa, Bacillus sp. 707
HHNGTNGTMMQYFEWYLPNDGNHWNRLNSDASNLKSKGITAVWIPPAWKGASQNDVGYGAYDLYDLGEFNQKGTVRTKYGTRSQLQAAVTSLKNNGIQVYGDVVMNHKGGADATEMVRAVEVNPNNRNQEVTGEYTIEAWTRFDFPGRGNTHSSFKWRWYHFDGVDWDQSRRLNNRIYKFRGHGKAWDWEVDTENGNYDYLMYADIDMDHPEVVNELRNWGGWYTNTLGLDGFRIDAVKHIKYSFTRDWINHVRSATGKNMFAVAEFWKNDLGAIENYLQKTNWNHSVFDVPLHYNLYNASKSGGNYDMRNIFNGTVVQRHPSHAVTFVDNHDSQPEEALESFVEEWFKPLAYALTLTREQGYPSVFYGDYYGIPTHGVPAMRSKIDPILEARQKYAYGKQNDYLDHHNIIGWTREGNTAHPNSGLATIMSDGAGGSKWMFVGRNKAGQVWSDITGNRTGTVTINADGWGNFSVNGGSVSIWVNK

SEQ ID NO: 22138 - protein, 485 aa, Bacillus subtilis
HHNGTNGTMMQYFEWYLPNDGNHWNRLRSDASNLKDKGISAVWIPPAWKGASQNDVGYGAYDLYDLGEFNQKGTIRTKYGTRNQLQAAVNALKSNGIQVYGDVVMNHKGGADATEMVRAVEVNPNNRNQEVSGEYTIEAWTKFDFPGRGNTHSNFKWRWYHFDGVDYDQSRKLNNRIYKFRGDGKGWDWEVDTENGNYDYLMYADIDMDNPEVVNELRNWGVWYTNTLGLDGFRIDAVKHIKYSFTRDWINHVRSATGKNMFAVAEFWKNDLGAIENYLNKTNWNHSVFDVPLHYNLYNASKSGGNYDMRQIFNGTVVQRHPMHAVTFVDNHDSQPEEALESFVEEWFKPLAYALTLTREQGYPSVFYGDYYGIPTHGVPAMKSKIDPILEARQKYAYGRQNDYLDHHNIIGWTREGNTAHPNSGLATIMSDGAGGNKWMFVGRNKAGQVWTDITGNRAGTVTINADGWGNFSVNGGSVSIWVNK

SEQ ID NO: 22139 - protein, 485 aa, Bacillus sp. 707
HHNGTNGTMMQYFEWYLPNDGNHWNRLNSDASNLKSKGITAVWIPPAWKGASQNDVGYGAYDLYDLGEFNQKGTVRTKYGTRSQLQAAVTSLKNNGIQVYGDVVMNHKGGADATEMVRAVEVNPNNRNQEVTGEYTIEAWTRFDFPGRGNTHSSFKWRWYHFDGVDWDQSRRWNNRIYKFRGHGKAWDWEVDTENGNYDYLMYADIDMDHPEVVNELRNWGVWYTNTLGLDGFRIDAVKHIKYSFTRDWINHVRSATGKNMFAVAEFWKNDLGAIENYLQKTNWNHSVFDVPLHYNLYNASKSGGNYDMRNIFNGTVVQRHPSHAVTFVDNHDSQPEEALESFVEEWFKPLAYALTLTREQGYPSVFYGDYYGIPTHGVPAMRSKIDPILEARQKYAYGKQNDYLDHHNIIGWTREGNTAHPNSGLATIMSDGAGGSKWMFVGRNKAGQVWSDITGNRTGTVTINADGWGNFSVNGGSVSIWVNK

SEQ ID NO: 22140 - protein, 485 aa, Bacillus sp. 707
HHNGTNGTMMQYFEWYLPNDGNHWNRLNSDASNLKSKGITAVWIPPAWKGASQNDVGYGAYDLYDLGEFNQKGTVRTKYGTRSQLQAAVTSLKNNGIQVYGDVVMNHKGGADATEMVRAVEVNPNNRNQEVTGEYTIEAWTRFDFPGRGNTHSSFKWRWYHFDGVDWDQSRRLNNRIYKFRGHGKAWDWEVDTENGNYDYLMYADIDMDHPEVVNELRAWGVWYTNTLGLDGFRIDAVKHIKYSFTRDWINHVRSATGKNMFAVAEFWKNDLGAIENYLQKTNWNHSVFDVPLHYNLYNASKSGGNYDMRNIFNGTVVQRHPSHAVTFVDNHDSQPEEALESFVEEWFKPLAYALTLTREQGYPSVFYGDYYGIPTHGVPAMRSKIDPILEARQKYAYGKQNDYLDHHNIIGWTREGNTAHPNSGLATIMSDGAGGSKWMFVGRNKAGQVWSDITGNRTGTVTINADGWGNFSVNGGSVSIWVNK

SEQ ID NO: 22141 - protein, 485 aa, Bacillus sp.
HHNGTNGTLMQYFEWYLPNDGNHWNRLRSDASNLKDKGISAVWIPPAWKGASQNDVGYGAYDLYDLGEFNQKGTIRTKYGTRNQLQAAVNALKSNGIQVYGDVVMNHKGGADATEMVRAVEVNPNNRNQEVSGEYTIEAWTKFDFPGRGNTHSNFKWRWYHFDGVDWDQSRKLNNRIYKFRGDGKGWDWEVDTENGNYDYLLYADIDMDHPEVVNELRNWGVWYTNTLGLDGFRIDAVKHIKYSFTRDWINHVRSATGKNMFAVAEFWKNDLGAIENYLNKTNWNHSVFDVPLHFNLYNASKSGGNYDMRQIFNGTVVQRHPMHAVTFVDNHDSQPEESLESFVEEWFKPLAYALTLTREQGYPSVFYGDYYGIPTHGVPAMKSKIDPILEARQKYAYGRQNDYLDHHNIIGWTREGNTAHPNSGLATIMSDGAGGNKWMFVGRNKAGQVWTDITGNRAGTVTINADGWGNFSVNGGSVSIWVNK

SEQ ID NO: 22142 - protein, 485 aa, Bacillus sp. 707
HHNGTNGTMMQYFEWYLPNDGNHWNRLNSDASNLKSKGITAVWIPPAWKGASQNDVGYGAYDLYDLGEFNQKGTVRTKYGTRSQLQAAVTSLKNNGIQVYGDVVMNHKGGADATEMVRAVEVNPNNRNQEVTGEYTIEAWTRFDFPGRGNTHSSFKWRWYHFDGVDWDQSRRLNNRIYKFRGHGKAWDWEVDTENGNYDYLMYADIDMDHPEVVNELRNWGVWYTNTLGLDGFRIDAVKHIKYSFTRDWINHVRSATGKNMFAVAEFWKNDLGAIENYLQKTNWNHSVFDVPLHYNLYNASKSGGNYDMRNIFNGTVVQRHPSHAVTFVDNHDSQPEEALESFVEEWFKPLAYALTLTREQGYPSVFYGDYYGIPTHGVPAMRSKIDPILEARQKYAYGKQNDYLDHHNIIGWTREGNTAHPNSGLATIMSDGAGGSKWMFVGRNKAGQVWSDITGNSTGTVTINADGWGNFSVNGGSVSIWVNK

SEQ ID NO: 22143 - protein, 484 aa, Bacillus sp. 707
HHNGTNGTMMQYFEWYLPNDGNHWNRLNSDASNLKSKGITAVWIPPAWKGASQNDVGYGAYDLYDLGEFNQKGTVRTKYGTRSQLQAAVTSLKNNGIQVYGDVVMNHKGGADATEMVRAVEVNPNNRNQEVTGEYTIEAWTRFDFPGRGNTHSSFKWRWYHFDGVDWDQSRRLNNRIYKFRGGKAWDWEVDTENGNYDYLMYADIDMDHPEVVNELRNWGVWYTNTLGLDGFRIDAVKHIKYSFTRDWINHVRSATGKNMFAVAEFWKNDLGAIENYLQKTNWNHSVFDVPLHYNLYNASKSGGNYDMRNIFNGTVVQRHPSHAVTFVDNHDSQPEEALESFVEEWFKPLAYALTLTREQGYPSVFYGDYYGIPTHGVPAMRSKIDPILEARQKYAYGKQNDYLDHHNIIGWTREGNTAHPNSGLATIMSDGAGGSKWMFVGRNKAGQVWSDITGNRTGTVTINADGWGNFSVNGGSVSIWVNK

SEQ ID NO: 22144 - protein, 485 aa, Bacillus sp.
HHNGTNGTMMQYFEWYLPNDGNHWNRLRSDASNLKDKGISAVWIPPAWKGASQNDVGYGAYDLYDLGEFNQKGTIRTKYGTRNQLQAAVNALKSNGIQVYGDVVMNHKGGADATEMVRAVEVNPNNRNQEVSGEYTIEAWTKFDFPGRGNTHSNFKWRWYHFDGVDWDQSRKLNNRIYKFRGDGKGWDWEVDTENGNYDYLLYADIDMDHPEVVNELRNWGVWYTNTLGLDGFRIDAVKHIKYSFTRDWINHVRSATGKNMFAVAEFWKNDLGAIENYLNKTNWNHSVFDVPLHFNLYNASKSGGNYDMRQIFNGTVVQRHPMHAVTFVDNHDSQPEEALESFVEEWFKPLAYALTLTREQGYPSVFYGDYYGIPTHGVPAMKSKIDPILEARQKYAYGRQNDYLDHHNIIGWTREGNTAHPNSGLATIMSDGAGGNKWMFVGRNKAGQVWTDITGNRAGTVTINADGWGNFSVNGGSVSIWVNK

SEQ ID NO: 22145 - protein, 485 aa, Bacillus sp. 707
HHNGTNGTMMQYFEWYLPNDGNHWNRLCSDASNLKSKGITAVWIPPAWKGASQNDVGYGAYDLYDLGEFNQKGTVRTKYGTRSQLQAAVTSLKNNGIQVYGDVVMNHKGGADATEMVRAVEVNPNNRNQEVTGEYTIEAWTRFDFPGRGNTHSSFKWRWYHFDGVDWDQSRRLNNRIYKFRGHGKAWDWEVDTENGNYDYLMYADIDMDHPEVVNELRNWGVWYTNTLGLDGFRIDAVKHIKYSFTRDWINHVRSATGKNMFAVAEFWKNDLGAIENYLQKTNWNHSVFDVPLHYNLYNASKSGGNYDMRNIFNGTVVQRHPSHAVTFVDNHDSQPEEALESFVEEWFKPLAYALTLTREQGYPSVFYGDYYGIPTHGVPAMRSKIDPILEARQKYAYGKQNDYLDHHNIIGWTREGNTAHPNSGLATIMSDGAGGSKWMFVGRNKAGQVWSDITGNRTGTVTINADGWGNFSVNGGSVSIWVNK

SEQ ID NO: 22146 - protein, 485 aa, Bacillus sp. 707
HHNGTNGTMMQYFEWYLPNDGNHWNRLNSDASNLKSKGITAVWIPPAWKGASQNDVGYGAYDLYDLGEFNQKGTVRTKYGTRSQLQAAVTSLKNNGIQVYGDVVMNHKGGADATEMVRAVEVNPNNRNQEVTGEYTIEAWTRFDFPGRGNTHSSFKWRWYHFDGVDWDQSRRLSNRIYKFRGHGKAWDWEVDTENGNYDYLMYADIDMDHPEVVNELRNWGVWYTNTLGLDGFRIDAVKHIKYSFTRDWINHVRSATGKNMFAVAEFWKNDLGAIENYLQKTNWNHSVFDVPLHYNLYNASKSGGNYDMRNIFNGTVVQRHPSHAVTFVDNHDSQPEEALESFVEEWFKPLAYALTLTREQGYPSVFYGDYYGIPTHGVPAMRSKIDPILEARQKYAYGKQNDYLDHHNIIGWTREGNTAHPNSGLATIMSDGAGGSKWMFVGRNKAGQVWSDITGNRTGTVTINADGWGNFSVNGGSVSIWVNK

SEQ ID NO: 22147 - protein, 485 aa, Bacillus sp. 707
HHNGTNGTMMQYFEWYLPNDGNHWNRLNSDASNLKSKGITAVWIPPAWKGASQNDVGYGAYDLYDLGEFNQKGTVRTKYGTRSQLQAAVTSLKNNGIQVYGDVVMNHKGGADATEMVRAVEVNPNNRNQEVTGEYTIEAWTRFDFPGRGNTHSSFKWRWYHFDGVDWDQSRRLNNRIYKFRGHGKAWDWEVDTENGNYDYLMYADIDMDHPEVVNELRNWGVWYTNTLGLDGFRIDAVKHIKYSFTRDWINHVRSATGKNMFAVAEFWKNDLGAIENYLQKTNWNHSVFDVPLHYNLYNASKSGGNYDMRNIFNGTVVQRHPSHAVTFVDNHDSQPEEALESFVEEWFKPLAYALTLTREQGYPSVFYGDYYGIPTHGVPAMRSKIDPILEARQKYAYGKQNDYLDHHNIIGWTREGNTAHPNSGLATIMSDGIGGSKWMFVGRNKAGQVWSDITGNRTGTVTINADGWGNFSVNGGSVSIWVNK

SEQ ID NO: 22148 - protein, 485 aa, Bacillus sp. 707
HHNGTNGTMMQYFEWYLPNDGNHWNRLNSDASNLKSKGITAVWIPPAWKGASQNDVGYGAYDLYDLGEFNQKGTVRTKYGTRSQLQAAVTSLKNNGIQVYGDVVMNHKGGADATEMVRAVEVNPNNRNQEVTGEYTIEAWTRFDFPGRGNTHSSFKWRWYHFDGVDWDQSRRLNNRIYKFRGHGKAWDWEVDTENGNYDYLMYADIDMDHPEVVNELRNWGVWYTNTLGLDGFRIDAVKHIKYSFTRDWINHVRSATGKNMFAVAEFWKNDLGAIENYLQKTNWNHSVFDVPLHYNLYNASKSGGNYDMRNIFNGTVVQRHPSHAVTFVDNHDSQPEEALESFVNEWFKPLAYALTLTREQGYPSVFYGDYYGIPTHGVPAMRSKIDPILEARQKYAYGKQNDYLDHHNIIGWTREGNTAHPNSGLATIMSDGAGGSKWMFVGRNKAGQVWSDITGNRTGTVTINADGWGNFSVNGGSVSIWVNK

SEQ ID NO: 22149 - protein, 485 aa, Bacillus sp. 707
HHNGTNGTMMQYFEWYLPNDGNHWNRLNSDASNLKSKGITAVWIPPAWKGASQNDVGYGAYDLYDLGEFNQKGTVRTKYGTRSQLQAAVTSLKNNGIQVYGDVVMNHKGGADATEMVRAVEVNPNNRNQEVTGEYTIEAWTRFDFPGRGNTHSSFKWRWYHFDGVDWDQSRRLNNRIYKFRGHGKAWDWEVDTENGNYDYLMYADIDMDHPEVVNELRNWGVWYTNTLGLDGFRIDAVKHIKYSFTRDWINHVRSATGKNMFAVAEFWKNDLGAIENYLQKTNWNHSVFDVPLHYNLYNASKSGGNYDMRTIFNGTVVQRHPSHAVTFVDNHDSQPEEALESFVEEWFKPLAYALTLTREQGYPSVFYGDYYGIPTHGVPAMRSKIDPILEARQKYAYGKQNDYLDHHNIIGWTREGNTAHPNSGLATIMSDGAGGSKWMFVGRNKAGQVWSDITGNRTGTVTINADGWGNFSVNGGSVSIWVNK

SEQ ID NO: 22150 - protein, 485 aa, Bacillus sp. 707
HHNGTNGTMMQYFEWYLPNDGNHWNRLNSDASNLKSKGITAVWIPPAWKGASQNDVGYGAYDLYDLGEFNQKGTVRTKYGTRSQLQAAVTSLKNNGIQVYGDVVMNHKGGADATEMVRAVEVNPNNRNQEVTGEYTIEAWTRFDFPGRGNTHSSFKWRWYHFDGVDWDQSRRLNNRIYKFRGHGKAWDWEVDTENGNYDYLMYADIDMDHPEVVNELRNWGIWYTNTLGLDGFRIDAVKHIKYSFTRDWINHVRSATGKNMFAVAEFWKNDLGAIENYLQKTNWNHSVFDVPLHYNLYNASKSGGNYDMRNIFNGTVVQRHPSHAVTFVDNHDSQPEEALESFVEEWFKPLAYALTLTREQGYPSVFYGDYYGIPTHGVPAMRSKIDPILEARQKYAYGKQNDYLDHHNIIGWTREGNTAHPNSGLATIMSDGAGGSKWMFVGRNKAGQVWSDITGNRTGTVTINADGWGNFSVNGGSVSIWVNK

SEQ ID NO: 22151 - protein, 485 aa, Bacillus sp. 707
HHNGTNGTMMQYFEWYLPNDGNHWNRLNSDASNLKSKGITAVWIPPAWKGASQNDVGYGAYDLYDLGEFNQKGTVRTKYGTRSQLQAAVTSLKNNGIQVYGDVVMNHKGGADATEMVRAVEVNPNNRNQEVTGEYTIEAWTRFDFPGRGNTHSSFKWRWYHFDGVDWDQSRRLNNRIYKFRGHGKAWDWEVDTENGNYDYLMYADIDMDHPEVVNELRNWGVWYTNTLGLDGFRIDAVKHIKYSFTRDWINHVRSATGKNMFAVAEFWKNDLGAIENYLQKTNWNHSVFDVPLHYNLYNASKSGGNYDMRNIFNGTVVQRHPSHAVTFVDNHDSQPEEALESFVTEWFKPLAYALTLTREQGYPSVFYGDYYGIPTHGVPAMRSKIDPILEARQKYAYGKQNDYLDHHNIIGWTREGNTAHPNSGLATIMSDGAGGSKWMFVGRNKAGQVWSDITGNRTGTVTINADGWGNFSVNGGSVSIWVNK

SEQ ID NO: 22152 - protein, 485 aa, Bacillus sp. 707
HHNGTNGTMMQYFEWYLPNDGNHWNRLNSDASNLKSKGITAVWIPPAWKGASQNDVGYGAYDLYDLGEFNQKGTVRTKYGTRSQLQAAVTSLKNNGIQVYGDVVMNHKGGADATEMVRAVEVNPNNRNQEVTGEYTIEAWTRFDFPGRGNTHSSFKWRWYHFDGVDWDQSRRLNNRIYKFRGHGKAWDWEVDTENGNYDYLMYADIDMDHPEVVNELRNWGVWYTNTLGLDGFRIDAVKHIKYSFTRDWINHVRSATGKNMFAVAEFWKNDLGAIENYLQKTNWNHSVFDVPLHYNLYNASKSGGNYDMRNIFNGTVVQRHPSHAVTFVDNHDSQPEEALESFVSEWFKPLAYALTLTREQGYPSVFYGDYYGIPTHGVPAMRSKIDPILEARQKYAYGKQNDYLDHHNIIGWTREGNTAHPNSGLATIMSDGAGGSKWMFVGRNKAGQVWSDITGNRTGTVTINADGWGNFSVNGGSVSIWVNK

SEQ ID NO: 22153 - protein, 485 aa, Bacillus sp. 707
HHNGTNGTMMQYFEWYLPNDGNHWNRLNSDASNLKSKGITAVWIPPAWKGASQNDVGYGAYDLYDLGEFNQKGTVRTKYGTRSQLQAAVTSLKNNGIQVYGDVVMNHKGGADATECVRAVEVNPNNRNQEVTGEYTIEAWTRFDFPGRGNTHSSFKWRWYHFDGVDWDQSRRLNNRIYKFRGHGKAWDWEVDTENGNYDYLMYADIDMDHPEVVNELRNWGVWYTNTLGLDGFRIDAVKHIKYSFTRDWINHVRSATGKNMFAVAEFWKNDLGAIENYLQKTNWNHSVFDVPLHYNLYNASKSGGNYDMRNIFNGTVVQRHPSHAVTFVDNHDSQPEEALESFVEEWFKPLAYALTLTREQGYPSVFYGDYYGIPTHGVPAMRSKIDPILEARQKYAYGKQNDYLDHHNIIGWTREGNTAHPNSGLATIMSDGAGGSKWMFVGRNKAGQVWSDITGNRTGTVTINADGWGNFSVNGGSVSIWVNK

SEQ ID NO: 22154 - protein, 485 aa, Bacillus sp. 707
HHNGTNGTMMQYFEWYLPNDGNHWNRLNSDASNLKSKGITAVWIPPAWKGASQNDVGYGAYDLYDLGEFNQKGTVRTKYGTRSQLQAAVTSLKNNGIQVYGDVVMNHKGGADATEMVRAVEVNPNNRNQEVTGEYTIEAWTRFDFPGRGNTHSSFKWRWYHFDGVDWDQSRRLNNRIYKFRGHGKAWDWEVDTENGNYDYLMYADIDMDHPEVVNELRNWGVWYTNTLGLDGFRIDAVKHIKYSFTRDWINHVRSATGKNMFAVAEFWKNDLGAIENYLQKTNWNHSVFDVPLHYNLYNASKSGGNYDMRNIFNGTVVQRHPSHAVTFVDNHDSQPEEALESFVEEWFKPLAYALTLTREQGYPSVFYGDYYGIPTHGVPAMRSKIDPILEARQKYAYGKQNDYLDHHNIIGWTREGNTAHPNSGLATIMSDGAGGSKWMFVGRNKAGQVWSDITGNRAGTVTINADGWGNFSVNGGSVSIWVNK

SEQ ID NO: 22155 - protein, 485 aa, Bacillus subtilis
HHNGTNGTMMQYFEWYLPNDGNHWNRLRSDASNLKDKGISAVWIPPAWKGQSQNDVGYGAYDLYDLGEFNQKGTIRTKYGTRNQLQAAVNALKSNGIQVYGDVVMNHKMGADATEMVRAVEVNPNNRNQEVSGEYTIEAWTKFDFPGRGNTHSNFKWRWYHFDGVDWDQSRKLNNRIYKFRGDGKGWDWEVDTENGNYDYLMGADIDMDHPEVVNELRNWGVWYTNTLGLDGFRIDAVKHIKYSFTRDWINHVRSATGKNMFAVAEFWKNDLGAIENYLNKTNWNHSVFDVPLHYNLYNASKSGGNYDMRQIFNGTVVQRHPMHAVTFVDNHDSQPEEALESFVEEWFKPLAYALTLTREQGYPSVFYGDYYGIPTHGVPAMKSKIDPILEARQKYAYGRQNDYLDHHNIIGWTREGNTAHPNSGLATIMSDGAGGNKWMFVGRNKAGQVWTDITGNRAGTVTINADGWGNFSVNGGSVSIWVNK

SEQ ID NO: 22156 - protein, 485 aa, Bacillus sp. 707
HHNGTNGTMMQYFEWYLPNDGNHWNRLNSDASNLKSKGITAVWIPPAWKGASQNDVGYGAYDLYDLGEFNQKGTVRTKYGTRSQLQAAVTSLKNNGIQVYGDVVMNHKGGADATEMVRAVEVNPNNRNQEVTGEYTIEAWTRFDFPGRGNTHSSFKWRWYHFDGVDWDQSRRLNNRIYKFRGHGKAWDWEVDTENGNYDYLMYADIDMDHPEVVNELRNWGVWYTNTLGLDGFRIDAVKHIKYSFTRDWINHVRSATGKNMFAVAEFWKNDLGAIENYLQKTNWNHSVFDVPLHYNLYNASKSGGNYDMRRIFNGTVVQRHPSHAVTFVDNHDSQPEEALESFVEEWFKPLAYALTLTREQGYPSVFYGDYYGIPTHGVPAMRSKIDPILEARQKYAYGKQNDYLDHHNIIGWTREGNTAHPNSGLATIMSDGAGGSKWMFVGRNKAGQVWSDITGNRTGTVTINADGWGNFSVNGGSVSIWVNK

SEQ ID NO: 22157 - protein, 485 aa, Bacillus sp. 707
HHNGTNGTMMQYFEWYLPNDGNHWNRLNSDASNLKSKGITAVWIPPAWKGASQNDVGYGAYDLYDLGEFNQKGTVRTKYGTRSQLQAAVTSLKNNGIQVYGDVVMNHKGGADATEMVRAVEVNPNNRNQEVTGEYTIEAWTRFDFPGRGNTHSSFKWRWYHFDGVDWDQSRRLNNRIYKFRGHGKAWDWEVDTENGNYDYLMYADIDMDHPEVVNELRNWGVWYTNTLGLDGFRIDAVKHIKYSFTRDWINHVRSATGKNMFAVAEFWKNDLGAIENYLQKTNWNHSVFDVPLHYNLYNASKSGGNYDMRNIFNGTVVQRHPSHAVTFVDNHDSQPEEALESFVEEWFKPLAYALTLTREQGYPSVFYGDYYGIPTHGVPAMRSKIDPILEARQKYAYGKQNDYLDHHNIIGWTREGNTAHPNSGLATIMSDGAGGSKWMFVGRNKAGQVWSDITGNREGTVTINADGWGNFSVNGGSVSIWVNK

SEQ ID NO: 22158 - protein, 485 aa, Bacillus sp. 707
HHNGTNGTMMQYFEWYLPNDGNHWNRLNSDASNLKSKGITAVWIPPAWKGASQNDVGYGAYDLYDLGEFNQKGTVRTKYGTRSQLQAAVTSLKNNGIQVYGDVVMNHKGGADATEMVRAVEVNPNNRNQEVTGEYTIEAWTRFDFPGRGNTHSSFKWRWYHFDGVDWDQSRYLNNRIYKFRGHGKAWDWEVDTENGNYDYLMYADIDMDHPEVVNELRNWGVWYTNTLGLDGFRIDAVKHIKYSFTRDWINHVRSATGKNMFAVAEFWKNDLGAIENYLQKTNWNHSVFDVPLHYNLYNASKSGGNYDMRNIFNGTVVQRHPSHAVTFVDNHDSQPEEALESFVEEWFKPLAYALTLTREQGYPSVFYGDYYGIPTHGVPAMRSKIDPILEARQKYAYGKQNDYLDHHNIIGWTREGNTAHPNSGLATIMSDGAGGSKWMFVGRNKAGQVWSDITGNRTGTVTINADGWGNFSVNGGSVSIWVNK

SEQ ID NO: 22159 - protein, 483 aa, Bacillus sp. SP70
HHNGTNGTMMQYFEWYLPNDGNHWNRLNSDASNLKSKGITAVWIPPAWKGASQNDVGYGAYDLYDLGEFNQKGTVRTKYGTRSQLQAAVTSLKNNGIQVYGDVVMNHKGGADATEMVRAVEVNPNNRNQEVTGEYTIEAWTRFDFPGRGNTHSSFKWRWYHFDGVDWDQSRRLNNRIYKFRGKAWDWEVDTENGNYDYLMYADIDMDHPEVVNELRNWGVWYTNTLGLDGFRIDAVKHIKYSFTRDWINHVRSATGKNMFAVAEFWKNDLGAIENYLQKTNWNHSVFDVPLHYNLYNASNSGGNYDMRNIFNGTVVQRHPSHAVTFVDNHDSQPEEALESFVEEWFKPLAYALTLTREQGYPSVFYGDYYGIPTHGVPAMRSKIDPILEARQKYAYGKQNDYLDHHNIIGWTREGNTAHPNSGLATIMSDGAGGSKRMFVGRNKAGQVWSDITGNRTGTVTINADGWGNFSVNGGSVSIWVNK

SEQ ID NO: 22160 - protein, 485 aa, Bacillus sp. 707
HHNGTNGTMMQYFEWYLPNDGNHWNRLNSDASNLKSKGITAVWIPPAWKGASQNDVGYGAYDLYDLGEFNQKGTVRTKYGTRSQLQAAVTSLKNNGIQVYGDVVMNHKGGADATEMVRAVEVNPNNRNQEVTGEYTIEAWTRFDFPGRGNTHSSFKWRWYHFDGVDWDQSRRLNNRIYKFRGHGKAWDWEVDTENGNYDYLMYADIDMDHPEVVNELRNWGVWYTNTLGLDGFRIDAVKHIKYSFTRDWINHVRSATGKNMFAVAEFWKNDLGAIENYLQKTNWNHSVFDVPLHYNLYNASKSGGNYDMRNIFNGTVVQRHPSHAVTFVDNHDSQPEEALESFVEEWFKPLAYALTLTREQGYPSVFYGDYYGIPTHGVPAMRSKIDPILEARQKYAYGKQNDYLDHHNIIGWTREGNTAHPNSGLATIMSDGAGGNKWMFVGRNKAGQVWSDITGNRTGTVTINADGWGNFSVNGGSVSIWVNK

SEQ ID NO: 22161 - protein, 485 aa, Bacillus sp. 707
HHNGTNGTMMQYFEWYLPNDGNHWNRLNSDASNLKSKGITAVWIPPAWKGASQNDVGYGAYDLYDLGEFNQKGTVRTKYGTRSQLQAAVTSLKNNGIQVYGDVVMNHKGGADATEMVRAVEVNPNNRNQEVTGEYTIEAWTRFDFPGRGNTHSSFKWRWYHFDGVDWDQSRRLNNRIYKFRGHGKAWDWEVDTENGNYDYLMYADIDMDHPEVVNELRNWGVWYTNTLGLDGFRIDAVKHIKYSFTRDWINHVRSATGKNMFAVAEFWKNDLGAIENYLQKTNWNHSVFDVPLHYNLYNASKSGGNYDMRNIFNGTVVQRHPSHAVTFVDNHDSQPEEALESFVEEWFKPLAYALTLTREQGYPSVFYGDYYGIPTHGVPAMRSKIDPILEARQKYAYGKQNDYLDHHNIIGWTREGNTDHPNSGLATIMSDGAGGSKWMFVGRNKAGQVWSDITGNRTGTVTINADGWGNFSVNGGSVSIWVNK

SEQ ID NO: 22162 - protein, 485 aa, Bacillus sp. 707
HHNGTNGTMMQYFEWYLPNDGNHWNRLNSDASNLKSKGITAVWIPPAWKGASQNDVGYGAYDLYDLGEFNQKGTVRTKYGTRSQLRAAVTSLKNNGIQVYGDVVMNHKGGADATEMVRAVEVNPNNRNQEVTGEYTIEAWTRFDFPGRGNTHSSFKWRWYHFDGVDWDQSRRLNNRIYKFRGHGKAWDWEVDTENGNYDYLMYADIDMDHPEVVNELRNWGVWYTNTLGLDGFRIDAVKHIKYSFTRDWINHVRSATGKNMFAVAEFWKNDLGAIENYLQKTNWNHSVFDVPLHYNLYNASKSGGNYDMRNIFNGTVVQRHPSHAVTFVDNHDSQPEEALESFVEEWFKPLAYALTLTREQGYPSVFYGDYYGIPTHGVPAMRSKIDPILEARQKYAYGKQNDYLDHHNIIGWTREGNTAHPNSGLATIMSDGAGGSKWMFVGRNKAGQVWSDITGNRTGTVTINADGWGNFSVNGGSVSIWVNK

SEQ ID NO: 22163 - protein, 485 aa, Bacillus sp. 707
HHNGTNGTMMQYFEWYLPNDGNHWNRLNSDASNLKSKGITAVWIPPAWKGASQNDVGYGAYDLYDLGEFNQKGTVRTKYGTRSQLQAAVTSLKNNGIQVYGDVVMNHKGGADATEMVRAVEVNPNNRNQEVTGEYTIEAWTRFDFPGRGNTHSSFKWRWYHFDGVDWDQSRRLNNRIYKFRGHGKAWDWEVDTENGNYDYLMYADIDMDHPEVVNELRNWGVWYTNTLGLDGFRIDAVKHIKYSFTRDWINHVRSATGKNMFAVAEFWKNDLGAIENYLQKTNWNHSVFDVPLHYNLYNASKSGGNYDMRNIFNGTVVQRHPSHAVTFVDNHDSQPEEALESFVEEWFKPLAYALTLTREQGYPSVFYGDYYGIPTHGVPAMRSKIDPILEARQKYAYGQQNDYLDHHNIIGWTREGNTAHPNSGLATIMSDGAGGSKWMFVGRNKAGQVWSDITGNRTGTVTINADGWGNFSVNGGSVSIWVNK

SEQ ID NO: 22164 - protein, 485 aa, Bacillus sp. 707
HHNGTNGTMMQYFEWYLPNDGNHWNRLNSDASNLKSKGITAVWIPPAWKGASQNDVGYGAYDLYDLGEFNQKGTVRTKYGTRSQLQAAVTSLKNNGIQVYGDVVMNHKGGADATEMVRAVEVNPNNRNQEVTGEYTIEAWTRFDFPGRGNTHSSFKWRWYHFDGVDWDQSRRLNNRIYKFRGHGKAWDWEVDTENGNYDYLMYADIDMDHPEVVNELRNWGVWYTNTLGLDGFRIDAVKHIKYSFTRDWINHVRSATGKNMFAVAEFWKNDLGAIENYLQKTNWNHSVFDVPLHYNLYNASKSGGNYDMRNIFNGTVVQRHPSHAVTFVDNHDSQPEEALESFVMEWFKPLAYALTLTREQGYPSVFYGDYYGIPTHGVPAMRSKIDPILEARQKYAYGKQNDYLDHHNIIGWTREGNTAHPNSGLATIMSDGAGGSKWMFVGRNKAGQVWSDITGNRTGTVTINADGWGNFSVNGGSVSIWVNK

SEQ ID NO: 22165 - protein, 485 aa, Bacillus sp. 707
HHNGTNGTMMQYFEWYLPNDGNHWNRLNSDASNLFSKGITAVWIPPAWKGASQNDVGYGAYDLYDLGEFNQKGTVRTKYGTRSQLQAAVTSLKNNGIQVYGDVVMNHKGGADATEMVRAVEVNPNNRNQEVTGEYTIEAWTRFDFPGRGNTHSSFKWRWYHFDGVDWDQSRRLNNRIYKFRGHGKAWDWEVDTENGNYDYLMYADIDMDHPEVVNELRNWGVWYTNTLGLDGFRIDAVKHIKYSFTRDWINHVRSATGKNMFAVAEFWKNDLGAIENYLQKTNWNHSVFDVPLHYNLYNASKSGGNYDMRNIFNGTVVQRHPSHAVTFVDNHDSQPEEALESFVEEWFKPLAYALTLTREQGYPSVFYGDYYGIPTHGVPAMRSKIDPILEARQKYAYGKQNDYLDHHNIIGWTREGNTAHPNSGLATIMSDGAGGSKWMFVGRNKAGQVWSDITGNRTGTVTINADGWGNFSVNGGSVSIWVNK

SEQ ID NO: 22166 - protein, 485 aa, Bacillus sp. 707
HHNGTNGTMMQYFEWYLPNDGNHWNRLNSDASNLKSKGITAVWIPPAWKGASQNDVGYGAYDLYDLGEFNQKGTVRTKYGTRSQLQAAVTSLKNNGIQVYGDVVMNHKGGADATEMVRAVEVNPNNRNQEVTGEYTIEAWTRFDFPGRGNTHSSFKWRWYHFDGVDWDQSRRLNNRIYKFRGNGKAWDWEVDTENGNYDYLMYADIDMDHPEVVNELRNWGVWYTNTLGLDGFRIDAVKHIKYSFTRDWINHVRSATGKNMFAVAEFWKNDLGAIENYLQKTNWNHSVFDVPLHYNLYNASKSGGNYDMRNIFNGTVVQRHPSHAVTFVDNHDSQPEEALESFVEEWFKPLAYALTLTREQGYPSVFYGDYYGIPTHGVPAMRSKIDPILEARQKYAYGKQNDYLDHHNIIGWTREGNTAHPNSGLATIMSDGAGGSKWMFVGRNKAGQVWSDITGNRTGTVTINADGWGNFSVNGGSVSIWVNK

SEQ ID NO: 22167 - protein, 485 aa, Bacillus sp. 707
HHNGTNGTMMQYFEWYLPNDGNHWNRLNSDASNLKSKGITAVWIPPAWKGASQNDVGYGAYDLYDLGEFNQKGTVRTKYGTRSQLQAAVTSLKNNGIQVYGDVVMNHKGGADATEMVRAVEVNPNNRNQEVTGEYTIEAWTRFDFPGRGNTHSSFKWRWYHFDGVDWDQSRRLNNRIYKFRGHGKAWDWEVDTENGNYDYLMYADIDMDHPEVVNELRNWGVWYTNTLGLDGFRIDAVKHIKYSFTRDWINHVRSATGKNMFAVAEFWKNDLGAIENYLQKTNWNHSVFDVPLHYNLYNASKSGGNYDMRNIFNGTVVQRHPSHAVTFVDNHDSQPEEALESFVEEWFKPLAYALTLTREQGYPSVFYGDYYGIPTHGVPAMRSKIDPILEARQKYAYGKQNDYLDHHNIIGWTREGNTAHPNSGLATIMSDGSGGSKWMFVGRNKAGQVWSDITGNRTGTVTINADGWGNFSVNGGSVSIWVNK

SEQ ID NO: 22168 - protein, 485 aa, Bacillus sp. 707
HHNGTNGTMMQYFEWYLPNDGNHWNRLNSDASNLKSKGITAVWIPPAWKGASQNDVGYGAYDLYDLGEFNQKGTVRTKYGTRSQLQAAVTSLKNNGIQVYGDVVMNHKGGADATEMVRAVEVNPNNRNQEVTGEYTIEAWTRFDFPGRGNTHSSFKWRWYHFDGVDWDQSRRLNNRIYKFRGHGKAWDWEVDTENGNYDYLMYADIDMDHPEVVNELRNWGVWYTNTLGLDGFRIDAVKHIKYSFTRDWINHVRSATGKNMFAVAEFWKNDLGAIENYLQKTNWNHSVFDVPLHYNLYNASKSGGNYDMRNIFNGTVVQRHPSHAVTFVDNHDSQPEEALESFVEEWFKPLAYALTLTREQGYPSVFYGDYYGIPTHGVPAMRSKIDPILEARQKYAYGKQNDYLDHHNIIGWTREGNTSHPNSGLATIMSDGAGGSKWMFVGRNKAGQVWSDITGNRTGTVTINADGWGNFSVNGGSVSIWVNK

SEQ ID NO: 22169 - protein, 485 aa, Bacillus sp. 707
HHNGTNGTMMQYFEWYLPNDGNHWNRLNSDASNLMSKGITAVWIPPAWKGASQNDVGYGAYDLYDLGEFNQKGTVRTKYGTRSQLQAAVTSLKNNGIQVYGDVVMNHKGGADATEMVRAVEVNPNNRNQEVTGEYTIEAWTRFDFPGRGNTHSSFKWRWYHFDGVDWDQSRRLNNRIYKFRGHGKAWDWEVDTENGNYDYLMYADIDMDHPEVVNELRNWGVWYTNTLGLDGFRIDAVKHIKYSFTRDWINHVRSATGKNMFAVAEFWKNDLGAIENYLQKTNWNHSVFDVPLHYNLYNASKSGGNYDMRNIFNGTVVQRHPSHAVTFVDNHDSQPEEALESFVEEWFKPLAYALTLTREQGYPSVFYGDYYGIPTHGVPAMRSKIDPILEARQKYAYGKQNDYLDHHNIIGWTREGNTAHPNSGLATIMSDGAGGSKWMFVGRNKAGQVWSDITGNRTGTVTINADGWGNFSVNGGSVSIWVNK

SEQ ID NO: 22170 - protein, 485 aa, Bacillus sp. 707
HHNGTNGTMMQYFEWYLPNDGNHWNRLNSDASNLKSKGITAVWIPPAWKGASQNDVGYGAYDLYDLGEFNQKGTVRTKYGTRSQLQAAVTSLKNNGIQVYGDVVMNHKGGADATEMVRAVEVNPNNRNQEVTGEYTIEAWTRFDFPGRGNTHSSFKWRWYHFDGVDWDQSRRLNNRIYKFRGHGKAWDWEVDTENGNYDYLMYADIDMDHPEVVNELRNWGVWYTNTLGLDGFRIDAVKHIKYSFTRDWINHVRSATGKNMFAVAEFWKNDLGAIENYLQKTNWNHSVFDVPLHYNLYNASKSGGNYDMRNIFNGTVVQRHPSHAVTFVDNHDSQPEEALESFVEEWFKPLAYALTLTREQGYPSVFYGDYYGIPTHGVPAMRSKIDPILEARQKYAYGKQVDYLDHHNIIGWTREGNTAHPNSGLATIMSDGAGGSKWMFVGRNKAGQVWSDITGNRTGTVTINADGWGNFSVNGGSVSIWVNK

SEQ ID NO: 22171 - protein, 485 aa, Bacillus sp. 707
HHNGTNGTMMQYFEWYLPNDGNHWNRLNSDASNLKSKGITAVWIPPAWKGASQNDVGYGAYDLYDLGEFNQKGTVRTKYGTRSQLQAAVTSLKNNGIQVYGDVVMNHKGGADATEMVRAVEVNPNNRNQEVTGEYTIEAWTYFDFPGRGNTHSSFKWRWYHFDGVDWDQSRRLNNRIYKFRGHGKAWDWEVDTENGNYDYLMYADIDMDHPEVVNELRNWGVWYTNTLGLDGFRIDAVKHIKYSFTRDWINHVRSATGKNMFAVAEFWKNDLGAIENYLQKTNWNHSVFDVPLHYNLYNASKSGGNYDMRNIFNGTVVQRHPSHAVTFVDNHDSQPEEALESFVEEWFKPLAYALTLTREQGYPSVFYGDYYGIPTHGVPAMRSKIDPILEARQKYAYGKQNDYLDHHNIIGWTREGNTAHPNSGLATIMSDGAGGSKWMFVGRNKAGQVWSDITGNRTGTVTINADGWGNFSVNGGSVSIWVNK

SEQ ID NO: 22172 - protein, 485 aa, Bacillus sp. 707
HHNGTNGTMMQYFEWYLPNDGNHWNRLNSDASNLKSKGITAVWIPPAWKGASQNDVGYGAYDLYDLGEFNQKGTVRTKYGTRSQLQAAVTHLKNNGIQVYGDVVMNHKGGADATEMVRAVEVNPNNRNQEVTGEYTIEAWTRFDFPGRGNTHSSFKWRWYHFDGVDWDQSRRLNNRIYKFRGHGKAWDWEVDTENGNYDYLMYADIDMDHPEVVNELRNWGVWYTNTLGLDGFRIDAVKHIKYSFTRDWINHVRSATGKNMFAVAEFWKNDLGAIENYLQKTNWNHSVFDVPLHYNLYNASKSGGNYDMRNIFNGTVVQRHPSHAVTFVDNHDSQPEEALESFVEEWFKPLAYALTLTREQGYPSVFYGDYYGIPTHGVPAMRSKIDPILEARQKYAYGKQNDYLDHHNIIGWTREGNTAHPNSGLATIMSDGAGGSKWMFVGRNKAGQVWSDITGNRTGTVTINADGWGNFSVNGGSVSIWVNK

SEQ ID NO: 22173 - protein, 485 aa, Bacillus sp. 707
HHNGTNGTMMQYFEWYLPNDGNHWNRLNSDASNLKSKGITAVWIPPAWKGASQNDVGYGAYDLYDLGEFNQKGTVRTKYGTRSQLQAAVTSLKNNGIQVYGDVVMNHKGGADATEMVRAVEVNPNNRNQEVTGEYTIEAWTRFDFPGRGNTHSSFKWRWYHFDGVDWDQSRRLNNRIYKFRGHGKAWDWEVDTENGNYDYLMYADIDMDHPEVVNELRNWGVWYTNTLGLDGFRIDAVKHIKYSFTRDWINHVRSATGKNMFAVAEFWKNDLGAIENYLQKTNWNHSVFDVPLHYNLYNASKSGGNYDMRNIFNGTVVQRHPSHAVTFVDNHDSQPEEALESFVEEWFKPLAYALTLTREQGYPSVFYGDYYGIPTHGVPAMRSKIDPILEARQAYAYGKQNDYLDHHNIIGWTREGNTAHPNSGLATIMSDGAGGSKWMFVGRNKAGQVWSDITGNRTGTVTINADGWGNFSVNGGSVSIWVNK

SEQ ID NO: 22174 - protein, 485 aa, Bacillus sp. 707
HHNGTNGTMMQYFEWYLPNDGNHWNRLNSDASNLKSKGITAVWIPPAWKGASQNDVGYGAYDLYDLGEFNQKGTVRTKYGTRSQLQAAVTSLKNNGIQVYGDVVMNHKGGADATEFVRAVEVNPNNRNQEVTGEYTIEAWTRFDFPGRGNTHSSFKWRWYHFDGVDWDQSRRLNNRIYKFRGHGKAWDWEVDTENGNYDYLMYADIDMDHPEVVNELRNWGVWYTNTLGLDGFRIDAVKHIKYSFTRDWINHVRSATGKNMFAVAEFWKNDLGAIENYLQKTNWNHSVFDVPLHYNLYNASKSGGNYDMRNIFNGTVVQRHPSHAVTFVDNHDSQPEEALESFVEEWFKPLAYALTLTREQGYPSVFYGDYYGIPTHGVPAMRSKIDPILEARQKYAYGKQNDYLDHHNIIGWTREGNTAHPNSGLATIMSDGAGGSKWMFVGRNKAGQVWSDITGNRTGTVTINADGWGNFSVNGGSVSIWVNK

SEQ ID NO: 22175 - protein, 485 aa, Bacillus sp.
HHNGTNGTMMQYFEWYLPNDGNHWNRLRSDASNLKDKGISAVWIPPAWKGASQNDVGYGAYDLYDLGEFNQKGTIRTKYGTRNQLQAAVNALKSNGIQVYGDVVMNHKGGADATEMVRAVEVNPNNRNQEVSGEYTIEAWTKFDFPGRGNTHSNFKWRWYHFDGVDWDQSRKLNNRIYKFRGDGKGWNWEVDTENGNYDYLMYADIDMSHPEVVNELRNWGVWYTNTLGLDGFRIDAVKHIKYSFTRDWINHVRSATGKNMFAVAEFWKNDLGAIENYLNKTNWNHSVFDVPLHYNLYNASKSGGNYDMRQIFNGTVVQRHPMHAVTFVDNHDSQPEEALESFVEEWFKPLAYALTLTREQGYPSVFYGDYYGIPTHGVPAMKSKIDPILEARQKYAYGRQNDYLDHHNIIGWTREGNTAHPNSGLATIMSDGAGGNKWMFVGRNKAGQVWTDITGNRAGTVTINADGWGNFSVNGGSVSIWVNK

SEQ ID NO: 22176 - protein, 485 aa, Bacillus subtilis
HHNGTNGTMMQYFEWYLPNDGNHWNRLRSDASNLKDKGISAVWIPPAWKGASQNDVGYGAYDLYDLGEFNQKGTIRTKYGTRNQLQAAVNALKSNGIQVYGDVVMNHKGGADATEMVRAVEVNPNNRNQEVSGEYTIEAWTKFDFPGRGNTHSNFKWRWYHFDGVDYDQSRKLNNRIYKFRGDGKGWDWEVDTENGNYDYLMYADIDMDHPEVVNELRNWGVWYTNTLGLDGFRIDAVKHIKYSFTRDWINHVRSATGKNMFAVAEFWKNDLGAIENYLNKTNWNHSVFDVPLHYNLYNASKSGGNYDMRQIFNGTVVQRHPMHAVTFVDNHDSQPEEALESFVEEWFKPLAYALTLTREQGYPSIFYGDYYGIPTHGVPAMKSKIDPILEARQKYAYGRQNDYLDHHNIIGWTREGNTAHPNSGLATIMSDGAGGNKWMFVGRNKAGQVWTDITGNRAGTVTINADGWGNFSVNGGSVSIWVNK

SEQ ID NO: 22177 - protein, 485 aa, Bacillus sp. 707
HHNGTNGTMMQYFEWYLPNDGNHWNRLNRDASNLKSKGITAVWIPPAWKGASQNDVGYGAYDLYDLGEFNQKGTVRTKYGTRSQLQAAVTSLKNNGIQVYGDVVMNHKGGADATEMVRAVEVNPNNRNQEVTGEYTIEAWTRFDFPGRGNTHSSFKWRWYHFDGVDWDQSRRLNNRIYKFRGHGKAWDWEVDTENGNYDYLMYADIDMDHPEVVNELRNWGVWYTNTLGLDGFRIDAVKHIKYSFTRDWINHVRSATGKNMFAVAEFWKNDLGAIENYLQKTNWNHSVFDVPLHYNLYNASKSGGNYDMRNIFNGTVVQRHPSHAVTFVDNHDSQPEEALESFVEEWFKPLAYALTLTREQGYPSVFYGDYYGIPTHGVPAMRSKIDPILEARQKYAYGKQNDYLDHHNIIGWTREGNTAHPNSGLATIMSDGAGGSKWMFVGRNKAGQVWSDITGNRTGTVTINADGWGNFSVNGGSVSIWVNK

SEQ ID NO: 22178 - protein, 485 aa, Bacillus sp. 707
HHNGTNGTMMQYFEWYLPNDGNHWNRLQSDASNLKSKGITAVWIPPAWKGASQNDVGYGAYDLYDLGEFNQKGTVRTKYGTRSQLQAAVTSLKNNGIQVYGDVVMNHKGGADATEMVRAVEVNPNNRNQEVTGEYTIEAWTRFDFPGRGNTHSSFKWRWYHFDGVDWDQSRRLNNRIYKFRGHGKAWDWEVDTENGNYDYLMYADIDMDHPEVVNELRNWGVWYTNTLGLDGFRIDAVKHIKYSFTRDWINHVRSATGKNMFAVAEFWKNDLGAIENYLQKTNWNHSVFDVPLHYNLYNASKSGGNYDMRNIFNGTVVQRHPSHAVTFVDNHDSQPEEALESFVEEWFKPLAYALTLTREQGYPSVFYGDYYGIPTHGVPAMRSKIDPILEARQKYAYGKQNDYLDHHNIIGWTREGNTAHPNSGLATIMSDGAGGSKWMFVGRNKAGQVWSDITGNRTGTVTINADGWGNFSVNGGSVSIWVNK

SEQ ID NO: 22179 - protein, 485 aa, Bacillus sp. 707
HHNGTNGTMMQYFEWYLPNDGNHWNRLNSDASNLKSKGITAVWIPPAWKGASQNDVGYGAYDLYDLGEFNQKGTVRTKYGTRSQLQAAVTSLKNNGIQVYGDVVMNHKGGADATEMVRAVEVNPNNRNQEVTGEYTIEAWTRFDFPGRGNTHSSFKWRWYHFDGVDWDQSRRLPNRIYKFRGHGKAWDWEVDTENGNYDYLMYADIDMDHPEVVNELRNWGVWYTNTLGLDGFRIDAVKHIKYSFTRDWINHVRSATGKNMFAVAEFWKNDLGAIENYLQKTNWNHSVFDVPLHYNLYNASKSGGNYDMRNIFNGTVVQRHPSHAVTFVDNHDSQPEEALESFVEEWFKPLAYALTLTREQGYPSVFYGDYYGIPTHGVPAMRSKIDPILEARQKYAYGKQNDYLDHHNIIGWTREGNTAHPNSGLATIMSDGAGGSKWMFVGRNKAGQVWSDITGNRTGTVTINADGWGNFSVNGGSVSIWVNK

SEQ ID NO: 22180 - protein, 485 aa, Bacillus sp. 707
HHNGTNGTMMQYFEWYLPNDGNHWNRLNSDASNLKSKGITAVWIPPAWKGASQNDVGYGAYDLYDLGEFNQKGTVRTKYGTRSQLQAAVTSLKNNGIQVYGDVVMNHKGGADATEMVRAVEVNPNNRNQEVTGEYTIEAWTEFDFPGRGNTHSSFKWRWYHFDGVDWDQSRRLNNRIYKFRGHGKAWDWEVDTENGNYDYLMYADIDMDHPEVVNELRNWGVWYTNTLGLDGFRIDAVKHIKYSFTRDWINHVRSATGKNMFAVAEFWKNDLGAIENYLQKTNWNHSVFDVPLHYNLYNASKSGGNYDMRNIFNGTVVQRHPSHAVTFVDNHDSQPEEALESFVEEWFKPLAYALTLTREQGYPSVFYGDYYGIPTHGVPAMRSKIDPILEARQKYAYGKQNDYLDHHNIIGWTREGNTAHPNSGLATIMSDGAGGSKWMFVGRNKAGQVWSDITGNRTGTVTINADGWGNFSVNGGSVSIWVNK

SEQ ID NO: 22181 - protein, 485 aa, Bacillus sp. 707
HHNGTNGTMMQYFEWYLPNDGNHWNRLNSDASNLKSKGITAVWIPPAWKGASQNDVGYGAYDLYDLGEFNQKGTVRTKYGTRSQLQAAVTSLKNNGIQVYGDVVMNHKGGADATEMVRAVEVNPNNRNQEVTGEYTIEAWTRFDFPGRGNTHSSFKWRWYHFDGVDWDQSRRLNNRIYKFRGHGKAWDWEVDTENGNYDYLMYADIDMDHPEVVNELRNWGVWYTNTLGLDGFRIDAVKHIKYSFTRDWINHVRSATGKNMFAVAEFWKNDLGAIENYLQKTNWNHSVFDVPLHYNLYNASKSGGNYDMRNIFNGTVVQRHPSHAVTFVDNHDSQPEEALESFVEEWFKPLAYALTLTREQGYPSVFYGDYYGIPTHGVPAMRSKIDPILEARQKYAYGKQNDYLDHHNIIGWTREGNTVHPNSGLATIMSDGAGGSKWMFVGRNKAGQVWSDITGNRTGTVTINADGWGNFSVNGGSVSIWVNK

SEQ ID NO: 22182 - protein, 485 aa, Bacillus sp. 707
HHNGTNGTMMQYFEWYLPNDGNHWNRLNSDASNLKSKGITAVWIPPAWKGASQNDVGYGAYDLYDLGEFNQKGTVRTKYGTRSQLQAAVTSLKNNGIQVYGDVVMNHKGGADATEMVRAVEVNPNNRNQEVTGEYTIEAWTRFDFPGRGNTHSSFKWRWYHFDGVDWDQSRRLNNRIYKFRGHGKAWDWEVDTENGNYDYLMYADIDMDHPEVVNELRCWGVWYTNTLGLDGFRIDAVKHIKYSFTRDWINHVRSATGKNMFAVAEFWKNDLGAIENYLQKTNWNHSVFDVPLHYNLYNASKSGGNYDMRNIFNGTVVQRHPSHAVTFVDNHDSQPEEALESFVEEWFKPLAYALTLTREQGYPSVFYGDYYGIPTHGVPAMRSKIDPILEARQKYAYGKQNDYLDHHNIIGWTREGNTAHPNSGLATIMSDGAGGSKWMFVGRNKAGQVWSDITGNRTGTVTINADGWGNFSVNGGSVSIWVNK

SEQ ID NO: 22183 - protein, 485 aa, Bacillus sp. 707
HHNGTNGTMMQYFEWYLPNDGNHWNRLNSDASNLKSKGITAVWIPPAWKGASQNDVGYGAYDLYDLGEFNQKGTVRTKYGTRSQLQAAVTSLKNNGIQVYGDVVMNHKGGADATEMVRAVEVNPNNRNQEVTGEYTIEAWTRFDFPGRGNTHSSFKWRWYHFDGVDWDQSRRLNNRIYKFRGHGKAWDWEVDTENGNYDYLMYADIDMDHPEVVNELRNWGVWYTNTLGLDGFRIDAVKHIKYSFTRDWINHVRSATGKNMFAVAEFWKNDLGAIENYLQKTNWNHSVFDVPLHYNLYNASKSGGNYDMRMIFNGTVVQRHPSHAVTFVDNHDSQPEEALESFVEEWFKPLAYALTLTREQGYPSVFYGDYYGIPTHGVPAMRSKIDPILEARQKYAYGKQNDYLDHHNIIGWTREGNTAHPNSGLATIMSDGAGGSKWMFVGRNKAGQVWSDITGNRTGTVTINADGWGNFSVNGGSVSIWVNK

SEQ ID NO: 22184 - protein, 485 aa, Bacillus sp. 707
HHNGTNGTMMQYFEWYLPNDGNHWNRLNFDASNLKSKGITAVWIPPAWKGASQNDVGYGAYDLYDLGEFNQKGTVRTKYGTRSQLQAAVTSLKNNGIQVYGDVVMNHKGGADATEMVRAVEVNPNNRNQEVTGEYTIEAWTRFDFPGRGNTHSSFKWRWYHFDGVDWDQSRRLNNRIYKFRGHGKAWDWEVDTENGNYDYLMYADIDMDHPEVVNELRNWGVWYTNTLGLDGFRIDAVKHIKYSFTRDWINHVRSATGKNMFAVAEFWKNDLGAIENYLQKTNWNHSVFDVPLHYNLYNASKSGGNYDMRNIFNGTVVQRHPSHAVTFVDNHDSQPEEALESFVEEWFKPLAYALTLTREQGYPSVFYGDYYGIPTHGVPAMRSKIDPILEARQKYAYGKQNDYLDHHNIIGWTREGNTAHPNSGLATIMSDGAGGSKWMFVGRNKAGQVWSDITGNRTGTVTINADGWGNFSVNGGSVSIWVNK

SEQ ID NO: 22185 - protein, 483 aa, Bacillus sp.
HHNGTNGTLMQYFEWYLPNDGNHWNRLRSDASNLKDKGISAVWIPPAWKGTSQNDVGYGAYDLYDLGEFNQKGTIRTKYGTRNQLQAAVNALKSNGIQVYGDVVMNHKGGADATEMVKAVEVNPNNRNQEVSGEYTIEAWTKFDFPGRANTHSNFKWRWYHFDGVDWDQSRKLNNRIYKFRTKAWDWEVDTEFGNYDYLMYADIDMDHPEVVNELRNWGVWYTNTLGLDGFRIDAVKHIKYSFTRDWINHVRSAIGKNMFAVAEFWKNDLGALENYLNKTNWNHSVFDVPLHFNLYYASKSGGNYDMRQIFNGTVVQKHPTHAVTFVDNHDSQPEESLESFVREWFKPLAYALTLTREQGYPSVFYGDYYGIPTHGVPAMKSKIDPILEARQKYAYGRQNDYLDHHNIIGWTREGNTAHPNSGLATIMSDGAGGNKWMFVGRNKAGQVWTDITGNKAGTVTINADGWGNFSVNGGSVSIWVNK

SEQ ID NO: 22186 - protein, 485 aa, Bacillus sp. 707
HHNGTNGTMMQYFEWYLPNDGNHWNRLASDASNLKSKGITAVWIPPAWKGASQNDVGYGAYDLYDLGEFNQKGTVRTKYGTRSQLQAAVTSLKNNGIQVYGDVVMNHKGGADATEMVRAVEVNPNNRNQEVTGEYTIEAWTRFDFPGRGNTHSSFKWRWYHFDGVDWDQSRRLNNRIYKFRGHGKAWDWEVDTENGNYDYLMYADIDMDHPEVVNELRNWGVWYTNTLGLDGFRIDAVKHIKYSFTRDWINHVRSATGKNMFAVAEFWKNDLGAIENYLQKTNWNHSVFDVPLHYNLYNASKSGGNYDMRNIFNGTVVQRHPSHAVTFVDNHDSQPEEALESFVEEWFKPLAYALTLTREQGYPSVFYGDYYGIPTHGVPAMRSKIDPILEARQKYAYGKQNDYLDHHNIIGWTREGNTAHPNSGLATIMSDGAGGSKWMFVGRNKAGQVWSDITGNRTGTVTINADGWGNFSVNGGSVSIWVNK

SEQ ID NO: 22187 - protein, 485 aa, Bacillus sp. 707
HHNGTNGTMMQYFEWYLPNDGNHWNRLNSDASNLKSKGITAVWIPPAWKGASQNDVGYGAYDLYDLGEFNQKGTVRTKYGTRSQLKAAVTSLKNNGIQVYGDVVMNHKGGADATEMVRAVEVNPNNRNQEVTGEYTIEAWTRFDFPGRGNTHSSFKWRWYHFDGVDWDQSRRLNNRIYKFRGHGKAWDWEVDTENGNYDYLMYADIDMDHPEVVNELRNWGVWYTNTLGLDGFRIDAVKHIKYSFTRDWINHVRSATGKNMFAVAEFWKNDLGAIENYLQKTNWNHSVFDVPLHYNLYNASKSGGNYDMRNIFNGTVVQRHPSHAVTFVDNHDSQPEEALESFVEEWFKPLAYALTLTREQGYPSVFYGDYYGIPTHGVPAMRSKIDPILEARQKYAYGKQNDYLDHHNIIGWTREGNTAHPNSGLATIMSDGAGGSKWMFVGRNKAGQVWSDITGNRTGTVTINADGWGNFSVNGGSVSIWVNK

SEQ ID NO: 22188 - protein, 485 aa, Bacillus sp. 707
HHNGTNGTMMQYFEWYLPNDGNHWNRLNSDASNLKSKGITAVWIPPAWKGASQNDVGYGAYDLYDLGEFNQKGTVRTKYGTRSQLQAAVTSLKNNGIQVYGDVVMNHKGGADATEMVRAVEVNPNNRNQEVTGEYTIEAWTRFDFPGRGNTHSSFKWRWYHFDGVDWDQSRRLNNRIYKFRGHGKAWDWEVDTENGNYDYLMYADIDMDHPEVVNELRNWGVWYTNTLGLDGFRIDAVKHIKYSFTRDWINHVRSATGKNMFAVAEFWKNDLGAIENYLQKTNWNHSVFDVPLHYNLYNASKSGGNYDMRNIFNGTVVQRHPSHAVTFVDNHDSQPEEALESFVEEWFKPLAYALTLTREQGYPSVFYGDYYGIPTHGVPAMRSKIDPILEARQKYAYGKQYDYLDHHNIIGWTREGNTAHPNSGLATIMSDGAGGSKWMFVGRNKAGQVWSDITGNRTGTVTINADGWGNFSVNGGSVSIWVNK

SEQ ID NO: 22189 - protein, 485 aa, Bacillus sp. 707
HHNGTNGTMMQYFEWYLPNDGNHWNRLNSDASNLKSKGITAVWIPPAWKGASQNDVGYGAYDLYDLGEFNQKGTVRTKYGTRSQLQAAVTSLKNNGIQVYGDVVMNHKGGADATEMVRAVEVNPNNRNQEVTGEYTIEAWTRFDFPGRGNTHSSFKWRWYHFDGVDWDQSRRLNNRIYKFRGHGKAWDWEVDTENGNYDYLMYADIDMDHPEVVNELRNWGVWYTNTLGLDGFRIDAVKHIKYSFTRDWINHVRSATGKNMFAVAEFWKNDLGAIENYLQKTNWNHSVFDVPLHYNLYNASKSGGNYDMRNIFNGTVVQRHPVHAVTFVDNHDSQPEEALESFVEEWFKPLAYALTLTREQGYPSVFYGDYYGIPTHGVPAMRSKIDPILEARQKYAYGKQNDYLDHHNIIGWTREGNTAHPNSGLATIMSDGAGGSKWMFVGRNKAGQVWSDITGNRTGTVTINADGWGNFSVNGGSVSIWVNK

SEQ ID NO: 22190 - protein, 485 aa, Bacillus sp. 707
HHNGTNGTMMQYFEWYLPNDGNHWNRLNSDASNLKSKGITAVWIPPAWKGASQNDVGYGAYDLYDLGEFNQKGTVRTKYGTRSQLQAAVTSLKNNGIQVYGDVVMNHKGGADATEMVRAVEVNPNNRNQEVTGEYTIEAWTRFDFPGRGNTHSSFKWRWYHFDGVDWDQSRRNNNRIYKFRGHGKAWDWEVDTENGNYDYLMYADIDMDHPEVVNELRNWGVWYTNTLGLDGFRIDAVKHIKYSFTRDWINHVRSATGKNMFAVAEFWKNDLGAIENYLQKTNWNHSVFDVPLHYNLYNASKSGGNYDMRNIFNGTVVQRHPSHAVTFVDNHDSQPEEALESFVEEWFKPLAYALTLTREQGYPSVFYGDYYGIPTHGVPAMRSKIDPILEARQKYAYGKQNDYLDHHNIIGWTREGNTAHPNSGLATIMSDGAGGSKWMFVGRNKAGQVWSDITGNRTGTVTINADGWGNFSVNGGSVSIWVNK

SEQ ID NO: 22191 - protein, 485 aa, Bacillus sp. 707
HHNGTNGTMMQYFEWYLPNDGNHWNRLNSDASNLKSKGITAVWIPPAWKGASQNDVGYGAYDLYDLGEFNQKGTVRTKYGTRSQLQAAVTSLKNNGIQVYGDVVMNHKGGADATERVRAVEVNPNNRNQEVTGEYTIEAWTRFDFPGRGNTHSSFKWRWYHFDGVDWDQSRRLNNRIYKFRGHGKAWDWEVDTENGNYDYLMYADIDMDHPEVVNELRNWGVWYTNTLGLDGFRIDAVKHIKYSFTRDWINHVRSATGKNMFAVAEFWKNDLGAIENYLQKTNWNHSVFDVPLHYNLYNASKSGGNYDMRNIFNGTVVQRHPSHAVTFVDNHDSQPEEALESFVEEWFKPLAYALTLTREQGYPSVFYGDYYGIPTHGVPAMRSKIDPILEARQKYAYGKQNDYLDHHNIIGWTREGNTAHPNSGLATIMSDGAGGSKWMFVGRNKAGQVWSDITGNRTGTVTINADGWGNFSVNGGSVSIWVNK

SEQ ID NO: 22192 - protein, 485 aa, Bacillus sp. 707
HHNGTNGTMMQYFEWYLPNDGNHWNRLNSDASNLKSKGITAVWIPPAWKGASQNDVGYGAYDLYDLGEFNQKGTVRTKYGTRSQLQAAVTSLKNNGIQVYGDVVMNHKGGADATEMVRAVEVNPNNRNQEVTGEYTIEAWTRFDFPGRGNTHSSFKWRWYHFDGVDWDQSRRLNNRIYKFRGHGKAWDWEVDTENGNYDYLMYADIDMDHPEVVNELRNWGVWYTNTLGLDGFRIDAVKHIKYSFTRDWINHVRSATGKNMFAVAEFWKNDLGAIENYLQKTNWNHSVFDVPLHYNLYNASKSGGNYDMRNIFNGTVVQRHPSHAVTFVDNHDSQPEEALESFVEEWFKPLAYALTLTREQGYPSVFYGDYYGIPTHGVPAMRSKIDPILEARQKYAYGKQNDYLDHHNIIGWTREGNTAHPNSGLATIMSDGAGGSKWMFVGRNKAGQVWSDITGNRTGTVTINADGWGNFSVNGGSVSIWVQK

SEQ ID NO: 22193 - protein, 485 aa, Bacillus sp. 707
HHNGTNGTMMQYFEWYLPNDGNHWNRLNSDASNLKSKGITAVWIPPAWKGASQNDVGYGAYDLYDLGEFNQKGTVRTKYGTRSQLQAAVTSLKNNGIQVYGDVVMNHKGGADATEMVRAVEVNPNNRNQEVTGEYTIEAWTRFDFPGRGNTHSSFKWRWYHFDGVDWDQSRRLNNRIYKFRGHGKAWDWEVDTENGNYDYLMYADIDMDHPEVVNELRNWGVWYTNTLGLDGFRIDAVKHIKYSFTRDWINHVRSATGKNMFAVAEFWKNDLGAIENYLQKTNWNHSVFDVPLHYNLYNASKSGGNYDMRNIFNGTVVQRHPHHAVTFVDNHDSQPEEALESFVEEWFKPLAYALTLTREQGYPSVFYGDYYGIPTHGVPAMRSKIDPILEARQKYAYGKQNDYLDHHNIIGWTREGNTAHPNSGLATIMSDGAGGSKWMFVGRNKAGQVWSDITGNRTGTVTINADGWGNFSVNGGSVSIWVNK

SEQ ID NO: 22194 - protein, 485 aa, Bacillus sp. 707
HHNGTNGTMMQYFEWYLPNDGNHWNRLNSDASNLKSKGITAVWIPPAWKGASQNDVGYGAYDLYDLGEFNQKGTVRTKYGTRSQLQAAVTSLKNNGIQVYGDVVMNHKGGADATEMVRAVEVNPNNRNQEVTGEYTIEAWTRFDFPGRGNTHSSFKWRWYHFDGVDWDQSRRLNNRIYKFRGHGKAWDWEVDTENGNYDYLMYADIDMDHPEVVNELRNWGVWYTNTLGLDGFRIDAVKHIKYSFTRDWINHVRSATGKNMFAVAEFWKNDLGAIENYLQKTNWNHSVFDVPLHYNLYNASKSGGNYDMRNIFNGTVVQRHPPHAVTFVDNHDSQPEEALESFVEEWFKPLAYALTLTREQGYPSVFYGDYYGIPTHGVPAMRSKIDPILEARQKYAYGKQNDYLDHHNIIGWTREGNTAHPNSGLATIMSDGAGGSKWMFVGRNKAGQVWSDITGNRTGTVTINADGWGNFSVNGGSVSIWVNK

SEQ ID NO: 22195 - protein, 485 aa, Bacillus sp. 707
HHNGTNGTMMQYFEWYLPNDGNHWNRLNSDASNLKSKGITAVWIPPAWKGASQNDVGYGAYDLYDLGEFNQKGTVRTKYGTRSQLQAAVTSLKNNGIQVYGDVVMNHKGGADATEMVRAVEVNPNNRNQEVTGEYTIEAWTRFDFPGRGNTHSSFKWRWYHFDGVDWDQSRRLNNRIYKFRGHGKAWDWEVDTENGNYDYLMYADIDMDHPEVVNELRTWGVWYTNTLGLDGFRIDAVKHIKYSFTRDWINHVRSATGKNMFAVAEFWKNDLGAIENYLQKTNWNHSVFDVPLHYNLYNASKSGGNYDMRNIFNGTVVQRHPSHAVTFVDNHDSQPEEALESFVEEWFKPLAYALTLTREQGYPSVFYGDYYGIPTHGVPAMRSKIDPILEARQKYAYGKQNDYLDHHNIIGWTREGNTAHPNSGLATIMSDGAGGSKWMFVGRNKAGQVWSDITGNRTGTVTINADGWGNFSVNGGSVSIWVNK

SEQ ID NO: 22196 - protein, 485 aa, Bacillus sp.
HHNGTNGTMMQYFEWYLPNDGNHWNRLNSDASNLKSKGITAVWIPPAWKGASQNDVGYGAYDLYDLGEFNQKGTVRTKYGTRSQLQAAVTSLKNNGIQVYGDVVMNHKGGADATEMVRAVEVNPNNRNQEVTGEYTIEAWTRFDFPGRGNTHSSFKWRWYHFDGVDWDQSRRLNNRIYKFRGHGKAWDWEVDTENGNYDYLMYADIDMDHPEVVNELRNWGVWYTNTLGLDGFRIDAVKHIKYSFTRDWINHVRSATGKNMFAVAEFWKNDLGAIENYLQKTNWNHSVFDVPLHYNLYNASKSGGNYDMRNIFNGTVVQRHPSHAVTFVDNHDSQPEEALESFVEEWFKPLAYALTLTREQGYPSVFYGDYYGIPTHGVPAMRSKIDPILEARQKYAYGKQNDYLDHHNIIGWTREGNTAHPNSGLATIMSDGAGGSKWMFVGRNKAGQVWSDITGNRTGTVTINADGWGNFSVNGGSVSIWVNK

SEQ ID NO: 22197 - protein, 485 aa, Bacillus sp. 707
HHNGTNGTMMQYFEWYLPNDGNHWNRLNSDASNLKSKGITAVWIPPAWKGASQNDVGYGAYDLYDLGEFNQKGTVRTKYGTRSQLQMAVTSLKNNGIQVYGDVVMNHKGGADATEMVRAVEVNPNNRNQEVTGEYTIEAWTRFDFPGRGNTHSSFKWRWYHFDGVDWDQSRRLNNRIYKFRGHGKAWDWEVDTENGNYDYLMYADIDMDHPEVVNELRNWGVWYTNTLGLDGFRIDAVKHIKYSFTRDWINHVRSATGKNMFAVAEFWKNDLGAIENYLQKTNWNHSVFDVPLHYNLYNASKSGGNYDMRNIFNGTVVQRHPSHAVTFVDNHDSQPEEALESFVEEWFKPLAYALTLTREQGYPSVFYGDYYGIPTHGVPAMRSKIDPILEARQKYAYGKQNDYLDHHNIIGWTREGNTAHPNSGLATIMSDGAGGSKWMFVGRNKAGQVWSDITGNRTGTVTINADGWGNFSVNGGSVSIWVNK

SEQ ID NO: 22198 - protein, 485 aa, Bacillus sp. 707
HHNGTNGTMMQYFEWYLPNDGNHWNRLNSDASNLKSKGITAVWIPPAWKGASQNDVGYGAYDLYDLGEFNQKGTVRTKYGTRSQLQAAVTSLKNNGIQVYGDVVMNHKGGADATEMVDAVEVNPNNRNQEVTGEYTIEAWTRFDFPGRGNTHSSFKWRWYHFDGVDWDQSRRLNNRIYKFRGHGKAWDWEVDTENGNYDYLMYADIDMDHPEVVNELRNWGVWYTNTLGLDGFRIDAVKHIKYSFTRDWINHVRSATGKNMFAVAEFWKNDLGAIENYLQKTNWNHSVFDVPLHYNLYNASKSGGNYDMRNIFNGTVVQRHPSHAVTFVDNHDSQPEEALESFVEEWFKPLAYALTLTREQGYPSVFYGDYYGIPTHGVPAMRSKIDPILEARQKYAYGKQNDYLDHHNIIGWTREGNTAHPNSGLATIMSDGAGGSKWMFVGRNKAGQVWSDITGNRTGTVTINADGWGNFSVNGGSVSIWVNK

SEQ ID NO: 22199 - protein, 483 aa, Bacillus sp.
HHNGTNGTLMQYFEWYLPNDGNHWNRLRSDASNLKDKGISAVWIPPAWKGASQNDVGYGAYDLYDLGEFNQKGTIRTKYGTRNQLQAAVNALKSNGIQVYGDVVMNHKGGADATEMVKAVEVNPNNRNQEVSGEYTIEAWTKFDFPGRGNTHSNFKWRWYHFDGVDWDQSRKLNNRIYKFRGKGWDWEVDTEFGNYDYLLYADIDMDHPEVVNELRNWGVWYTNTLGLDGFRIDAVKHIKYSFTRDWINHVRSATGKNMFAVAEFWKNDLGAIENYLNKTNWNHSVFDVPLHYNLYNASKSGGNYDMRQIFNGTVVQKHPTHAVTFVDNHDSQPEEALESFVEEWFKPLAYALTLTREQGYPSVFYGDYYGIPTHGVPAMKSKIDPILEARQKYAYGRQNDYLDHHNIIGWTREGNTAHPNSGLATIMSDGAGGNKWMFVGRNKAGQVWTDITGNKAGTVTINADGWGNFSVNGGSVSIWVNK

SEQ ID NO: 22200 - protein, 485 aa, Bacillus sp. 707
HHNGTNGTMMQYFEWYLPNDGNHWNRLNSDASNLKSKGITAVWIPPAWKGASQNDVGYGAYDLYDLGEFNQKGTVRTKYGTRSQLQAAVTSLKNNGIQVYGDVVMNHKGGADATEMVRAVEVNPNNRNQEVTGEYTIEAWTRFDFPGRGNTHSSFKWRWYHFDGVDWDQSRRLNNRIYKFRGHGKAWDWEVDTENGNYDYLMYADIDMDHPEVVNELRNWGVWYTNTLGLDGFRIDAVKHIKYSFTRDWINHVRSATGKNMFAVAEFWKNDLGAIENYLQKTNWNHSVFDVPLHYNLYNASKSGGNYDMRNIFNGTVVQRHPSHAVTFVDNHDSQPEEALESFVEEWFKPLAYALTLTREQGYPSVFYGDYYGIPTHGVPAMRSKIDPILEARQKYAYGKQIDYLDHHNIIGWTREGNTAHPNSGLATIMSDGAGGSKWMFVGRNKAGQVWSDITGNRTGTVTINADGWGNFSVNGGSVSIWVNK

SEQ ID NO: 22201 - protein, 484 aa, Bacillus sp.
HHNGTNGTLMQYFEWYLPNDGNHWNRLRSDASNLKDKGISAVWIPPAWKGASQNDVGYGAYDLYDLGEFNQKGTIRTKYGTRNQLQAAVNALKSNGIQVYGDVVMNHKGGADATEMVKAVEVNPNNRNQEVSGEYTIEAWTKFDFPGRGNTHSNFKWRWYHFDGVDWDQSRKLNNRIYKFRGGKGWDWEVDTEFGNYDYLTYADIDMDHPEVVNELRNWGVWYTNTLGLDGFRIDAVKHIKYSFTRDWINHVRSATGKNMFAVAEFWKNDLGAIENYLNKTNWNHSVFDVPLHYNLYNASKSGGNYDMRQIFNGTVVQKHPTHAVTFVDNHDSQPEEALESFVEEWFKPLAYALTLTREQGYPSVFYGDYYGIPTHGVPAMKSKIDPILEARQKYAYGRQNDYLDHHNIIGWTREGNTAHPNSGLATIMSDGAGGNKWMFVGRNKAGQVWTDITGNKAGTVTINADGWGNFSVNGGSVSIWVNK

SEQ ID NO: 22202 - protein, 485 aa, Bacillus sp. 707
HHNGTNGTMMQYFEWYLPNDGNHWNRLNSDASNLKSKGITAVWIPPAWKGASQNDVGYGAYDLYDLGEFNQKGTVRTKYGTRSQLQAAVTSLKNNGIQVYGDVVMNHKGGADATEMVRAVEVNPNNRNQEVTGEYTIEAWTRFDFPGRGNTHSSFKWRWYHFDGVDWDQSRRLNNRIYKFRGHGKAWDWEVDTENGNYDYLMYADIDMDHPEVVNELRNWGVWYTNTLGLDGFRIDAVKHIKYSFTRDWINHVRSATGKNMFAVAEFWKNDLGAIENYLQKTNWNHSVFDVPLHYNLYNASKSGGNYDMRNIFNGTVVQRHPSHAVTFVDNHDSQPEEALESFVEEWFKPLAYALTLTREQGYPSVFYGDYYGIPTHGVPAMRSKIDPILEARQKYAYGKQNDYLDHHNIIGWTREGNTAHPNSGLATIMSDGFGGSKWMFVGRNKAGQVWSDITGNRTGTVTINADGWGNFSVNGGSVSIWVNK

SEQ ID NO: 22203 - protein, 485 aa, Bacillus sp. 707
HHNGTNGTMMQYFEWYLPNDGNHWNRLNSDASNLKSKGITAVWIPPAWKGASQNDVGYGAYDLYDLGEFNQKGTVRTKYGTRSQLQAAVTSLKNNGIQVYGDVVMNHKGGADATEMVRAVEVNPNNRNQEVTGEYTIEAWTRFDFPGRGNTHSSFKWRWYHFDGVDWDQSRRLNNRIYKFRGHGKAWDWEVDTENGNYDYLMYADIDMDHPEVVNELRNWGVWYTNTLGLDGFRIDAVKHIKYSFTRDWINHVRSATGKNMFAVAEFWKNDLGAIENYLQKTNWNHSVFDVPLHYNLYNASKSGGNYDMRNIFNGTVVQRHPSHAVTFVDNHDSQPEEALESFVEEWFKPLAYALTLTREQGYPSVFYGDYYGIPTHGVPAMRSKIDPILEARQKYAYGAQNDYLDHHNIIGWTREGNTAHPNSGLATIMSDGAGGSKWMFVGRNKAGQVWSDITGNRTGTVTINADGWGNFSVNGGSVSIWVNK

SEQ ID NO: 22204 - protein, 485 aa, Bacillus sp. 707
HHNGTNGTMMQYFEWYLPNDGNHWNRLNSDASNLKSKGITAVWIPPAWKGASQNDVGYGAYDLYDLGEFNQKGTVRTKYGTRSQLQAAVTSLKNNGIQVYGDVVMNHKGGADATEMVRAVEVNPNNRNQEVTGEYTIEAWTRFDFPGRGNTHSSFKWRWYHFDGVDWDQSRRLNNRIYKFRGHGKAWDWEVDTENGNYDYLMYADIDMDHPEVVNELRNWGVWYTNTLGLDGFRIDAVKHIKYSFTRDWINHVRSATGKNMFAVAEFWKNDLGAIENYLQKTNWNHSVFDVPLHYNLYNASKSGGNYDMRNIFNGTVVQEHPSHAVTFVDNHDSQPEEALESFVEEWFKPLAYALTLTREQGYPSVFYGDYYGIPTHGVPAMRSKIDPILEARQKYAYGKQNDYLDHHNIIGWTREGNTAHPNSGLATIMSDGAGGSKWMFVGRNKAGQVWSDITGNRTGTVTINADGWGNFSVNGGSVSIWVNK

SEQ ID NO: 22205 - protein, 485 aa, Bacillus sp. 707
HHNGTNGTMMQYFEWYLPNDGNHWNRLNSDASNLKSKGITAVWIPPAWKGASQNDVGYGAYDLYDLGEFNQKGTVRTKYGTRSQLQAAVTSLKNNGIQVYGDVVMNHKGGADATEMVRAVEVNPNNRNQEVTGEYTIEAWTRFDFPGRGNTHSSFKWRWYHFDGVDWDQSRRLNNRIYKFRGHGKAWDWEVDTENGNYDYLMYADIDMDHPEVVNELRNWGVWYTNTLGLDGFRIDAVKHIKYSFTRDWINHVRSATGKNMFAVAEFWKNDLGAIENYLQKTNWNHSVFDVPLHYNLYNASKSGGNYDMRNIFNGTVVQRHPSHAVTFVDNHDSQPEEALESFVEEWFKPLAYALTLTREQGYPSVFYGDYYGIPTHGVPAMRSKIDPILEARQKYAYGKQNDYLDHHNIIGWTREGNTAHPNSGLATIMSDGNGGSKWMFVGRNKAGQVWSDITGNRTGTVTINADGWGNFSVNGGSVSIWVNK

SEQ ID NO: 22206 - protein, 485 aa, Bacillus sp.
HHNGTNGTMMQYFEWYLPNDGNHWNRLRSDASNLKDKGISAVWIPPAWKGASQNDVGYGAYDLYDLGEFNQKGTIRTKYGTRNQLQAAVNALKSNGIQVYGDVVMNHKGGADATEMVRAVEVNPNNRNQEVSEEYTIEAWTKFDFPGRGNTHSNFKWRWYHFDGVDWDQSRKLNNRIYKFRGDGKGWDWEVDTENGNYDYLVYADIDMDHPEVVNELRNWGVWYTNTLGLDGFRIDAVKHIKYSFTRDWINHVRSATGKNMFAVAEFWKNDLGAIENYLNKTNWNHSVFDVPLHYNLYNASKSGGNYDMRQIFNGTVVQRHPMHAVTFVDNHDSQPEEALESFVEEWFKPLAYALTLTREQGYPSVFYGDYYGIPTHGVPAMKSKIDPILEARQKYAYGRQNDYLDHHNIIGWTREGNTAHPNSGLATIMSDGAGGNKWMFVGENKAGQVWTDITGNRAGTVTINADGWGNFSVNGGSVSIWVNK

SEQ ID NO: 22207 - protein, 485 aa, Bacillus sp. 707
HHNGTNGTMMQYFEWYLPNDGNHWNRLNSDASNLKSKGITAVWIPPAWKGASQNDVGYGAYDLYDLGEFNQKGTVRTKYGTRSQLQAAVTSLKNNGIQVYGDVVMNHKGGADATEMVRAVEVNPNNRNQEVTGEYTIEAWTRFDFPGRGNTHSSFKWRWYHFDGVDWDQSRHLNNRIYKFRGHGKAWDWEVDTENGNYDYLMYADIDMDHPEVVNELRNWGVWYTNTLGLDGFRIDAVKHIKYSFTRDWINHVRSATGKNMFAVAEFWKNDLGAIENYLQKTNWNHSVFDVPLHYNLYNASKSGGNYDMRNIFNGTVVQRHPSHAVTFVDNHDSQPEEALESFVEEWFKPLAYALTLTREQGYPSVFYGDYYGIPTHGVPAMRSKIDPILEARQKYAYGKQNDYLDHHNIIGWTREGNTAHPNSGLATIMSDGAGGSKWMFVGRNKAGQVWSDITGNRTGTVTINADGWGNFSVNGGSVSIWVNK

SEQ ID NO: 22208 - protein, 485 aa, Bacillus sp. 707
HHNGTNGTMMQYFEWYLPNDGNHWNRLNSDASNLKSKGITAVWIPPAWKGASQNDVGYGAYDLYDLGEFNQKGTVRTKYGTRSQLQAAVTSLKNNGIQVYGDVVMNHKGGADATEMVRAVEVNPNNRNQEVTGEYTIEAWTRFDFPGRGNTHSSFKWRWYHFDGVDWDQSRRLNNRIYKFRGHGKAWDWEVDTENGNYDYLMYADIDMDHPEVVNELRNWGVWYTNTLGLDGFRIDAVKHIKYSFTRDWINHVRSATGKNMFAVAEFWKNDLGAIENYLQKTNWNHSVFDVPLHYNLYNASKSGGNYDMRNIFNGTVVQRHPSHAVTFVDNHDSQPEEALESFVEEWFKPLAYALTLTREQGYPSVFYGDYYGIPTHGVPAMRSKIDPILEARQKYAYGLQNDYLDHHNIIGWTREGNTAHPNSGLATIMSDGAGGSKWMFVGRNKAGQVWSDITGNRTGTVTINADGWGNFSVNGGSVSIWVNK

SEQ ID NO: 22209 - protein, 485 aa, Bacillus sp. 707
HHNGTNGTMMQYFEWYLPNDGNHWNRLNSDASNLKSKGITAVWIPPAWKGASQNDVGYGAYDLYDLGEFNQKGTVRTKYGTRSQLQAAVTSLKNNGIQVYGDVVMNHKGGADATEMVRAVEVNPNNRNQEVTGEYTIEAWTRFDFPGRGNTHSSFKWRWYHFDGVDWDQSRRLNNRIYKFRGPGKAWDWEVDTENGNYDYLMYADIDMDHPEVVNELRNWGVWYTNTLGLDGFRIDAVKHIKYSFTRDWINHVRSATGKNMFAVAEFWKNDLGAIENYLQKTNWNHSVFDVPLHYNLYNASKSGGNYDMRNIFNGTVVQRHPSHAVTFVDNHDSQPEEALESFVEEWFKPLAYALTLTREQGYPSVFYGDYYGIPTHGVPAMRSKIDPILEARQKYAYGKQNDYLDHHNIIGWTREGNTAHPNSGLATIMSDGAGGSKWMFVGRNKAGQVWSDITGNRTGTVTINADGWGNFSVNGGSVSIWVNK

SEQ ID NO: 22210 - protein, 485 aa, Bacillus sp. 707
HHNGTNGTMMQYFEWYLPNDGNHWNRLNSDASNLISKGITAVWIPPAWKGASQNDVGYGAYDLYDLGEFNQKGTVRTKYGTRSQLQAAVTSLKNNGIQVYGDVVMNHKGGADATEMVRAVEVNPNNRNQEVTGEYTIEAWTRFDFPGRGNTHSSFKWRWYHFDGVDWDQSRRLNNRIYKFRGHGKAWDWEVDTENGNYDYLMYADIDMDHPEVVNELRNWGVWYTNTLGLDGFRIDAVKHIKYSFTRDWINHVRSATGKNMFAVAEFWKNDLGAIENYLQKTNWNHSVFDVPLHYNLYNASKSGGNYDMRNIFNGTVVQRHPSHAVTFVDNHDSQPEEALESFVEEWFKPLAYALTLTREQGYPSVFYGDYYGIPTHGVPAMRSKIDPILEARQKYAYGKQNDYLDHHNIIGWTREGNTAHPNSGLATIMSDGAGGSKWMFVGRNKAGQVWSDITGNRTGTVTINADGWGNFSVNGGSVSIWVNK

SEQ ID NO: 22211 - protein, 485 aa, Bacillus sp. 707
HHNGTNGTMMQYFEWYLPNDGNHWNRLNSDASNLKSKGITAVWIPPAWKGASQNDVGYGAYDLYDLGEFNQKGTVRTKYGTRSQLQAAVTSLKNNGIQVYGDVVMNHKGGADATEMVRAVEVNPNNRNQEVTGEYTIEAWTRFDFPGRGNTHSSFKWRWYHFDGVDWDQSRRLINRIYKFRGHGKAWDWEVDTENGNYDYLMYADIDMDHPEVVNELRNWGVWYTNTLGLDGFRIDAVKHIKYSFTRDWINHVRSATGKNMFAVAEFWKNDLGAIENYLQKTNWNHSVFDVPLHYNLYNASKSGGNYDMRNIFNGTVVQRHPSHAVTFVDNHDSQPEEALESFVEEWFKPLAYALTLTREQGYPSVFYGDYYGIPTHGVPAMRSKIDPILEARQKYAYGKQNDYLDHHNIIGWTREGNTAHPNSGLATIMSDGAGGSKWMFVGRNKAGQVWSDITGNRTGTVTINADGWGNFSVNGGSVSIWVNK

SEQ ID NO: 22212 - protein, 485 aa, Bacillus sp. 707
HHNGTNGTMMQYFEWYLPNDGNHWNRLNSDASNLKSKGITAVWIPPAWKGASQNDVGYGAYDLYDLGEFNQKGTVRTKYGTRSQLQAAVTSLKNNGIQVYGDVVMNHKGGADATEMVRAVEVNPNNRNQEVTGEYTIEAWTFFDFPGRGNTHSSFKWRWYHFDGVDWDQSRRLNNRIYKFRGHGKAWDWEVDTENGNYDYLMYADIDMDHPEVVNELRNWGVWYTNTLGLDGFRIDAVKHIKYSFTRDWINHVRSATGKNMFAVAEFWKNDLGAIENYLQKTNWNHSVFDVPLHYNLYNASKSGGNYDMRNIFNGTVVQRHPSHAVTFVDNHDSQPEEALESFVEEWFKPLAYALTLTREQGYPSVFYGDYYGIPTHGVPAMRSKIDPILEARQKYAYGKQNDYLDHHNIIGWTREGNTAHPNSGLATIMSDGAGGSKWMFVGRNKAGQVWSDITGNRTGTVTINADGWGNFSVNGGSVSIWVNK

SEQ ID NO: 22213 - protein, 485 aa, Bacillus sp. 707
HHNGTNGTMMQYFEWYLPNDGNHWNRLNSDASNLKSKGITAVWIPPAWKGASQNDVGYGAYDLYDLGEFNQKGTVRTKYGTRSQLQAAVTSLKNNGIQVYGDVVMNHKGGADATEMVRAVEVNPNNRNQEVTGEYTIEAWTRFDFPGRGNTHSSFKWRWYHFDGVDWDQSRRLNNRIYKFRGMGKAWDWEVDTENGNYDYLMYADIDMDHPEVVNELRNWGVWYTNTLGLDGFRIDAVKHIKYSFTRDWINHVRSATGKNMFAVAEFWKNDLGAIENYLQKTNWNHSVFDVPLHYNLYNASKSGGNYDMRNIFNGTVVQRHPSHAVTFVDNHDSQPEEALESFVEEWFKPLAYALTLTREQGYPSVFYGDYYGIPTHGVPAMRSKIDPILEARQKYAYGKQNDYLDHHNIIGWTREGNTAHPNSGLATIMSDGAGGSKWMFVGRNKAGQVWSDITGNRTGTVTINADGWGNFSVNGGSVSIWVNK

SEQ ID NO: 22214 - protein, 485 aa, Bacillus sp. 707
HHNGTNGTMMQYFEWYLPNDGNHWNRLNSDASNLKSKGITAVWIPPAWKGASQNDVGYGAYDLYDLGEFNQKGTVRTKYGTRSQLQAAVTSLKNNGIQVYGDVVMNHKGGADATEMVRAVEVNPNNRNQEVTGEYTIEAWTRFDFPGRGNTHSSFKWRWYHFDGVDWDQSRRLNNRIYKFRGHGKAWDWEVDTENGNYDYLMYADIDMDHPEVVNELRNWGVWYTNTLGLDGFRIDAVKHIKYSFTRDWINHVRSATGKNMFAVAEFWKNDLGAIENYLQKTNWNHSVFDVPLHYNLYNASKSGGNYDMRNIFNGTVVQAHPSHAVTFVDNHDSQPEEALESFVEEWFKPLAYALTLTREQGYPSVFYGDYYGIPTHGVPAMRSKIDPILEARQKYAYGKQNDYLDHHNIIGWTREGNTAHPNSGLATIMSDGAGGSKWMFVGRNKAGQVWSDITGNRTGTVTINADGWGNFSVNGGSVSIWVNK

SEQ ID NO: 22215 - protein, 485 aa, Bacillus subtilis
HHNGTNGTMMQYFEWYLPNDGNHWNRLRSDASNLKDKGISAVWIPPAWKGASQNDVGYGAYDLYDLGEFNQKGTIRTKYGTRNQLQAAVNALKSNGIQVYGDVVMNHKGGADATEMVRAVEVNPNNRNQEVSGEYTIEAWTKFDFPGRGNTHSNFKWRWYHFDGVDYDQSRKLNNRIYKFRGDGKGWDWEVDTENGNYDYLMYADIDMDHPEVVNELRNWGVWYTNTLGLDGFRIDAVKHIKFSFTRDWINHVRSATGKNMFAVAEFWKNDLGAIENYLNKTNWNHSVFDVPLHYNLYNASKSGGNYDMRQIFNGTVVQRHPMHAVTFVDNHDSQPEEALESFVEEWFKPLAYALTLTREQGYPSVFYGDYYGIPTHGVPAMKSKIDPILEARQKYAYGRQNDYLDHHNIIGWTREGNTAHPNSGLATIMSDGAGGNKWMFVGRNKAGQVWTDITGNRAGTVTINADGWGNFSVNGGSVSIWVNK

SEQ ID NO: 22216 - protein, 485 aa, Bacillus sp. 707
HHNGTNGTMMQYFEWYLPNDGNHWNRLNSDASNLKSKGITAVWIPPAWKGASQNDVGYGAYDLYDLGEFNQKGTVRTKYGTRSQLQAAVTSLKNNGIQVYGDVVMNHKGGADATEMVRAVEVNPNNRNQEVTGEYTIEAWTRFDFPGRGNTHSSFKWRWYHFDGVDWDQSRRLNNRIYKFRGHGKAWDWEVDTENGNYDYLMYADIDMDHPEVVNELRNWGVWYTNTLGLDGFRIDAVKHIKYSFTRDWINHVRSATGKNMFAVAEFWKNDLGAIENYLQKTNWNHSVFDVPLHYNLYNASKSGGNYDMRNIFNGTVVQRHPSHAVTFVDNHDSQPEEALESFVEEWFKPLAYALTLTREQGYPSVFYGDYYGIPTHGVPAMRSKIDPILEARQKYAYGKQNDYLDHHNIIGWTREGNTHHPNSGLATIMSDGAGGSKWMFVGRNKAGQVWSDITGNRTGTVTINADGWGNFSVNGGSVSIWVNK

SEQ ID NO: 22217 - protein, 485 aa, Bacillus sp. 707
HHNGTNGTMMQYFEWYLPNDGNHWNRLNSDASNLKSKGITAVWIPPAWKGASQNDVGYGAYDLYDLGEFNQKGTVRTKYGTRSQLQAAVTSLKNNGIQVYGDVVMNHKGGADATEMVRAVEVNPNNRNQEVTGEYTIEAWTRFDFPGRGNTHSSFKWRWYHFDGVDWDQSRRLNNRIYKFRGHGKAWDWEVDTENGNYDYLMYADIDMDHPEVVNELRNWGVWYTNTLGLDGFRIDAVKHIKYSFTRDWINHVRSATGKNMFAVAEFWKNDLGAIENYLQKTNWNHSVFDVPLHYNLYNASKSGGNYDMRNIFNGTVVQRHPSHAVTFVDNHDSQPEEALESFVEEWFKPLAYALTLTREQGYPSVFYGDYYGIPTHGVPAMRSKIDPILEARQKYAYGKQNDYLDHHNIIGWTREGNTAHPNSGLATIMSDGKGGSKWMFVGRNKAGQVWSDITGNRTGTVTINADGWGNFSVNGGSVSIWVNK

SEQ ID NO: 22218 - protein, 485 aa, Bacillus sp. 707
HHNGTNGTMMQYFEWYLPNDGNHWNRLNSDASNLKSKGITAVWIPPAWKGASQNDVGYGAYDLYDLGEFNQKGTVRTKYGTRSQLQAAVTSLKNNGIQVYGDVVMNHKGGADATEMVRAVEVNPNNRNQEVTGEYTIEAWTRFDFPGRGNTHSSFKWRWYHFDGVDWDQSRRLNNRIYKFRGHGKAWDWEVDTENGNYDYLMYADIDMDHPEVVNELRNWGVWYTNTLGLDGFRIDAVKHIKYSFTRDWIHHVRSATGKNMFAVAEFWKNDLGAIENYLQKTNWNHSVFDVPLHYNLYNASKSGGNYDMRNIFNGTVVQRHPSHAVTFVDNHDSQPEEALESFVEEWFKPLAYALTLTREQGYPSVFYGDYYGIPTHGVPAMRSKIDPILEARQKYAYGKQNDYLDHHNIIGWTREGNTAHPNSGLATIMSDGAGGSKWMFVGRNKAGQVWSDITGNRTGTVTINADGWGNFSVNGGSVSIWVNK

SEQ ID NO: 22219 - protein, 485 aa, Bacillus sp. 707
HHNGTNGTMMQYFEWYLPNDGNHWNRLNSDASNLKSKGITAVWIPPAWKGASQNDVGYGAYDLYDLGEFNQKGTVRTKYGTRSQLQAAVTSLKNNGIQVYGDVVMNHKGGADATETVRAVEVNPNNRNQEVTGEYTIEAWTRFDFPGRGNTHSSFKWRWYHFDGVDWDQSRRLNNRIYKFRGHGKAWDWEVDTENGNYDYLMYADIDMDHPEVVNELRNWGVWYTNTLGLDGFRIDAVKHIKYSFTRDWINHVRSATGKNMFAVAEFWKNDLGAIENYLQKTNWNHSVFDVPLHYNLYNASKSGGNYDMRNIFNGTVVQRHPSHAVTFVDNHDSQPEEALESFVEEWFKPLAYALTLTREQGYPSVFYGDYYGIPTHGVPAMRSKIDPILEARQKYAYGKQNDYLDHHNIIGWTREGNTAHPNSGLATIMSDGAGGSKWMFVGRNKAGQVWSDITGNRTGTVTINADGWGNFSVNGGSVSIWVNK

SEQ ID NO: 22220 - protein, 485 aa, Bacillus sp. 707
HHNGTNGTMMQYFEWYLPNDGNHWNRLNEDASNLKSKGITAVWIPPAWKGASQNDVGYGAYDLYDLGEFNQKGTVRTKYGTRSQLQAAVTSLKNNGIQVYGDVVMNHKGGADATEMVRAVEVNPNNRNQEVTGEYTIEAWTRFDFPGRGNTHSSFKWRWYHFDGVDWDQSRRLNNRIYKFRGHGKAWDWEVDTENGNYDYLMYADIDMDHPEVVNELRNWGVWYTNTLGLDGFRIDAVKHIKYSFTRDWINHVRSATGKNMFAVAEFWKNDLGAIENYLQKTNWNHSVFDVPLHYNLYNASKSGGNYDMRNIFNGTVVQRHPSHAVTFVDNHDSQPEEALESFVEEWFKPLAYALTLTREQGYPSVFYGDYYGIPTHGVPAMRSKIDPILEARQKYAYGKQNDYLDHHNIIGWTREGNTAHPNSGLATIMSDGAGGSKWMFVGRNKAGQVWSDITGNRTGTVTINADGWGNFSVNGGSVSIWVNK

SEQ ID NO: 22221 - protein, 485 aa, Bacillus sp. 707
HHNGTNGTMMQYFEWYLPNDGNHWNRLNSDASNLKSKGITAVWIPPAWKGASQNDVGYGAYDLYDLGEFNQKGTVRTKYGTRSQLQAAVTSLKNNGIQVYGDVVMNHKGGADATEMVRAVEVNPNNRNQEVTGEYTIEAWTRFDFPGRGNTHSSFKWRWYHFDGVDWDQSRRLNNRIYKFRGHGKAWDWEVDTENGNYDYLMYADIDMDHPEVVNELRNWGVWYTNTLGLDGFRIDAVKHIKYSFTRDWINHVRSATGKNMFAVAEFWKNDLGAIENYLQKTNWNHSVFDVPLHYNLYNASKSGGNYDMRNIFNGTVVQRHPSHAVTFVDNHDSQPEEALESFVKEWFKPLAYALTLTREQGYPSVFYGDYYGIPTHGVPAMRSKIDPILEARQKYAYGKQNDYLDHHNIIGWTREGNTAHPNSGLATIMSDGAGGSKWMFVGRNKAGQVWSDITGNRTGTVTINADGWGNFSVNGGSVSIWVNK

SEQ ID NO: 22222 - protein, 485 aa, Bacillus sp. 707
HHNGTNGTMMQYFEWYLPNDGNHWNRLNSDASNLHSKGITAVWIPPAWKGASQNDVGYGAYDLYDLGEFNQKGTVRTKYGTRSQLQAAVTSLKNNGIQVYGDVVMNHKGGADATEMVRAVEVNPNNRNQEVTGEYTIEAWTRFDFPGRGNTHSSFKWRWYHFDGVDWDQSRRLNNRIYKFRGHGKAWDWEVDTENGNYDYLMYADIDMDHPEVVNELRNWGVWYTNTLGLDGFRIDAVKHIKYSFTRDWINHVRSATGKNMFAVAEFWKNDLGAIENYLQKTNWNHSVFDVPLHYNLYNASKSGGNYDMRNIFNGTVVQRHPSHAVTFVDNHDSQPEEALESFVEEWFKPLAYALTLTREQGYPSVFYGDYYGIPTHGVPAMRSKIDPILEARQKYAYGKQNDYLDHHNIIGWTREGNTAHPNSGLATIMSDGAGGSKWMFVGRNKAGQVWSDITGNRTGTVTINADGWGNFSVNGGSVSIWVNK

SEQ ID NO: 22223 - protein, 485 aa, Bacillus sp. 707
HHNGTNGTMMQYFEWYLPNDGNHWNRLNSDASNLKSKGITAVWIPPAWKGASQNDVGYGAYDLYDLGEFNQKGTVRTKYGTRSQLQAAVTSLKNNGIQVYGDVVMNHKGGADATEMVRAVEVNPNNRNQEVTGEYTIEAWTRFDFPGRGNTHSSFKWRWYHFDGVDWDQSRRLNNRIYKFRGEGKAWDWEVDTENGNYDYLMYADIDMDHPEVVNELRNWGVWYTNTLGLDGFRIDAVKHIKYSFTRDWINHVRSATGKNMFAVAEFWKNDLGAIENYLQKTNWNHSVFDVPLHYNLYNASKSGGNYDMRNIFNGTVVQRHPSHAVTFVDNHDSQPEEALESFVEEWFKPLAYALTLTREQGYPSVFYGDYYGIPTHGVPAMRSKIDPILEARQKYAYGKQNDYLDHHNIIGWTREGNTAHPNSGLATIMSDGAGGSKWMFVGRNKAGQVWSDITGNRTGTVTINADGWGNFSVNGGSVSIWVNK

SEQ ID NO: 22224 - protein, 485 aa, Bacillus sp. 707
HHNGTNGTMMQYFEWYLPNDGNHWNRLNSDASNLKSKGITAVWIPPAWKGASQNDVGYGAYDLYDLGEFNQKGTVRTKYGTRSQLQAAVTSLKNNGIQVYGDVVMNHKGGADATEMVRAVEVNPNNRNQEVTGEYTIEAWTRFDFPGRGNTHSSFKWRWYHFDGVDWDQSRRLNNRIYKFRGHGKAWDWEVDTENGNYDYLMYADIDMDHPEVVNELRNWGVWYTNTLGLDGFRIDAVKHIKYSFTRDWINHVRSATGKNMFAVAEFWKNDLGAIENYLQKTNWNHSVFDVPLHYNLYNASKSGGNYDMRNIFNGTVVQRHPSHAVTFVDNHDSQPEEALESFVEEWFKPLAYALTLTREQGYPSVFYGDYYGIPTHGVPAMRSKIDPILEARQKYAYGKQNDYLDHHNIIGWTREGNTAHPNSGLATIMSDGAGGSKWMFVGRNKAGQVWADITGNRTGTVTINADGWGNFSVNGGSVSIWVNK

SEQ ID NO: 22225 - protein, 485 aa, Bacillus sp. 707
HHNGTNGTMMQYFEWYLPNDGNHWNRLNSDASNLKSKGITAVWIPPAWKGASQNDVGYGAYDLYDLGEFNQKGTVRTKYGTRSQLQAAVTSLKNNGIQVYGDVVMNHKGGADATEMVRAVEVNPNNRNQEVTGEYTIEAWTRFDFPGRGNTHSSFKWRWYHFDGVDWDQSRRLNNRIYKFRGHGKAWDWEVDTENGNYDYLMYADIDMDHPEVVNELRNWGVWYTNTLGLDGFRIDAVKHIKYSFTRDWIAHVRSATGKNMFAVAEFWKNDLGAIENYLQKTNWNHSVFDVPLHYNLYNASKSGGNYDMRNIFNGTVVQRHPSHAVTFVDNHDSQPEEALESFVEEWFKPLAYALTLTREQGYPSVFYGDYYGIPTHGVPAMRSKIDPILEARQKYAYGKQNDYLDHHNIIGWTREGNTAHPNSGLATIMSDGAGGSKWMFVGRNKAGQVWSDITGNRTGTVTINADGWGNFSVNGGSVSIWVNK

SEQ ID NO: 22226 - protein, 485 aa, Bacillus sp. 707
HHNGTNGTMMQYFEWYLPNDGNHWNRLNSDASNLKSKGITAVWIPPAWKGASQNDVGYGAYDLYDLGEFNQKGTVRTKYGTRSQLQAAVTSLKNNGIQVYGDVVMNHKGGADATEMVRAVEVNPNNRNQEVTGEYTIEAWTRFDFPGRGNTHSSFKWRWYHFDGVDWDQSRRLNNRIYKFRGHGKAWDWEVDTENGNYDYLMYADIDMDHPEVVNELRNWGVWYTNTLGLDGFRIDAVKHIKYSFTRDWINHVRSATGKNMFAVAEFWKNDLGAIENYLQKTNWNHSVFDVPLHYNLYNASKSGGNYDMRNIFNGTVVQRHPSHAVTFVDNHDSQPEEALESFVEEWFKPLAYALTLTREQGYPSVFYGDYYGIPTHGVPAMRSKIDPILEARQRYAYGKQNDYLDHHNIIGWTREGNTAHPNSGLATIMSDGAGGSKWMFVGRNKAGQVWSDITGNRTGTVTINADGWGNFSVNGGSVSIWVNK

SEQ ID NO: 22227 - protein, 485 aa, Bacillus sp. 707
HHNGTNGTMMQYFEWYLPNDGNHWNRLNSDASNLKSKGITAVWIPPAWKGASQNDVGYGAYDLYDLGEFNQKGTVRTKYGTRSQLQAAVTSLKNNGIQVYGDVVMNHKGGADATEMVRAVEVNPNNRNQEVTGEYTIEAWTRFDFPGRGNTHSSFKWRWYHFDGVDWDQSRRLNNRIYKFRGHGKAWDWEVDTENGNYDYLMYADIDMDHPEVVNELRNWGVWYTNTLGLDGFRIDAVKHIKYSFTRDWINHVRSATGKNMFAVAEFWKNDLGAIENYLQKTNWNHSVFDVPLHYNLYNASKSGGNYDMRNIFNGTVVQRHPSHAVTFVDNHDSQPEEALESFVEEWFKPLAYALTLTREQGYPSVFYGDYYGIPTHGVPAMRSKIDPILEARQKYAYGKQNDYLDHHNIIGWTREGNTAHPNSGLATIMSDGCGGSKWMFVGRNKAGQVWSDITGNRTGTVTINADGWGNFSVNGGSVSIWVNK

SEQ ID NO: 22228 - protein, 485 aa, Bacillus sp. 707
HHNGTNGTMMQYFEWYLPNDGNHWNRLNSDASNLKSKGITAVWIPPAWKGASQNDVGYGAYDLYDLGEFNQKGTVRTKYGTRSQLQAAVTSLKNNGIQVYGDVVMNHKGGADATEMVRAVEVNPNNRNQEVTGEYTIEAWTRFDFPGRGNTHSSFKWRWYHFDGVDWDQSRRLNNRIYKFRGHGKAWDWEVDTENGNYDYLMYADIDMDHPEVVNELRNWGVWYTNTLGLDGFRIDAVKHIKYSFTRDWINHVRSATGKNMFAVAEFWKNDLGAIENYLQKTNWNHSVFDVPLHYNLYNASKSGGNYDMRNIFNGTVVQRHPSHAVTFVDNHDSQPNEALESFVEEWFKPLAYALTLTREQGYPSVFYGDYYGIPTHGVPAMRSKIDPILEARQKYAYGKQNDYLDHHNIIGWTREGNTAHPNSGLATIMSDGAGGSKWMFVGRNKAGQVWSDITGNRTGTVTINADGWGNFSVNGGSVSIWVNK

SEQ ID NO: 22229 - protein, 485 aa, Bacillus sp. 707
HHNGTNGTMMQYFEWYLPNDGNHWNRLNSDASNLKSKGITAVWIPPAWKGASQNDVGYGAYDLYDLGEFNQKGTVRTKYGTRSQLQAAVTSLKNNGIQVYGDVVMNHKGGADATEMVRAVEVNPNNRNQEVTGEYTIEAWTRFDFPGRGNTHSSFKWRWYHFDGVDWDQSRRLNNRIYKFRGHGKAWDWEVDTENGNYDYLMYADIDMDHPEVVNELRNWGVWYTNTLGLDGFRIDAVKHIKYSFTRDWINHVRSATGKNMFAVAEFWKNDLGAIENYLQKTNWNHSVFDVPLHYNLYNASKSGGNYDMRNIFNGTVVQRHPSHAVTFVDNHDSQPEEALESFVEEWFKPLAYALTLTREQGYPSVFYGDYYGIPTHGVPAMRSKIDPILEARQKYAYGKQNDYLDHHNIIGWTREGNTAHPNSGLATIMSDGTGGSKWMFVGRNKAGQVWSDITGNRTGTVTINADGWGNFSVNGGSVSIWVNK

SEQ ID NO: 22230 - protein, 485 aa, Bacillus sp.
HHNGTNGTMMQYFEWYLPNDGNHWNRLRSDASNLKDKGISAVWIPPAWKGASQNDVGYGAYDLYDLGEFNQKGTIRTKYGTRNQLQAAVNALKSNGIQVYGDVVMNHKGGADATEMVRAVEVNPNNRNQEVSGEYTIEAWTKFDFPGRGNTHSNFKWRWYHFDGVDWDQSRKLNNRIYKFRGDGKGWDWEVDTENGNYDYLIYADIDMDHPEVVNELRNWGVWYTNTLGLDGFRIDAVKHIKYSFTRDWINHVRSATGKNMFAVAEFWKNDLGAIENYLNKTNWNHSVFDVPLHYNLYNASKSGGNYDMRQIFNGTVVQRHPTHAVTFVDNHDSQPEEALESFVEEWFKPLAYALTLTREQGYPSVFYGDYYGIPTHGVPAMKSKIDPILEARQKYAYGRQNDYLDHHNIIGWTREGNTAHPNSGLATIMSDGAGGNKWMFVGRNKAGQVWTDITGNRAGTVTINADGWGNFSVNGGSVSIWVNK

SEQ ID NO: 22231 - protein, 485 aa, Bacillus sp. 707
HHNGTNGTMMQYFEWYLPNDGNHWNRLNSDASNLKSKGITAVWIPPAWKGASQNDVGYGAYDLYDLGEFNQKGTVRTKYGTRSQLQAAVTSLKNNGIQVYGDVVMNHKGGADATEMVRAVEVNPNNRNQEVTGEYTIEAWTRFDFPGRGNTHSSFKWRWYHFDGVDWDQSRRLNNRIYKFRGHGKAWDWEVDTENGNYDYLMYADIDMDHPEVVNELRNWGVWYTNTLGLDGFRIDAVKHIKYSFTRDWINHVRSATGKNMFAVAEFWKNDLGAIENYLQKTNWNHSVFDVPLHYNLYNASKSGGNYDMRNIFNGTVVQRHPSHAVTFVDNHDSQPEEALESFVEEWFKPLAYALTLTREQGYPSVFYGDYYGIPTHGVPAMRSKIDPILEARQKYAYGGQNDYLDHHNIIGWTREGNTAHPNSGLATIMSDGAGGSKWMFVGRNKAGQVWSDITGNRTGTVTINADGWGNFSVNGGSVSIWVNK

SEQ ID NO: 22232 - protein, 485 aa, Bacillus sp. 707
HHNGTNGTMMQYFEWYLPNDGNHWNRLKSDASNLKSKGITAVWIPPAWKGASQNDVGYGAYDLYDLGEFNQKGTVRTKYGTRSQLQAAVTSLKNNGIQVYGDVVMNHKGGADATEMVRAVEVNPNNRNQEVTGEYTIEAWTRFDFPGRGNTHSSFKWRWYHFDGVDWDQSRRLNNRIYKFRGHGKAWDWEVDTENGNYDYLMYADIDMDHPEVVNELRNWGVWYTNTLGLDGFRIDAVKHIKYSFTRDWINHVRSATGKNMFAVAEFWKNDLGAIENYLQKTNWNHSVFDVPLHYNLYNASKSGGNYDMRNIFNGTVVQRHPSHAVTFVDNHDSQPEEALESFVEEWFKPLAYALTLTREQGYPSVFYGDYYGIPTHGVPAMRSKIDPILEARQKYAYGKQNDYLDHHNIIGWTREGNTAHPNSGLATIMSDGAGGSKWMFVGRNKAGQVWSDITGNRTGTVTINADGWGNFSVNGGSVSIWVNK

SEQ ID NO: 22233 - protein, 485 aa, Bacillus sp. 707
HHNGTNGTMMQYFEWYLPNDGNHWNRLNSDASNLKSKGITAVWIPPAWKGASQNDVGYGAYDLYDLGEFNQKGTVRTKYGTRSQLQAAVTSLKNNGIQVYGDVVMNHKGGADATEMVRAVEVNPNNRNQEVTGEYTIEAWTRFDFPGRGNTHSSFKWRWYHFDGVDWDQSRELNNRIYKFRGHGKAWDWEVDTENGNYDYLMYADIDMDHPEVVNELRNWGVWYTNTLGLDGFRIDAVKHIKYSFTRDWINHVRSATGKNMFAVAEFWKNDLGAIENYLQKTNWNHSVFDVPLHYNLYNASKSGGNYDMRNIFNGTVVQRHPSHAVTFVDNHDSQPEEALESFVEEWFKPLAYALTLTREQGYPSVFYGDYYGIPTHGVPAMRSKIDPILEARQKYAYGKQNDYLDHHNIIGWTREGNTAHPNSGLATIMSDGAGGSKWMFVGRNKAGQVWSDITGNRTGTVTINADGWGNFSVNGGSVSIWVNK

SEQ ID NO: 22234 - protein, 485 aa, Bacillus sp. 707
HHNGTNGTMMQYFEWYLPNDGNHWNRLNSDASNLKSKGITAVWIPPAWKGASQNDVGYGAYDLYDLGEFNQKGTVRTKYGTRSQLQAAVTSLKNNGIQVYGDVVMNHKGGADATEMVRAVEVNPNNRNQEVTGEYTIEAWTRFDFPGRGNTHSSFKWRWYHFDGVDWDQSRRLNNRIYKFRGHGKAWDWEVDTENGNYDYLMYADIDMDHPEVVNELRNWGVWYTNTLGLDGFRIDAVKHIKYSFTRDWINHVRSATGKNMFAVAEFWKNDLGAIENYLQKTNWNHSVFDVPLHYNLYNASKSGGNYDMRNIFNGTVVQRHPSHAVTFVDNHDSQPQEALESFVEEWFKPLAYALTLTREQGYPSVFYGDYYGIPTHGVPAMRSKIDPILEARQKYAYGKQNDYLDHHNIIGWTREGNTAHPNSGLATIMSDGAGGSKWMFVGRNKAGQVWSDITGNRTGTVTINADGWGNFSVNGGSVSIWVNK

SEQ ID NO: 22235 - protein, 485 aa, Bacillus sp. 707
HHNGTNGTMMQYFEWYLPNDGNHWNRLNSDASNLKSKGITAVWIPPAWKGASQNDVGYGAYDLYDLGEFNQKGTVRTKYGTRSQLQAAVTSLKNNGIQVYGDVVMNHKGGADATEPVRAVEVNPNNRNQEVTGEYTIEAWTRFDFPGRGNTHSSFKWRWYHFDGVDWDQSRRLNNRIYKFRGHGKAWDWEVDTENGNYDYLMYADIDMDHPEVVNELRNWGVWYTNTLGLDGFRIDAVKHIKYSFTRDWINHVRSATGKNMFAVAEFWKNDLGAIENYLQKTNWNHSVFDVPLHYNLYNASKSGGNYDMRNIFNGTVVQRHPSHAVTFVDNHDSQPEEALESFVEEWFKPLAYALTLTREQGYPSVFYGDYYGIPTHGVPAMRSKIDPILEARQKYAYGKQNDYLDHHNIIGWTREGNTAHPNSGLATIMSDGAGGSKWMFVGRNKAGQVWSDITGNRTGTVTINADGWGNFSVNGGSVSIWVNK

SEQ ID NO: 22236 - protein, 485 aa, Bacillus sp. 707
HHNGTNGTMMQYFEWYLPNDGNHWNRLNSDASNLKSKGITAVWIPPAWKGASQNDVGYGAYDLYDLGEFNQKGTVRTKYGTRSQLQAAVTSLKNNGIQVYGDVVMNHKGGADATEMVRAVEVNPNNRNQEVTGEYTIEAWTRFDFPGRGNTHSSFKWRWYHFDGVDWDQSRRLNNRIYKFRGAGKAWDWEVDTENGNYDYLMYADIDMDHPEVVNELRNWGVWYTNTLGLDGFRIDAVKHIKYSFTRDWINHVRSATGKNMFAVAEFWKNDLGAIENYLQKTNWNHSVFDVPLHYNLYNASKSGGNYDMRNIFNGTVVQRHPSHAVTFVDNHDSQPEEALESFVEEWFKPLAYALTLTREQGYPSVFYGDYYGIPTHGVPAMRSKIDPILEARQKYAYGKQNDYLDHHNIIGWTREGNTAHPNSGLATIMSDGAGGSKWMFVGRNKAGQVWSDITGNRTGTVTINADGWGNFSVNGGSVSIWVNK

SEQ ID NO: 22237 - protein, 485 aa, Bacillus sp. 707
HHNGTNGTMMQYFEWYLPNDGNHWNRLNSDASNLKSKGITAVWIPPAWKGASQNDVGYGAYDLYDLGEFNQKGTVRTKYGTRSQLQAAVTSLKNNGIQVYGDVVMNHKGGADATEMVRAVEVNPNNRNQEVTGEYTIEAWTRFDFPGRGNTHSSFKWRWYHFDGVDWDQSRRLNNRIYKFRGHGKAWDWEVDTENGNYDYLMYADIDMDHPEVVNELRNWGVWYTNTLGLDGFRIDAVKHIKYSFTRDWINHVRSATGKNMFAVAEFWKNDLGAIENYLQKTNWNHSVFDVPLHYNLYNASKSGGNYDMRNIFNGTVVQRHPSHAVTFVDNHDSQPEEALESFVGEWFKPLAYALTLTREQGYPSVFYGDYYGIPTHGVPAMRSKIDPILEARQKYAYGKQNDYLDHHNIIGWTREGNTAHPNSGLATIMSDGAGGSKWMFVGRNKAGQVWSDITGNRTGTVTINADGWGNFSVNGGSVSIWVNK

SEQ ID NO: 22238 - protein, 485 aa, Bacillus sp. 707
HHNGTNGTMMQYFEWYLPNDGNHWNRLNSDASNLKSKGITAVWIPPAWKGASQNDVGYGAYDLYDLGEFNQKGTVRTKYGTRSQLQAAVTSLKNNGIQVYGDVVMNHKGGADATEMVRAVEVNPNNRNQEVTGEYTIEAWTRFDFPGRGNTHSSFKWRWYHFDGVDWDQSRRLNNRIYKFRGHGKAWDWEVDTENGNYDYLMYADIDMDHPEVVNELRNWGVWYTNTLGLDGFRIDAVKHIKYSFTRDWINHVRSATGKNMFAVAEFWKNDLGAIENYLQKTNWNHSVFDVPLHYNLYNASKSGGNYDMRNIFNGTVVQRHPSHAVTFVDNHDSQPEEALESFVEEWFKPLAYALTLTREQGYPSVFYGDYYGIPTHGVPAMRSKIDPILEARQKYAYGKQNDYLDHHNIIGWTREGNTAHPNSGLATIMSDGAGGSKWMFVGRNKAGQVWSDITGNRGGTVTINADGWGNFSVNGGSVSIWVNK

SEQ ID NO: 22239 - protein, 485 aa, Bacillus sp. 707
HHNGTNGTMMQYFEWYLPNDGNHWNRLNSDASNLKSKGITAVWIPPAWKGASQNDVGYGAYDLYDLGEFNQKGTVRTKYGTRSQLQAAVTSLKNNGIQVYGDVVMNHKGGADATEMVRAVEVNPNNRNQEVTGEYTIEAWTRFDFPGRGNTHSSFKWRWYHFDGVDWDQSRRLNNRIYKFRGHGKAWDWEVDTENGNYDYLMYADIDMDHPEVVNELRNWGTWYTNTLGLDGFRIDAVKHIKYSFTRDWINHVRSATGKNMFAVAEFWKNDLGAIENYLQKTNWNHSVFDVPLHYNLYNASKSGGNYDMRNIFNGTVVQRHPSHAVTFVDNHDSQPEEALESFVEEWFKPLAYALTLTREQGYPSVFYGDYYGIPTHGVPAMRSKIDPILEARQKYAYGKQNDYLDHHNIIGWTREGNTAHPNSGLATIMSDGAGGSKWMFVGRNKAGQVWSDITGNRTGTVTINADGWGNFSVNGGSVSIWVNK

SEQ ID NO: 22240 - protein, 485 aa, Bacillus sp. 707
HHNGTNGTMMQYFEWYLPNDGNHWNRLNSDASNLKSKGITAVWIPPAWKGASQNDVGYGAYDLYDLGEFNQKGTVRTKYGTRSQLQAAVTSLKNNGIQVYGDVVMNHKGGADATEMVRAVEVNPNNRNQEVTGEYTIEAWTRFDFPGRGNTHSSFKWRWYHFDGVDWDQSRRLNNRIYKFRGHGKAWDWEVDTENGNYDYLMYADIDMDHPEVVNELRNWGVWYTNTLGLDGFRIDAVKHIKYSFTRDWINHVRSATGKNMFAVAEFWKNDLGAIENYLQKTNWNHSVFDVPLHYNLYNASKSGGNYDMRNIFNGTVVQRHPSHAVTFVDNHDSQPEEALESFVEEWFKPLAYALTLTREQGYPSVFYGDYYGIPTHGVPAMRSKIDPILEARQKYAYGKQNDYLDHHNIIGWTREGNTAHPNSGLATIMSDGAGGSKWMFVGRNKAGQVWFDITGNRTGTVTINADGWGNFSVNGGSVSIWVNK

SEQ ID NO: 22241 - protein, 485 aa, Bacillus sp. 707
HHNGTNGTMMQYFEWYLPNDGNHWNRLNVDASNLKSKGITAVWIPPAWKGASQNDVGYGAYDLYDLGEFNQKGTVRTKYGTRSQLQAAVTSLKNNGIQVYGDVVMNHKGGADATEMVRAVEVNPNNRNQEVTGEYTIEAWTRFDFPGRGNTHSSFKWRWYHFDGVDWDQSRRLNNRIYKFRGHGKAWDWEVDTENGNYDYLMYADIDMDHPEVVNELRNWGVWYTNTLGLDGFRIDAVKHIKYSFTRDWINHVRSATGKNMFAVAEFWKNDLGAIENYLQKTNWNHSVFDVPLHYNLYNASKSGGNYDMRNIFNGTVVQRHPSHAVTFVDNHDSQPEEALESFVEEWFKPLAYALTLTREQGYPSVFYGDYYGIPTHGVPAMRSKIDPILEARQKYAYGKQNDYLDHHNIIGWTREGNTAHPNSGLATIMSDGAGGSKWMFVGRNKAGQVWSDITGNRTGTVTINADGWGNFSVNGGSVSIWVNK

SEQ ID NO: 22242 - protein, 485 aa, Bacillus subtilis
HHNGTNGTMMQYFEWYLPNDGNHWNRLRSDASNLKDKGISAVWIPPAWKGASQNDVGYGAYDLYDLGEFNQKGTIRTKYGTRNQLQAAVNALKSNGIQVYGDVVMNHKGGADATEFVRAVEVNPNNRNQEVSGEYTIEAWTKFDFPGRGNTHSNFKWRWYHFDGVDWDQSRKLNNRIYKFRGDGKGWDWEVDTENGNYDYLMYADIDMDHPEVVNELRNWGVWYTNTLGLDGFRIDAAKHIKYSFTRDWINHVRSATGKNMFAVAEFWKNDLGAIENYLNKTNWNHSVFDVPLHYNLYNASKSGGNYDMRQIFNGTVVQRHPMHAVTFVDNHDTQPEEALESFVEEWFKPLAYALTLTREQGYPSVFYGDYYGIPTHGVPAMKSKIDPILEARQKYAYGRQNDYLDHHNIIGWTREGNTAHPNSGLATIMSDGAGGNKWMFVGRNKAGQVWTDITGNRAGTVTINADGWGNFSVNGGSVSIWVNK

SEQ ID NO: 22243 - protein, 485 aa, Bacillus sp. 707
HHNGTNGTMMQYFEWYLPNDGNHWNRLWSDASNLKSKGITAVWIPPAWKGASQNDVGYGAYDLYDLGEFNQKGTVRTKYGTRSQLQAAVTSLKNNGIQVYGDVVMNHKGGADATEMVRAVEVNPNNRNQEVTGEYTIEAWTRFDFPGRGNTHSSFKWRWYHFDGVDWDQSRRLNNRIYKFRGHGKAWDWEVDTENGNYDYLMYADIDMDHPEVVNELRNWGVWYTNTLGLDGFRIDAVKHIKYSFTRDWINHVRSATGKNMFAVAEFWKNDLGAIENYLQKTNWNHSVFDVPLHYNLYNASKSGGNYDMRNIFNGTVVQRHPSHAVTFVDNHDSQPEEALESFVEEWFKPLAYALTLTREQGYPSVFYGDYYGIPTHGVPAMRSKIDPILEARQKYAYGKQNDYLDHHNIIGWTREGNTAHPNSGLATIMSDGAGGSKWMFVGRNKAGQVWSDITGNRTGTVTINADGWGNFSVNGGSVSIWVNK

SEQ ID NO: 22244 - protein, 485 aa, Bacillus sp. 707
HHNGTNGTMMQYFEWYLPNDGNHWNRLNSDASNLKSKGITAVWIPPAWKGASQNDVGYGAYDLYDLGEFNQKGTVRTKYGTRSQLQAAVTSLKNNGIQVYGDVVMNHKGGADATEMVRAVEVNPNNRNQEVTGEYTIEAWTRFDFPGRGNTHSSFKWRWYHFDGVDWDQSRRLNNRIYKFRGHGKAWDWEVDTENGNYDYLMYADIDMDHPEVVNELRNWGVWYTNTLGLDGFRIDAVKHIKYSFTRDWINHVRSATGKNMFAVAEFWKNDLGAIENYLQKTNWNHSVFDVPLHYNLYNASKSGGNYDMRNIFNGTVVQRHPSHAVTFVDNHDSQPEEALESFVEEWFKPLAYALTLTREQGYPSVFYGDYYGIPTHGVPAMRSKIDPILEARQKYAYGKQNDYLDHHNIIGWTREGNTAHPNSGLATIMSDGAGGSKWMFVGRNKAGQVWSDITGNDTGTVTINADGWGNFSVNGGSVSIWVNK

SEQ ID NO: 22245 - protein, 485 aa, Bacillus sp. 707
HHNGTNGTMMQYFEWYLPNDGNHWNRLNSDASNLKSKGITAVWIPPAWKGASQNDVGYGAYDLYDLGEFNQKGTVRTKYGTRSQLQAAVTSLKNNGIQVYGDVVMNHKGGADATEGVRAVEVNPNNRNQEVTGEYTIEAWTRFDFPGRGNTHSSFKWRWYHFDGVDWDQSRRLNNRIYKFRGHGKAWDWEVDTENGNYDYLMYADIDMDHPEVVNELRNWGVWYTNTLGLDGFRIDAVKHIKYSFTRDWINHVRSATGKNMFAVAEFWKNDLGAIENYLQKTNWNHSVFDVPLHYNLYNASKSGGNYDMRNIFNGTVVQRHPSHAVTFVDNHDSQPEEALESFVEEWFKPLAYALTLTREQGYPSVFYGDYYGIPTHGVPAMRSKIDPILEARQKYAYGKQNDYLDHHNIIGWTREGNTAHPNSGLATIMSDGAGGSKWMFVGRNKAGQVWSDITGNRTGTVTINADGWGNFSVNGGSVSIWVNK

SEQ ID NO: 22246 - protein, 485 aa, Bacillus sp. 707
HHNGTNGTMMQYFEWYLPNDGNHWNRLNSDASNLKSKGITAVWIPPAWKGASQNDVGYGAYDLYDLGEFNQKGTVRTKYGTRSQLQAAVTSLKNNGIQVYGDVVMNHKGGADATEMVRAVEVNPNNRNQEVTGEYTIEAWTRFDFPGRGNTHSSFKWRWYHFDGVDWDQSRRLNNRIYKFRGHGKAWDWEVDTENGNYDYLMYADIDMDHPEVVNELRNWGVWYTNTLGLDGFRIDAVKHIKYSFTRDWINHVRSATGKNMFAVAEFWKNDLGAIENYLQKTNWNHSVFDVPLHYNLYNASKSGGNYDMRNIFNGTVVQRHPSHAVTFVDNHDSQPEEALESFVEEWFKPLAYALTLTREQGYPSVFYGDYYGIPTHGVPAMRSKIDPILEARQKYAYGKQNDYLDHHNIIGWTREGNTAHPNSGLATIMSDGDGGSKWMFVGRNKAGQVWSDITGNRTGTVTINADGWGNFSVNGGSVSIWVNK

SEQ ID NO: 22247 - protein, 485 aa, Bacillus sp. 707
HHNGTNGTMMQYFEWYLPNDGNHWNRLNSDASNLKSKGITAVWIPPAWKGASQNDVGYGAYDLYDLGEFNQKGTVRTKYGTRSQLQAAVTSLKNNGIQVYGDVVMNHKGGADATEMVRAVEVNPNNRNQEVTGEYTIEAWTRFDFPGRGNTHSSFKWRWYHFDGVDWDQSRSLNNRIYKFRGHGKAWDWEVDTENGNYDYLMYADIDMDHPEVVNELRNWGVWYTNTLGLDGFRIDAVKHIKYSFTRDWINHVRSATGKNMFAVAEFWKNDLGAIENYLQKTNWNHSVFDVPLHYNLYNASKSGGNYDMRNIFNGTVVQRHPSHAVTFVDNHDSQPEEALESFVEEWFKPLAYALTLTREQGYPSVFYGDYYGIPTHGVPAMRSKIDPILEARQKYAYGKQNDYLDHHNIIGWTREGNTAHPNSGLATIMSDGAGGSKWMFVGRNKAGQVWSDITGNRTGTVTINADGWGNFSVNGGSVSIWVNK

SEQ ID NO: 22248 - protein, 485 aa, Bacillus sp. 707
HHNGTNGTMMQYFEWYLPNDGNHWNRLNSDASNLKSKGITAVWIPPAWKGASQNDVGYGAYDLYDLGEFNQKGTVRTKYGTRSQLQAAVTSLKNNGIQVYGDVVMNHKGGADATEMVRAVEVNPNNRNQEVTGEYTIEAWTRFDFPGRGNTHSSFKWRWYHFDGVDWDQSRRLNNRIYKFRGHGKAWDWEVDTENGNYDYLMYADIDMDHPEVVNELRNWGVWYTNTLGLDGFRIDAVKHIKYSFTRDWINHVRSATGKNMFAVAEFWKNDLGAIENYLQKTNWNHSVFDVPLHYNLYNASKSGGNYDMRNIFNGTVVQRHPSHAVTFVDNHDSQPEEALESFVEEWFKPLAYALTLTREQGYPSVFYGDYYGIPTHGVPAMRSKIDPILEARQKYAYGVQNDYLDHHNIIGWTREGNTAHPNSGLATIMSDGAGGSKWMFVGRNKAGQVWSDITGNRTGTVTINADGWGNFSVNGGSVSIWVNK

SEQ ID NO: 22249 - protein, 485 aa, Bacillus sp. 707
HHNGTNGTMMQYFEWYLPNDGNHWNRLNSDASNLGSKGITAVWIPPAWKGASQNDVGYGAYDLYDLGEFNQKGTVRTKYGTRSQLQAAVTSLKNNGIQVYGDVVMNHKGGADATEMVRAVEVNPNNRNQEVTGEYTIEAWTRFDFPGRGNTHSSFKWRWYHFDGVDWDQSRRLNNRIYKFRGHGKAWDWEVDTENGNYDYLMYADIDMDHPEVVNELRNWGVWYTNTLGLDGFRIDAVKHIKYSFTRDWINHVRSATGKNMFAVAEFWKNDLGAIENYLQKTNWNHSVFDVPLHYNLYNASKSGGNYDMRNIFNGTVVQRHPSHAVTFVDNHDSQPEEALESFVEEWFKPLAYALTLTREQGYPSVFYGDYYGIPTHGVPAMRSKIDPILEARQKYAYGKQNDYLDHHNIIGWTREGNTAHPNSGLATIMSDGAGGSKWMFVGRNKAGQVWSDITGNRTGTVTINADGWGNFSVNGGSVSIWVNK

SEQ ID NO: 22250 - protein, 485 aa, Bacillus sp. 707
HHNGTNGTMMQYFEWYLPNDGNHWNRLNSDASNLKSKGITAVWIPPAWKGASQNDVGYGAYDLYDLGEFNQKGTVRTKYGTRSQLQAAVTSLKNNGIQVYGDVVMNHKGGADATEMVRAVEVNPNNRNQEVTGEYTIEAWTRFDFPGRGNTHSSFKWRWYHFDGVDWDQSRRLNNRIYKFRGHGKAWDWEVDTENGNYDYLMYADIDMDHPEVVNELRNWGVWYTNTLGLDGFRIDAVKHIKYSFTRDWINHVRSATGKNMFAVAEFWKNDLGAIENYLQKTNWNHSVFDVPLHYNLYNASKSGGNYDMRNIFNGTVVQRHPSHAVTFVDNHDSQPEEALESFVEEWFKPLAYALTLTREQGYPSVFYGDYYGIPTHGVPAMRSKIDPILEARQKYAYGKQNDYLDHHNIIGWTREGNTMHPNSGLATIMSDGAGGSKWMFVGRNKAGQVWSDITGNRTGTVTINADGWGNFSVNGGSVSIWVNK

SEQ ID NO: 22251 - protein, 485 aa, Bacillus sp. 707
HHNGTNGTMMQYFEWYLPNDGNHWNRLNSDASNLKSKGITAVWIPPAWKGASQNDVGYGAYDLYDLGEFNQKGTVRTKYGTRSQLQAAVTSLKNNGIQVYGDVVMNHKGGADATEMVRAVEVNPNNRNQEVTGEYTIEAWTRFDFPGRGNTHSSFKWRWYHFDGVDWDQSRRLNNRIYKFRGHGKAWDWEVDTENGNYDYLMYADIDMDHPEVVNELRNWGVWYTNTLGLDGFRIDAVKHIKYSFTRDWINHVRSATGKNMFAVAEFWKNDLGAIENYLQKTNWNHSVFDVPLHYNLYNASKSGGNYDMRNIFNGTVVQRHPSHAVTFVDNHDSQPEEALESFVEEWFKPLAYALTLTREQGYPSVFYGDYYGIPTHGVPAMRSKIDPILEARQKYAYGKQNDYLDHHNIIGWTREGNTAHPNSGLATIMSDGHGGSKWMFVGRNKAGQVWSDITGNRTGTVTINADGWGNFSVNGGSVSIWVNK

SEQ ID NO: 22252 - protein, 485 aa, Bacillus sp. 707
HHNGTNGTMMQYFEWYLPNDGNHWNRLNSDASNLKSKGITAVWIPPAWKGASQNDVGYGAYDLYDLGEFNQKGTVRTKYGTRSQLQAAVTSLKNNGIQVYGDVVMNHKGGADATEMVRAVEVNPNNRNQEVTGEYTIEAWTRFDFPGRGNTHSSFKWRWYHFDGVDWDQSRRLNNRIYKFRGHGKAWDWEVDTENGNYDYLMYADIDMDHPEVVNELRNWGNWYTNTLGLDGFRIDAVKHIKYSFTRDWINHVRSATGKNMFAVAEFWKNDLGAIENYLQKTNWNHSVFDVPLHYNLYNASKSGGNYDMRNIFNGTVVQRHPSHAVTFVDNHDSQPEEALESFVEEWFKPLAYALTLTREQGYPSVFYGDYYGIPTHGVPAMRSKIDPILEARQKYAYGKQNDYLDHHNIIGWTREGNTAHPNSGLATIMSDGAGGSKWMFVGRNKAGQVWSDITGNRTGTVTINADGWGNFSVNGGSVSIWVNK

SEQ ID NO: 22253 - protein, 485 aa, Bacillus sp. 707
HHNGTNGTMMQYFEWYLPNDGNHWNRLNSDASNLKSKGITAVWIPPAWKGASQNDVGYGAYDLYDLGEFNQKGTVRTKYGTRSQLQAAVTSLKNNGIQVYGDVVMNHKGGADATEMVRAVEVNPNNRNQEVTGEYTIEAWTRFDFPGRGNTHSSFKWRWYHFDGVDWDQSRRLNNRIYKFRGHGKAWDWEVDTENGNYDYLMYADIDMDHPEVVNELRNWGVWYTNTLGLDGFRIDAVKHIKYSFTRDWINHVRSATGKNMFAVAEFWKNDLGAIENYLQKTNWNHSVFDVPLHYNLYNASKSGGNYDMRNIFNGTVVQRHPSHAVTFVDNHDSQPEEALESFVEEWFKPLAYALTLTREQGYPSVFYGDYYGIPTHGVPAMRSKIDPILEARQKYAYGKQNDYLDHHNIIGWTREGNTAHPNSGLATIMSDGAGGSKWMFVGRNKAGQVWSDITGNRLGTVTINADGWGNFSVNGGSVSIWVNK

SEQ ID NO: 22254 - protein, 485 aa, Bacillus sp.
HHNGTNGTMMQYFEWYLPNDGNHWNRLRSDASNLKDKGISAVWIPPAWKGASQNDVGYGAYDLYDLGEFNQKGTIRTKYGTRNQLQAAVNALKSNGIQVYGDVVMNHKGGADATEMVRAVEVNPNNRNQEVSGEYTIEAWTKFDFPGRGNTHSNFKWRWYHFDGVDWDQSRKLNNRIYKFRGDGKGWDWEVDTENGNYDYLLYADIDMDHPEVVNELRNWGVWYTNTLGLDGFRIDAVKHIKYSFTRDWINHVRSATGKNMFAVAEFWKNDLGAIENYLNKTNWNHSVFDVPLHYNLYNASKSGGNYDMRQIFNGTVVQRHPMHAVTFVDNHDSQPEEALESFVEEWFKPLAYALTLTREQGYPSVFYGDYYGIPTHGVPAMKSRIDPILEARQKYAYGRQNDYLDHHNIIGWTREGNTAHPNSGLATIMSDGAGGNKWMFVGRNKAGQVWTDITGNRAGTVTINADGWGNFSVNGGSVSIWVQK

SEQ ID NO: 22255 - protein, 485 aa, Bacillus subtilis
HHNGTNGTMLQYFEWYLPNDGNHWNRLRSDASNLKDKGISAVWIPPAWKGASQNDVGYGAYDLYDLGEFNQKGTIRTKYGTRNQLQAAVNALKSNGIQVYGDVVMNHKGGADATEMVRAVEVNPNNRNQEVSGEYTIEAWTKFDFPGRGNTHSNFKWRWYHFDGVDWDQSRKLNNRIYKFRGDGKGWDWEVDTENGNYDYLMYADIDMDHPEVVNELRNWGVWYTNTLGLDGFRIDAVKHIKYSFTRDWINHVRSATGKNLFAVAEFWKNDLGAIENYLNKTNWNHSVFDVPLHYNLYNASKSGGNYDMRQIFNGTVVQRHPMHAVTFVDNHDSQPEEALESFVEEWFKPLAYALTLTREQGYPSVFYGDYYGIPTHGVPAMKSKIDPILEARQKYAYGRQNDYLDHHNIIGWTREGNTAHPNSGLATIMSDGAGGNKWMFVGRNKAGQVWTDITGNRAGTVTINADGWGNFSVNGGSVSIWVNK

SEQ ID NO: 22256 - protein, 485 aa, Bacillus sp. 707
HHNGTNGTMMQYFEWYLPNDGNHWNRLNSDASNLKSKGITAVWIPPAWKGASQNDVGYGAYDLYDLGEFNQKGTVRTKYGTRSQLQAAVTSLKNNGIQVYGDVVMNHKGGADATEMVRAVEVNPNNRNQEVTGEYTIEAWTRFDFPGRGNTHSSFKWRWYHFDGVDWDQSRRLNNRIYKFRGHGKAWDWEVDTENGNYDYLMYADIDMDHPEVVNELRNWGVWYTNTLGLDGFRIDAVKHIKYSFTRDWINHVRSATGKNMFAVAEFWKNDLGAIENYLQKTNWNHSVFDVPLHYNLYNASKSGGNYDMRNIFNGTVVQRHPSHAVTFVDNHDSQPEEALESFVEEWFKPLAYALTLTREQGYPSVFYGDYYGIPTHGVPAMRSKIDPILEARQKYAYGKQNDYLDHHNIIGWTREGNTAHPNSGLATIMSDGAGGSKWMFVGRNKAGQVWSDITGNRSGTVTINADGWGNFSVNGGSVSIWVNK

SEQ ID NO: 22257 - protein, 485 aa, Bacillus sp. 707
HHNGTNGTMMQYFEWYLPNDGNHWNRLDSDASNLKSKGITAVWIPPAWKGASQNDVGYGAYDLYDLGEFNQKGTVRTKYGTRSQLQAAVTSLKNNGIQVYGDVVMNHKGGADATEMVRAVEVNPNNRNQEVTGEYTIEAWTRFDFPGRGNTHSSFKWRWYHFDGVDWDQSRRLNNRIYKFRGHGKAWDWEVDTENGNYDYLMYADIDMDHPEVVNELRNWGVWYTNTLGLDGFRIDAVKHIKYSFTRDWINHVRSATGKNMFAVAEFWKNDLGAIENYLQKTNWNHSVFDVPLHYNLYNASKSGGNYDMRNIFNGTVVQRHPSHAVTFVDNHDSQPEEALESFVEEWFKPLAYALTLTREQGYPSVFYGDYYGIPTHGVPAMRSKIDPILEARQKYAYGKQNDYLDHHNIIGWTREGNTAHPNSGLATIMSDGAGGSKWMFVGRNKAGQVWSDITGNRTGTVTINADGWGNFSVNGGSVSIWVNK

SEQ ID NO: 22258 - protein, 485 aa, Bacillus sp.
HHNGTNGTMMQYFEWYLPNDGNHWNRLRSDASNLKDKGISAVWIPPAWKGASQNDVGYGAYDLYDLGEFNQKGTIRTKYGTRNQLQAAVNALKSNGIQVYGDVVMNHKGGADATEMVRAVEVNPNNRNQEVSGEYTIEAWTKFDFPGRGNTHSNFKWRWYHFDGVDWDQSRKLNNRIYKFRGDGKGWDWEVDTENGNYDYLTYADIDMDHPEVVNELRNWGVWYTNTLGLDGFRIDAVKHIKYSFTRDWINHVRSATGKNMFAVAEFWKNDLGAIENYLNKTNWNHSVFDVPLHFNLYNASKSGGNYDMRQIFNGTVVQRHPMHAVTFVDNHDSQPEEALESFVEEWFKPLAYALTLTREQGYPSVFYGDYYGIPTHGVPAMKSKIDPILEARQKYAYGRQNDYLDHHNIIGWTREGNTAHPNSGLATIMSDGAGGNKWMFVGRNKAGQVWTDITGNRAGTVTINADGWGNFSVNGGSVSIWVNK

SEQ ID NO: 22259 - protein, 485 aa, Bacillus sp. 707
HHNGTNGTMMQYFEWYLPNDGNHWNRLNSDASNLKSKGITAVWIPPAWKGASQNDVGYGAYDLYDLGEFNQKGTVRTKYGTRSQLQAAVTSLKNNGIQVYGDVVMNHKGGADATEMVRAVEVNPNNRNQEVTGEYTIEAWTRFDFPGRGNTHSSFKWRWYHFDGVDWDQSRRLNNRIYKFRGHGKAWDWEVDTENGNYDYLMYADIDMDHPEVVNELRNWGVWYTNTLGLDGFRIDAVKHIKYSFTRDWINHVRSATGKNMFAVAEFWKNDLGAIENYLQKTNWNHSVFDVPLHYNLYNASKSGGNYDMRGIFNGTVVQRHPSHAVTFVDNHDSQPEEALESFVEEWFKPLAYALTLTREQGYPSVFYGDYYGIPTHGVPAMRSKIDPILEARQKYAYGKQNDYLDHHNIIGWTREGNTAHPNSGLATIMSDGAGGSKWMFVGRNKAGQVWSDITGNRTGTVTINADGWGNFSVNGGSVSIWVNK

SEQ ID NO: 22260 - protein, 485 aa, Bacillus subtilis
HHNGTNGTMMQYFEWYLPNDGNHWNRLRSDASNLKDKGISAVWIPPAWKGASQNDVGYGAYDLYDLGEFNQKGTIRTKYGTRNQLQAAVNALKSNGIQVYGDVVMNHKGGADATEMVRAVEVNPNNRNQEVSGEYTIEAWTKFDFPGRGNTHSNFKWRWYHFDGVDWDQSRKLNNRIYKFRGDGKGWDWEVDTENGNYDYLMYADIDMDHPEVVNELRNWGVWYTNTLGLDGFRIDAVKHIKYSFIRDWINHVRSATGKNMFAVAEFWKNDLGAIENYLNKTNWNHSVFDVPLHYNLYNASKSGGNYDMRQIFNGTVVQRHPMHAVTFVDNHDTQPEEALESFVEEWFKPLAYALTLTREQGYPSVFYGDYYGIPTHGVPAMKSKIDPILEARQKYAYGRQNDYLDHHNIIGWTREGNTAHPNSGLATIMSDGAGGNKWMFVGRNKAGQVWTDITGNRAGTVTINADGWGNFSVNGGSVSIWVNK

SEQ ID NO: 22261 - protein, 485 aa, Bacillus sp. 707
HHNGTNGTMMQYFEWYLPNDGNHWNRLNSDASNLKSKGITAVWIPPAWKGASQNDVGYGAYDLYDLGEFNQKGTVRTKYGTRSQLQAAVTKLKNNGIQVYGDVVMNHKGGADATEMVRAVEVNPNNRNQEVTGEYTIEAWTRFDFPGRGNTHSSFKWRWYHFDGVDWDQSRRLNNRIYKFRGHGKAWDWEVDTENGNYDYLMYADIDMDHPEVVNELRNWGVWYTNTLGLDGFRIDAVKHIKYSFTRDWINHVRSATGKNMFAVAEFWKNDLGAIENYLQKTNWNHSVFDVPLHYNLYNASKSGGNYDMRNIFNGTVVQRHPSHAVTFVDNHDSQPEEALESFVEEWFKPLAYALTLTREQGYPSVFYGDYYGIPTHGVPAMRSKIDPILEARQKYAYGKQNDYLDHHNIIGWTREGNTAHPNSGLATIMSDGAGGSKWMFVGRNKAGQVWSDITGNRTGTVTINADGWGNFSVNGGSVSIWVNK

SEQ ID NO: 22262 - protein, 485 aa, Bacillus sp. 707
HHNGTNGTMMQYFEWYLPNDGNHWNRLNSDASNLKSKGITAVWIPPAWKGASQNDVGYGAYDLYDLGEFNQKGTVRTKYGTRSQLQAAVTSLKNNGIQVYGDVVMNHKGGADATEMVRAVEVNPNNRNQEVTGEYTIEAWTRFDFPGRGNTHSSFKWRWYHFDGVDWDQSRRLNNRIYKFRGHGKAWDWEVDTENGNYDYLMYADIDMDHPEVVNELRNWGVWYTNTLGLDGFRIDAVKHIKYSFTRDWINHVRSATGKNMFAVAEFWKNDLGAIENYLQKTNWNHSVFDVPLHYNLYNASKSGGNYDMRNIFNGTVVQRHPSHAVTFVDNHDSQPEEALESFVEEWFKPLAYALTLTREQGYPSVFYGDYYGIPTHGVPAMRSKIDPILEARQKYAYGKQNDYLDHHNIIGWTREGNTAHPNSGLATIMSDGAGGSKWMFVGRNKAGQVWSDITGNRTGTVTINADGWGNFSVNGGSVSIWVRK

SEQ ID NO: 22263 - protein, 483 aa, Bacillus sp.
HHNGTNGTLMQYFEWYLPNDGNHWNRLRSDASNLKDKGISAVWIPPAWKGTSQNDVGYGAYDLYDLGEFNQKGTIRTKYGTRNQLQAAVNALKSNGIQVYGDVVMNHKGGADATEMVKAVEVNPNNRNQEVSGEYTIEAWTKFDFPGRANTHSNFKWRWYHFDGVDWDQSRKLNNRIYKFRTKAWDWEVDTENGNYDYLMYADIDMDHPEVVNELRNWGVWYTNTLGLDGFRIDAVKHIKYSFTRDWINHVRSAIGKNMFAVAEFWKNDLGAIENYLNKTNWNHSVFDVPLHFNLYYASKSGGNYDMRQIFNGTVVQKHPTHAVTFVDNHDSQPEESLESFVREWFKPLAYALTLTREQGYPSVFYGDYYGIPTHGVPAMKSKIDPILEARQKYAYGRQNDYLDHHNIIGWTREGNTAHPNSGLATIMSDGAGGNKWMFVGRNKAGQVWTDITGNKAGTVTINADGWGNFSVNGGSVSIWVNK

SEQ ID NO: 22264 - protein, 485 aa, Bacillus sp. 707
HHNGTNGTMMQYFEWYLPNDGNHWNRLNSDASNLKSKGITAVWIPPAWKGASQNDVGYGAYDLYDLGEFNQKGTVRTKYGTRSQLQAAVTSLKNNGIQVYGDVVMNHKGGADATEMVRAVEVNPNNRNQEVTGEYTIEAWTRFDFPGRGNTHSSFKWRWYHFDGVDWDQSRRLNNRIYKFRGHGKAWDWEVDTENGNYDYLMYADIDMDHPEVVNELRNWGVWYTNTLGLDGFRIDAVKHIKYSFTRDWINHVRSATGKNMFAVAEFWKNDLGAIENYLQKTNWNHSVFDVPLHYNLYNASKSGGNYDMRNIFNGTVVQTHPSHAVTFVDNHDSQPEEALESFVEEWFKPLAYALTLTREQGYPSVFYGDYYGIPTHGVPAMRSKIDPILEARQKYAYGKQNDYLDHHNIIGWTREGNTAHPNSGLATIMSDGAGGSKWMFVGRNKAGQVWSDITGNRTGTVTINADGWGNFSVNGGSVSIWVNK

SEQ ID NO: 22265 - protein, 485 aa, Bacillus sp.
HHNGTNGTMMQYFEWYLPNDGNHWNRLRSDASNLKDKGISAVWIPPAWKGASQNDVGYGAYDLYDLGEFNQKGTIRTKYGTRNQLQAAVNALKSNGIQVYGDVVMNHKGGADATEMVRAVEVNPNNRNQEVSGEYTIEAWTKFDFPGRGNTHSNFKWRWYHFDGVDWDQSRKLNNRIYKFRGDGKGWDWEVDTENGNYDYLVYADIDMDHPEVVNELRNWGVWYTNTLGLDGFRIDAVKHIKYSFTRDWINHVRSATGKNMFAVAEFWKNDLGAIENYLNKTNWNHSVFDVPLHYNLYNASKSGGNYDMRQIFNGTVVQRHPMHAVTFVDNHDSQPEEALESFVEEWFKPLAYALTLTREQGYPSVFYGDYYGIPTHGVPAMKSKIDPILEARQKYAYGRQNDYLDHHNIIGWTREGNTAHPNSGLATIMSDGAGGNKWMFVGRNRAGQVWTDITGNRAGTVTINADGWGNFSVNGGSVSIWVQK

SEQ ID NO: 22266 - protein, 485 aa, Bacillus sp. 707
HHNGTNGTMMQYFEWYLPNDGNHWNRLNSDASNLKSKGITAVWIPPAWKGASQNDVGYGAYDLYDLGEFNQKGTVRTKYGTRSQLQAAVTSLKNNGIQVYGDVVMNHKGGADATEMVRAVEVNPNNRNQEVTGEYTIEAWTRFDFPGRGNTHSSFKWRWYHFDGVDWDQSRRYNNRIYKFRGHGKAWDWEVDTENGNYDYLMYADIDMDHPEVVNELRNWGVWYTNTLGLDGFRIDAVKHIKYSFTRDWINHVRSATGKNMFAVAEFWKNDLGAIENYLQKTNWNHSVFDVPLHYNLYNASKSGGNYDMRNIFNGTVVQRHPSHAVTFVDNHDSQPEEALESFVEEWFKPLAYALTLTREQGYPSVFYGDYYGIPTHGVPAMRSKIDPILEARQKYAYGKQNDYLDHHNIIGWTREGNTAHPNSGLATIMSDGAGGSKWMFVGRNKAGQVWSDITGNRTGTVTINADGWGNFSVNGGSVSIWVNK

SEQ ID NO: 22267 - protein, 485 aa, Bacillus sp. 707
HHNGTNGTMMQYFEWYLPNDGNHWNRLNSDASNLKSKGITAVWIPPAWKGASQNDVGYGAYDLYDLGEFNQKGTVRTKYGTRSQLQAAVTSLKNNGIQVYGDVVMNHKGGADATEMVRAVEVNPNNRNQEVTGEYTIEAWTRFDFPGRGNTHSSFKWRWYHFDGVDWDQSRRLNNRIYKFRGHGKAWDWEVDTENGNYDYLMYADIDMDHPEVVNELRNWGVWYTNTLGLDGFRIDAVKHIKYSFTRDWINHVRSATGKNMFAVAEFWKNDLGAIENYLQKTNWNHSVFDVPLHYNLYNASKSGGNYDMRLIFNGTVVQRHPSHAVTFVDNHDSQPEEALESFVEEWFKPLAYALTLTREQGYPSVFYGDYYGIPTHGVPAMRSKIDPILEARQKYAYGKQNDYLDHHNIIGWTREGNTAHPNSGLATIMSDGAGGSKWMFVGRNKAGQVWSDITGNRTGTVTINADGWGNFSVNGGSVSIWVNK

SEQ ID NO: 22268 - protein, 485 aa, Bacillus sp. 707
HHNGTNGTMMQYFEWYLPNDGNHWNRLNSDASNLKSKGITAVWIPPAWKGASQNDVGYGAYDLYDLGEFNQKGTVRTKYGTRSQLQAAVTSLKNNGIQVYGDVVMNHKGGADATEVVRAVEVNPNNRNQEVTGEYTIEAWTRFDFPGRGNTHSSFKWRWYHFDGVDWDQSRRLNNRIYKFRGHGKAWDWEVDTENGNYDYLMYADIDMDHPEVVNELRNWGVWYTNTLGLDGFRIDAVKHIKYSFTRDWINHVRSATGKNMFAVAEFWKNDLGAIENYLQKTNWNHSVFDVPLHYNLYNASKSGGNYDMRNIFNGTVVQRHPSHAVTFVDNHDSQPEEALESFVEEWFKPLAYALTLTREQGYPSVFYGDYYGIPTHGVPAMRSKIDPILEARQKYAYGKQNDYLDHHNIIGWTREGNTAHPNSGLATIMSDGAGGSKWMFVGRNKAGQVWSDITGNRTGTVTINADGWGNFSVNGGSVSIWVNK

SEQ ID NO: 22269 - protein, 485 aa, Bacillus sp.
HHNGTNGTMMQYFEWYLPNDGNHWNRLRSDASNLKDKGISAVWIPPAWKGASQNDVGYGAYDLYDLGEFNQKGTIRTKYGTRNQLQAAVNALKSNGIQVYGDVVMNHKGGADATEMVRAVEVNPNNRNQEVSEEYTIEAWTKFDFPGRGNTHSNFKWRWYHFDGVDWDQSRKLNNRIYKFRGDGKGWDWEVDTENGNYDYLTYADIDMDHPEVVNELRNWGVWYTNTLGLDGFRIDAVKHIKYSFTRDWINHVRSATGKNMFAVAEFWKNDLGAIENYLNKTNWNHSVFDVPLHYNLYNASKSGGNYDMRQIFNGTVVQRHPMHAVTFVDNHDSQPEEALESFVEEWFKPLAYALTLTREQGYPSVFYGDYYGIPTHGVPAMKSKIDPILEARQKYAYGRQNDYLDHHNIIGWTREGNTAHPNSGLATIMSDGAGGNKWMFVGENKAGQVWTDITGNRAGTVTINADGWGNFSVNGGSVSIWVNK

SEQ ID NO: 22270 - protein, 485 aa, Bacillus sp.
HHNGTNGTMMQYFEWYLPNDGNHWNRLRSDASNLKDKGISAVWIPPAWKGASQNDVGYGAYDLYDLGEFNQKGTIRTKYGTRNQLQAAVNALKSNGIQVYGDVVMNHKGGADATEMVRAVEVNPNNRNQEVSGEYTIEAWTKFDFPGRGNTHSNFKWRWYHFDGVDWDQSRKLNNRIYKFRGDGKGWDWEVDTENGNYDYLIYADIDMDHPEVTNELRNWGVWYTNTLGLDGFRIDAVKHIKYSFTRDWINHVRSATGKNMFAVAEFWKNDLGAIENYLNKTNWNHSVFDVPLHYNLYNASKSGGNYDMRQIFNGTVVQRHPMHAVTFVDNHDSQPEEALESFVEEWFKPLAYALTLTREQGYPSVFYGDYYGIPTHGVPAMKSKIDPILEARQKYAYGRQNDYLDHHNIIGWTREGNTAHPNSGLATIMSDGAGGNKWMFVGYNKAGQVWTDITGNRAGTVTINADGWGNFSVNGGSVSIWVNK

SEQ ID NO: 22271 - protein, 485 aa, Bacillus sp. 707
HHNGTNGTMMQYFEWYLPNDGNHWNRLNSDASNLKSKGITAVWIPPAWKGASQNDVGYGAYDLYDLGEFNQKGTVRTKYGTRSQLQAAVTSLKNNGIQVYGDVVMNHKGGADATEMVRAVEVNPNNRNQEVTGEYTIEAWTRFDFPGRGNTHSSFKWRWYHFDGVDWDQSRRLNNRIYKFRGHGKAWDWEVDTENGNYDYLMYADIDMDHPEVVNELRNWGVWYTNTLGLDGFRIDAVKHIKYSFTRDWINHVRSATGKNMFAVAEFWKNDLGAIENYLQKTNWNHSVFDVPLHYNLYNASKSGGNYDMRNIFNGTVVQRHPSHAVTFVDNHDSQPEEALESFVEEWFKPLAYALTLTREQGYPSVFYGDYYGIPTHGVPAMRSKIDPILEARQKYAYGKQNDYLDHHNIIGWTREGNTAHPNSGLATIMSDGAGGTKWMFVGRNKAGQVWSDITGNRTGTVTINADGWGNFSVNGGSVSIWVNK

SEQ ID NO: 22272 - protein, 485 aa, Bacillus sp. 707
HHNGTNGTMMQYFEWYLPNDGNHWNRLNSDASNLKSKGITAVWIPPAWKGASQNDVGYGAYDLYDLGEFNQKGTVRTKYGTRSQLWAAVTSLKNNGIQVYGDVVMNHKGGADATEMVRAVEVNPNNRNQEVTGEYTIEAWTRFDFPGRGNTHSSFKWRWYHFDGVDWDQSRRLNNRIYKFRGHGKAWDWEVDTENGNYDYLMYADIDMDHPEVVNELRNWGVWYTNTLGLDGFRIDAVKHIKYSFTRDWINHVRSATGKNMFAVAEFWKNDLGAIENYLQKTNWNHSVFDVPLHYNLYNASKSGGNYDMRNIFNGTVVQRHPSHAVTFVDNHDSQPEEALESFVEEWFKPLAYALTLTREQGYPSVFYGDYYGIPTHGVPAMRSKIDPILEARQKYAYGKQNDYLDHHNIIGWTREGNTAHPNSGLATIMSDGAGGSKWMFVGRNKAGQVWSDITGNRTGTVTINADGWGNFSVNGGSVSIWVNK

SEQ ID NO: 22273 - protein, 485 aa, Bacillus subtilis
HHNGTNGTMMQYFEWYLPNDGNHWNRLRSDASNLKDKGISAVWIPPAWKGASQNDVGYGAYDLYDLGEFNQKGTIRTKYGTRNQLQAAVNALKSNGIQVYGDVVMNHKGGADATEMVRAVEVNPNNRNQEVSGEYTIEAWTKFDFPGRGNTHSNFKWRWYHFDGVDWDQSRKLNNRIYKFRGDGKGWDWEVDTENGNYDYLMYADIDMDHPEVVNELRNWGVWYTNTLGLDGFRIDAVKHIKYSFTRDWINHVRSATGKNMFAVAEFWKNDLGAIENYLNKTNWNHSVFDVPLHYNLYNASKSGGNYDMRQIFNGTVVQRHPMHAVTFVDNHDSQPEEALESFVEEWFKPLAYALTLTRFQGYPCVFYGDYYGIPTHGVPAMKSKIDPILEARQKYAYGRQNDYLDHHNIIGWTREGNTAHPNSGLATIMSDGAGGNKWMFVGRNKAGQVWTDITGNRAGTVTINADGWGNFSVNGGSVSIWVNK

SEQ ID NO: 22274 - protein, 485 aa, Bacillus sp. 707
HHNGTNGTMMQYFEWYLPNDGNHWNRLNSDASNLKSKGITAVWIPPAWKGASQNDVGYGAYDLYDLGEFNQKGTVRTKYGTRSQLQAAVTSLKNNGIQVYGDVVMNHKGGADATEMVRAVEVNPNNRNQEVTGEYTIEAWTSFDFPGRGNTHSSFKWRWYHFDGVDWDQSRRLNNRIYKFRGHGKAWDWEVDTENGNYDYLMYADIDMDHPEVVNELRNWGVWYTNTLGLDGFRIDAVKHIKYSFTRDWINHVRSATGKNMFAVAEFWKNDLGAIENYLQKTNWNHSVFDVPLHYNLYNASKSGGNYDMRNIFNGTVVQRHPSHAVTFVDNHDSQPEEALESFVEEWFKPLAYALTLTREQGYPSVFYGDYYGIPTHGVPAMRSKIDPILEARQKYAYGKQNDYLDHHNIIGWTREGNTAHPNSGLATIMSDGAGGSKWMFVGRNKAGQVWSDITGNRTGTVTINADGWGNFSVNGGSVSIWVNK

SEQ ID NO: 22275 - protein, 485 aa, Bacillus subtilis
HHNGTNGTMMQYFEWYLPNDGNHWNRLRSDASNLKDKGISAVWIPPAWKGASQNDVGYGAYDLYDLGEFNQKGTIRTKYGTRNQLQAAVNALKSNGIQVYGDVVMNHKGGADATEMVRAVEVNPNNRNQEVSGEYTIEAWTKFDFPGRGNTHSNFKWRWYHFDGVDWDQSRKLNNRIYKFRGDGKGWDWEVDTENGNYDYLMYADIDMDHPEVVNELRNWGVWYTNTLGLDGFRIDAVKHIKYSFVRDWINHVRSATGKNMFAVAEFWKNDLGAIENYLNKTNWNHSVFDVPLHYNLYNASKSGGNYDMRQIFNGTVVQRHPMHAVTFVDNHDTQPEEALESFVEEWFKPLAYALTLTREQGYPSVFYGDYYGIPTHGVPAMKSKIDPILEARQKYAYGRQNDYLDHHNIIGWTREGNTAHPNSGLATIMSDGAGGNKWMFVGRNKAGQVWTDITGNRAGTVTINADGWGNFSVNGGSVSIWVNK

SEQ ID NO: 22276 - protein, 485 aa, Bacillus sp. 707
HHNGTNGTMMQYFEWYLPNDGNHWNRLNSDASNLKSKGITAVWIPPAWKGASQNDVGYGAYDLYDLGEFNQKGTVRTKYGTRSQLQAAVTSLKNNGIQVYGDVVMNHKGGADATEMVRAVEVNPNNRNQEVTGEYTIEAWTRFDFPGRGNTHSSFKWRWYHFDGVDWDQSRRLNNRIYKFRGHGKAWDWEVDTENGNYDYLMYADIDMDHPEVVNELRNWGVWYTNTLGLDGFRIDAVKHIKYSFTRDWINHVRSATGKNMFAVAEFWKNDLGAIENYLQKTNWNHSVFDVPLHYNLYNASKSGGNYDMRNIFNGTVVQRHPSHAVTFVDNHDSQPEEALESFVLEWFKPLAYALTLTREQGYPSVFYGDYYGIPTHGVPAMRSKIDPILEARQKYAYGKQNDYLDHHNIIGWTREGNTAHPNSGLATIMSDGAGGSKWMFVGRNKAGQVWSDITGNRTGTVTINADGWGNFSVNGGSVSIWVNK

SEQ ID NO: 22277 - protein, 485 aa, Bacillus sp. 707
HHNGTNGTMMQYFEWYLPNDGNHWNRLHSDASNLKSKGITAVWIPPAWKGASQNDVGYGAYDLYDLGEFNQKGTVRTKYGTRSQLQAAVTSLKNNGIQVYGDVVMNHKGGADATEMVRAVEVNPNNRNQEVTGEYTIEAWTRFDFPGRGNTHSSFKWRWYHFDGVDWDQSRRLNNRIYKFRGHGKAWDWEVDTENGNYDYLMYADIDMDHPEVVNELRNWGVWYTNTLGLDGFRIDAVKHIKYSFTRDWINHVRSATGKNMFAVAEFWKNDLGAIENYLQKTNWNHSVFDVPLHYNLYNASKSGGNYDMRNIFNGTVVQRHPSHAVTFVDNHDSQPEEALESFVEEWFKPLAYALTLTREQGYPSVFYGDYYGIPTHGVPAMRSKIDPILEARQKYAYGKQNDYLDHHNIIGWTREGNTAHPNSGLATIMSDGAGGSKWMFVGRNKAGQVWSDITGNRTGTVTINADGWGNFSVNGGSVSIWVNK

SEQ ID NO: 22278 - protein, 485 aa, Bacillus sp.
HHNGTNGTMMQYFEWYLPNDGNHWNRLRSDASNLKDKGISAVWIPPAWKGASQNDVGYGAYDLYDLGEFNQKGTIRTKYGTRNQLQAAVNALKSNGIQVYGDVVMNHKGGADATEMVRAVEVNPNNRNQEVSEEYTIEAWTKFDFPGRGNTHSNFKWRWYHFDGVDWDQSRKLNNRIYKFRGDGKGWDWEVDTENGNYDYLLYADIDMDHPEVVNELRNWGVWYTNTLGLDGFRIDAVKHIKYSFTRDWINHVRSATGKNMFAVAEFWKNDLGAIENYLNKTNWNHSVFDVPLHYNLYNASKSGGNYDMRQIFNGTVVQRHPMHAVTFVDNHDSQPEEALESFVEEWFKPLAYALTLTREQGYPSVFYGDYYGIPTHGVPAMKSKIDPILEARQKYAYGRQNDYLDHHNIIGWTREGNTAHPNSGLATIMSDGAGGNKWMFVGENKAGQVWTDITGNRAGTVTINADGWGNFSVNGGSVSIWVNK

SEQ ID NO: 22279 - protein, 485 aa, Bacillus sp. 707
HHNGTNGTMMQYFEWYLPNDGNHWNRLNSDASNLKSKGITAVWIPPAWKGASQNDVGYGAYDLYDLGEFNQKGTVRTKYGTRSQLQAAVTSLKNNGIQVYGDVVMNHKGGADATEMVRAVEVNPNNRNQEVTGEYTIEAWTRFDFPGRGNTHSSFKWRWYHFDGVDWDQSRRLNNRIYKFRGHGKAWDWEVDTENGNYDYLMYADIDMDHPEVVNELRNWGVWYTNTLGLDGFRIDAVKHIKYSFTRDWINHVRSATGKNMFAVAEFWKNDLGAIENYLQKTNWNHSVFDVPLHYNLYNASKSGGNYDMRNIFNGTVVQRHPSHAVTFVDNHDSQPDEALESFVEEWFKPLAYALTLTREQGYPSVFYGDYYGIPTHGVPAMRSKIDPILEARQKYAYGKQNDYLDHHNIIGWTREGNTAHPNSGLATIMSDGAGGSKWMFVGRNKAGQVWSDITGNRTGTVTINADGWGNFSVNGGSVSIWVNK

SEQ ID NO: 22280 - protein, 485 aa, Bacillus sp. 707
HHNGTNGTMMQYFEWYLPNDGNHWNRLNSDASNLKSKGITAVWIPPAWKGASQNDVGYGAYDLYDLGEFNQKGTVRTKYGTRSQLQAAVTSLKNNGIQVYGDVVMNHKGGADATEMVTAVEVNPNNRNQEVTGEYTIEAWTRFDFPGRGNTHSSFKWRWYHFDGVDWDQSRRLNNRIYKFRGHGKAWDWEVDTENGNYDYLMYADIDMDHPEVVNELRNWGVWYTNTLGLDGFRIDAVKHIKYSFTRDWINHVRSATGKNMFAVAEFWKNDLGAIENYLQKTNWNHSVFDVPLHYNLYNASKSGGNYDMRNIFNGTVVQRHPSHAVTFVDNHDSQPEEALESFVEEWFKPLAYALTLTREQGYPSVFYGDYYGIPTHGVPAMRSKIDPILEARQKYAYGKQNDYLDHHNIIGWTREGNTAHPNSGLATIMSDGAGGSKWMFVGRNKAGQVWSDITGNRTGTVTINADGWGNFSVNGGSVSIWVNK

SEQ ID NO: 22281 - protein, 485 aa, Bacillus sp. 707
HHNGTNGTMMQYFEWYLPNDGNHWNRLNSDASNLKSKGITAVWIPPAWKGASQNDVGYGAYDLYDLGEFNQKGTVRTKYGTRSQLQAAVTSLKNNGIQVYGDVVMNHKGGADATEMVRAVEVNPNNRNQEVTGEYTIEAWTRFDFPGRGNTHSSFKWRWYHFDGVDWDQSRRLNNRIYKFRGHGKAWDWEVDTENGNYDYLMYADIDMDHPEVVNELRNWGVWYTNTLGLDGFRIDAVKHIKYSFTRDWINHVRSATGKNMFAVAEFWKNDLGAIENYLQKTNWNHSVFDVPLHYNLYNASKSGGNYDMRNIFNGTVVQRHPFHAVTFVDNHDSQPEEALESFVEEWFKPLAYALTLTREQGYPSVFYGDYYGIPTHGVPAMRSKIDPILEARQKYAYGKQNDYLDHHNIIGWTREGNTAHPNSGLATIMSDGAGGSKWMFVGRNKAGQVWSDITGNRTGTVTINADGWGNFSVNGGSVSIWVNK

SEQ ID NO: 22282 - protein, 485 aa, Bacillus sp. 707
HHNGTNGTMMQYFEWYLPNDGNHWNRLNSDASNLKSKGITAVWIPPAWKGASQNDVGYGAYDLYDLGEFNQKGTVRTKYGTRSQLHAAVTSLKNNGIQVYGDVVMNHKGGADATEMVRAVEVNPNNRNQEVTGEYTIEAWTRFDFPGRGNTHSSFKWRWYHFDGVDWDQSRRLNNRIYKFRGHGKAWDWEVDTENGNYDYLMYADIDMDHPEVVNELRNWGVWYTNTLGLDGFRIDAVKHIKYSFTRDWINHVRSATGKNMFAVAEFWKNDLGAIENYLQKTNWNHSVFDVPLHYNLYNASKSGGNYDMRNIFNGTVVQRHPSHAVTFVDNHDSQPEEALESFVEEWFKPLAYALTLTREQGYPSVFYGDYYGIPTHGVPAMRSKIDPILEARQKYAYGKQNDYLDHHNIIGWTREGNTAHPNSGLATIMSDGAGGSKWMFVGRNKAGQVWSDITGNRTGTVTINADGWGNFSVNGGSVSIWVNK

SEQ ID NO: 22283 - protein, 485 aa, Bacillus sp. 707
HHNGTNGTMMQYFEWYLPNDGNHWNRLNSDASNLKSKGITAVWIPPAWKGASQNDVGYGAYDLYDLGEFNQKGTVRTKYGTRSQLQAAVTSLKNNGIQVYGDVVMNHKGGADATEMVRAVEVNPNNRNQEVTGEYTIEAWTRFDFPGRGNTHSSFKWRWYHFDGVDWDQSRRLNNRIYKFRGHGKAWDWEVDTENGNYDYLMYADIDMDHPEVVNELRNWGVWYTNTLGLDGFRIDAVKHIKYSFTRDWINHVRSATGKNMFAVAEFWKNDLGAIENYLQKTNWNHSVFDVPLHYNLYNASKSGGNYDMRNIFNGTVVQRHPSHAVTFVDNHDSQPEEALESFVEEWFKPLAYALTLTREQGYPSVFYGDYYGIPTHGVPAMRSKIDPILEARQKYAYGKQNDYLDHHNIIGWTREGNTAHPNSGLATIMSDGAGGSKWMFVGRNKAGQVWWDITGNRTGTVTINADGWGNFSVNGGSVSIWVNK

SEQ ID NO: 22284 - protein, 484 aa, Bacillus sp.
HHNGTNGTLMQYFEWYLPNDGNHWNRLRSDASNLKDKGISAVWIPPAWKGASQNDVGYGAYDLYDLGEFNQKGTIRTKYGTRNQLQAAVNALKSNGIQVYGDVVMNHKGGADATEMVKAVEVNPNNRNQEVSGEYTIEAWTKFDFPGRGNTHSNFKWRWYHFDGVDWDQSRKLNNRIYKFRGGKGWDWEVDTEFGNYDYLIYADIDMDHPEVVNELRNWGVWYTNTLGLDGFRIDAVKHIKYSFTRDWINHVRSATGKNMFAVAEFWKNDLGAIENYLNKTNWNHSVFDVPLHYNLYNASKSGGNYDMRQIFNGTVVQKHPTHAVTFVDNHDSQPEEALESFVEEWFKPLAYALTLTREQGYPSVFYGDYYGIPTHGVPAMKSKIDPILEARQKYAYGRQNDYLDHHNIIGWTREGNTAHPNSGLATIMSDGAGGNKWMFVGRNKAGQVWTDITGNKAGTVTINADGWGNFSVNGGSVSIWVNK

SEQ ID NO: 22285 - protein, 485 aa, Bacillus sp. 707
HHNGTNGTMMQYFEWYLPNDGNHWNRLNSDASNLKSKGITAVWIPPAWKGASQNDVGYGAYDLYDLGEFNQKGTVRTKYGTRSQLVAAVTSLKNNGIQVYGDVVMNHKGGADATEMVRAVEVNPNNRNQEVTGEYTIEAWTRFDFPGRGNTHSSFKWRWYHFDGVDWDQSRRLNNRIYKFRGHGKAWDWEVDTENGNYDYLMYADIDMDHPEVVNELRNWGVWYTNTLGLDGFRIDAVKHIKYSFTRDWINHVRSATGKNMFAVAEFWKNDLGAIENYLQKTNWNHSVFDVPLHYNLYNASKSGGNYDMRNIFNGTVVQRHPSHAVTFVDNHDSQPEEALESFVEEWFKPLAYALTLTREQGYPSVFYGDYYGIPTHGVPAMRSKIDPILEARQKYAYGKQNDYLDHHNIIGWTREGNTAHPNSGLATIMSDGAGGSKWMFVGRNKAGQVWSDITGNRTGTVTINADGWGNFSVNGGSVSIWVNK

SEQ ID NO: 22286 - protein, 485 aa, Bacillus sp. 707
HHNGTNGTMMQYFEWYLPNDGNHWNRLNSDASNLKSKGITAVWIPPAWKGASQNDVGYGAYDLYDLGEFNQKGTVRTKYGTRSQLQAAVTSLKNNGIQVYGDVVMNHKGGADATEMVRAVEVNPNNRNQEVTGEYTIEAWTRFDFPGRGNTHSSFKWRWYHFDGVDWDQSRRLNNRIYKFRGHGKAWDWEVDTENGNYDYLMYADIDMDHPEVVNELRNWGVWYTNTLGLDGFRIDAVKHIKYSFTRDWINHVRSATGKNMFAVAEFWKNDLGAIENYLQKTNWNHSVFDVPLHYNLYNASKSGGNYDMRNIFNGTVVQHHPSHAVTFVDNHDSQPEEALESFVEEWFKPLAYALTLTREQGYPSVFYGDYYGIPTHGVPAMRSKIDPILEARQKYAYGKQNDYLDHHNIIGWTREGNTAHPNSGLATIMSDGAGGSKWMFVGRNKAGQVWSDITGNRTGTVTINADGWGNFSVNGGSVSIWVNK

SEQ ID NO: 22287 - protein, 484 aa, Bacillus sp.
HHNGTNGTMMQYFEWHLPNDGQHWNRLRNDAANLKNLGIDAVWIPPAWKGTSQNDVGYGAYDLYDLGEFNQKGTIRTKYGTRSQLQSAIARLQNNGIQVYGDVVMNHKGGADGTEWVQAVEVNPSNRNQEVTGEYTIEAWTKFDFPGRGNTHSSFKWRWYHFDGTDWDQSRRLNNRIYKFTGKAWDWEVPTENGNYDYLMYADVDMDHPEVINELRRWGVWYTNTLNLDGFRIDAVKHIKYSFTRDWLNHVRSTTGKNNMFAVAEFWKNDLGAIENYLHKSNWNHSVFDVPLHYNLYNASKSGGNYDMRQILNGTVVSKHPIHRVTFVDNHDSQPAEALESFVEAWFKPLAYALILTREQGYPSVFYGDYYGIPTHGVAAMKGKIDPILEARQKYAYGTQHDYLDHHNIIGWTREGNSAHPNSGLATIMSDGPGGSKWMYVGRHKAGQVWRDITGNRTGTVTINADGWGNFSVNGGSVSIWVNK

SEQ ID NO: 22288 - protein, 485 aa, Bacillus sp. 707
HHNGTNGTMMQYFEWWLPNDGNHWNRLNSDASNLKSKGITAVWIPPAWKGASQNDVGYGAYDLYDLGEFNQKGTVRTKYGTRSQLQAAVTSLKNNGIQVYGDVVMNHKGGADATEMVRAVEVNPNNRNQEVTGEYTIEAWTRFDFPGRGNTHSSFKWRWYHFDGVDWDQSRRLNNRIYKFRGHGKAWDWEVDTENGNYDYLMYADIDMDHPEVVNELRNWGVWYTNTLGLDGFRIDAVKHIKYSFTRDWINHVRSATGKNMFAVAEFWKNDLGAIENYLQKTNWNHSVFDVPLHYNLYNASKSGGNYDMRNIFNGTVVQRHPSHAVTFVDNHDSQPEEALESFVEEWFKPLAYALTLTREQGYPSVFYGDYYGIPTHGVPAMRSKIDPILEARQKYAYGKQNDYLDHHNIIGWTREGNTAHPNSGLATIMSDGAGGSKWMFVGRNKAGQVWSDITGNRTGTVTINADGWGNFSVNGGSVSIWVNK

SEQ ID NO: 22289 - protein, 485 aa, Bacillus sp. 707
HHNGTNGTMMQYFEWYLPNDGNHWNRLNSDASNLKSKGITAVWIPPAWKGASQNDVGYGAYDLYDLGEFNQKGTVRTKYGTRSQLQAAVTSLKNNGIQVYGDVVMNHKGGADATEMVRAVEVNPNNRNQEVTGEYTIEAWTRFDFPGRGNTHSSFKWRWYHFDGVDWDQSRRLNNRIYKFRGHGKAWDWEVDTENGNYDYLMYADIDMDHPEVVNELRNWGVWYTNTLGLDGFRIDAVKHIKYSFTRDWINHVRSATGKNMFAVAEFWKNDLGAIENYLQKTNWNHSVFDVPLHYNLYNASKSGGNYDMRNIFNGTVVQRHPSHAVTFVDNHDSQPEEALESFVEEWFKPLAYALTLTREQGYPSVFYGDYYGIPTHGVPAMRSKIDPILEARQKYAYGKQNDYLDHHNIIGWTREGNTRHPNSGLATIMSDGAGGSKWMFVGRNKAGQVWSDITGNRTGTVTINADGWGNFSVNGGSVSIWVNK

SEQ ID NO: 22290 - protein, 485 aa, Bacillus sp. 707
HHNGTNGTMMQYFEWYLPNDGNHWNRLNWDASNLKSKGITAVWIPPAWKGASQNDVGYGAYDLYDLGEFNQKGTVRTKYGTRSQLQAAVTSLKNNGIQVYGDVVMNHKGGADATEMVRAVEVNPNNRNQEVTGEYTIEAWTRFDFPGRGNTHSSFKWRWYHFDGVDWDQSRRLNNRIYKFRGHGKAWDWEVDTENGNYDYLMYADIDMDHPEVVNELRNWGVWYTNTLGLDGFRIDAVKHIKYSFTRDWINHVRSATGKNMFAVAEFWKNDLGAIENYLQKTNWNHSVFDVPLHYNLYNASKSGGNYDMRNIFNGTVVQRHPSHAVTFVDNHDSQPEEALESFVEEWFKPLAYALTLTREQGYPSVFYGDYYGIPTHGVPAMRSKIDPILEARQKYAYGKQNDYLDHHNIIGWTREGNTAHPNSGLATIMSDGAGGSKWMFVGRNKAGQVWSDITGNRTGTVTINADGWGNFSVNGGSVSIWVNK

SEQ ID NO: 22291 - protein, 484 aa, Bacillus sp.
HHNGTNGTLMQYFEWYLPNDGNHWNRLRSDASNLKDKGISAVWIPPAWKGASQNDVGYGAYDLYDLGEFNQKGTIRTKYGTRNQLQAAVNALKSNGIQVYGDVVMNHKGGADATEMVKAVEVNPNNRNQEVSGEYTIEAWTKFDFPGRGNTHSNFKWRWYHFDGVDWDQSRKLNNRIYKFRGGKGWDWEVDTEFGNYDYLLYADIDMDHPEVVNELRNWGVWYTNTLGLDGFRIDAVKHIKYSFTRDWINHVRSATGKNMFAVAEFWKNDLGAIENYLNKTNWNHSVFDVPLHYNLYNASKSGGNYDMRQIFNGTVVQKHPTHAVTFVDNHDSQPEEALESFVEEWFKPLAYALTLTREQGYPSVFYGDYYGIPTHGVPAMKSKIDPILEARQKYAYGRQNDYLDHHNIIGWTREGNTAHPNSGLATIMSDGAGGNKWMFVGRNKAGQVWTDITGNKAGTVTINADGWGNFSVNGGSVSIWVNK

SEQ ID NO: 22292 - protein, 485 aa, Bacillus sp. 707
HHNGTNGTMMQYFEWYLPNDGNHWNRLNSDASNLKSKGITAVWIPPAWKGASQNDVGYGAYDLYDLGEFNQKGTVRTKYGTRSQLQAAVTSLKNNGIQVYGDVVMNHKGGADATEMVRAVEVNPNNRNQEVTGEYTIEAWTRFDFPGRGNTHSSFKWRWYHFDGVDWDQSRRLNNRIYKFRGHGKAWDWEVDTENGNYDYLMYADIDMDHPEVVNELRNWGVWYTNTLGLDGFRIDAVKHIKYSFTRDWINHVRSATGKNMFAVAEFWKNDLGAIENYLQKTNWNHSVFDVPLHYNLYNASKSGGNYDMRNIFNGTVVQRHPSHAVTFVDNHDSQPEEALESFVEEWFKPLAYALTLTREQGYPSVFYGDYYGIPTHGVPAMRSKIDPILEARQKYAYGKQNDYLDHHNIIGWTREGNTAHPNSGLATIMSDGAGGSKWMFVGRNKAGQVWCDITGNRTGTVTINADGWGNFSVNGGSVSIWVNK

SEQ ID NO: 22293 - protein, 485 aa, Bacillus sp. 707
HHNGTNGTMMQYFEWYLPNDGNHWNRLNSDASNLKSKGITAVWIPPAWKGASQNDVGYGAYDLYDLGEFNQKGTVRTKYGTRSQLQAAVTSLKNNGIQVYGDVVMNHKGGADATEEVRAVEVNPNNRNQEVTGEYTIEAWTRFDFPGRGNTHSSFKWRWYHFDGVDWDQSRRLNNRIYKFRGHGKAWDWEVDTENGNYDYLMYADIDMDHPEVVNELRNWGVWYTNTLGLDGFRIDAVKHIKYSFTRDWINHVRSATGKNMFAVAEFWKNDLGAIENYLQKTNWNHSVFDVPLHYNLYNASKSGGNYDMRNIFNGTVVQRHPSHAVTFVDNHDSQPEEALESFVEEWFKPLAYALTLTREQGYPSVFYGDYYGIPTHGVPAMRSKIDPILEARQKYAYGKQNDYLDHHNIIGWTREGNTAHPNSGLATIMSDGAGGSKWMFVGRNKAGQVWSDITGNRTGTVTINADGWGNFSVNGGSVSIWVNK

SEQ ID NO: 22294 - protein, 483 aa, Bacillus sp.
HHNGTNGTLMQYFEWYLPNDGNHWNRLRSDASNLKDKGISAVWIPPAWKGASQNDVGYGAYDLYDLGEFNQKGTIRTKYGTRNQLQAAVNALKSNGIQVYGDVVMNHKGGADATEMVKAVEVNPNNRNQEVSGEYTIEAWTKFDFPGRGNTHSNFKWRWYHFDGVDWDQSRKLNNRIYKFRGKGWDWEVDTEFGNYDYLTYADIDMDHPEVVNELRNWGVWYTNTLGLDGFRIDAVKHIKYSFTRDWINHVRSATGKNMFAVAEFWKNDLGAIENYLNKTNWNHSVFDVPLHYNLYNASKSGGNYDMRQIFNGTVVQKHPTHAVTFVDNHDSQPEEALESFVEEWFKPLAYALTLTREQGYPSVFYGDYYGIPTHGVPAMKSKIDPILEARQKYAYGRQNDYLDHHNIIGWTREGNTAHPNSGLATIMSDGAGGNKWMFVGRNKAGQVWTDITGNKAGTVTINADGWGNFSVNGGSVSIWVNK

SEQ ID NO: 22295 - protein, 485 aa, Bacillus sp.
HHNGTNGTLMQYFEWYLPNDGNHWNRLRSDASNLKDKGISAVWIPPAWKGASQNDVGYGAYDLYDLGEFNQKGTIRTKYGTRNQLQAAVNALKSNGIQVYGDVVMNHKGGADATEMVRAVEVNPNNRNQEVSGEYTIEAWTKFDFPGRGNTHSNFKWRWYHFDGVDWDQSRKLNNRIYKFRGDGKGWDWEVDTENGNYDYLLYADIDMDHPEVVNELRNWGVWYTNTLGLDGFRIDAVKHIKYSFTRDWINHVRSATGKNMFAVAEFWKNDLGAIENYLNKTNWNHSVFDVPLHYNLYNASKSGGNYDMRQIFNGTVVQRHPMHAVTFVDNHDSQPEEALESFVEEWFKPLAYALTLTREQGYPSVFYGDYYGIPTHGVPAMKSKIDPILEARQKYAYGRQNDYLDHHNIIGWTREGNTAHPNSGLATIMSDGAGGNKWMFVGRNKAGQVWTDITGNRAGTVTINADGWGNFSVNGGSVSIWVNK

SEQ ID NO: 22296 - protein, 485 aa, Bacillus sp. 707
HHNGTNGTMMQYFEWYLPNDGNHWNRLNSDASNLKSKGITAVWIPPAWKGASQNDVGYGAYDLYDLGEFNQKGTVRTKYGTRSQLQAAVTSLKNNGIQVYGDVVMNHKGGADATEMVRAVEVNPNNRNQEVTGEYTIEAWTRFDFPGRGNTHSSFKWRWYHFDGVDWDQSRRLNNRIYKFRGHGKAWDWEVDTENGNYDYLMYADIDMDHPEVVNELRNWGVWYTNTLGLDGFRIDAVKHIKYSFTRDWINHVRSATGKNMFAVAEFWKNDLGAIENYLQKTNWNHSVFDVPLHYNLYNASKSGGNYDMRNIFNGTVVQRHPSHAVTFVDNHDSQPEEALESFVEEWFKPLAYALTLTREQGYPSVFYGDYYGIPTHGVPAMRSKIDPILEARQKYAYGKQNDYLDHHNIIGWTREGNTLHPNSGLATIMSDGAGGSKWMFVGRNKAGQVWSDITGNRTGTVTINADGWGNFSVNGGSVSIWVNK

SEQ ID NO: 22297 - protein, 485 aa, Bacillus sp. 707
HHNGTNGTMMQYFEWYLPNDGNHWNRLGSDASNLKSKGITAVWIPPAWKGASQNDVGYGAYDLYDLGEFNQKGTVRTKYGTRSQLQAAVTSLKNNGIQVYGDVVMNHKGGADATEMVRAVEVNPNNRNQEVTGEYTIEAWTRFDFPGRGNTHSSFKWRWYHFDGVDWDQSRRLNNRIYKFRGHGKAWDWEVDTENGNYDYLMYADIDMDHPEVVNELRNWGVWYTNTLGLDGFRIDAVKHIKYSFTRDWINHVRSATGKNMFAVAEFWKNDLGAIENYLQKTNWNHSVFDVPLHYNLYNASKSGGNYDMRNIFNGTVVQRHPSHAVTFVDNHDSQPEEALESFVEEWFKPLAYALTLTREQGYPSVFYGDYYGIPTHGVPAMRSKIDPILEARQKYAYGKQNDYLDHHNIIGWTREGNTAHPNSGLATIMSDGAGGSKWMFVGRNKAGQVWSDITGNRTGTVTINADGWGNFSVNGGSVSIWVNK

SEQ ID NO: 22298 - protein, 485 aa, Bacillus sp. 707
HHNGTNGTMMQYFEWYLPNDGNHWNRLNSDASNLKSKGITAVWIPPAWKGASQNDVGYGAYDLYDLGEFNQKGTVRTKYGTRSQLQAAVTSLKNNGIQVYGDVVMNHKGGADATEMVRAVEVNPNNRNQEVTGEYTIEAWTRFDFPGRGNTHSSFKWRWYHFDGVDWDQSRRLNNRIYKFRGHGKAWDWEVDTENGNYDYLMYADIDMDHPEVVNELRNWGVWYTNTLGLDGFRIDAVKHIKYSFTRDWINHVRSATGKNMFAVAEFWKNDLGAIENYLQKTNWNHSVFDVPLHYNLYNASKSGGNYDMRNIFNGTVVQRHPSHAVTFVDNHDSQPEEALESFVEEWFKPLAYALTLTREQGYPSVFYGDYYGIPTHGVPAMRSKIDPILEARQKYAYGKQNDYLDHHNIIGWTREGNTGHPNSGLATIMSDGAGGSKWMFVGRNKAGQVWSDITGNRTGTVTINADGWGNFSVNGGSVSIWVNK

SEQ ID NO: 22299 - protein, 485 aa, Bacillus sp.
HHNGTNGTMMQYFEWYLPNDGNHWNRLRSDASNLKDKGISAVWIPPAWKGASQNDVGYGAYDLYDLGEFNQKGTIRTKYGTRNQLQAAVNALKSNGIQVYGDVVMNHKGGADATEMVRAVEVNPNNRNQEVSGEYTIEAWTKFDFPGRGNTHSNFKWRWYHFDGVDWDQSRKLNNRIYKFRGDGKGWDWEVDTENGNYDYLVYADIDMDHPEVTNELRNWGVWYTNTLGLDGFRIDAVKHIKYSFTRDWINHVRSATGKNMFAVAEFWKNDLGAIENYLNKTNWNHSVFDVPLHYNLYNASKSGGNYDMRQIFNGTVVQRHPMHAVTFVDNHDSQPEEALESFVEEWFKPLAYALTLTREQGYPSVFYGDYYGIPTHGVPAMKSKIDPILEARQKYAYGRQNDYLDHHNIIGWTREGNTAHPNSGLATIMSDGAGGNKWMFVGYNKAGQVWTDITGNRAGTVTINADGWGNFSVNGGSVSIWVNK

SEQ ID NO: 22300 - protein, 485 aa, Bacillus sp. 707
HHNGTNGTMMQYFEWYLPNDGNHWNRLNSDASNLKSKGITAVWIPPAWKGASQNDVGYGAYDLYDLGEFNQKGTVRTKYGTRSQLQAAVTSLKNNGIQVYGDVVMNHKGGADATEMVRAVEVNPNNRNQEVTGEYTIEAWTRFDFPGRGNTHSSFKWRWYHFDGVDWDQSRRLNNRIYKFRGHGKAWDWEVDTENGNYDYLMYADIDMDHPEVVNELRNWGVWYTNTLGLDGFRIDAVKHIKYSFTRDWINHVRSATGKNMFAVAEFWKNDLGAIENYLQKTNWNHSVFDVPLHYNLYNASKSGGNYDMRNIFNGTVVQRHPSHAVTFVDNHDSQPEEALESFVEEWFKPLAYALTLTREQGYPSVFYGDYYGIPTHGVPAMRSKIDPILEARQKYAYGKQNDYLDHHNIIGWTREGNTAHPNSGLATIMSDGAGGSKWMFVGRNKAGQVWQDITGNRTGTVTINADGWGNFSVNGGSVSIWVNK

SEQ ID NO: 22301 - protein, 485 aa, Bacillus sp. 707
HHNGTNGTMMQYFEWYLPNDGNHWNRLNSDASNLKSKGITAVWIPPAWKGASQNDVGYGAYDLYDLGEFNQKGTVRTKYGTRSQLQAAVTSLKNNGIQVYGDVVMNHKGGADATEMVRAVEVNPNNRNQEVTGEYTIEAWTRFDFPGRGNTHSSFKWRWYHFDGVDWDQSRRLLNRIYKFRGHGKAWDWEVDTENGNYDYLMYADIDMDHPEVVNELRNWGVWYTNTLGLDGFRIDAVKHIKYSFTRDWINHVRSATGKNMFAVAEFWKNDLGAIENYLQKTNWNHSVFDVPLHYNLYNASKSGGNYDMRNIFNGTVVQRHPSHAVTFVDNHDSQPEEALESFVEEWFKPLAYALTLTREQGYPSVFYGDYYGIPTHGVPAMRSKIDPILEARQKYAYGKQNDYLDHHNIIGWTREGNTAHPNSGLATIMSDGAGGSKWMFVGRNKAGQVWSDITGNRTGTVTINADGWGNFSVNGGSVSIWVNK

SEQ ID NO: 22302 - protein, 485 aa, Bacillus sp. 707
HHNGTNGTMMQYFEWYLPNDGNHWNRLNSDASNLKSKGITAVWIPPAWKGASQNDVGYGAYDLYDLGEFNQKGTVRTKYGTRSQLQAAVTSLKNNGIQVYGDVVMNHKGGADATEMVRAVEVNPNNRNQEVTGEYTIEAWTRFDFPGRGNTHSSFKWRWYHFDGVDWDQSRRLHNRIYKFRGHGKAWDWEVDTENGNYDYLMYADIDMDHPEVVNELRNWGVWYTNTLGLDGFRIDAVKHIKYSFTRDWINHVRSATGKNMFAVAEFWKNDLGAIENYLQKTNWNHSVFDVPLHYNLYNASKSGGNYDMRNIFNGTVVQRHPSHAVTFVDNHDSQPEEALESFVEEWFKPLAYALTLTREQGYPSVFYGDYYGIPTHGVPAMRSKIDPILEARQKYAYGKQNDYLDHHNIIGWTREGNTAHPNSGLATIMSDGAGGSKWMFVGRNKAGQVWSDITGNRTGTVTINADGWGNFSVNGGSVSIWVNK

SEQ ID NO: 22303 - protein, 485 aa, Bacillus sp. 707
HHNGTNGTMMQYFEWYLPNDGNHWNRLNSDASNLKSKGITAVWIPPAWKGASQNDVGYGAYDLYDLGEFNQKGTVRTKYGTRSQLQAAVTSLKNNGIQVYGDVVMNHKGGADATEMVRAVEVNPNNRNQEVTGEYTIEAWTRFDFPGRGNTHSSFKWRWYHFDGVDWDQSRRLNNRIYKFRGHGKAWDWEVDTENGNYDYLMYADIDMDHPEVVNELRNWGVWYTNTLGLDGFRIDAVKHIKYSFTRDWINHVRSATGKNMFAVAEFWKNDLGAIENYLQKTNWNHSVFDVPLHYNLYNASKSGGNYDMRNIFNGTVVQRHPSHAVTFVDNHDSQPEEALESFVEEWFKPLAYALTLTREQGYPSVFYGDYYGIPTHGVPAMRSKIDPILEARQKYAYGKQNDYLDHHNIIGWTREGNTAHPNSGLATIMSDGAGGSKWMFVGRNKAGQVWSDITGNRTGTVTINADGWGNFSVNGGSVSIWVEK

SEQ ID NO: 22304 - protein, 485 aa, Bacillus sp. 707
HHNGTNGTMMQYFEWYLPNDGNHWNRLNSDASNLKSKGITAVWIPPAWKGASQNDVGYGAYDLYDLGEFNQKGTVRTKYGTRSQLQAAVTSLKNNGIQVYGDVVMNHKGGADATEQVRAVEVNPNNRNQEVTGEYTIEAWTRFDFPGRGNTHSSFKWRWYHFDGVDWDQSRRLNNRIYKFRGHGKAWDWEVDTENGNYDYLMYADIDMDHPEVVNELRNWGVWYTNTLGLDGFRIDAVKHIKYSFTRDWINHVRSATGKNMFAVAEFWKNDLGAIENYLQKTNWNHSVFDVPLHYNLYNASKSGGNYDMRNIFNGTVVQRHPSHAVTFVDNHDSQPEEALESFVEEWFKPLAYALTLTREQGYPSVFYGDYYGIPTHGVPAMRSKIDPILEARQKYAYGKQNDYLDHHNIIGWTREGNTAHPNSGLATIMSDGAGGSKWMFVGRNKAGQVWSDITGNRTGTVTINADGWGNFSVNGGSVSIWVNK

SEQ ID NO: 22305 - protein, 485 aa, Bacillus sp.
HHNGTNGTMMQYFEWYLPNDGNHWNRLRSDASNLKDKGISAVWIPPAWKGASQNDVGYGAYDLYDLGEFNQKGTIRTKYGTRNQLQAAVNALKSNGIQVYGDVVMNHKGGADATEMVRAVEVNPNNRNQEVSGEYTIEAWTKFDFPGRGNTHSNFKWRWYHFDGVDWDQSRKLNNRIYKFRGDGKGWDWEVDTENGNYDYLTYADIDMDHPEVVNELRNWGVWYTNTLGLDGFRIDAVKHIKYSFTRDWINHVRSATGKNMFAVAEFWKNDLGAIENYLNKTNWNHSVFDVPLHYNLYNASKSGGNYDMRQIFNGTVVQRHPTHAVTFVDNHDSQPEEALESFVEEWFKPLAYALTLTREQGYPSVFYGDYYGIPTHGVPAMKSKIDPILEARQKYAYGRQNDYLDHHNIIGWTREGNTAHPNSGLATIMSDGAGGNKWMFVGRNKAGQVWTDITGNRAGTVTINADGWGNFSVNGGSVSIWVNK

SEQ ID NO: 22306 - protein, 485 aa, Bacillus sp. 707
HHNGTNGTMMQYFEWYLPNDGNHWNRLNSDASNLKSKGITAVWIPPAWKGASQNDVGYGAYDLYDLGEFNQKGTVRTKYGTRSQLQAAVTSLKNNGIQVYGDVVMNHKGGADATEMVRAVEVNPNNRNQEVTGEYTIEAWTRFDFPGRGNTHSSFKWRWYHFDGVDWDQSRRLNNRIYKFRGHGKAWDWEVDTENGNYDYLMYADIDMDHPEVVNELRNWGVWYTNTLGLDGFRIDAVKHIKYSFTRDWINHVRSATGKNMFAVAEFWKNDLGAIENYLQKTNWNHSVFDVPLHYNLYNASKSGGNYDMRFIFNGTVVQRHPSHAVTFVDNHDSQPEEALESFVEEWFKPLAYALTLTREQGYPSVFYGDYYGIPTHGVPAMRSKIDPILEARQKYAYGKQNDYLDHHNIIGWTREGNTAHPNSGLATIMSDGAGGSKWMFVGRNKAGQVWSDITGNRTGTVTINADGWGNFSVNGGSVSIWVNK

SEQ ID NO: 22307 - protein, 485 aa, Bacillus sp. 707
HHNGTNGTMMQYFEWYLPNDGNHWNRLNSDASNLKSKGITAVWIPPAWKGASQNDVGYGAYDLYDLGEFNQKGTVRTKYGTRSQLQAAVTQLKNNGIQVYGDVVMNHKGGADATEMVRAVEVNPNNRNQEVTGEYTIEAWTRFDFPGRGNTHSSFKWRWYHFDGVDWDQSRRLNNRIYKFRGHGKAWDWEVDTENGNYDYLMYADIDMDHPEVVNELRNWGVWYTNTLGLDGFRIDAVKHIKYSFTRDWINHVRSATGKNMFAVAEFWKNDLGAIENYLQKTNWNHSVFDVPLHYNLYNASKSGGNYDMRNIFNGTVVQRHPSHAVTFVDNHDSQPEEALESFVEEWFKPLAYALTLTREQGYPSVFYGDYYGIPTHGVPAMRSKIDPILEARQKYAYGKQNDYLDHHNIIGWTREGNTAHPNSGLATIMSDGAGGSKWMFVGRNKAGQVWSDITGNRTGTVTINADGWGNFSVNGGSVSIWVNK

SEQ ID NO: 22308 - protein, 485 aa, Bacillus sp. 707
HHNGTNGTMMQYFEWYLPNDGNHWNRLNSDASNLKSKGITAVWIPPAWKGASQNDVGYGAYDLYDLGEFNQKGTVRTKYGTRSQLQKAVTSLKNNGIQVYGDVVMNHKGGADATEMVRAVEVNPNNRNQEVTGEYTIEAWTRFDFPGRGNTHSSFKWRWYHFDGVDWDQSRRLNNRIYKFRGHGKAWDWEVDTENGNYDYLMYADIDMDHPEVVNELRNWGVWYTNTLGLDGFRIDAVKHIKYSFTRDWINHVRSATGKNMFAVAEFWKNDLGAIENYLQKTNWNHSVFDVPLHYNLYNASKSGGNYDMRNIFNGTVVQRHPSHAVTFVDNHDSQPEEALESFVEEWFKPLAYALTLTREQGYPSVFYGDYYGIPTHGVPAMRSKIDPILEARQKYAYGKQNDYLDHHNIIGWTREGNTAHPNSGLATIMSDGAGGSKWMFVGRNKAGQVWSDITGNRTGTVTINADGWGNFSVNGGSVSIWVNK

SEQ ID NO: 22309 - protein, 485 aa, Bacillus sp. 707
HHNGTNGTMMQYFEWYLPNDGNHWNRLNSDASNLKSKGITAVWIPPAWKGASQNDVGYGAYDLYDLGEFNQKGTVRTKYGTRSQLQAAVTSLKNNGIQVYGDVVMNHKGGADATEMVRAVEVNPNNRNQEVTGEYTIEAWTGFDFPGRGNTHSSFKWRWYHFDGVDWDQSRRLNNRIYKFRGHGKAWDWEVDTENGNYDYLMYADIDMDHPEVVNELRNWGVWYTNTLGLDGFRIDAVKHIKYSFTRDWINHVRSATGKNMFAVAEFWKNDLGAIENYLQKTNWNHSVFDVPLHYNLYNASKSGGNYDMRNIFNGTVVQRHPSHAVTFVDNHDSQPEEALESFVEEWFKPLAYALTLTREQGYPSVFYGDYYGIPTHGVPAMRSKIDPILEARQKYAYGKQNDYLDHHNIIGWTREGNTAHPNSGLATIMSDGAGGSKWMFVGRNKAGQVWSDITGNRTGTVTINADGWGNFSVNGGSVSIWVNK

SEQ ID NO: 22310 - protein, 485 aa, Bacillus sp. 707
HHNGTNGTMMQYFEWYLPNDGNHWNRLNSDASNLKSKGITAVWIPPAWKGASQNDVGYGAYDLYDLGEFNQKGTVRTKYGTRSQLQAAVTSLKNNGIQVYGDVVMNHKGGADATEMVRAVEVNPNNRNQEVTGEYTIEAWTRFDFPGRGNTHSSFKWRWYHFDGVDWDQSRRLNNRIYKFRGHGKAWDWEVDTENGNYDYLMYADIDMDHPEVVNELRNWGVWYTNTLGLDGFRIDAVKHIKYSFTRDWINHVRSATGKNMFAVAEFWKNDLGAIENYLQKTNWNHSVFDVPLHYNLYNASKSGGNYDMRNIFNGTVVQNHPSHAVTFVDNHDSQPEEALESFVEEWFKPLAYALTLTREQGYPSVFYGDYYGIPTHGVPAMRSKIDPILEARQKYAYGKQNDYLDHHNIIGWTREGNTAHPNSGLATIMSDGAGGSKWMFVGRNKAGQVWSDITGNRTGTVTINADGWGNFSVNGGSVSIWVNK

SEQ ID NO: 22311 - protein, 485 aa, Bacillus sp. 707
HHNGTNGTMMQYFEWYLPNDGNHWNRLNSDASNLCSKGITAVWIPPAWKGASQNDVGYGAYDLYDLGEFNQKGTVRTKYGTRSQLQAAVTSLKNNGIQVYGDVVMNHKGGADATEMVRAVEVNPNNRNQEVTGEYTIEAWTRFDFPGRGNTHSSFKWRWYHFDGVDWDQSRRLNNRIYKFRGHGKAWDWEVDTENGNYDYLMYADIDMDHPEVVNELRNWGVWYTNTLGLDGFRIDAVKHIKYSFTRDWINHVRSATGKNMFAVAEFWKNDLGAIENYLQKTNWNHSVFDVPLHYNLYNASKSGGNYDMRNIFNGTVVQRHPSHAVTFVDNHDSQPEEALESFVEEWFKPLAYALTLTREQGYPSVFYGDYYGIPTHGVPAMRSKIDPILEARQKYAYGKQNDYLDHHNIIGWTREGNTAHPNSGLATIMSDGAGGSKWMFVGRNKAGQVWSDITGNRTGTVTINADGWGNFSVNGGSVSIWVNK

SEQ ID NO: 22312 - protein, 485 aa, Bacillus sp. 707
HHNGTNGTMMQYFEWYLPNDGNHWNRLNYDASNLKSKGITAVWIPPAWKGASQNDVGYGAYDLYDLGEFNQKGTVRTKYGTRSQLQAAVTSLKNNGIQVYGDVVMNHKGGADATEMVRAVEVNPNNRNQEVTGEYTIEAWTRFDFPGRGNTHSSFKWRWYHFDGVDWDQSRRLNNRIYKFRGHGKAWDWEVDTENGNYDYLMYADIDMDHPEVVNELRNWGVWYTNTLGLDGFRIDAVKHIKYSFTRDWINHVRSATGKNMFAVAEFWKNDLGAIENYLQKTNWNHSVFDVPLHYNLYNASKSGGNYDMRNIFNGTVVQRHPSHAVTFVDNHDSQPEEALESFVEEWFKPLAYALTLTREQGYPSVFYGDYYGIPTHGVPAMRSKIDPILEARQKYAYGKQNDYLDHHNIIGWTREGNTAHPNSGLATIMSDGAGGSKWMFVGRNKAGQVWSDITGNRTGTVTINADGWGNFSVNGGSVSIWVNK

SEQ ID NO: 22313 - protein, 485 aa, Bacillus sp. 707
HHNGTNGTMMQYFEWYLPNDGNHWNRLNSDASNLKSKGITAVWIPPAWKGASQNDVGYGAYDLYDLGEFNQKGTVRTKYGTRSQLQAAVTSLKNNGIQVYGDVVMNHKGGADATEMVGAVEVNPNNRNQEVTGEYTIEAWTRFDFPGRGNTHSSFKWRWYHFDGVDWDQSRRLNNRIYKFRGHGKAWDWEVDTENGNYDYLMYADIDMDHPEVVNELRNWGVWYTNTLGLDGFRIDAVKHIKYSFTRDWINHVRSATGKNMFAVAEFWKNDLGAIENYLQKTNWNHSVFDVPLHYNLYNASKSGGNYDMRNIFNGTVVQRHPSHAVTFVDNHDSQPEEALESFVEEWFKPLAYALTLTREQGYPSVFYGDYYGIPTHGVPAMRSKIDPILEARQKYAYGKQNDYLDHHNIIGWTREGNTAHPNSGLATIMSDGAGGSKWMFVGRNKAGQVWSDITGNRTGTVTINADGWGNFSVNGGSVSIWVNK

SEQ ID NO: 22314 - protein, 485 aa, Bacillus sp. 707
HHNGTNGTMMQYFEWYLPNDGNHWNRLNSDASNLKSKGITAVWIPPAWKGASQNDVGYGAYDLYDLGEFNQKGTVRTKYGTRSQLQAAVTSLKNNGIQVYGDVVMNHKGGADATEIVRAVEVNPNNRNQEVTGEYTIEAWTRFDFPGRGNTHSSFKWRWYHFDGVDWDQSRRLNNRIYKFRGHGKAWDWEVDTENGNYDYLMYADIDMDHPEVVNELRNWGVWYTNTLGLDGFRIDAVKHIKYSFTRDWINHVRSATGKNMFAVAEFWKNDLGAIENYLQKTNWNHSVFDVPLHYNLYNASKSGGNYDMRNIFNGTVVQRHPSHAVTFVDNHDSQPEEALESFVEEWFKPLAYALTLTREQGYPSVFYGDYYGIPTHGVPAMRSKIDPILEARQKYAYGKQNDYLDHHNIIGWTREGNTAHPNSGLATIMSDGAGGSKWMFVGRNKAGQVWSDITGNRTGTVTINADGWGNFSVNGGSVSIWVNK

SEQ ID NO: 22315 - protein, 485 aa, Bacillus sp. 707
HHNGTNGTMMQYFEWYLPNDGNHWNRLNSDASNLKSKGITAVWIPPAWKGASQNDVGYGAYDLYDLGEFNQKGTVRTKYGTRSQLQAAVTSLKNNGIQVYGDVVMNHKGGADATEMVRAVEVNPNNRNQEVTGEYTIEAWTRFDFPGRGNTHSSFKWRWYHFDGVDWDQSRRLNNRIYKFRGHGKAWDWEVDTENGNYDYLMYADIDMDHPEVVNELRNWGVWYTNTLGLDGFRIDAVKHIKYSFTRDWINHVRSATGKNMFAVAEFWKNDLGAIENYLQKTNWNHSVFDVPLHYNLYNASKSGGNYDMRNIFNGTVVQQHPSHAVTFVDNHDSQPEEALESFVEEWFKPLAYALTLTREQGYPSVFYGDYYGIPTHGVPAMRSKIDPILEARQKYAYGKQNDYLDHHNIIGWTREGNTAHPNSGLATIMSDGAGGSKWMFVGRNKAGQVWSDITGNRTGTVTINADGWGNFSVNGGSVSIWVNK

SEQ ID NO: 22316 - protein, 485 aa, Bacillus sp. 707
HHNGTNGTMMQYFEWYLPNDGNHWNRLNSDASNLKSKGITAVWIPPAWKGASQNDVGYGAYDLYDLGEFNQKGTVRTKYGTRSQLQAAVTSLKNNGIQVYGDVVMNHKGGADATEMVRAVEVNPNNRNQEVTGEYTIEAWTHFDFPGRGNTHSSFKWRWYHFDGVDWDQSRRLNNRIYKFRGHGKAWDWEVDTENGNYDYLMYADIDMDHPEVVNELRNWGVWYTNTLGLDGFRIDAVKHIKYSFTRDWINHVRSATGKNMFAVAEFWKNDLGAIENYLQKTNWNHSVFDVPLHYNLYNASKSGGNYDMRNIFNGTVVQRHPSHAVTFVDNHDSQPEEALESFVEEWFKPLAYALTLTREQGYPSVFYGDYYGIPTHGVPAMRSKIDPILEARQKYAYGKQNDYLDHHNIIGWTREGNTAHPNSGLATIMSDGAGGSKWMFVGRNKAGQVWSDITGNRTGTVTINADGWGNFSVNGGSVSIWVNK

SEQ ID NO: 22317 - protein, 485 aa, Bacillus sp.
HHNGTNGTMMQYFEWHLPNDGNHWNRLRDDAANLKSKGITAVWIPPAWKGTSQNDVGYGAYDLYDLGEFNQKGTVRTKYGTRSQLQGAVTSLKNNGIQVYGDVVMNHKGGADGTEMVNAVEVNRSNRNQEISGEYTIEAWTKFDFPGRGNTHSNFKWRWYHFDGTDWDQSRQLQNKIYKFRGTGKAWDWEVDIENGNYDYLMYADIDMDHPEVINELRNWGVWYTNTLNLDGFRIDAVKHIKYSYTRDWLTHVRNTTGKPMFAVAXFWKNDLAAIENYLNKTSWNHSVFDVPLHYNLYNASNSXGYFDMRNILNGSVVQKHPIHAVTFVDNHDSQPGEALESFVQSWFKPLAYALILTREQGYPSVFYGDYYGIPTHGVPSMKSKIDPLLQARQTYAYGTQHDYFDHHDIIGWTREGDSSHPNSGLATIMSDGPGGNKWMYVGKHKAGQVWRDITGNRSGTVTINADGWGNFTVNGGAVSVWVKQ

SEQ ID NO: 22318 - protein, 485 aa, Bacillus sp. 707
HHNGTNGTMMQYFEWYLPNDGNHWNRLNSDASNLKSKGITAVWIPPAWKGASQNDVGYGAYDLYDLGEFNQKGTVRTKYGTRSQLQAAVTSLKNNGIQVYGDVVMNHKGGADATEMVRAVEVNPNNRNQEVTGEYTIEAWTRFDFPGRGNTHSSFKWRWYHFDGVDWDQSRRLNNRIYKFRGHGKAWDWEVDTENGNYDYLMYADIDMDHPEVVNELRNWGVWYTNTLGLDGFRIDAVKHIKYSFTRDWINHVRSATGKNMFAVAEFWKNDLGAIENYLQKTNWNHSVFDVPLHYNLYNASKSGGNYDMRNIFNGTVVQRHPSHAVTFVDNHDSQPEEALESFVEEWFKPLAYALTLTREQGYPSVFYGDYYGIPTHGVPAMRSKIDPILEARQKYAYGKQNDYLDHHNIIGWTREGNTAHPNSGLATIMSDGAGGSKWMFVGRNKAGQVWSDITGNRTGTVTINADGWGNFSVNGGSVSIWVSK

SEQ ID NO: 22319 - protein, 485 aa, Bacillus sp. 707
HHNGTNGTMMQYFEWYLPNDGNHWNRLNSDASNLKSKGITAVWIPPAWKGASQNDVGYGAYDLYDLGEFNQKGTVRTKYGTRSQLQAAVTSLKNNGIQVYGDVVMNHKGGADATEMVRAVEVNPNNRNQEVTGEYTIEAWTRFDFPGRGNTHSSFKWRWYHFDGVDWDQSRRLNNRIYKFRGHGKAWDWEVDTENGNYDYLMYADIDMDHPEVVNELRNWGVWYTNTLGLDGFRIDAVKHIKYSFTRDWINHVRSATGKNMFAVAEFWKNDLGAIENYLQKTNWNHSVFDVPLHYNLYNASKSGGNYDMRNIFNGTVVQRHPSHAVTFVDNHDSQPEEALESFVEEWFKPLAYALTLTREQGYPSVFYGDYYGIPTHGVPAMRSKIDPILEARQKYAYGKQNDYLDHHNIIGWTREGNTAHPNSGLATIMSDGAGGSKWMFVGRNKAGQVWSDITGNNTGTVTINADGWGNFSVNGGSVSIWVNK

SEQ ID NO: 22320 - protein, 485 aa, Bacillus sp. 707
HHNGTNGTMMQYFEWYLPNDGNHWNRLNSDASNLKSKGITAVWIPPAWKGASQNDVGYGAYDLYDLGEFNQKGTVRTKYGTRSQLQAAVTSLKNNGIQVYGDVVMNHKGGADATEMVRAVEVNPNNRNQEVTGEYTIEAWTRFDFPGRGNTHSSFKWRWYHFDGVDWDQSRRLNNRIYKFRGHGKAWDWEVDTENGNYDYLMYADIDMDHPEVVNELRNWGVWYTNTLGLDGFRIDAVKHIKYSFTRDWINHVRSATGKNMFAVAEFWKNDLGAIENYLQKTNWNHSVFDVPLHYNLYNASKSGGNYDMRNIFNGTVVQRHPSHAVTFVDNHDSQPEEALESFVEEWFKPLAYALTLTREQGYPSVFYGDYYGIPTHGVPAMRSKIDPILEARQKYAYGKQNDYLDHHNIIGWTREGNTAHPNSGLATIMSDGAGGSKWMFVGRNKAGQVWYDITGNRTGTVTINADGWGNFSVNGGSVSIWVNK

SEQ ID NO: 22321 - protein, 483 aa, Bacillus sp. SP70
HHNGTNGTMMQYFEWYLPNDGNHWNRLNSDASNLKSKGITAVWIPPAWKGASQNDVGYGAYDLYDLGEFNQKGTVRTKYGTRSQLQAAVTSLKNNGIQVYGDVVMNHKGGADATEMVRAVEVNPNNRNQEVTGEYTIEAWTRFDFPGRGNTHSSFKWRWYHFDGVDWDQSRRLNNRIYKFRGKAWDWEVDTENGNYDYLMYADIDMDHPEVVNELRNWGVWYTNTLGLDGFRIDAVKHIKYSFTRDWINHVRSATGKDMFAVAEFWKNDLGAIENYLQKTNWNHSVFDVPLHYNLYNASKSGGNYDMRNIFNGTVVQRHPSHAVTFVDNHDSQPEEALESFVEEWFKPLAYALTLTREQGYPSVFYGDYYGIPTHGVPAMRSKIDPILEARQKYAYGKQNDYLDHHNIIGWTREGNTAHPNSGLATIMSDGAGGSKWMFVGRNKAGQVWSDITGNRTGTVTINADGWGNFSVNGGSVSIWVNK

SEQ ID NO: 22322 - protein, 485 aa, Bacillus sp. 707
HHNGTNGTMMQYFEWYLPNDGNHWNRLNSDASNLKSKGITAVWIPPAWKGASQNDVGYGAYDLYDLGEFNQKGTVRTKYGTRSQLQAAVTSLKNNGIQVYGDVVMNHKGGADATEMVRAVEVNPNNRNQEVTGEYTIEAWTRFDFPGRGNTHSSFKWRWYHFDGVDWDQSRRLNNRIYKFRGHGKAWDWEVDTENGNYDYLMYADIDMDHPEVVNELRNWGVWYTNTLGLDGFRIDAVKHIKYSFTRDWINHVRSATGKNMFAVAEFWKNDLGAIENYLQKTNWNHSVFDVPLHYNLYNASKSGGNYDMRNIFNGTVVQRHPSHAVTFVDNHDSQPEEALESFVEEWFKPLAYALTLTREQGYPSVFYGDYYGIPTHGVPAMRSKIDPILEARQKYAYGFQNDYLDHHNIIGWTREGNTAHPNSGLATIMSDGAGGSKWMFVGRNKAGQVWSDITGNRTGTVTINADGWGNFSVNGGSVSIWVNK

SEQ ID NO: 22323 - protein, 485 aa, Bacillus sp. 707
HHNGTNGTMMQYFEWYLPNDGNHWNRLNSDASNLKSKGITAVWIPPAWKGASQNDVGYGAYDLYDLGEFNQKGTVRTKYGTRSQLQAAVTSLKNNGIQVYGDVVMNHKGGADATEMVRAVEVNPNNRNQEVTGEYTIEAWTRFDFPGRGNTHSSFKWRWYHFDGVDWDQSRRLNNRIYKFRGHGKAWDWEVDTENGNYDYLMYADIDMDHPEVVNELRNWGVWYTNTLGLDGFRIDAVKHIKYSFTRDWIPHVRSATGKNMFAVAEFWKNDLGAIENYLQKTNWNHSVFDVPLHYNLYNASKSGGNYDMRNIFNGTVVQRHPSHAVTFVDNHDSQPEEALESFVEEWFKPLAYALTLTREQGYPSVFYGDYYGIPTHGVPAMRSKIDPILEARQKYAYGKQNDYLDHHNIIGWTREGNTAHPNSGLATIMSDGAGGSKWMFVGRNKAGQVWSDITGNRTGTVTINADGWGNFSVNGGSVSIWVNK

SEQ ID NO: 22324 - protein, 485 aa, Bacillus sp. 707
HHNGTNGTMMQYFEWYLPNDGNHWNRLNSDASNLKSKGITAVWIPPAWKGASQNDVGYGAYDLYDLGEFNQKGTVRTKYGTRSQLQAAVTSLKNNGIQVYGDVVMNHKGGADATEMVRAVEVNPNNRNQEVTGEYTIEAWTRFDFPGRGNTHSSFKWRWYHFDGVDWDQSRRLNNRIYKFRGHGKAWDWEVDTENGNYDYLMYADIDMDHPEVVNELRNWGVWYTNTLGLDGFRIDAVKHIKYSFTRDWINHVRSATGKNMFAVAEFWKNDLGAIENYLQKTNWNHSVFDVPLHYNLYNASKSGGNYDMRNIFNGTVVQRHPSHAVTFVDNHDSQPEEALESFVAEWFKPLAYALTLTREQGYPSVFYGDYYGIPTHGVPAMRSKIDPILEARQKYAYGKQNDYLDHHNIIGWTREGNTAHPNSGLATIMSDGAGGSKWMFVGRNKAGQVWSDITGNRTGTVTINADGWGNFSVNGGSVSIWVNK

SEQ ID NO: 22325 - protein, 485 aa, Bacillus sp. 707
HHNGTNGTMMQYFEWYLPNDGNHWNRLNSDASNLKSKGITAVWIPPAWKGASQNDVGYGAYDLYDLGEFNQKGTVRTKYGTRSQLQAAVTSLKNNGIQVYGDVVMNHKGGADATEMVRAVEVNPNNRNQEVTGEYTIEAWTRFDFPGRGNTHSSFKWRWYHFDGVDWDQSRRLNNRIYKFRGHGKAWDWEVDTENGNYDYLMYADIDMDHPEVVNELRNWGVWYTNTLGLDGFRIDAVKHIKYSFTRDWINHVRSATGKNMFAVAEFWKNDLGAIENYLQKTNWNHSVFDVPLHYNLYNASKSGGNYDMRNIFNGTVVQRHPSHAVTFVDNHDSQPEEALESFVEEWFKPLAYALTLTREQGYPSVFYGDYYGIPTHGVPAMRSKIDPILEARQKYAYGKQNDYLDHHNIIGWTREGNTAHPNSGLATIMSDGAGGSKWMFVGRNKAGQVWSDITGNRTGTVTINADGWGNFSVNGGSVSIWVNQ

SEQ ID NO: 22326 - protein, 485 aa, Bacillus sp. 707
HHNGTNGTMMQYFEWYLPNDGNHWNRLNSDASNLKSKGITAVWIPPAWKGASQNDVGYGAYDLYDLGEFNQKGTVRTKYGTRSQLQAAVTSLKNNGIQVYGDVVMNHKGGADATEMVRAVEVNPNNRNQEVTGEYTIEAWTRFDFPGRGNTHSSFKWRWYHFDGVDWDQSRRLNNRIYKFRGHGKAWDWEVDTENGNYDYLMYADIDMDHPEVVNELRNWGVWYTNTLGLDGFRIDAVKHIKYSFTRDWINHVRSATGKNMFAVAEFWKNDLGAIENYLQKTNWNHSVFDVPLHYNLYNASKSGGNYDMRNIFNGTVVQRHPSHAVTFVDNHDSQPEEALESFVEEWFKPLAYALTLTREQGYPSVFYGDYYGIPTHGVPAMRSKIDPILEARQKYAYGKQNDYLDHHNIIGWTREGNTAHPNSGLATIMSDGAGGSKWMFVGRNKAGQVWSDITGNRTGTVTINADGWGNFSVNGGSVSIWVHK

SEQ ID NO: 22327 - protein, 485 aa, Bacillus sp. 707
HHNGTNGTMMQYFEWYLPNDGNHWNRLNSDASNLKSKGITAVWIPPAWKGASQNDVGYGAYDLYDLGEFNQKGTVRTKYGTRSQLQAAVTSLKNNGIQVYGDVVMNHKGGADATEMVRAVEVNPNNRNQEVTGEYTIEAWTRFDFPGRGNTHSSFKWRWYHFDGVDWDQSRRLNNRIYKFRGHGKAWDWEVDTENGNYDYLMYADIDMDHPEVVNELRNWGVWYTNTLGLDGFRIDAVKHIKYSFTRDWINHVRSATGKNMFAVAEFWKNDLGAIENYLQKTNWNHSVFDVPLHYNLYNASKSGGNYDMRNIFNGTVVQRHPSHAVTFVDNHDSQPEEALESFVEEWFKPLAYALTLTREQGYPSVFYGDYYGIPTHGVPAMRSKIDPILEARQMYAYGKQNDYLDHHNIIGWTREGNTAHPNSGLATIMSDGAGGSKWMFVGRNKAGQVWSDITGNRTGTVTINADGWGNFSVNGGSVSIWVNK

SEQ ID NO: 22328 - protein, 485 aa, Bacillus sp. 707
HHNGTNGTMMQYFEWYLPNDGNHWNRLNSDASNLKSKGITAVWIPPAWKGASQNDVGYGAYDLYDLGEFNQKGTVRTKYGTRSQLQAAVTRLKNNGIQVYGDVVMNHKGGADATEMVRAVEVNPNNRNQEVTGEYTIEAWTRFDFPGRGNTHSSFKWRWYHFDGVDWDQSRRLNNRIYKFRGHGKAWDWEVDTENGNYDYLMYADIDMDHPEVVNELRNWGVWYTNTLGLDGFRIDAVKHIKYSFTRDWINHVRSATGKNMFAVAEFWKNDLGAIENYLQKTNWNHSVFDVPLHYNLYNASKSGGNYDMRNIFNGTVVQRHPSHAVTFVDNHDSQPEEALESFVEEWFKPLAYALTLTREQGYPSVFYGDYYGIPTHGVPAMRSKIDPILEARQKYAYGKQNDYLDHHNIIGWTREGNTAHPNSGLATIMSDGAGGSKWMFVGRNKAGQVWSDITGNRTGTVTINADGWGNFSVNGGSVSIWVNK

SEQ ID NO: 22329 - protein, 485 aa, Bacillus sp. 707
HHNGTNGTMMQYFEWYLPNDGNHWNRLNSDASNLKSKGITAVWIPPAWKGASQNDVGYGAYDLYDLGEFNQKGTVRTKYGTRSQLQAAVTSLKNNGIQVYGDVVMNHKGGADATEMVRAVEVNPNNRNQEVTGEYTIEAWTRFDFPGRGNTHSSFKWRWYHFDGVDWDQSRRLNNRIYKFRGHGKAWDWEVDTENGNYDYLMYADIDMDHPEVVNELRNWGVWYTNTLGLDGFRIDAVKHIKYSFTRDWINHVRSATGKNMFAVAEFWKNDLGAIENYLQKTNWNHSVFDVPLHYNLYNASKSGGNYDMRNIFNGTVVQRHPSHAVTFVDNHDSQPEEALESFVEEWFKPLAYALTLTREQGYPSVFYGDYYGIPTHGVPAMRSKIDPILEARQKYAYGKQNDYLDHHNIIGWTREGNTAHPNSGLATIMSDGQGGSKWMFVGRNKAGQVWSDITGNRTGTVTINADGWGNFSVNGGSVSIWVNK

SEQ ID NO: 22330 - protein, 485 aa, Bacillus sp. 707
HHNGTNGTMMQYFEWYLPNDGNHWNRLNSDASNLKSKGITAVWIPPAWKGASQNDVGYGAYDLYDLGEFNQKGTVRTKYGTRSQLQAAVTSLKNNGIQVYGDVVMNHKGGADATEMVRAVEVNPNNRNQEVTGEYTIEAWTRFDFPGRGNTHSSFKWRWYHFDGVDWDQSRRLNNRIYKFRGHGKAWDWEVDTENGNYDYLMYADIDMDHPEVVNELRNWGVWYTNTLGLDGFRIDAVKHIKYSFTRDWINHVRSATGKNMFAVAEFWKNDLGAIENYLQKTNWNHSVFDVPLHYNLYNASKSGGNYDMRNIFNGTVVQRHPSHAVTFVDNHDSQPEEALESFVEEWFKPLAYALTLTREQGYPSVFYGDYYGIPTHGVPAMRSKIDPILEARQKYAYGKQNDYLDHHNIIGWTREGNTAHPNSGLATIMSDGAGGSKWMFVGRNKAGQVWSDITGNMTGTVTINADGWGNFSVNGGSVSIWVNK

SEQ ID NO: 22331 - protein, 485 aa, Bacillus sp.
HHNGTNGTMMQYFEWYLPNDGNHWNRLRSDASNLKDKGISAVWIPPAWKGASQNDVGYGAYDLYDLGEFNQKGTIRTKYGTRNQLQAAVNALKSNGIQVYGDVVMNHKGGADATEMVRAVEVNPNNRNQEVSEEYTIEAWTKFDFPGRGNTHSNFKWRWYHFDGVDWDQSRKLNNRIYKFRGDGKGWDWEVDTENGNYDYLIYADIDMDHPEVVNELRNWGVWYTNTLGLDGFRIDAVKHIKYSFTRDWINHVRSATGKNMFAVAEFWKNDLGAIENYLNKTNWNHSVFDVPLHYNLYNASKSGGNYDMRQIFNGTVVQRHPMHAVTFVDNHDSQPEEALESFVEEWFKPLAYALTLTREQGYPSVFYGDYYGIPTHGVPAMKSKIDPILEARQKYAYGRQNDYLDHHNIIGWTREGNTAHPNSGLATIMSDGAGGNKWMFVGENKAGQVWTDITGNRAGTVTINADGWGNFSVNGGSVSIWVNK

SEQ ID NO: 22332 - protein, 485 aa, Bacillus sp. 707
HHNGTNGTMMQYFEWYLPNDGNHWNRLNSDASNLKSKGITAVWIPPAWKGASQNDVGYGAYDLYDLGEFNQKGTVRTKYGTRSQLQAAVTSLKNNGIQVYGDVVMNHKGGADATEMVRAVEVNPNNRNQEVTGEYTIEAWTRFDFPGRGNTHSSFKWRWYHFDGVDWDQSRRLNNRIYKFRGHGKAWDWEVDTENGNYDYLMYADIDMDHPEVVNELRNWGVWYTNTLGLDGFRIDAVKHIKYSFTRDWINHVRSATGKNMFAVAEFWKNDLGAIENYLQKTNWNHSVFDVPLHYNLYNASKSGGNYDMRNIFNGTVVQRHPSHAVTFVDNHDSQPEEALESFVEEWFKPLAYALTLTREQGYPSVFYGDYYGIPTHGVPAMRSKIDPILEARQEYAYGKQNDYLDHHNIIGWTREGNTAHPNSGLATIMSDGAGGSKWMFVGRNKAGQVWSDITGNRTGTVTINADGWGNFSVNGGSVSIWVNK

SEQ ID NO: 22333 - protein, 485 aa, Bacillus sp.
HHNGTNGTLMQYFEWYLPNDGNHWNRLRSDASNLKDKGISAVWIPPAWKGASQNDVGYGAYDLYDLGEFNQKGTIRTKYGTRNQLQAAVNALKSNGIQVYGDVVMNHKGGADATEMVRAVEVNPNNRNQEVSGEYTIEAWTKFDFPGRGNTHSNFKWRWYHFDGVDWDQSRKLNNRIYKFRGDGKGWDWEVDTENGNYDYLLYADIDMDHPEVVNELRNWGVWYTNTLGLDGFRIDAVKHIKYSFTRDWINHVRSATGKNMFAVAEFWKNDLGAIENYLNKTNWNHSVFDVPLHFNLYNASKSGGNYDMRQIFNGTVVQRHPMHAVTFVDNHDSQPEESLESFVREWFKPLAYALTLTREQGYPSVFYGDYYGIPTHGVPAMKSKIDPILEARQKYAYGRQNDYLDHHNIIGWTREGNTAHPNSGLATIMSDGAGGNKWMFVGRNKAGQVWTDITGNRAGTVTINADGWGNFSVNGGSVSIWVNK

SEQ ID NO: 22334 - protein, 485 aa, Bacillus sp. 707
HHNGTNGTMMQYFEWYLPNDGNHWNRLNSDASNLKSKGITAVWIPPAWKGASQNDVGYGAYDLYDLGEFNQKGTVRTKYGTRSQLQAAVTSLKNNGIQVYGDVVMNHKGGADATEMVRAVEVNPNNRNQEVTGEYTIEAWTRFDFPGRGNTHSSFKWRWYHFDGVDWDQSRGLNNRIYKFRGHGKAWDWEVDTENGNYDYLMYADIDMDHPEVVNELRNWGVWYTNTLGLDGFRIDAVKHIKYSFTRDWINHVRSATGKNMFAVAEFWKNDLGAIENYLQKTNWNHSVFDVPLHYNLYNASKSGGNYDMRNIFNGTVVQRHPSHAVTFVDNHDSQPEEALESFVEEWFKPLAYALTLTREQGYPSVFYGDYYGIPTHGVPAMRSKIDPILEARQKYAYGKQNDYLDHHNIIGWTREGNTAHPNSGLATIMSDGAGGSKWMFVGRNKAGQVWSDITGNRTGTVTINADGWGNFSVNGGSVSIWVNK

SEQ ID NO: 22335 - protein, 485 aa, Bacillus sp. 707
HHNGTNGTMMQYFEWYLPNDGNHWNRLNSDASNLKSKGITAVWIPPAWKGASQNDVGYGAYDLYDLGEFNQKGTVRTKYGTRSQLQAAVTSLKNNGIQVYGDVVMNHKGGADATEMVRAVEVNPNNRNQEVTGEYTIEAWTRFDFPGRGNTHSSFKWRWYHFDGVDWDQSRRLNNRIYKFRGHGKAWDWEVDTENGNYDYLMYADIDMDHPEVVNELRNWGVWYTNTLGLDGFRIDAVKHIKYSFTRDWINHVRSATGKNMFAVAEFWKNDLGAIENYLQKTNWNHSVFDVPLHYNLYNASKSGGNYDMRNIFNGTVVQRHPSHAVTFVDNHDSQPEEALESFVEEWFKPLAYALTLTREQGYPSVFYGDYYGIPTHGVPAMRSKIDPILEARQKYAYGKQNDYLDHHNIIGWTREGNTAHPNSGLATIMSDGAGGSKWMFVGRNKAGQVWSDITGNRTGTVTINADGWGNFSVNGGSVSIWVAK

SEQ ID NO: 22336 - protein, 485 aa, Bacillus sp. 707
HHNGTNGTMMQYFEWYLPNDGNHWNRLNSDASNLKSKGITAVWIPPAWKGASQNDVGYGAYDLYDLGEFNQKGTVRTKYGTRSQLQAAVTSLKNNGIQVYGDVVMNHKGGADATEMVRAVEVNPNNRNQEVTGEYTIEAWTRFDFPGRGNTHSSFKWRWYHFDGVDWDQSRRLNNRIYKFRGHGKAWDWEVDTENGNYDYLMYADIDMDHPEVVNELRNWGVWYTNTLGLDGFRIDAVKHIKYSFTRDWINHVRSATGKNMFAVAEFWKNDLGAIENYLQKTNWNHSVFDVPLHYNLYNASKSGGNYDMRNIFNGTVVQRHPTHAVTFVDNHDSQPEEALESFVEEWFKPLAYALTLTREQGYPSVFYGDYYGIPTHGVPAMRSKIDPILEARQKYAYGKQNDYLDHHNIIGWTREGNTAHPNSGLATIMSDGAGGSKWMFVGRNKAGQVWSDITGNRTGTVTINADGWGNFSVNGGSVSIWVNK

SEQ ID NO: 22337 - protein, 485 aa, Bacillus sp. 707
HHNGTNGTMMQYFEWYLPNDGNHWNRLNSDASNLKSKGITAVWIPPAWKGASQNDVGYGAYDLYDLGEFNQKGTVRTKYGTRSQLQAAVTSLKNNGIQVYGDVVMNHKGGADATEMVRAVEVNPNNRNQEVTGEYTIEAWTRFDFPGRGNTHSSFKWRWYHFDGVDWDQSRRKNNRIYKFRGHGKAWDWEVDTENGNYDYLMYADIDMDHPEVVNELRNWGVWYTNTLGLDGFRIDAVKHIKYSFTRDWINHVRSATGKNMFAVAEFWKNDLGAIENYLQKTNWNHSVFDVPLHYNLYNASKSGGNYDMRNIFNGTVVQRHPSHAVTFVDNHDSQPEEALESFVEEWFKPLAYALTLTREQGYPSVFYGDYYGIPTHGVPAMRSKIDPILEARQKYAYGKQNDYLDHHNIIGWTREGNTAHPNSGLATIMSDGAGGSKWMFVGRNKAGQVWSDITGNRTGTVTINADGWGNFSVNGGSVSIWVNK

SEQ ID NO: 22338 - protein, 485 aa, Bacillus sp. 707
HHNGTNGTMMQYFEWYLPNDGNHWNRLNSDASNLKSKGITAVWIPPAWKGASQNDVGYGAYDLYDLGEFNQKGTVRTKYGTRSQLQAAVTSLKNNGIQVYGDVVMNHKGGADATEMVRAVEVNPNNRNQEVTGEYTIEAWTRFDFPGRGNTHSSFKWRWYHFDGVDWDQSRRLVNRIYKFRGHGKAWDWEVDTENGNYDYLMYADIDMDHPEVVNELRNWGVWYTNTLGLDGFRIDAVKHIKYSFTRDWINHVRSATGKNMFAVAEFWKNDLGAIENYLQKTNWNHSVFDVPLHYNLYNASKSGGNYDMRNIFNGTVVQRHPSHAVTFVDNHDSQPEEALESFVEEWFKPLAYALTLTREQGYPSVFYGDYYGIPTHGVPAMRSKIDPILEARQKYAYGKQNDYLDHHNIIGWTREGNTAHPNSGLATIMSDGAGGSKWMFVGRNKAGQVWSDITGNRTGTVTINADGWGNFSVNGGSVSIWVNK

SEQ ID NO: 22339 - protein, 485 aa, Bacillus sp. 707
HHNGTNGTMMQYFEWYLPNDGNHWNRLNSDASNLKSKGITAVWIPPAWKGASQNDVGYGAYDLYDLGEFNQKGTVRTKYGTRSQLQAAVTSLKNNGIQVYGDVVMNHKGGADATEMVRAVEVNPNNRNQEVTGEYTIEAWTRFDFPGRGNTHSSFKWRWYHFDGVDWDQSRRLGNRIYKFRGHGKAWDWEVDTENGNYDYLMYADIDMDHPEVVNELRNWGVWYTNTLGLDGFRIDAVKHIKYSFTRDWINHVRSATGKNMFAVAEFWKNDLGAIENYLQKTNWNHSVFDVPLHYNLYNASKSGGNYDMRNIFNGTVVQRHPSHAVTFVDNHDSQPEEALESFVEEWFKPLAYALTLTREQGYPSVFYGDYYGIPTHGVPAMRSKIDPILEARQKYAYGKQNDYLDHHNIIGWTREGNTAHPNSGLATIMSDGAGGSKWMFVGRNKAGQVWSDITGNRTGTVTINADGWGNFSVNGGSVSIWVNK

SEQ ID NO: 22340 - protein, 485 aa, Bacillus sp. 707
HHNGTNGTMMQYFEWYLPNDGNHWNRLNSDASNLKSKGITAVWIPPAWKGASQNDVGYGAYDLYDLGEFNQKGTVRTKYGTRSQLQAAVTSLKNNGIQVYGDVVMNHKGGADATEMVRAVEVNPNNRNQEVTGEYTIEAWTRFDFPGRGNTHSSFKWRWYHFDGVDWDQSRRLNNRIYKFRGHGKAWDWEVDTENGNYDYLMYADIDMDHPEVVNELRNWGVWYTNTLGLDGFRIDAVKHIKYSFTRDWINHVRSATGKNMFAVAEFWKNDLGAIENYLQKTNWNHSVFDVPLHYNLYNASKSGGNYDMRNIFNGTVVQRHPSHAVTFVDNHDSQPEEALESFVEEWFKPLAYALTLTREQGYPSVFYGDYYGIPTHGVPAMRSKIDPILEARQKYAYGKQNDYLDHHNIIGWTREGNTAHPNSGLATIMSDGMGGSKWMFVGRNKAGQVWSDITGNRTGTVTINADGWGNFSVNGGSVSIWVNK

SEQ ID NO: 22341 - protein, 485 aa, Bacillus sp. 707
HHNGTNGTMMQYFEWYLPNDGNHWNRLNSDASNLKSKGITAVWIPPAWKGASQNDVGYGAYDLYDLGEFNQKGTVRTKYGTRSQLQAAVTSLKNNGIQVYGDVVMNHKGGADATEMVRAVEVNPNNRNQEVTGEYTIEAWTRFDFPGRGNTHSSFKWRWYHFDGVDWDQSRRLNNRIYKFRGHGKAWDWEVDTENGNYDYLMYADIDMDHPEVVNELRNWGVWYTNTLGLDGFRIDAVKHIKYSFTRDWINHVRSATGKNMFAVAEFWKNDLGAIENYLQKTNWNHSVFDVPLHYNLYNASKSGGNYDMRNIFNGTVVQRHPSHAVTFVDNHDSQPEEALESFVHEWFKPLAYALTLTREQGYPSVFYGDYYGIPTHGVPAMRSKIDPILEARQKYAYGKQNDYLDHHNIIGWTREGNTAHPNSGLATIMSDGAGGSKWMFVGRNKAGQVWSDITGNRTGTVTINADGWGNFSVNGGSVSIWVNK

SEQ ID NO: 22342 - protein, 485 aa, Bacillus sp. 707
HHNGTNGTMMQYFEWYLPNDGNHWNRLNSDASNLKSKGITAVWIPPAWKGASQNDVGYGAYDLYDLGEFNQKGTVRTKYGTRSQLQAAVTSLKNNGIQVYGDVVMNHKGGADATEMVRAVEVNPNNRNQEVTGEYTIEAWTRFDFPGRGNTHSSFKWRWYHFDGVDWDQSRALNNRIYKFRGHGKAWDWEVDTENGNYDYLMYADIDMDHPEVVNELRNWGVWYTNTLGLDGFRIDAVKHIKYSFTRDWINHVRSATGKNMFAVAEFWKNDLGAIENYLQKTNWNHSVFDVPLHYNLYNASKSGGNYDMRNIFNGTVVQRHPSHAVTFVDNHDSQPEEALESFVEEWFKPLAYALTLTREQGYPSVFYGDYYGIPTHGVPAMRSKIDPILEARQKYAYGKQNDYLDHHNIIGWTREGNTAHPNSGLATIMSDGAGGSKWMFVGRNKAGQVWSDITGNRTGTVTINADGWGNFSVNGGSVSIWVNK

SEQ ID NO: 22343 - protein, 485 aa, Bacillus sp. 707
HHNGTNGTMMQYFEWYLPNDGNHWNRLNSDASNLKSKGITAVWIPPAWKGASQNDVGYGAYDLYDLGEFNQKGTVRTKYGTRSQLQAAVTSLKNNGIQVYGDVVMNHKGGADATELVRAVEVNPNNRNQEVTGEYTIEAWTRFDFPGRGNTHSSFKWRWYHFDGVDWDQSRRLNNRIYKFRGHGKAWDWEVDTENGNYDYLMYADIDMDHPEVVNELRNWGVWYTNTLGLDGFRIDAVKHIKYSFTRDWINHVRSATGKNMFAVAEFWKNDLGAIENYLQKTNWNHSVFDVPLHYNLYNASKSGGNYDMRNIFNGTVVQRHPSHAVTFVDNHDSQPEEALESFVEEWFKPLAYALTLTREQGYPSVFYGDYYGIPTHGVPAMRSKIDPILEARQKYAYGKQNDYLDHHNIIGWTREGNTAHPNSGLATIMSDGAGGSKWMFVGRNKAGQVWSDITGNRTGTVTINADGWGNFSVNGGSVSIWVNK

SEQ ID NO: 22344 - protein, 485 aa, Bacillus sp. 707
HHNGTNGTMMQYFEWYLPNDGNHWNRLNSDASNLKSKGITAVWIPPAWKGASQNDVGYGAYDLYDLGEFNQKGTVRTKYGTRSQLQAAVTSLKNNGIQVYGDVVMNHKGGADATEMVRAVEVNPNNRNQEVTGEYTIEAWTRFDFPGRGNTHSSFKWRWYHFDGVDWDQSRRLNNRIYKFRGHGKAWDWEVDTENGNYDYLMYADIDMDHPEVVNELRNWGVWYTNTLGLDGFRIDAVKHIKYSFTRDWINHVRSATGKNMFAVAEFWKNDLGAIENYLQKTNWNHSVFDVPLHYNLYNASKSGGNYDMRNIFNGTVVQMHPSHAVTFVDNHDSQPEEALESFVEEWFKPLAYALTLTREQGYPSVFYGDYYGIPTHGVPAMRSKIDPILEARQKYAYGKQNDYLDHHNIIGWTREGNTAHPNSGLATIMSDGAGGSKWMFVGRNKAGQVWSDITGNRTGTVTINADGWGNFSVNGGSVSIWVNK

SEQ ID NO: 22345 - protein, 485 aa, Bacillus sp. 707
HHNGTNGTMMQYFEWYLPNDGNHWNRLNSDASNLKSKGITAVWIPPAWKGASQNDVGYGAYDLYDLGEFNQKGTVRTKYGTRSQLQAAVTSLKNNGIQVYGDVVMNHKGGADATEMVRAVEVNPNNRNQEVTGEYTIEAWTRFDFPGRGNTHSSFKWRWYHFDGVDWDQSRRLNNRIYKFRGHGKAWDWEVDTENGNYDYLMYADIDMDHPEVVNELRNWGVWYTNTLGLDGFRIDAVKHIKYSFTRDWINHVRSATGKNMFAVAEFWKNDLGAIENYLQKTNWNHSVFDVPLHYNLYNASKSGGNYDMRNIFNGTVVQRHPIHAVTFVDNHDSQPEEALESFVEEWFKPLAYALTLTREQGYPSVFYGDYYGIPTHGVPAMRSKIDPILEARQKYAYGKQNDYLDHHNIIGWTREGNTAHPNSGLATIMSDGAGGSKWMFVGRNKAGQVWSDITGNRTGTVTINADGWGNFSVNGGSVSIWVNK

SEQ ID NO: 22346 - protein, 485 aa, Bacillus sp.
HHNGTNGTLMQYFEWYLPNDGNHWNRLRSDASNLKDKGISAVWIPPAWKGASQNDVGYGAYDLYDLGEFNQKGTIRTKYGTRNQLQAAVNALKSNGIQVYGDVVMNHKGGADATEMVRAVEVNPNNRNQEVSGEYTIEAWTKFDFPGRGNTHSNFKWRWYHFDGVDWDQSRKLNNRIYKFRGDGKGWDWEVDTENGNYDYLIYADIDMDHPEVVNELRNWGVWYTNTLGLDGFRIDAVKHIKYSFTRDWINHVRSATGKNMFAVAEFWKNDLGAIENYLNKTNWNHSVFDVPLHFNLYNASKSGGNYDMRQIFNGTVVQRHPMHAVTFVDNHDSQPEESLESFVEEWFKPLAYALTLTREQGYPSVFYGDYYGIPTHGVPAMKSKIDPILEARQKYAYGRQNDYLDHHNIIGWTREGNTAHPNSGLATIMSDGAGGNKWMFVGRNKAGQVWTDITGNRAGTVTINADGWGNFSVNGGSVSIWVNK

SEQ ID NO: 22347 - protein, 485 aa, Bacillus sp. 707
HHNGTNGTMMQYFEWYLPNDGNHWNRLNSDASNLKSKGITAVWIPPAWKGASQNDVGYGAYDLYDLGEFNQKGTVRTKYGTRSQLQAAVTSLKNNGIQVYGDVVMNHKGGADATEMVRAVEVNPNNRNQEVTGEYTIEAWTRFDFPGRGNTHSSFKWRWYHFDGVDWDQSRRLNNRIYKFRGHGKAWDWEVDTENGNYDYLMYADIDMDHPEVVNELRNWGVWYTNTLGLDGFRIDAVKHIKYSFTRDWINHVRSATGKNMFAVAEFWKNDLGAIENYLQKTNWNHSVFDVPLHYNLYNASKSGGNYDMRNIFNGTVVQRHPSHAVTFVDNHDSQPEEALESFVEEWFKPLAYALTLTREQGYPSVFYGDYYGIPTHGVPAMRSKIDPILEARQKYAYGKQNDYLDHHNIIGWTREGNTQHPNSGLATIMSDGAGGSKWMFVGRNKAGQVWSDITGNRTGTVTINADGWGNFSVNGGSVSIWVNK

SEQ ID NO: 22348 - protein, 485 aa, Bacillus sp. 707
HHNGTNGTMMQYFEWYLPNDGNHWNRLNSDASNLKSKGITAVWIPPAWKGASQNDVGYGAYDLYDLGEFNQKGTVRTKYGTRSQLQAAVTSLKNNGIQVYGDVVMNHKGGADATEMVRAVEVNPNNRNQEVTGEYTIEAWTRFDFPGRGNTHSSFKWRWYHFDGVDWDQSRRLNNRIYKFRGHGKAWDWEVDTENGNYDYLMYADIDMDHPEVVNELRNWGVWYTNTLGLDGFRIDAVKHIKYSFTRDWIVHVRSATGKNMFAVAEFWKNDLGAIENYLQKTNWNHSVFDVPLHYNLYNASKSGGNYDMRNIFNGTVVQRHPSHAVTFVDNHDSQPEEALESFVEEWFKPLAYALTLTREQGYPSVFYGDYYGIPTHGVPAMRSKIDPILEARQKYAYGKQNDYLDHHNIIGWTREGNTAHPNSGLATIMSDGAGGSKWMFVGRNKAGQVWSDITGNRTGTVTINADGWGNFSVNGGSVSIWVNK

SEQ ID NO: 22349 - protein, 485 aa, Bacillus sp. 707
HHNGTNGTMMQYFEWYLPNDGNHWNRLNSDASNLKSKGITAVWIPPAWKGASQNDVGYGAYDLYDLGEFNQKGTVRTKYGTRSQLQAAVTSLKNNGIQVYGDVVMNHKGGADATEMVRAVEVNPNNRNQEVTGEYTIEAWTRFDFPGRGNTHSSFKWRWYHFDGVDWDQSRRLNNRIYKFRGHGKAWDWEVDTENGNYDYLMYADIDMDHPEVVNELRNWGVWYTNTLGLDGFRIDAVKHIKYSFTRDWINHVRSATGKNMFAVAEFWKNDLGAIENYLQKTNWNHSVFDVPLHYNLYNASKSGGNYDMRNIFNGTVVQRHPGHAVTFVDNHDSQPEEALESFVEEWFKPLAYALTLTREQGYPSVFYGDYYGIPTHGVPAMRSKIDPILEARQKYAYGKQNDYLDHHNIIGWTREGNTAHPNSGLATIMSDGAGGSKWMFVGRNKAGQVWSDITGNRTGTVTINADGWGNFSVNGGSVSIWVNK

SEQ ID NO: 22350 - protein, 485 aa, Bacillus sp. 707
HHNGTNGTMMQYFEWYLPNDGNHWNRLNSDASNLKSKGITAVWIPPAWKGASQNDVGYGAYDLYDLGEFNQKGTVRTKYGTRSQLQAAVTSLKNNGIQVYGDVVMNHKGGADATEMVRAVEVNPNNRNQEVTGEYTIEAWTRFDFPGRGNTHSSFKWRWYHFDGVDWDQSRRLNNRIYKFRGHGKAWDWEVDTENGNYDYLMYADIDMDHPEVVNELRNWGVWYTNTLGLDGFRIDAVKHIKYSFTRDWINHVRSATGKNMFAVAEFWKNDLGAIENYLQKTNWNHSVFDVPLHYNLYNASKSGGNYDMRNIFNGTVVQRHPCHAVTFVDNHDSQPEEALESFVEEWFKPLAYALTLTREQGYPSVFYGDYYGIPTHGVPAMRSKIDPILEARQKYAYGKQNDYLDHHNIIGWTREGNTAHPNSGLATIMSDGAGGSKWMFVGRNKAGQVWSDITGNRTGTVTINADGWGNFSVNGGSVSIWVNK

SEQ ID NO: 22351 - protein, 485 aa, Bacillus sp. 707
HHNGTNGTMMQYFEWYLPNDGNHWNRLNSDASNLKSKGITAVWIPPAWKGASQNDVGYGAYDLYDLGEFNQKGTVRTKYGTRSQLQAAVTSLKNNGIQVYGDVVMNHKGGADATEMVRAVEVNPNNRNQEVTGEYTIEAWTRFDFPGRGNTHSSFKWRWYHFDGVDWDQSRRLNNRIYKFRGHGKAWDWEVDTENGNYDYLMYADIDMDHPEVVNELRNWGVWYTNTLGLDGFRIDAVKHIKYSFTRDWINHVRSATGKNMFAVAEFWKNDLGAIENYLQKTNWNHSVFDVPLHYNLYNASKSGGNYDMRNIFNGTVVQRHPSHAVTFVDNHDSQPEEALESFVEEWFKPLAYALTLTREQGYPSVFYGDYYGIPTHGVPAMRSKIDPILEARQKYAYGKQNDYLDHHNIIGWTREGNTAHPNSGLATIMSDGAGGSKWMFVGRNKAGQVWTDITGNRTGTVTINADGWGNFSVNGGSVSIWVNK

SEQ ID NO: 22352 - protein, 484 aa, Bacillus sp.
HHNGTNGTMMQYFEWHLPNDGQHWNRLRNDAANLKNLGINAVWIPPAWKGTSQNDVGYGAYDLYDLGEFNQKGTIRTKYGTRSQLQSAIARLQNNGIQVYGDVVMNHKGGADGTEWVQAVEVNPSNRNQEVTGEYTIEAWTKFDFPGRGNTHSSFKWRWYHFDGTDWDQSRRLNNRIYKFTGKAWDWEVDTENGNYDYLMYADVDMDHPEVINELRRWGVWYTNTLNLDGFRIDAVKHIKYSFQRDWLNHVRSTTGKNNMFAYAEFWKNDLGAIENYLHKSNWNHSVFDVPLHYNLYNASKSGGNYDMRQILNGTVVSKHPIHAVTFVDNHDSQPAEALESFVEAWFKPLAYALILTREQGYPSVFYGDYYGIPTHGVAAMKGKIDPILEARQKYAYGTQHDYLDHHNIIGWTREGNSAHPNSGLATIMSDGPGGSKWMYVGRHKAGQVWRDITGNRTGTVTINADGWGNFSVNGGSVSIWVNK

SEQ ID NO: 22353 - protein, 485 aa, Bacillus sp. 707
HHNGTNGTMMQYFEWYLPNDGNHWNRLNSDASNLKSKGITAVWIPPAWKGASQNDVGYGAYDLYDLGEFNQKGTVRTKYGTRSQLQAAVTSLKNNGIQVYGDVVMNHKGGADATEAVRAVEVNPNNRNQEVTGEYTIEAWTRFDFPGRGNTHSSFKWRWYHFDGVDWDQSRRLNNRIYKFRGHGKAWDWEVDTENGNYDYLMYADIDMDHPEVVNELRNWGVWYTNTLGLDGFRIDAVKHIKYSFTRDWINHVRSATGKNMFAVAEFWKNDLGAIENYLQKTNWNHSVFDVPLHYNLYNASKSGGNYDMRNIFNGTVVQRHPSHAVTFVDNHDSQPEEALESFVEEWFKPLAYALTLTREQGYPSVFYGDYYGIPTHGVPAMRSKIDPILEARQKYAYGKQNDYLDHHNIIGWTREGNTAHPNSGLATIMSDGAGGSKWMFVGRNKAGQVWSDITGNRTGTVTINADGWGNFSVNGGSVSIWVNK

SEQ ID NO: 22354 - protein, 485 aa, Bacillus sp. 707
HHNGTNGTMMQYFEWYLPNDGNHWNRLNSDASNLKSKGITAVWIPPAWKGASQNDVGYGAYDLYDLGEFNQKGTVRTKYGTRSQLQAAVTSLKNNGIQVYGDVVMNHKGGADATEMVRAVEVNPNNRNQEVTGEYTIEAWTRFDFPGRGNTHSSFKWRWYHFDGVDWDQSRRLNNRIYKFRGHGKAWDWEVDTENGNYDYLMYADIDMDHPEVVNELRNWGVWYTNTLGLDGFRIDAVKHIKYSFTRDWINHVRSATGKNMFAVAEFWKNDLGAIENYLQKTNWNHSVFDVPLHYNLYNASKSGGNYDMRNIFNGTVVQRHPSHAVTFVDNHDSQPEEALESFVEEWFKPLAYALTLTREQGYPSVFYGDYYGIPTHGVPAMRSKIDPILEARQKYAYGKQCDYLDHHNIIGWTREGNTAHPNSGLATIMSDGAGGSKWMFVGRNKAGQVWSDITGNRTGTVTINADGWGNFSVNGGSVSIWVNK

SEQ ID NO: 22355 - protein, 485 aa, Bacillus sp.
HHNGTNGTMMQYFEWYLPNDGNHWNRLNSDASNLKSKGITAVWIPPAWKGASQNDVGYGAYDLYDLGEFNQKGTVRTKYGTRSQLQAAVTSLKNNGIQVYGDVVMNHKGGADATEMVRAVEVNPNNRNQEVTGEYTIEAWTRFDFPGRGNTHSSFKWRWYHFDGVDWDQSRKYENRIYKFRGHGKAWDWEVDTENGNYDYLMYADIDMDHPEVVNELRNWGVWYTNTLGLDGFRIDAVKHIKYSFTRDWINHVRSATGKNMFAVAEFWKNDLGAIENYLQKTNWNHSVFDVPLHYNLYNASKSGGNYDMRNIFNGTVVQRHPSHAVTFVDNHDSQPEEALESFVEEWFKPLAYALTLTREQGYPSVFYGDYYGIPTHGVPAMRSKIDPILEARQKYAYGKQNDYLDHHNIIGWTREGNTAHPNSGLATIMSDGAGGSKWMFVGRNKAGQVWSDITGNRTGTVTINADGWGNFSVNGGSVSIWVNK

SEQ ID NO: 22356 - protein, 485 aa, Bacillus sp. 707
HHNGTNGTMMQYFEWYLPNDGNHWNRLNSDASNLKSKGITAVWIPPAWKGASQNDVGYGAYDLYDLGEFNQKGTVRTKYGTRSQLQAAVTSLKNNGIQVYGDVVMNHKGGADATEMVRAVEVNPNNRNQEVTGEYTIEAWTRFDFPGRGNTHSSFKWRWYHFDGVDWDQSRRLNNRIYKFRGHGKAWDWEVDTENGNYDYLMYADIDMDHPEVVNELRNWGVWYTNTLGLDGFRIDAVKHIKYSFTRDWINHVRSATGKNMFAVAEFWKNDLGAIENYLQKTNWNHSVFDVPLHYNLYNASKSGGNYDMREIFNGTVVQRHPSHAVTFVDNHDSQPEEALESFVEEWFKPLAYALTLTREQGYPSVFYGDYYGIPTHGVPAMRSKIDPILEARQKYAYGKQNDYLDHHNIIGWTREGNTAHPNSGLATIMSDGAGGSKWMFVGRNKAGQVWSDITGNRTGTVTINADGWGNFSVNGGSVSIWVNK

SEQ ID NO: 22357 - protein, 485 aa, Bacillus sp. 707
HHNGTNGTMMQYFEWYLPNDGNHWNRLNSDASNLKSKGITAVWIPPAWKGASQNDVGYGAYDLYDLGEFNQKGTVRTKYGTRSQLQAAVTSLKNNGIQVYGDVVMNHKGGADATEMVRAVEVNPNNRNQEVTGEYTIEAWTRFDFPGRGNTHSSFKWRWYHFDGVDWDQSRRLNNRIYKFRGHGKAWDWEVDTENGNYDYLMYADIDMDHPEVVNELRNWGVWYTNTLGLDGFRIDAVKHIKYSFTRDWINHVRSATGKNMFAVAEFWKNDLGAIENYLQKTNWNHSVFDVPLHYNLYNASKSGGNYDMRNIFNGTVVQRHPSHAVTFVDNHDSQPEEALESFVEEWFKPLAYALTLTREQGYPSVFYGDYYGIPTHGVPAMRSKIDPILEARQKYAYGKQNDYLDHHNIIGWTREGNTAHPNSGLATIMSDGAGGAKWMFVGRNKAGQVWSDITGNRTGTVTINADGWGNFSVNGGSVSIWVNK

SEQ ID NO: 22358 - protein, 485 aa, Bacillus sp. 707
HHNGTNGTMMQYFEWYLPNDGNHWNRLNSDASNLKSKGITAVWIPPAWKGASQNDVGYGAYDLYDLGEFNQKGTVRTKYGTRSQLQAAVTSLKNNGIQVYGDVVMNHKGGADATEMVRAVEVNPNNRNQEVTGEYTIEAWTRFDFPGRGNTHSSFKWRWYHFDGVDWDQSRRLNNRIYKFRGHGKAWDWEVDTENGNYDYLMYADIDMDHPEVVNELRNWGVWYTNTLGLDGFRIDAVKHIKYSFTRDWINHVRSATGKNMFAVAEFWKNDLGAIENYLQKTNWNHSVFDVPLHYNLYNASKSGGNYDMRNIFNGTVVQRHPSHAVTFVDNHDSQPEEALESFVEEWFKPLAYALTLTREQGYPSVFYGDYYGIPTHGVPAMRSKIDPILEARQVYAYGKQNDYLDHHNIIGWTREGNTAHPNSGLATIMSDGAGGSKWMFVGRNKAGQVWSDITGNRTGTVTINADGWGNFSVNGGSVSIWVNK

SEQ ID NO: 22359 - protein, 485 aa, Bacillus sp. 707
HHNGTNGTMMQYFEWYLPNDGNHWNRLNCDASNLKSKGITAVWIPPAWKGASQNDVGYGAYDLYDLGEFNQKGTVRTKYGTRSQLQAAVTSLKNNGIQVYGDVVMNHKGGADATEMVRAVEVNPNNRNQEVTGEYTIEAWTRFDFPGRGNTHSSFKWRWYHFDGVDWDQSRRLNNRIYKFRGHGKAWDWEVDTENGNYDYLMYADIDMDHPEVVNELRNWGVWYTNTLGLDGFRIDAVKHIKYSFTRDWINHVRSATGKNMFAVAEFWKNDLGAIENYLQKTNWNHSVFDVPLHYNLYNASKSGGNYDMRNIFNGTVVQRHPSHAVTFVDNHDSQPEEALESFVEEWFKPLAYALTLTREQGYPSVFYGDYYGIPTHGVPAMRSKIDPILEARQKYAYGKQNDYLDHHNIIGWTREGNTAHPNSGLATIMSDGAGGSKWMFVGRNKAGQVWSDITGNRTGTVTINADGWGNFSVNGGSVSIWVNK

SEQ ID NO: 22360 - protein, 485 aa, Bacillus sp. 707
HHNGTNGTMMQYFEWYLPNDGNHWNRLNSDASNLKSKGITAVWIPPAWKGASQNDVGYGAYDLYDLGEFNQKGTVRTKYGTRSQLQAAVTSLKNNGIQVYGDVVMNHKGGADATEMVRAVEVNPNNRNQEVTGEYTIEAWTTFDFPGRGNTHSSFKWRWYHFDGVDWDQSRRLNNRIYKFRGHGKAWDWEVDTENGNYDYLMYADIDMDHPEVVNELRNWGVWYTNTLGLDGFRIDAVKHIKYSFTRDWINHVRSATGKNMFAVAEFWKNDLGAIENYLQKTNWNHSVFDVPLHYNLYNASKSGGNYDMRNIFNGTVVQRHPSHAVTFVDNHDSQPEEALESFVEEWFKPLAYALTLTREQGYPSVFYGDYYGIPTHGVPAMRSKIDPILEARQKYAYGKQNDYLDHHNIIGWTREGNTAHPNSGLATIMSDGAGGSKWMFVGRNKAGQVWSDITGNRTGTVTINADGWGNFSVNGGSVSIWVNK

SEQ ID NO: 22361 - protein, 485 aa, Bacillus sp. 707
HHNGTNGTMMQYFEWYLPNDGNHWNRLNSDASNLKSKGITAVWIPPAWKGASQNDVGYGAYDLYDLGEFNQKGTVRTKYGTRSQLQAAVTSLKNNGIQVYGDVVMNHKGGADATEMVWAVEVNPNNRNQEVTGEYTIEAWTRFDFPGRGNTHSSFKWRWYHFDGVDWDQSRRLNNRIYKFRGHGKAWDWEVDTENGNYDYLMYADIDMDHPEVVNELRNWGVWYTNTLGLDGFRIDAVKHIKYSFTRDWINHVRSATGKNMFAVAEFWKNDLGAIENYLQKTNWNHSVFDVPLHYNLYNASKSGGNYDMRNIFNGTVVQRHPSHAVTFVDNHDSQPEEALESFVEEWFKPLAYALTLTREQGYPSVFYGDYYGIPTHGVPAMRSKIDPILEARQKYAYGKQNDYLDHHNIIGWTREGNTAHPNSGLATIMSDGAGGSKWMFVGRNKAGQVWSDITGNRTGTVTINADGWGNFSVNGGSVSIWVNK

SEQ ID NO: 22362 - protein, 485 aa, Bacillus sp. 707
HHNGTNGTMMQYFEWYLPNDGNHWNRLNSDASNLKSKGITAVWIPPAWKGASQNDVGYGAYDLYDLGEFNQKGTVRTKYGTRSQLQAAVTSLKNNGIQVYGDVVMNHKGGADATEMVRAVEVNPNNRNQEVTGEYTIEAWTRFDFPGRGNTHSSFKWRWYHFDGVDWDQSRRLNNRIYKFRGYGKAWDWEVDTENGNYDYLMYADIDMDHPEVVNELRNWGVWYTNTLGLDGFRIDAVKHIKYSFTRDWINHVRSATGKNMFAVAEFWKNDLGAIENYLQKTNWNHSVFDVPLHYNLYNASKSGGNYDMRNIFNGTVVQRHPSHAVTFVDNHDSQPEEALESFVEEWFKPLAYALTLTREQGYPSVFYGDYYGIPTHGVPAMRSKIDPILEARQKYAYGKQNDYLDHHNIIGWTREGNTAHPNSGLATIMSDGAGGSKWMFVGRNKAGQVWSDITGNRTGTVTINADGWGNFSVNGGSVSIWVNK

SEQ ID NO: 22363 - protein, 485 aa, Bacillus sp. 707
HHNGTNGTMMQYFEWYLPNDGNHWNRLNSDASNLKSKGITAVWIPPAWKGASQNDVGYGAYDLYDLGEFNQKGTVRTKYGTRSQLQAAVTSLKNNGIQVYGDVVMNHKGGADATEWVRAVEVNPNNRNQEVTGEYTIEAWTRFDFPGRGNTHSSFKWRWYHFDGVDWDQSRRLNNRIYKFRGHGKAWDWEVDTENGNYDYLMYADIDMDHPEVVNELRNWGVWYTNTLGLDGFRIDAVKHIKYSFTRDWINHVRSATGKNMFAVAEFWKNDLGAIENYLQKTNWNHSVFDVPLHYNLYNASKSGGNYDMRNIFNGTVVQRHPSHAVTFVDNHDSQPEEALESFVEEWFKPLAYALTLTREQGYPSVFYGDYYGIPTHGVPAMRSKIDPILEARQKYAYGKQNDYLDHHNIIGWTREGNTAHPNSGLATIMSDGAGGSKWMFVGRNKAGQVWSDITGNRTGTVTINADGWGNFSVNGGSVSIWVNK

SEQ ID NO: 22364 - protein, 485 aa, Bacillus sp. 707
HHNGTNGTMMQYFEWYLPNDGNHWNRLNSDASNLKSKGITAVWIPPAWKGASQNDVGYGAYDLYDLGEFNQKGTVRTKYGTRSQLQAAVTTLKNNGIQVYGDVVMNHKGGADATEMVRAVEVNPNNRNQEVTGEYTIEAWTRFDFPGRGNTHSSFKWRWYHFDGVDWDQSRRLNNRIYKFRGHGKAWDWEVDTENGNYDYLMYADIDMDHPEVVNELRNWGVWYTNTLGLDGFRIDAVKHIKYSFTRDWINHVRSATGKNMFAVAEFWKNDLGAIENYLQKTNWNHSVFDVPLHYNLYNASKSGGNYDMRNIFNGTVVQRHPSHAVTFVDNHDSQPEEALESFVEEWFKPLAYALTLTREQGYPSVFYGDYYGIPTHGVPAMRSKIDPILEARQKYAYGKQNDYLDHHNIIGWTREGNTAHPNSGLATIMSDGAGGSKWMFVGRNKAGQVWSDITGNRTGTVTINADGWGNFSVNGGSVSIWVNK

SEQ ID NO: 22365 - protein, 483 aa, Bacillus sp.
HHNGTNGTLMQYFEWYLPNDGNHWNRLRSDASNLKDKGISAVWIPPAWKGASQNDVGYGAYDLYDLGEFNQKGTIRTKYGTRNQLQAAVNALKSNGIQVYGDVVMNHKGGADATEMVKAVEVNPNNRNQEVSGEYTIEAWTKFDFPGRGNTHSNFKWRWYHFDGVDWDQSRKLNNRIYKFRGKGWDWEVDTEFGNYDYLVYADIDMDHPEVVNELRNWGVWYTNTLGLDGFRIDAVKHIKYSFTRDWINHVRSATGKNMFAVAEFWKNDLGAIENYLNKTNWNHSVFDVPLHYNLYNASKSGGNYDMRQIFNGTVVQKHPTHAVTFVDNHDSQPEEALESFVEEWFKPLAYALTLTREQGYPSVFYGDYYGIPTHGVPAMKSKIDPILEARQKYAYGRQNDYLDHHNIIGWTREGNTAHPNSGLATIMSDGAGGNKWMFVGRNKAGQVWTDITGNKAGTVTINADGWGNFSVNGGSVSIWVNK

SEQ ID NO: 22366 - protein, 485 aa, Bacillus sp. 707
HHNGTNGTMMQYFEWYLPNDGNHWNRLNSDASNLKSKGITAVWIPPAWKGASQNDVGYGAYDLYDLGEFNQKGTVRTKYGTRSQLQAAVTSLKNNGIQVYGDVVMNHKGGADATEMVRAVEVNPNNRNQEVTGEYTIEAWTRFDFPGRGNTHSSFKWRWYHFDGVDWDQSRRLNNRIYKFRGHGKAWDWEVDTENGNYDYLMYADIDMDHPEVVNELRNWGVWYTNTLGLDGFRIDAVKHIKYSFTRDWINHVRSATGKNMFAVAEFWKNDLGAIENYLQKTNWNHSVFDVPLHYNLYNASKSGGNYDMRNIFNGTVVQRHPSHAVTFVDNHDSQPEEALESFVEEWFKPLAYALTLTREQGYPSVFYGDYYGIPTHGVPAMRSKIDPILEARQTYAYGKQNDYLDHHNIIGWTREGNTAHPNSGLATIMSDGAGGSKWMFVGRNKAGQVWSDITGNRTGTVTINADGWGNFSVNGGSVSIWVNK

SEQ ID NO: 22367 - protein, 485 aa, Bacillus sp. 707
HHNGTNGTMMQYFEWYLPNDGNHWNRLNSDASNLKSKGITAVWIPPAWKGASQNDVGYGAYDLYDLGEFNQKGTVRTKYGTRSQLQAAVTSLKNNGIQVYGDVVMNHKGGADATEMVRAVEVNPNNRNQEVTGEYTIEAWTRFDFPGRGNTHSSFKWRWYHFDGVDWDQSRRLNNRIYKFRGHGKAWDWEVDTENGNYDYLMYADIDMDHPEVVNELRNWGVWYTNTLGLDGFRIDAVKHIKYSFTRDWINHVRSATGKNMFAVAEFWKNDLGAIENYLQKTNWNHSVFDVPLHYNLYNASKSGGNYDMRNIFNGTVVQRHPSHAVTFVDNHDSQPEEALESFVEEWFKPLAYALTLTREQGYPSVFYGDYYGIPTHGVPAMRSKIDPILEARQKYAYGIQNDYLDHHNIIGWTREGNTAHPNSGLATIMSDGAGGSKWMFVGRNKAGQVWSDITGNRTGTVTINADGWGNFSVNGGSVSIWVNK

SEQ ID NO: 22368 - protein, 485 aa, Bacillus sp. 707
HHNGTNGTMMQYFEWYLPNDGNHWNRLNSDASNLKSKGITAVWIPPAWKGASQNDVGYGAYDLYDLGEFNQKGTVRTKYGTRSQLQAAVTSLKNNGIQVYGDVVMNHKGGADATEMVRAVEVNPNNRNQEVTGEYTIEAWTRFDFPGRGNTHSSFKWRWYHFDGVDWDQSRRLNNRIYKFRGHGKAWDWEVDTENGNYDYLMYADIDMDHPEVVNELRNWGVWYTNTLGLDGFRIDAVKHIKYSFTRDWINHVRSATGKNMFAVAEFWKNDLGAIENYLQKTNWNHSVFDVPLHYNLYNASKSGGNYDMRNIFNGTVVQRHPSHAVTFVDNHDSQPEEALESFVYEWFKPLAYALTLTREQGYPSVFYGDYYGIPTHGVPAMRSKIDPILEARQKYAYGKQNDYLDHHNIIGWTREGNTAHPNSGLATIMSDGAGGSKWMFVGRNKAGQVWSDITGNRTGTVTINADGWGNFSVNGGSVSIWVNK

SEQ ID NO: 22369 - protein, 485 aa, Bacillus sp. 707
HHNGTNGTMMQYFEWYLPNDGNHWNRLNSDASNLKSKGITAVWIPPAWKGASQNDVGYGAYDLYDLGEFNQKGTVRTKYGTRSQLQAAVTSLKNNGIQVYGDVVMNHKGGADATEMVVAVEVNPNNRNQEVTGEYTIEAWTRFDFPGRGNTHSSFKWRWYHFDGVDWDQSRRLNNRIYKFRGHGKAWDWEVDTENGNYDYLMYADIDMDHPEVVNELRNWGVWYTNTLGLDGFRIDAVKHIKYSFTRDWINHVRSATGKNMFAVAEFWKNDLGAIENYLQKTNWNHSVFDVPLHYNLYNASKSGGNYDMRNIFNGTVVQRHPSHAVTFVDNHDSQPEEALESFVEEWFKPLAYALTLTREQGYPSVFYGDYYGIPTHGVPAMRSKIDPILEARQKYAYGKQNDYLDHHNIIGWTREGNTAHPNSGLATIMSDGAGGSKWMFVGRNKAGQVWSDITGNRTGTVTINADGWGNFSVNGGSVSIWVNK

SEQ ID NO: 22370 - protein, 485 aa, Bacillus sp. 707
HHNGTNGTMMQYFEWYLPNDGNHWNRLNSDASNLKSKGITAVWIPPAWKGASQNDVGYGAYDLYDLGEFNQKGTVRTKYGTRSQLQAAVTSLKNNGIQVYGDVVMNHKGGADATEMVRAVEVNPNNRNQEVTGEYTIEAWTRFDFPGRGNTHSSFKWRWYHFDGVDWDQSRRLNNRIYKFRGHGKAWDWEVDTENGNYDYLMYADIDMDHPEVVNELRNWGVWYTNTLGLDGFRIDAVKHIKYSFTRDWINHVRSATGKNMFAVAEFWKNDLGAIENYLQKTNWNHSVFDVPLHYNLYNASKSGGNYDMRNIFNGTVVQRHPSHAVTFVDNHDSQPEEALESFVEEWFKPLAYALTLTREQGYPSVFYGDYYGIPTHGVPAMRSKIDPILEARQKYAYGKQNDYLDHHNIIGWTREGNTAHPNSGLATIMSDGEGGSKWMFVGRNKAGQVWSDITGNRTGTVTINADGWGNFSVNGGSVSIWVNK

SEQ ID NO: 22371 - protein, 485 aa, Bacillus sp. 707
HHNGTNGTMMQYFEWYLPNDGNHWNRLNSDASNLKSKGITAVWIPPAWKGASQNDVGYGAYDLYDLGEFNQKGTVRTKYGTRSQLQAAVTSLKNNGIQVYGDVVMNHKGGADATEMVRAVEVNPNNRNQEVTGEYTIEAWTRFDFPGRGNTHSSFKWRWYHFDGVDWDQSRRLNNRIYKFRGHGKAWDWEVDTENGNYDYLMYADIDMDHPEVVNELRNWGVWYTNTLGLDGFRIDAVKHIKYSFTRDWINHVRSATGKNMFAVAEFWKNDLGAIENYLQKTNWNHSVFDVPLHYNLYNASKSGGNYDMRNIFNGTVVQRHPSHAVTFVDNHDSQPCEALESFVEEWFKPLAYALTLTREQGYPSVFYGDYYGIPTHGVPAMRSKIDPILEARQKYAYGKQNDYLDHHNIIGWTREGNTAHPNSGLATIMSDGAGGSKWMFVGRNKAGQVWSDITGNRTGTVTINADGWGNFSVNGGSVSIWVNK

SEQ ID NO: 22372 - protein, 485 aa, Bacillus sp. 707
HHNGTNGTMMQYFEWYLPNDGNHWNRLNSDASNLKSKGITAVWIPPAWKGASQNDVGYGAYDLYDLGEFNQKGTVRTKYGTRSQLQAAVTSLKNNGIQVYGDVVMNHKGGADATEMVRAVEVNPNNRNQEVTGEYTIEAWTRFDFPGRGNTHSSFKWRWYHFDGVDWDQSRRLNNRIYKFRGHGKAWDWEVDTENGNYDYLMYADIDMDHPEVVNELRNWGVWYTNTLGLDGFRIDAVKHIKYSFTRDWINHVRSATGKNMFAVAEFWKNDLGAIENYLQKTNWNHSVFDVPLHYNLYNASKSGGNYDMRNIFNGTVVQRHPSHAVTFVDNHDSQPEEALESFVEEWFKPLAYALTLTREQGYPSVFYGDYYGIPTHGVPAMRSKIDPILEARQDYAYGKQNDYLDHHNIIGWTREGNTAHPNSGLATIMSDGAGGSKWMFVGRNKAGQVWSDITGNRTGTVTINADGWGNFSVNGGSVSIWVNK

SEQ ID NO: 22373 - protein, 485 aa, Bacillus sp. 707
HHNGTNGTMMQYFEWYLPNDGNHWNRLESDASNLKSKGITAVWIPPAWKGASQNDVGYGAYDLYDLGEFNQKGTVRTKYGTRSQLQAAVTSLKNNGIQVYGDVVMNHKGGADATEMVRAVEVNPNNRNQEVTGEYTIEAWTRFDFPGRGNTHSSFKWRWYHFDGVDWDQSRRLNNRIYKFRGHGKAWDWEVDTENGNYDYLMYADIDMDHPEVVNELRNWGVWYTNTLGLDGFRIDAVKHIKYSFTRDWINHVRSATGKNMFAVAEFWKNDLGAIENYLQKTNWNHSVFDVPLHYNLYNASKSGGNYDMRNIFNGTVVQRHPSHAVTFVDNHDSQPEEALESFVEEWFKPLAYALTLTREQGYPSVFYGDYYGIPTHGVPAMRSKIDPILEARQKYAYGKQNDYLDHHNIIGWTREGNTAHPNSGLATIMSDGAGGSKWMFVGRNKAGQVWSDITGNRTGTVTINADGWGNFSVNGGSVSIWVNK

SEQ ID NO: 22374 - protein, 485 aa, Bacillus subtilis
HHNGTNGTMMQYFEWYLPNDGNHWNRLRSDASNLKDKGISAVWIPPAWKGASQNDVGYGAYDLYDLGEFNQKGTIRTKYGTRNQLQAAVNALKSNGIQVYGDVVMNHKGGADATEMVRAVEVNPNNRNQEVSGEYTIEAWTKFDFPGRGNTHSNFKWRWYHFDGVDWDQSRKLNNRIYKFRGDGKGWDWEVDTENGNYDYLMYADIDMDHPEVVNELRNWGVWYTNTLGLDGFRIDAVKHIKFSFTRDWINHVRSATGKNMFAVAEYWKNDLGAIENYLNKTNWNHSVFDVPLHYNLYNASKSGGNYDMRQIFNGTVVQRHPMHAVTFVDNHDSQPEEALESFVEEWFKPLAYALTLTREQGYPSVFYGDYYGIPTHGVPAMKSKIDPILEARQKYAYGRQNDYLDHHNIIGWTREGNTAHPNSGLATIMSDGAGGNKWMFVGRNKAGQVWTDITGNRAGTVTINADGWGNFSVNGGSVSIWVNK

SEQ ID NO: 22375 - protein, 485 aa, Bacillus sp. 707
HHNGTNGTMMQYFEWYLPNDGNHWNRLNSDASNLKSKGITAVWIPPAWKGASQNDVGYGAYDLYDLGEFNQKGTVRTKYGTRSQLQAAVTSLKNNGIQVYGDVVMNHKGGADATEMVRAVEVNPNNRNQEVTGEYTIEAWTRFDFPGRGNTHSSFKWRWYHFDGVDWDQSRRCNNRIYKFRGHGKAWDWEVDTENGNYDYLMYADIDMDHPEVVNELRNWGVWYTNTLGLDGFRIDAVKHIKYSFTRDWINHVRSATGKNMFAVAEFWKNDLGAIENYLQKTNWNHSVFDVPLHYNLYNASKSGGNYDMRNIFNGTVVQRHPSHAVTFVDNHDSQPEEALESFVEEWFKPLAYALTLTREQGYPSVFYGDYYGIPTHGVPAMRSKIDPILEARQKYAYGKQNDYLDHHNIIGWTREGNTAHPNSGLATIMSDGAGGSKWMFVGRNKAGQVWSDITGNRTGTVTINADGWGNFSVNGGSVSIWVNK

SEQ ID NO: 22376 - protein, 485 aa, Bacillus sp. 707
HHNGTNGTMMQYFEWYLPNDGNHWNRLNSDASNLKSKGITAVWIPPAWKGASQNDVGYGAYDLYDLGEFNQKGTVRTKYGTRSQLQAAVTSLKNNGIQVYGDVVMNHKGGADATEMVRAVEVNPNNRNQEVTGEYTIEAWTRFDFPGRGNTHSSFKWRWYHFDGVDWDQSRRLNNRIYKFRGHGKAWDWEVDTENGNYDYLMYADIDMDHPEVVNELRNWGVWYTNTLGLDGFRIDAVKHIKYSFTRDWINHVRSATGKNMFAVAEFWKNDLGAIENYLQKTNWNHSVFDVPLHYNLYNASKSGGNYDMRNIFNGTVVQRHPSHAVTFVDNHDSQPEEALESFVEEWFKPLAYALTLTREQGYPSVFYGDYYGIPTHGVPAMRSKIDPILEARQKYAYGKQNDYLDHHNIIGWTREGNTAHPNSGLATIMSDGAGGKKWMFVGRNKAGQVWSDITGNRTGTVTINADGWGNFSVNGGSVSIWVNK

SEQ ID NO: 22377 - protein, 485 aa, Bacillus sp. 707
HHNGTNGTMMQYFEWYLPNDGNHWNRLNSDASNLKSKGITAVWIPPAWKGASQNDVGYGAYDLYDLGEFNQKGTVRTKYGTRSQLQAAVTSLKNNGIQVYGDVVMNHKGGADATEMVRAVEVNPNNRNQEVTGEYTIEAWTRFDFPGRGNTHSSFKWRWYHFDGVDWDQSRRLNNRIYKFRGHGKAWDWEVDTENGNYDYLMYADIDMDHPEVVNELRNWGHWYTNTLGLDGFRIDAVKHIKYSFTRDWINHVRSATGKNMFAVAEFWKNDLGAIENYLQKTNWNHSVFDVPLHYNLYNASKSGGNYDMRNIFNGTVVQRHPSHAVTFVDNHDSQPEEALESFVEEWFKPLAYALTLTREQGYPSVFYGDYYGIPTHGVPAMRSKIDPILEARQKYAYGKQNDYLDHHNIIGWTREGNTAHPNSGLATIMSDGAGGSKWMFVGRNKAGQVWSDITGNRTGTVTINADGWGNFSVNGGSVSIWVNK

SEQ ID NO: 22378 - protein, 485 aa, Bacillus subtilis
HHNGTNGTMMQYFEWYLPNDGNHWNRLRSDASNLKDVGISAVWIRPAWKGASQNDVGYGAYDLYDLGEFNQKGTIRTKYGTRNQLQAAVNALKSNGIQVYGDVVMNHKGGADATEMVRAVEVNPNNRNQEVSGEYTIEAWTKFDFPGRGNTHSNFKWRWYHFDGVDWDQSRKLNNRIYKFRGDGKGWDWEVDTENGNYDYLMYADIDMDHPEVVNELRNWGVWYTNTLGLDGFRIDAVKHIKYSFTRDWINHVRSATGKNMFAVAEFWKNDLGAIENYLNKTNWNHSVFDVPLHYNLYNASKSGGNYDMRQIFNGTVVQRHPMHAVTFVDNHDSQPEEALESFVEEWFKPLAYALTLTREQGYPSVFYGDYYGIPTHGVPAMRSKIDPILEARQKYAYGRQNDYLDHHNIIGWTREGNTAHPNSGLATIMSDGAGGNKWMFVGRNKAGQVWTDITGNRAGTVTINADGWGNFSVNGGSVSIWVNK

SEQ ID NO: 22379 - protein, 485 aa, Bacillus sp. 707
HHNGTNGTMMQYFEWYLPNDGNHWNRLNSDASNLESKGITAVWIPPAWKGASQNDVGYGAYDLYDLGEFNQKGTVRTKYGTRSQLQAAVTSLKNNGIQVYGDVVMNHKGGADATEMVRAVEVNPNNRNQEVTGEYTIEAWTRFDFPGRGNTHSSFKWRWYHFDGVDWDQSRRLNNRIYKFRGHGKAWDWEVDTENGNYDYLMYADIDMDHPEVVNELRNWGVWYTNTLGLDGFRIDAVKHIKYSFTRDWINHVRSATGKNMFAVAEFWKNDLGAIENYLQKTNWNHSVFDVPLHYNLYNASKSGGNYDMRNIFNGTVVQRHPSHAVTFVDNHDSQPEEALESFVEEWFKPLAYALTLTREQGYPSVFYGDYYGIPTHGVPAMRSKIDPILEARQKYAYGKQNDYLDHHNIIGWTREGNTAHPNSGLATIMSDGAGGSKWMFVGRNKAGQVWSDITGNRTGTVTINADGWGNFSVNGGSVSIWVNK

SEQ ID NO: 22380 - protein, 485 aa, Bacillus sp. 707
HHNGTNGTMMQYFEWYLPNDGNHWNRLNSDASNLKSKGITAVWIPPAWKGASQNDVGYGAYDLYDLGEFNQKGTVRTKYGTRSQLQAAVTSLKNNGIQVYGDVVMNHKGGADATEMVRAVEVNPNNRNQEVTGEYTIEAWTRFDFPGRGNTHSSFKWRWYHFDGVDWDQSRRLNNRIYKFRGHGKAWDWEVDTENGNYDYLMYADIDMDHPEVVNELRNWGVWYTNTLGLDGFRIDAVKHIKYSFTRDWISHVRSATGKNMFAVAEFWKNDLGAIENYLQKTNWNHSVFDVPLHYNLYNASKSGGNYDMRNIFNGTVVQRHPSHAVTFVDNHDSQPEEALESFVEEWFKPLAYALTLTREQGYPSVFYGDYYGIPTHGVPAMRSKIDPILEARQKYAYGKQNDYLDHHNIIGWTREGNTAHPNSGLATIMSDGAGGSKWMFVGRNKAGQVWSDITGNRTGTVTINADGWGNFSVNGGSVSIWVNK

SEQ ID NO: 22381 - protein, 485 aa, Bacillus sp. 707
HHNGTNGTMMQYFEWYLPNDGNHWNRLNSDASNLKSKGITAVWIPPAWKGASQNDVGYGAYDLYDLGEFNQKGTVRTKYGTRSQLQAAVTSLKNNGIQVYGDVVMNHKGGADATEMVRAVEVNPNNRNQEVTGEYTIEAWTRFDFPGRGNTHSSFKWRWYHFDGVDWDQSRRLTNRIYKFRGHGKAWDWEVDTENGNYDYLMYADIDMDHPEVVNELRNWGVWYTNTLGLDGFRIDAVKHIKYSFTRDWINHVRSATGKNMFAVAEFWKNDLGAIENYLQKTNWNHSVFDVPLHYNLYNASKSGGNYDMRNIFNGTVVQRHPSHAVTFVDNHDSQPEEALESFVEEWFKPLAYALTLTREQGYPSVFYGDYYGIPTHGVPAMRSKIDPILEARQKYAYGKQNDYLDHHNIIGWTREGNTAHPNSGLATIMSDGAGGSKWMFVGRNKAGQVWSDITGNRTGTVTINADGWGNFSVNGGSVSIWVNK

SEQ ID NO: 22382 - protein, 485 aa, Bacillus sp. 707
HHNGTNGTMMQYFEWYLPNDGNHWNRLNSDASNLKSKGITAVWIPPAWKGASQNDVGYGAYDLYDLGEFNQKGTVRTKYGTRSQLQAAVTSLKNNGIQVYGDVVMNHKGGADATEMVRAVEVNPNNRNQEVTGEYTIEAWTRFDFPGRGNTHSSFKWRWYHFDGVDWDQSRCLNNRIYKFRGHGKAWDWEVDTENGNYDYLMYADIDMDHPEVVNELRNWGVWYTNTLGLDGFRIDAVKHIKYSFTRDWINHVRSATGKNMFAVAEFWKNDLGAIENYLQKTNWNHSVFDVPLHYNLYNASKSGGNYDMRNIFNGTVVQRHPSHAVTFVDNHDSQPEEALESFVEEWFKPLAYALTLTREQGYPSVFYGDYYGIPTHGVPAMRSKIDPILEARQKYAYGKQNDYLDHHNIIGWTREGNTAHPNSGLATIMSDGAGGSKWMFVGRNKAGQVWSDITGNRTGTVTINADGWGNFSVNGGSVSIWVNK

SEQ ID NO: 22383 - protein, 485 aa, Bacillus sp. 707
HHNGTNGTMMQYFEWYLPNDGNHWNRLNSDASNLKSKGITAVWIPPAWKGASQNDVGYGAYDLYDLGEFNQKGTVRTKYGTRSQLQAAVTSLKNNGIQVYGDVVMNHKGGADATEMVRAVEVNPNNRNQEVTGEYTIEAWTRFDFPGRGNTHSSFKWRWYHFDGVDWDQSRRLNNRIYKFRGHGKAWDWEVDTENGNYDYLMYADIDMDHPEVVNELRNWGVWYTNTLGLDGFRIDAVKHIKYSFTRDWINHVRSATGKNMFAVAEFWKNDLGAIENYLQKTNWNHSVFDVPLHYNLYNASKSGGNYDMRNIFNGTVVQDHPSHAVTFVDNHDSQPEEALESFVEEWFKPLAYALTLTREQGYPSVFYGDYYGIPTHGVPAMRSKIDPILEARQKYAYGKQNDYLDHHNIIGWTREGNTAHPNSGLATIMSDGAGGSKWMFVGRNKAGQVWSDITGNRTGTVTINADGWGNFSVNGGSVSIWVNK

SEQ ID NO: 22384 - protein, 485 aa, Bacillus sp. 707
HHNGTNGTMMQYFEWYLPNDGNHWNRLNSDASNLKSKGITAVWIPPAWKGASQNDVGYGAYDLYDLGEFNQKGTVRTKYGTRSQLQAAVTSLKNNGIQVYGDVVMNHKGGADATEMVRAVEVNPNNRNQEVTGEYTIEAWTRFDFPGRGNTHSSFKWRWYHFDGVDWDQSRMLNNRIYKFRGHGKAWDWEVDTENGNYDYLMYADIDMDHPEVVNELRNWGVWYTNTLGLDGFRIDAVKHIKYSFTRDWINHVRSATGKNMFAVAEFWKNDLGAIENYLQKTNWNHSVFDVPLHYNLYNASKSGGNYDMRNIFNGTVVQRHPSHAVTFVDNHDSQPEEALESFVEEWFKPLAYALTLTREQGYPSVFYGDYYGIPTHGVPAMRSKIDPILEARQKYAYGKQNDYLDHHNIIGWTREGNTAHPNSGLATIMSDGAGGSKWMFVGRNKAGQVWSDITGNRTGTVTINADGWGNFSVNGGSVSIWVNK

SEQ ID NO: 22385 - protein, 485 aa, Bacillus sp. 707
HHNGTNGTMMQYFEWYLPNDGNHWNRLNSDASNLKSKGITAVWIPPAWKGASQNDVGYGAYDLYDLGEFNQKGTVRTKYGTRSQLQAAVTSLKNNGIQVYGDVVMNHKGGADATEMVRAVEVNPNNRNQEVTGEYTIEAWTRFDFPGRGNTHSSFKWRWYHFDGVDWDQSRRANNRIYKFRGHGKAWDWEVDTENGNYDYLMYADIDMDHPEVVNELRNWGVWYTNTLGLDGFRIDAVKHIKYSFTRDWINHVRSATGKNMFAVAEFWKNDLGAIENYLQKTNWNHSVFDVPLHYNLYNASKSGGNYDMRNIFNGTVVQRHPSHAVTFVDNHDSQPEEALESFVEEWFKPLAYALTLTREQGYPSVFYGDYYGIPTHGVPAMRSKIDPILEARQKYAYGKQNDYLDHHNIIGWTREGNTAHPNSGLATIMSDGAGGSKWMFVGRNKAGQVWSDITGNRTGTVTINADGWGNFSVNGGSVSIWVNK

SEQ ID NO: 22386 - protein, 485 aa, Bacillus sp. 707
HHNGTNGTMMQYFEWYLPNDGNHWNRLNSDASNLKSKGITAVWIPPAWKGASQNDVGYGAYDLYDLGEFNQKGTVRTKYGTRSQLQAAVTSLKNNGIQVYGDVVMNHKGGADATEMVRAVEVNPNNRNQEVTGEYTIEAWTRFDFPGRGNTHSSFKWRWYHFDGVDWDQSRRLNNRIYKFRGHGKAWDWEVDTENGNYDYLMYADIDMDHPEVVNELRNWGVWYTNTLGLDGFRIDAVKHIKYSFTRDWIRHVRSATGKNMFAVAEFWKNDLGAIENYLQKTNWNHSVFDVPLHYNLYNASKSGGNYDMRNIFNGTVVQRHPSHAVTFVDNHDSQPEEALESFVEEWFKPLAYALTLTREQGYPSVFYGDYYGIPTHGVPAMRSKIDPILEARQKYAYGKQNDYLDHHNIIGWTREGNTAHPNSGLATIMSDGAGGSKWMFVGRNKAGQVWSDITGNRTGTVTINADGWGNFSVNGGSVSIWVNK

SEQ ID NO: 22387 - protein, 485 aa, Bacillus sp. 707
HHNGTNGTMMQYFEWYLPNDGNHWNRLNMDASNLKSKGITAVWIPPAWKGASQNDVGYGAYDLYDLGEFNQKGTVRTKYGTRSQLQAAVTSLKNNGIQVYGDVVMNHKGGADATEMVRAVEVNPNNRNQEVTGEYTIEAWTRFDFPGRGNTHSSFKWRWYHFDGVDWDQSRRLNNRIYKFRGHGKAWDWEVDTENGNYDYLMYADIDMDHPEVVNELRNWGVWYTNTLGLDGFRIDAVKHIKYSFTRDWINHVRSATGKNMFAVAEFWKNDLGAIENYLQKTNWNHSVFDVPLHYNLYNASKSGGNYDMRNIFNGTVVQRHPSHAVTFVDNHDSQPEEALESFVEEWFKPLAYALTLTREQGYPSVFYGDYYGIPTHGVPAMRSKIDPILEARQKYAYGKQNDYLDHHNIIGWTREGNTAHPNSGLATIMSDGAGGSKWMFVGRNKAGQVWSDITGNRTGTVTINADGWGNFSVNGGSVSIWVNK

SEQ ID NO: 22388 - protein, 485 aa, Bacillus sp. 707
HHNGTNGTMMQYFEWYLPNDGNHWNRLNSDASNLKSKGITAVWIPPAWKGASQNDVGYGAYDLYDLGEFNQKGTVRTKYGTRSQLQAAVTSLKNNGIQVYGDVVMNHKGGADATEMVRAVEVNPNNRNQEVTGEYTIEAWTRFDFPGRGNTHSSFKWRWYHFDGVDWDQSRRLNNRIYKFRGQGKAWDWEVDTENGNYDYLMYADIDMDHPEVVNELRNWGVWYTNTLGLDGFRIDAVKHIKYSFTRDWINHVRSATGKNMFAVAEFWKNDLGAIENYLQKTNWNHSVFDVPLHYNLYNASKSGGNYDMRNIFNGTVVQRHPSHAVTFVDNHDSQPEEALESFVEEWFKPLAYALTLTREQGYPSVFYGDYYGIPTHGVPAMRSKIDPILEARQKYAYGKQNDYLDHHNIIGWTREGNTAHPNSGLATIMSDGAGGSKWMFVGRNKAGQVWSDITGNRTGTVTINADGWGNFSVNGGSVSIWVNK

SEQ ID NO: 22389 - protein, 485 aa, Bacillus subtilis
HHNGTNGTMMQYFEWYLPNDGNHWNRLRSDASNLKDKGISAVWIPPAWKGASQNDVGYGAYDLYDLGEFNQKGTIRTKYGTRNQLQAAVNALKSNGIQVYGDVVMNHKGGADATEMVRAVEVNPNNRNQEVSGEYTIEAWTKFDFPGRGNTHSNFKWRWYHFDGVDWDQSRKLNNRIYKFRGDGKGWDWEVDTENGNYDYLMYADIDMDHPEVVNELRNWGVWYTNTLGLDGFRIDAVKHIKFSFTRDWINHVRSATGKNMFAVAEFWKNDLGAIENYLNKTNWNHSVFDVPLHYNLYNASKSGGNYDMRQIFNGTVVQRHPMHAVTFVDNHDTQPEEALESFVEEWFKPLAYALTLTREQGYPSVFYGDYYGIPTHGVPAMKSKIDPILEARQKYAYGRQNDYLDHHNIIGWTREGNTAHPNSGLATIMSDGAGGNKWMFVGRNKAGQVWTDITGNRAGTVTINADGWGNFSVNGGSVSIWVNK

SEQ ID NO: 22390 - protein, 485 aa, Bacillus sp. 707
HHNGTNGTMMQYFEWYLPNDGNHWNRLNSDASNLKSKGITAVWIPPAWKGASQNDVGYGAYDLYDLGEFNQKGTVRTKYGTRSQLQAAVTSLKNNGIQVYGDVVMNHKGGADATEMVRAVEVNPNNRNQEVTGEYTIEAWTRFDFPGRGNTHSSFKWRWYHFDGVDWDQSRRLNNRIYKFRGHGKAWDWEVDTENGNYDYLMYADIDMDHPEVVNELRDWGVWYTNTLGLDGFRIDAVKHIKYSFTRDWINHVRSATGKNMFAVAEFWKNDLGAIENYLQKTNWNHSVFDVPLHYNLYNASKSGGNYDMRNIFNGTVVQRHPSHAVTFVDNHDSQPEEALESFVEEWFKPLAYALTLTREQGYPSVFYGDYYGIPTHGVPAMRSKIDPILEARQKYAYGKQNDYLDHHNIIGWTREGNTAHPNSGLATIMSDGAGGSKWMFVGRNKAGQVWSDITGNRTGTVTINADGWGNFSVNGGSVSIWVNK

SEQ ID NO: 22391 - protein, 485 aa, Bacillus sp.
HHNGTNGTMMQYFEWYLPNDGNHWNRLRSDASNLKDKGISAVWIPPAWKGASQNDVGYGAYDLYDLGEFNQKGTIRTKYGTRNQLQAAVNALKSNGIQVYGDVVMNHKGGADATEMVRAVEVNPNNRNQEVSGEYTIEAWTKFDFPGRGNTHSNFKWRWYHFDGVDWDQSRKLNNRIYKFRGDGKGWDWEVDTENGNYDYLIYADIDMDHPEVVNELRNWGVWYTNTLGLDGFRIDAVKHIKYSFTRDWINHVRSATGKNMFAVAEFWKNDLGAIENYLNKTNWNHSVFDVPLHYNLYNASKSGGNYDMRQIFNGTVVQRHPMHAVTFVDNHDSQPEEALESFVEEWFKPLAYALTLTREQGYPSVFYGDYYGIPTHGVPAMKSKIDPILEARQKYAYGRQNDYLDHHNIIGWTREGNTAHPNSGLATIMSDGAGGNKWMFVGRNRAGQVWTDITGNRAGTVTINADGWGNFSVNGGSVSIWVQK

SEQ ID NO: 22392 - protein, 485 aa, Bacillus sp. 707
HHNGTNGTMMQYFEWYLPNDGNHWNRLNSDASNLKSKGITAVWIPPAWKGASQNDVGYGAYDLYDLGEFNQKGTVRTKYGTRSQLQAAVTSLKNNGIQVYGDVVMNHKGGADATEMVRAVEVNPNNRNQEVTGEYTIEAWTRFDFPGRGNTHSSFKWRWYHFDGVDWDQSRRLNNRIYKFRGHGKAWDWEVDTENGNYDYLMYADIDMDHPEVVNELRNWGSWYTNTLGLDGFRIDAVKHIKYSFTRDWINHVRSATGKNMFAVAEFWKNDLGAIENYLQKTNWNHSVFDVPLHYNLYNASKSGGNYDMRNIFNGTVVQRHPSHAVTFVDNHDSQPEEALESFVEEWFKPLAYALTLTREQGYPSVFYGDYYGIPTHGVPAMRSKIDPILEARQKYAYGKQNDYLDHHNIIGWTREGNTAHPNSGLATIMSDGAGGSKWMFVGRNKAGQVWSDITGNRTGTVTINADGWGNFSVNGGSVSIWVNK

SEQ ID NO: 22393 - protein, 485 aa, Bacillus sp. 707
HHNGTNGTMMQYFEWYLPNDGNHWNRLNSDASNLKSKGITAVWIPPAWKGASQNDVGYGAYDLYDLGEFNQKGTVRTKYGTRSQLQAAVTSLKNNGIQVYGDVVMNHKGGADATEMVRAVEVNPNNRNQEVTGEYTIEAWTRFDFPGRGNTHSSFKWRWYHFDGVDWDQSRRLNNRIYKFRGCGKAWDWEVDTENGNYDYLMYADIDMDHPEVVNELRNWGVWYTNTLGLDGFRIDAVKHIKYSFTRDWINHVRSATGKNMFAVAEFWKNDLGAIENYLQKTNWNHSVFDVPLHYNLYNASKSGGNYDMRNIFNGTVVQRHPSHAVTFVDNHDSQPEEALESFVEEWFKPLAYALTLTREQGYPSVFYGDYYGIPTHGVPAMRSKIDPILEARQKYAYGKQNDYLDHHNIIGWTREGNTAHPNSGLATIMSDGAGGSKWMFVGRNKAGQVWSDITGNRTGTVTINADGWGNFSVNGGSVSIWVNK

SEQ ID NO: 22394 - protein, 485 aa, Bacillus sp. 707
HHNGTNGTMMQYFEWYLPNDGNHWNRLNSDASNLKSKGITAVWIPPAWKGASQNDVGYGAYDLYDLGEFNQKGTVRTKYGTRSQLQAAVTSLKNNGIQVYGDVVMNHKGGADATEMVRAVEVNPNNRNQEVTGEYTIEAWTRFDFPGRGNTHSSFKWRWYHFDGVDWDQSRRLNNRIYKFRGHGKAWDWEVDTENGNYDYLMYADIDMDHPEVVNELRNWGVWYTNTLGLDGFRIDAVKHIKYSFTRDWINHVRSATGKNMFAVAEFWKNDLGAIENYLQKTNWNHSVFDVPLHYNLYNASKSGGNYDMRNIFNGTVVQRHPSHAVTFVDNHDSQPEEALESFVEEWFKPLAYALTLTREQGYPSVFYGDYYGIPTHGVPAMRSKIDPILEARQQYAYGKQNDYLDHHNIIGWTREGNTAHPNSGLATIMSDGAGGSKWMFVGRNKAGQVWSDITGNRTGTVTINADGWGNFSVNGGSVSIWVNK

SEQ ID NO: 22395 - protein, 485 aa, Bacillus sp. 707
HHNGTNGTMMQYFEWYLPNDGNHWNRLNSDASNLKSKGITAVWIPPAWKGASQNDVGYGAYDLYDLGEFNQKGTVRTKYGTRSQLQDAVTSLKNNGIQVYGDVVMNHKGGADATEMVRAVEVNPNNRNQEVTGEYTIEAWTRFDFPGRGNTHSSFKWRWYHFDGVDWDQSRRLNNRIYKFRGHGKAWDWEVDTENGNYDYLMYADIDMDHPEVVNELRNWGVWYTNTLGLDGFRIDAVKHIKYSFTRDWINHVRSATGKNMFAVAEFWKNDLGAIENYLQKTNWNHSVFDVPLHYNLYNASKSGGNYDMRNIFNGTVVQRHPSHAVTFVDNHDSQPEEALESFVEEWFKPLAYALTLTREQGYPSVFYGDYYGIPTHGVPAMRSKIDPILEARQKYAYGKQNDYLDHHNIIGWTREGNTAHPNSGLATIMSDGAGGSKWMFVGRNKAGQVWSDITGNRTGTVTINADGWGNFSVNGGSVSIWVNK

SEQ ID NO: 22396 - protein, 485 aa, Bacillus sp. 707
HHNGTNGTMMQYFEWYLPNDGNHWNRLNSDASNLKSKGITAVWIPPAWKGASQNDVGYGAYDLYDLGEFNQKGTVRTKYGTRSQLQAAVTSLKNNGIQVYGDVVMNHKGGADATEMVRAVEVNPNNRNQEVTGEYTIEAWTRFDFPGRGNTHSSFKWRWYHFDGVDWDQSRRLNNRIYKFRGHGKAWDWEVDTENGNYDYLMYADIDMDHPEVVNELRNWGVWYTNTLGLDGFRIDAVKHIKYSFTRDWINHVRSATGKNMFAVAEFWKNDLGAIENYLQKTNWNHSVFDVPLHYNLYNASKSGGNYDMRHIFNGTVVQRHPSHAVTFVDNHDSQPEEALESFVEEWFKPLAYALTLTREQGYPSVFYGDYYGIPTHGVPAMRSKIDPILEARQKYAYGKQNDYLDHHNIIGWTREGNTAHPNSGLATIMSDGAGGSKWMFVGRNKAGQVWSDITGNRTGTVTINADGWGNFSVNGGSVSIWVNK

SEQ ID NO: 22397 - protein, 485 aa, Bacillus sp. 707
HHNGTNGTMMQYFEWYLPNDGNHWNRLYSDASNLKSKGITAVWIPPAWKGASQNDVGYGAYDLYDLGEFNQKGTVRTKYGTRSQLQAAVTSLKNNGIQVYGDVVMNHKGGADATEMVRAVEVNPNNRNQEVTGEYTIEAWTRFDFPGRGNTHSSFKWRWYHFDGVDWDQSRRLNNRIYKFRGHGKAWDWEVDTENGNYDYLMYADIDMDHPEVVNELRNWGVWYTNTLGLDGFRIDAVKHIKYSFTRDWINHVRSATGKNMFAVAEFWKNDLGAIENYLQKTNWNHSVFDVPLHYNLYNASKSGGNYDMRNIFNGTVVQRHPSHAVTFVDNHDSQPEEALESFVEEWFKPLAYALTLTREQGYPSVFYGDYYGIPTHGVPAMRSKIDPILEARQKYAYGKQNDYLDHHNIIGWTREGNTAHPNSGLATIMSDGAGGSKWMFVGRNKAGQVWSDITGNRTGTVTINADGWGNFSVNGGSVSIWVNK

SEQ ID NO: 22398 - protein, 483 aa, Bacillus sp.
HHNGTNGTLMQYFEWYLPNDGNHWNRLRSDASNLKDKGISAVWIPPAWKGASQNDVGYGAYDLYDLGEFNQKGTIRTKYGTRNQLQAAVNALKSNGIQVYGDVVMNHKGGADATEMVKAVEVNPNNRNQEVSGEYTIEAWTKFDFPGRGNTHSNFKWRWYHFDGVDWDQSRKLNNRIYKFRGKGWDWEVDTEFGNYDYLIYADIDMDHPEVVNELRNWGVWYTNTLGLDGFRIDAVKHIKYSFTRDWINHVRSATGKNMFAVAEFWKNDLGAIENYLNKTNWNHSVFDVPLHYNLYNASKSGGNYDMRQIFNGTVVQKHPTHAVTFVDNHDSQPEEALESFVEEWFKPLAYALTLTREQGYPSVFYGDYYGIPTHGVPAMKSKIDPILEARQKYAYGRQNDYLDHHNIIGWTREGNTAHPNSGLATIMSDGAGGNKWMFVGRNKAGQVWTDITGNKAGTVTINADGWGNFSVNGGSVSIWVNK

SEQ ID NO: 22399 - protein, 485 aa, Bacillus sp.
HHNGTNGTMMQYFEWYLPNDGNHWNRLRSDASNLKDKGISAVWIPPAWKGASQNDVGYGAYDLYDLGEFNQKGTIRTKYGTRNQLQAAVNALKSNGIQVYGDVVMNHKGGADATEMVRAVEVNPNNRNQEVSGEYTIEAWTKFDFPGRGNTHSNFKWRWYHFDGVDWDQSRKLNNRIYKFRGDGKGWDWEVDTENGNYDYLVYADIDMDHPEVVNELRNWGVWYTNTLGLDGFRIDAVKHIKYSFTRDWINHVRSATGKNMFAVAEFWKNDLGAIENYLNKTNWNHSVFDVPLHYNLYNASKSGGNYDMRQIFNGTVVQRHPTHAVTFVDNHDSQPEEALESFVEEWFKPLAYALTLTREQGYPSVFYGDYYGIPTHGVPAMKSKIDPILEARQKYAYGRQNDYLDHHNIIGWTREGNTAHPNSGLATIMSDGAGGNKWMFVGRNKAGQVWTDITGNRAGTVTINADGWGNFSVNGGSVSIWVNK

SEQ ID NO: 22400 - protein, 485 aa, Bacillus sp. 707
HHNGTNGTMMQYFEWYLPNDGNHWNRLNSDASNLKSKGITAVWIPPAWKGASQNDVGYGAYDLYDLGEFNQKGTVRTKYGTRSQLQAAVTELKNNGIQVYGDVVMNHKGGADATEMVRAVEVNPNNRNQEVTGEYTIEAWTRFDFPGRGNTHSSFKWRWYHFDGVDWDQSRRLNNRIYKFRGHGKAWDWEVDTENGNYDYLMYADIDMDHPEVVNELRNWGVWYTNTLGLDGFRIDAVKHIKYSFTRDWINHVRSATGKNMFAVAEFWKNDLGAIENYLQKTNWNHSVFDVPLHYNLYNASKSGGNYDMRNIFNGTVVQRHPSHAVTFVDNHDSQPEEALESFVEEWFKPLAYALTLTREQGYPSVFYGDYYGIPTHGVPAMRSKIDPILEARQKYAYGKQNDYLDHHNIIGWTREGNTAHPNSGLATIMSDGAGGSKWMFVGRNKAGQVWSDITGNRTGTVTINADGWGNFSVNGGSVSIWVNK

SEQ ID NO: 22401 - protein, 485 aa, Bacillus sp. 707
HHNGTNGTMMQYFEWYLPNDGNHWNRLNSDASNLKSKGITAVWIPPAWKGASQNDVGYGAYDLYDLGEFNQKGTVRTKYGTRSQLQAAVTSLKNNGIQVYGDVVMNHKGGADATEMVRAVEVNPNNRNQEVTGEYTIEAWTRFDFPGRGNTHSSFKWRWYHFDGVDWDQSRRHNNRIYKFRGHGKAWDWEVDTENGNYDYLMYADIDMDHPEVVNELRNWGVWYTNTLGLDGFRIDAVKHIKYSFTRDWINHVRSATGKNMFAVAEFWKNDLGAIENYLQKTNWNHSVFDVPLHYNLYNASKSGGNYDMRNIFNGTVVQRHPSHAVTFVDNHDSQPEEALESFVEEWFKPLAYALTLTREQGYPSVFYGDYYGIPTHGVPAMRSKIDPILEARQKYAYGKQNDYLDHHNIIGWTREGNTAHPNSGLATIMSDGAGGSKWMFVGRNKAGQVWSDITGNRTGTVTINADGWGNFSVNGGSVSIWVNK

SEQ ID NO: 22402 - protein, 485 aa, Bacillus sp. 707
HHNGTNGTMMQYFEWYLPNDGNHWNRLNSDASNLKSKGITAVWIPPAWKGASQNDVGYGAYDLYDLGEFNQKGTVRTKYGTRSQLQAAVTSLKNNGIQVYGDVVMNHKGGADATEMVRAVEVNPNNRNQEVTGEYTIEAWTRFDFPGRGNTHSSFKWRWYHFDGVDWDQSRRLNNRIYKFRGHGKAWDWEVDTENGNYDYLMYADIDMDHPEVVNELRNWGVWYTNTLGLDGFRIDAVKHIKYSFTRDWINHVRSATGKNMFAVAEFWKNDLGAIENYLQKTNWNHSVFDVPLHYNLYNASKSGGNYDMRNIFNGTVVQRHPSHAVTFVDNHDSQPEEALESFVEEWFKPLAYALTLTREQGYPSVFYGDYYGIPTHGVPAMRSKIDPILEARQKYAYGKQNDYLDHHNIIGWTREGNTAHPNSGLATIMSDGAGGSKWMFVGRNKAGQVWSDITGNYTGTVTINADGWGNFSVNGGSVSIWVNK

SEQ ID NO: 22403 - protein, 484 aa, Bacillus sp.
HHNGTNGTLMQYFEWYLPNDGNHWNRLRSDASNLKDKGISAVWIPPAWKGASQNDVGYGAYDLYDLGEFNQKGTIRTKYGTRNQLQAAVNALKSNGIQVYGDVVMNHKGGADATEMVKAVEVNPNNRNQEVSGEYTIEAWTKFDFPGRGNTHSNFKWRWYHFDGVDWDQSRKLNNRIYKFRGGKGWDWEVDTEFGNYDYLVYADIDMDHPEVVNELRNWGVWYTNTLGLDGFRIDAVKHIKYSFTRDWINHVRSATGKNMFAVAEFWKNDLGAIENYLNKTNWNHSVFDVPLHYNLYNASKSGGNYDMRQIFNGTVVQKHPTHAVTFVDNHDSQPEEALESFVEEWFKPLAYALTLTREQGYPSVFYGDYYGIPTHGVPAMKSKIDPILEARQKYAYGRQNDYLDHHNIIGWTREGNTAHPNSGLATIMSDGAGGNKWMFVGRNKAGQVWTDITGNKAGTVTINADGWGNFSVNGGSVSIWVNK

SEQ ID NO: 22404 - protein, 483 aa, Bacillus subtilis
HHNGTNGTIMQYFEWYLPNDGNHWNRLRSDASNLKDKGISAVWIPPAWKGASQNDVGYGAYDLYDLGEFNQKGTIRTKYGTRNQLQAAVNALKSNGIQVYGDVVMNHKGGADATEMVKAVEVNPNNRNQEVSGEYTIEAWTKFDFPGRGNTHSNFKWRWYHFDGVDWDQSRKLNNRIYKFRGKGWDWEVDTEFGNYDYLLYADIDMDHPEVVNELRNWGVWYTNTLGLDGFRIDAVKHIKYSFTRDWINHVRSATGKNMFAVAEFWKNDLGAIENYLNKTNWNHSVFDVPLHYNLYNASKSGGNYDMRQIFNGTVVQKHPTHAVTFVDNHDSQPEEALESFVEEWFKPLAYALTLTREQGYPSVFYGDYYGIPTHGVPAMKSKIDPILEARQKYAYGRQNDYLDHHNIIGWTREGNTAHPNSGLATIMSDGAGGNKWMFVGRNKAGQVWTDITGNKAGTVTINADGWGNFSVNGGSVSIWVNK

SEQ ID NO: 22405 - protein, 485 aa, Bacillus subtilis
HHNGTNGTMMQYFEWYLPNDGNHWNRLRSDASNLKDKGISAVWIPPAWKGASQNDVGYGAYDLYDLGEFNQKGTIRTKYGTRNQLQAAVNALKSNGIQVYGDVVMNHKGGADATEMVRAVEVNPNNRNQEVSGEYTIEAWTKFDFPGRGNTHSNFKWRWYHFDGVDWDQSRKLNNRIYKFRGDGKGWDWEVDTENGNYDYLMYADIDMDNPEVVNELRNWGVWYTNTLGLDGFRIDAVKHIKYSFTRDWINHVRSATGKNMFAVAEFWKNDLGAIENYLNKTNWNHSVFDVPLHYNLYNASKSGGNYDMRQIFNGTVVQRHPMHAVTFVDNHDSQPEEALESFVEEWFKPLAYALTLTREQGYPSIFYGDYYGIPTHGVPAMKSKIDPILEARQKYAYGRQNDYLDHHNIIGWTREGNTAHPNSGLATIMSDGAGGNKWMFVGRNKAGQVWTDITGNRAGTVTINADGWGNFSVNGGSVSIWVNK

SEQ ID NO: 22406 - protein, 485 aa, Bacillus sp. 707
HHNGTNGTMMQYFEWYLPNDGNHWNRLNSDASNLKSKGITAVWIPPAWKGASQNDVGYGAYDLYDLGEFNQKGTVRTKYGTRSQLQAAVTSLKNNGIQVYGDVVMNHKGGADATEMVRAVEVNPNNRNQEVTGEYTIEAWTRFDFPGRGNTHSSFKWRWYHFDGVDWDQSRRDNNRIYKFRGHGKAWDWEVDTENGNYDYLMYADIDMDHPEVVNELRNWGVWYTNTLGLDGFRIDAVKHIKYSFTRDWINHVRSATGKNMFAVAEFWKNDLGAIENYLQKTNWNHSVFDVPLHYNLYNASKSGGNYDMRNIFNGTVVQRHPSHAVTFVDNHDSQPEEALESFVEEWFKPLAYALTLTREQGYPSVFYGDYYGIPTHGVPAMRSKIDPILEARQKYAYGKQNDYLDHHNIIGWTREGNTAHPNSGLATIMSDGAGGSKWMFVGRNKAGQVWSDITGNRTGTVTINADGWGNFSVNGGSVSIWVNK

SEQ ID NO: 22407 - protein, 485 aa, Bacillus sp. 707
HHNGTNGTMMQYFEWYLPNDGNHWNRLNSDASNLKSKGITAVWIPPAWKGASQNDVGYGAYDLYDLGEFNQKGTVRTKYGTRSQLQAAVTSLKNNGIQVYGDVVMNHKGGADATEMVRAVEVNPNNRNQEVTGEYTIEAWTRFDFPGRGNTHSSFKWRWYHFDGVDWDQSRRLNNRIYKFRGHGKAWDWEVDTENGNYDYLMYADIDMDHPEVVNELRNWGVWYTNTLGLDGFRIDAVKHIKYSFTRDWINHVRSATGKNMFAVAEFWKNDLGAIENYLQKTNWNHSVFDVPLHYNLYNASKSGGNYDMRNIFNGTVVQRHPSHAVTFVDNHDSQPEEALESFVEEWFKPLAYALTLTREQGYPSVFYGDYYGIPTHGVPAMRSKIDPILEARQKYAYGKQNDYLDHHNIIGWTREGNTAHPNSGLATIMSDGAGGSKWMFVGRNKAGQVWSDITGNRHGTVTINADGWGNFSVNGGSVSIWVNK

SEQ ID NO: 22408 - protein, 485 aa, Bacillus sp. 707
HHNGTNGTMMQYFEWDLPNDGNHWNRLNSDASNLKSKGITAVWIPPAWKGASQNDVGYGAYDLYDLGEFNQKGTVRTKYGTRSQLQAAVTSLKNNGIQVYGDVVMNHKGGADATEMVRAVEVNPNNRNQEVTGEYTIEAWTRFDFPGRGNTHSSFKWRWYHFDGVDWDQSRRLNNRIYKFRGHGKAWDWEVDTENGNYDYLMYADIDMDHPEVVNELRNWGVWYTNTLGLDGFRIDAVKHIKYSFTRDWINHVRSATGKNMFAVAEFWKNDLGAIENYLQKTNWNHSVFDVPLHYNLYNASKSGGNYDMRNIFNGTVVQRHPSHAVTFVDNHDSQPEEALESFVEEWFKPLAYALTLTREQGYPSVFYGDYYGIPTHGVPAMRSKIDPILEARQKYAYGKQNDYLDHHNIIGWTREGNTAHPNSGLATIMSDGAGGSKWMFVGRNKAGQVWSDITGNRTGTVTINADGWGNFSVNGGSVSIWVNK

SEQ ID NO: 22409 - protein, 485 aa, Bacillus sp. 707
HHNGTNGTMMQYFEWYLPNDGNHWNRLNSDASNLKSKGITAVWIPPAWKGASQNDVGYGAYDLYDLGEFNQKGTVRTKYGTRSQLQAAVTSLKNNGIQVYGDVVMNHKGGADATEMVRAVEVNPNNRNQEVTGEYTIEAWTRFDFPGRGNTHSSFKWRWYHFDGVDWDQSRRLNNRIYKFRGHGKAWDWEVDTENGNYDYLMYADIDMDHPEVVNELRNWGVWYTNTLGLDGFRIDAVKHIKYSFTRDWICHVRSATGKNMFAVAEFWKNDLGAIENYLQKTNWNHSVFDVPLHYNLYNASKSGGNYDMRNIFNGTVVQRHPSHAVTFVDNHDSQPEEALESFVEEWFKPLAYALTLTREQGYPSVFYGDYYGIPTHGVPAMRSKIDPILEARQKYAYGKQNDYLDHHNIIGWTREGNTAHPNSGLATIMSDGAGGSKWMFVGRNKAGQVWSDITGNRTGTVTINADGWGNFSVNGGSVSIWVNK

SEQ ID NO: 22410 - protein, 485 aa, Bacillus sp.
HHNGTNGTLMQYFEWYLPNDGNHWNRLRSDASNLKDKGISAVWIPPAWKGASQNDVGYGAYDLYDLGEFNQKGTIRTKYGTRNQLQAAVNALKSNGIQVYGDVVMNHKGGADATEMVRAVEVNPNNRNQEVSGEYTIEAWTKFDFPGRGNTHSNFKWRWYHFDGVDWDQSRKLNNRIYKFRGDGKGWDWEVDTENGNYDYLTYADIDMDHPEVVNELRNWGVWYTNTLGLDGFRIDAVKHIKYSFTRDWINHVRSATGKNMFAVAEFWKNDLGAIENYLNKTNWNHSVFDVPLHFNLYNASKSGGNYDMRQIFNGTVVQRHPMHAVTFVDNHDSQPEESLESFVREWFKPLAYALTLTREQGYPSVFYGDYYGIPTHGVPAMKSKIDPILEARQKYAYGRQNDYLDHHNIIGWTREGNTAHPNSGLATIMSDGAGGNKWMFVGRNKAGQVWTDITGNRAGTVTINADGWGNFSVNGGSVSIWVNK

SEQ ID NO: 22411 - protein, 485 aa, Bacillus sp. 707
HHNGTNGTMMQYFEWYLPNDGNHWNRLNSDASNLKSKGITAVWIPPAWKGASQNDVGYGAYDLYDLGEFNQKGTVRTKYGTRSQLQAAVTSLKNNGIQVYGDVVMNHKGGADATEMVRAVEVNPNNRNQEVTGEYTIEAWTRFDFPGRGNTHSSFKWRWYHFDGVDWDQSRRLNNRIYKFRGHGKAWDWEVDTENGNYDYLMYADIDMDHPEVVNELRNWGVWYTNTLGLDGFRIDAVKHIKYSFTRDWINHVRSATGKNMFAVAEFWKNDLGAIENYLQKTNWNHSVFDVPLHYNLYNASKSGGNYDMRNIFNGTVVQRHPSHAVTFVDNHDSQPEEALESFVEEWFKPLAYALTLTREQGYPSVFYGDYYGIPTHGVPAMRSKIDPILEARQKYAYGKQNDYLDHHNIIGWTREGNTAHPNSGLATIMSDGAGGSKWMFVGRNKAGQVWSDITGNRDGTVTINADGWGNFSVNGGSVSIWVNK

SEQ ID NO: 22412 - protein, 485 aa, Bacillus sp. 707
HHNGTNGTMMQYFEWYLPNDGNHWNRLNSDASNLKSKGITAVWIPPAWKGASQNDVGYGAYDLYDLGEFNQKGTVRTKYGTRSQLQAAVTSLKNNGIQVYGDVVMNHKGGADATEMVRAVEVNPNNRNQEVTGEYTIEAWTRFDFPGRGNTHSSFKWRWYHFDGVDWDQSRRLNNRIYKFRGHGKAWDWEVDTENGNYDYLMYADIDMDHPEVVNELRNWGVWYTNTLGLDGFRIDAVKHIKYSFTRDWINHVRSATGKNMFAVAEFWKNDLGAIENYLQKTNWNHSVFDVPLHYNLYNASKSGGNYDMRNIFNGTVVQRHPSHAVTFVDNHDSQPEEALESFVEEWFKPLAYALTLTREQGYPSVFYGDYYGIPTHGVPAMRSKIDPILEARQKYAYGKQNDYLDHHNIIGWTREGNTAHPNSGLATIMSDGAGGSKWMFVGRNKAGQVWSDITGNHTGTVTINADGWGNFSVNGGSVSIWVNK

SEQ ID NO: 22413 - protein, 485 aa, Bacillus sp. 707
HHNGTNGTMMQYFEWYLPNDGNHWNRLNSDASNLKSKGITAVWIPPAWKGASQNDVGYGAYDLYDLGEFNQKGTVRTKYGTRSQLQAAVTSLKNNGIQVYGDVVMNHKGGADATEMVRAVEVNPNNRNQEVTGEYTIEAWTRFDFPGRGNTHSSFKWRWYHFDGVDWDQSRRLNNRIYKFRGHGKAWDWEVDTENGNYDYLMYADIDMDHPEVVNELRNWGVWYTNTLGLDGFRIDAVKHIKYSFTRDWIYHVRSATGKNMFAVAEFWKNDLGAIENYLQKTNWNHSVFDVPLHYNLYNASKSGGNYDMRNIFNGTVVQRHPSHAVTFVDNHDSQPEEALESFVEEWFKPLAYALTLTREQGYPSVFYGDYYGIPTHGVPAMRSKIDPILEARQKYAYGKQNDYLDHHNIIGWTREGNTAHPNSGLATIMSDGAGGSKWMFVGRNKAGQVWSDITGNRTGTVTINADGWGNFSVNGGSVSIWVNK

SEQ ID NO: 22414 - protein, 485 aa, Bacillus sp. 707
HHNGTNGTMMQYFEWYLPNDGNHWNRLNSDASNLKSKGITAVWIPPAWKGASQNDVGYGAYDLYDLGEFNQKGTVRTKYGTRSQLQAAVTSLKNNGIQVYGDVVMNHKGGADATEMVRAVEVNPNNRNQEVTGEYTIEAWTRFDFPGRGNTHSSFKWRWYHFDGVDWDQSRRLNNRIYKFRGHGKAWDWEVDTENGNYDYLMYADIDMDHPEVVNELRNWGVWYTNTLGLDGFRIDAVKHIKYSFTRDWINHVRSATGKNMFAVAEFWKNDLGAIENYLQKTNWNHSVFDVPLHYNLYNASKSGGNYDMRNIFNGTVVQRHPSHAVTFVDNHDSQPEEALESFVEEWFKPLAYALTLTREQGYPSVFYGDYYGIPTHGVPAMRSKIDPILEARQKYAYGKQNDYLDHHNIIGWTREGNTFHPNSGLATIMSDGAGGSKWMFVGRNKAGQVWSDITGNRTGTVTINADGWGNFSVNGGSVSIWVNK

SEQ ID NO: 22415 - protein, 485 aa, Bacillus sp. 707
HHNGTNGTMMQYFEWYLPNDGNHWNRLNSDASNLKSKGITAVWIPPAWKGASQNDVGYGAYDLYDLGEFNQKGTVRTKYGTRSQLQAAVTSLKNNGIQVYGDVVMNHKGGADATEMVRAVEVNPNNRNQEVTGEYTIEAWTRFDFPGRGNTHSSFKWRWYHFDGVDWDQSRRLNNRIYKFRGHGKAWDWEVDTENGNYDYLMYADIDMDHPEVVNELRNWGVWYTNTLGLDGFRIDAVKHIKYSFTRDWINHVRSATGKNMFAVAEFWKNDLGAIENYLQKTNWNHSVFDVPLHYNLYNASKSGGNYDMRNIFNGTVVQRHPSHAVTFVDNHDSQPYEALESFVEEWFKPLAYALTLTREQGYPSVFYGDYYGIPTHGVPAMRSKIDPILEARQKYAYGKQNDYLDHHNIIGWTREGNTAHPNSGLATIMSDGAGGSKWMFVGRNKAGQVWSDITGNRTGTVTINADGWGNFSVNGGSVSIWVNK

SEQ ID NO: 22416 - protein, 485 aa, Bacillus sp. 707
HHNGTNGTMMQYFEWYLPNDGNHWNRLNSDASNLKSKGITAVWIPPAWKGASQNDVGYGAYDLYDLGEFNQKGTVRTKYGTRSQLQAAVTNLKNNGIQVYGDVVMNHKGGADATEMVRAVEVNPNNRNQEVTGEYTIEAWTRFDFPGRGNTHSSFKWRWYHFDGVDWDQSRRLNNRIYKFRGHGKAWDWEVDTENGNYDYLMYADIDMDHPEVVNELRNWGVWYTNTLGLDGFRIDAVKHIKYSFTRDWINHVRSATGKNMFAVAEFWKNDLGAIENYLQKTNWNHSVFDVPLHYNLYNASKSGGNYDMRNIFNGTVVQRHPSHAVTFVDNHDSQPEEALESFVEEWFKPLAYALTLTREQGYPSVFYGDYYGIPTHGVPAMRSKIDPILEARQKYAYGKQNDYLDHHNIIGWTREGNTAHPNSGLATIMSDGAGGSKWMFVGRNKAGQVWSDITGNRTGTVTINADGWGNFSVNGGSVSIWVNK

SEQ ID NO: 22417 - protein, 485 aa, Bacillus sp. 707
HHNGTNGTMMQYFEWYLPNDGNHWNRLNSDASNLKSKGITAVWIPPAWKGASQNDVGYGAYDLYDLGEFNQKGTVRTKYGTRSQLQAAVTSLKNNGIQVYGDVVMNHKGGADATEMVRAVEVNPNNRNQEVTGEYTIEAWTRFDFPGRGNTHSSFKWRWYHFDGVDWDQSRRLNNRIYKFRGHGKAWDWEVDTENGNYDYLMYADIDMDHPEVVNELRNWGVWYTNTLGLDGFRIDAVKHIKYSFTRDWINHVRSATGKNMFAVAEFWKNDLGAIENYLQKTNWNHSVFDVPLHYNLYNASKSGGNYDMRYIFNGTVVQRHPSHAVTFVDNHDSQPEEALESFVEEWFKPLAYALTLTREQGYPSVFYGDYYGIPTHGVPAMRSKIDPILEARQKYAYGKQNDYLDHHNIIGWTREGNTAHPNSGLATIMSDGAGGSKWMFVGRNKAGQVWSDITGNRTGTVTINADGWGNFSVNGGSVSIWVNK

SEQ ID NO: 22418 - protein, 485 aa, Bacillus sp. 707
HHNGTNGTMMQYFEWYLPNDGNHWNRLNSDASNLKSKGITAVWIPPAWKGASQNDVGYGAYDLYDLGEFNQKGTVRTKYGTRSQLQAAVTSLKNNGIQVYGDVVMNHKGGADATEMVRAVEVNPNNRNQEVTGEYTIEAWTRFDFPGRGNTHSSFKWRWYHFDGVDWDQSRRLNNRIYKFRGHGKAWDWEVDTENGNYDYLMYADIDMDHPEVVNELRMWGVWYTNTLGLDGFRIDAVKHIKYSFTRDWINHVRSATGKNMFAVAEFWKNDLGAIENYLQKTNWNHSVFDVPLHYNLYNASKSGGNYDMRNIFNGTVVQRHPSHAVTFVDNHDSQPEEALESFVEEWFKPLAYALTLTREQGYPSVFYGDYYGIPTHGVPAMRSKIDPILEARQKYAYGKQNDYLDHHNIIGWTREGNTAHPNSGLATIMSDGAGGSKWMFVGRNKAGQVWSDITGNRTGTVTINADGWGNFSVNGGSVSIWVNK

SEQ ID NO: 22419 - protein, 485 aa, Bacillus sp. 707
HHNGTNGTMMQYFEWYLPNDGNHWNRLNSDASNLKSKGITAVWIPPAWKGASQNDVGYGAYDLYDLGEFNQKGTVRTKYGTRSQLQAAVTSLKNNGIQVYGDVVMNHKGGADATEMVRAVEVNPNNRNQEVTGEYTIEAWTRFDFPGRGNTHSSFKWRWYHFDGVDWDQSRRLNNRIYKFRGHGKAWDWEVDTENGNYDYLMYADIDMDHPEVVNELRNWGVWYTNTLGLDGFRIDAVKHIKYSFTRDWILHVRSATGKNMFAVAEFWKNDLGAIENYLQKTNWNHSVFDVPLHYNLYNASKSGGNYDMRNIFNGTVVQRHPSHAVTFVDNHDSQPEEALESFVEEWFKPLAYALTLTREQGYPSVFYGDYYGIPTHGVPAMRSKIDPILEARQKYAYGKQNDYLDHHNIIGWTREGNTAHPNSGLATIMSDGAGGSKWMFVGRNKAGQVWSDITGNRTGTVTINADGWGNFSVNGGSVSIWVNK

SEQ ID NO: 22420 - protein, 485 aa, Bacillus sp. 707
HHNGTNGTMMQYFEWYLPNDGNHWNRLNSDASNLKSKGITAVWIPPAWKGASQNDVGYGAYDLYDLGEFNQKGTVRTKYGTRSQLQAAVTSLKNNGIQVYGDVVMNHKGGADATEMVRAVEVNPNNRNQEVTGEYTIEAWTRFDFPGRGNTHSSFKWRWYHFDGVDWDQSRRLNNRIYKFRGHGKAWDWEVDTENGNYDYLMYADIDMDHPEVVNELRNWGVWYTNTLGLDGFRIDAVKHIKYSFTRDWINHVRSATGKNMFAVAEFWKNDLGAIENYLQKTNWNHSVFDVPLHYNLYNASKSGGNYDMRNIFNGTVVQRHPSHAVTFVDNHDSQPTEALESFVEEWFKPLAYALTLTREQGYPSVFYGDYYGIPTHGVPAMRSKIDPILEARQKYAYGKQNDYLDHHNIIGWTREGNTAHPNSGLATIMSDGAGGSKWMFVGRNKAGQVWSDITGNRTGTVTINADGWGNFSVNGGSVSIWVNK

SEQ ID NO: 22421 - protein, 485 aa, Bacillus sp. 707
HHNGTNGTMMQYFEWYLPNDGNHWNRLNSDASNLKSKGITAVWIPPAWKGASQNDVGYGAYDLYDLGEFNQKGTVRTKYGTRSQLQAAVTSLKNNGIQVYGDVVMNHKGGADATEMVRAVEVNPNNRNQEVTGEYTIEAWTRFDFPGRGNTHSSFKWRWYHFDGVDWDQSRRLNNRIYKFRGWGKAWDWEVDTENGNYDYLMYADIDMDHPEVVNELRNWGVWYTNTLGLDGFRIDAVKHIKYSFTRDWINHVRSATGKNMFAVAEFWKNDLGAIENYLQKTNWNHSVFDVPLHYNLYNASKSGGNYDMRNIFNGTVVQRHPSHAVTFVDNHDSQPEEALESFVEEWFKPLAYALTLTREQGYPSVFYGDYYGIPTHGVPAMRSKIDPILEARQKYAYGKQNDYLDHHNIIGWTREGNTAHPNSGLATIMSDGAGGSKWMFVGRNKAGQVWSDITGNRTGTVTINADGWGNFSVNGGSVSIWVNK

SEQ ID NO: 22422 - protein, 485 aa, Bacillus sp. 707
HHNGTNGTMMQYFEWYLPNDGNHWNRLNSDASNLKSKGITAVWIPPAWKGASQNDVGYGAYDLYDLGEFNQKGTVRTKYGTRSQLQAAVTSLKNNGIQVYGDVVMNHKGGADATEMVRAVEVNPNNRNQEVTGEYTIEAWTRFDFPGRGNTHSSFKWRWYHFDGVDWDQSRRLNNRIYKFRGHGKAWDWEVDTENGNYDYLMYADIDMDHPEVVNELRNWGVWYTNTLGLDGFRIDAVKHIKYSFTRDWINHVRSATGKNMFAVAEFWKNDLGAIENYLQKTNWNHSVFDVPLHYNLYNASKSGGNYDMRNIFNGTVVQRHPSHAVTFVDNHDSQPEEALESFVEEWFKPLAYALTLTREQGYPSVFYGDYYGIPTHGVPAMRSKIDPILEARQKYAYGKQNDYLDHHNIIGWTREGNTWHPNSGLATIMSDGAGGSKWMFVGRNKAGQVWSDITGNRTGTVTINADGWGNFSVNGGSVSIWVNK

SEQ ID NO: 22423 - protein, 485 aa, Bacillus sp. 707
HHNGTNGTMMQYFEWNLPNDGNHWNRLNSDASNLKSKGITAVWIPPAWKGASQNDVGYGAYDLYDLGEFNQKGTVRTKYGTRSQLQAAVTSLKNNGIQVYGDVVMNHKGGADATEMVRAVEVNPNNRNQEVTGEYTIEAWTRFDFPGRGNTHSSFKWRWYHFDGVDWDQSRRLNNRIYKFRGHGKAWDWEVDTENGNYDYLMYADIDMDHPEVVNELRNWGVWYTNTLGLDGFRIDAVKHIKYSFTRDWINHVRSATGKNMFAVAEFWKNDLGAIENYLQKTNWNHSVFDVPLHYNLYNASKSGGNYDMRNIFNGTVVQRHPSHAVTFVDNHDSQPEEALESFVEEWFKPLAYALTLTREQGYPSVFYGDYYGIPTHGVPAMRSKIDPILEARQKYAYGKQNDYLDHHNIIGWTREGNTAHPNSGLATIMSDGAGGSKWMFVGRNKAGQVWSDITGNRTGTVTINADGWGNFSVNGGSVSIWVNK

SEQ ID NO: 22424 - protein, 485 aa, Bacillus subtilis
HHNGTNGTMMQYFEWYLPNDGNHWNRLRSDASNLKDKGISAVWIPPAFKGASQNDVGYGAYDLYDLGEFNQKGTIRTKYGTRNQLQAAVNALKSNGIQVYGDVVMNHKGGADATEFVRAVEVNPNNRNQEVSGEYTIEAWTKFDFPGRGNTHSNFKWRWYHFDGVDYDQSRKLNNRIYKFRGDGKGWDWEVDTENGNYDYLMYADIDMDHPEVVNELRNWGVWYTNTLGLDGFRIDAVKHIKYSFTRDWINHVRSATGKNMFAVAEFWKNDLGAIENYLNKTNWNHSVFDVPLHYNLYNASKSGGNYDMRQIFNGTVVQRHPMHAVTFVDNHDSQPEEALESFVEEWFKPLAYALTLTREQGYPSVFYGDYYGIPTHGVPAMKSKIDPILEARQKYAYGRQNDYLDHHNIIGWTREGNTAHPNSGLATIMSDGAGGNKWMFVGRNKAGQVWTDITGNRAGTVTINADGWGNFSVNGGSVSIWVNK

SEQ ID NO: 22425 - protein, 485 aa, Bacillus sp. 707
HHNGTNGTMMQYFEWYLPNDGNHWNRLNSDASNLKSKGITAVWIPPAWKGASQNDVGYGAYDLYDLGEFNQKGTVRTKYGTRSQLQAAVTSLKNNGIQVYGDVVMNHKGGADATEMVRAVEVNPNNRNQEVTGEYTIEAWTRFDFPGRGNTHSSFKWRWYHFDGVDWDQSRRLNNRIYKFRGHGKAWDWEVDTENGNYDYLMYADIDMDHPEVVNELRNWGVWYTNTLGLDGFRIDAVKHIKYSFTRDWINHVRSATGKNMFAVAEFWKNDLGAIENYLQKTNWNHSVFDVPLHYNLYNASKSGGNYDMRNIFNGTVVQRHPSHAVTFVDNHDSQPEEALESFVEEWFKPLAYALTLTREQGYPSVFYGDYYGIPTHGVPAMRSKIDPILEARQKYAYGWQNDYLDHHNIIGWTREGNTAHPNSGLATIMSDGAGGSKWMFVGRNKAGQVWSDITGNRTGTVTINADGWGNFSVNGGSVSIWVNK

SEQ ID NO: 22426 - protein, 485 aa, Bacillus sp. 707
HHNGTNGTMMQYFEWYLPNDGNHWNRLNSDASNLKSKGITAVWIPPAWKGASQNDVGYGAYDLYDLGEFNQKGTVRTKYGTRSQLQAAVTSLKNNGIQVYGDVVMNHKGGADATEMVRAVEVNPNNRNQEVTGEYTIEAWTCFDFPGRGNTHSSFKWRWYHFDGVDWDQSRRLNNRIYKFRGHGKAWDWEVDTENGNYDYLMYADIDMDHPEVVNELRNWGVWYTNTLGLDGFRIDAVKHIKYSFTRDWINHVRSATGKNMFAVAEFWKNDLGAIENYLQKTNWNHSVFDVPLHYNLYNASKSGGNYDMRNIFNGTVVQRHPSHAVTFVDNHDSQPEEALESFVEEWFKPLAYALTLTREQGYPSVFYGDYYGIPTHGVPAMRSKIDPILEARQKYAYGKQNDYLDHHNIIGWTREGNTAHPNSGLATIMSDGAGGSKWMFVGRNKAGQVWSDITGNRTGTVTINADGWGNFSVNGGSVSIWVNK

SEQ ID NO: 22427 - protein, 485 aa, Bacillus sp. 707
HHNGTNGTMMQYFEWYLPNDGNHWNRLNSDASNLKSKGITAVWIPPAWKGASQNDVGYGAYDLYDLGEFNQKGTVRTKYGTRSQLQAAVTSLKNNGIQVYGDVVMNHKGGADATEMVRAVEVNPNNRNQEVTGEYTIEAWTRFDFPGRGNTHSSFKWRWYHFDGVDWDQSRRLNNRIYKFRGHGKAWDWEVDTENGNYDYLMYADIDMDHPEVVNELRNWGVWYTNTLGLDGFRIDAVKHIKYSFTRDWINHVRSATGKNMFAVAEFWKNDLGAIENYLQKTNWNHSVFDVPLHYNLYNASKSGGNYDMRNIFNGTVVQRHPRHAVTFVDNHDSQPEEALESFVEEWFKPLAYALTLTREQGYPSVFYGDYYGIPTHGVPAMRSKIDPILEARQKYAYGKQNDYLDHHNIIGWTREGNTAHPNSGLATIMSDGAGGSKWMFVGRNKAGQVWSDITGNRTGTVTINADGWGNFSVNGGSVSIWVNK

SEQ ID NO: 22428 - protein, 485 aa, Bacillus sp. 707
HHNGTNGTMMQYFEWYLPNDGNHWNRLNSDASNLKSKGITAVWIPPAWKGASQNDVGYGAYDLYDLGEFNQKGTVRTKYGTRSQLQAAVTSLKNNGIQVYGDVVMNHKGGADATEMVRAVEVNPNNRNQEVTGEYTIEAWTRFDFPGRGNTHSSFKWRWYHFDGVDWDQSRRLNNRIYKFRGHGKAWDWEVDTENGNYDYLMYADIDMDHPEVVNELRNWGVWYTNTLGLDGFRIDAVKHIKYSFTRDWIGHVRSATGKNMFAVAEFWKNDLGAIENYLQKTNWNHSVFDVPLHYNLYNASKSGGNYDMRNIFNGTVVQRHPSHAVTFVDNHDSQPEEALESFVEEWFKPLAYALTLTREQGYPSVFYGDYYGIPTHGVPAMRSKIDPILEARQKYAYGKQNDYLDHHNIIGWTREGNTAHPNSGLATIMSDGAGGSKWMFVGRNKAGQVWSDITGNRTGTVTINADGWGNFSVNGGSVSIWVNK

SEQ ID NO: 22429 - protein, 485 aa, Bacillus sp. 707
HHNGTNGTMMQYFEWYLPNDGNHWNRLNSDASNLKSKGITAVWIPPAWKGASQNDVGYGAYDLYDLGEFNQKGTVRTKYGTRSQLQAAVTSLKNNGIQVYGDVVMNHKGGADATEMVRAVEVNPNNRNQEVTGEYTIEAWTRFDFPGRGNTHSSFKWRWYHFDGVDWDQSRRLNNRIYKFRGHGKAWDWEVDTENGNYDYLMYADIDMDHPEVVNELRNWGVWYTNTLGLDGFRIDAVKHIKYSFTRDWINHVRSATGKNMFAVAEFWKNDLGAIENYLQKTNWNHSVFDVPLHYNLYNASKSGGNYDMRNIFNGTVVQRHPLHAVTFVDNHDSQPEEALESFVEEWFKPLAYALTLTREQGYPSVFYGDYYGIPTHGVPAMRSKIDPILEARQKYAYGKQNDYLDHHNIIGWTREGNTAHPNSGLATIMSDGAGGSKWMFVGRNKAGQVWSDITGNRTGTVTINADGWGNFSVNGGSVSIWVNK

SEQ ID NO: 22430 - protein, 485 aa, Bacillus sp. 707
HHNGTNGTMMQYFEWYLPNDGNHWNRLNSDASNLKSKGITAVWIPPAWKGASQNDVGYGAYDLYDLGEFNQKGTVRTKYGTRSQLQAAVTSLKNNGIQVYGDVVMNHKGGADATEMVRAVEVNPNNRNQEVTGEYTIEAWTRFDFPGRGNTHSSFKWRWYHFDGVDWDQSRRLNNRIYKFRGFGKAWDWEVDTENGNYDYLMYADIDMDHPEVVNELRNWGVWYTNTLGLDGFRIDAVKHIKYSFTRDWINHVRSATGKNMFAVAEFWKNDLGAIENYLQKTNWNHSVFDVPLHYNLYNASKSGGNYDMRNIFNGTVVQRHPSHAVTFVDNHDSQPEEALESFVEEWFKPLAYALTLTREQGYPSVFYGDYYGIPTHGVPAMRSKIDPILEARQKYAYGKQNDYLDHHNIIGWTREGNTAHPNSGLATIMSDGAGGSKWMFVGRNKAGQVWSDITGNRTGTVTINADGWGNFSVNGGSVSIWVNK

SEQ ID NO: 22431 - protein, 485 aa, Bacillus sp.
HHNGTNGTMMQYFEWYLPNDGNHWNRLRSDASNLKDKGISAVWIPPAWKGASQNDVGYGAYDLYDLGEFNQKGTIRTKYGTRNQLQAAVNALKSNGIQVYGDVVMNHKGGADATEMVRAVEVNPNNRNQEVSGEYTIEAWTKFDFPGRGNTHSNFKWRWYHFDGVDWDQSRKLNNRIYKFRGDGKGWDWEVDTENGNYDYLTYADIDMDHPEVTNELRNWGVWYTNTLGLDGFRIDAVKHIKYSFTRDWINHVRSATGKNMFAVAEFWKNDLGAIENYLNKTNWNHSVFDVPLHYNLYNASKSGGNYDMRQIFNGTVVQRHPMHAVTFVDNHDSQPEEALESFVEEWFKPLAYALTLTREQGYPSVFYGDYYGIPTHGVPAMKSKIDPILEARQKYAYGRQNDYLDHHNIIGWTREGNTAHPNSGLATIMSDGAGGNKWMFVGYNKAGQVWTDITGNRAGTVTINADGWGNFSVNGGSVSIWVNK

SEQ ID NO: 22432 - protein, 485 aa, Bacillus subtilis
HHNGTNGTMMQYFEWYLPNDGNHWNRLRSDASNLKDKGISAVWIPPAWKGASQNDVGYGAYDLYDLGEFNQKGTIRTKYGTRNQLQAAVNALKSNGIQVYGDVVMNHKGGADATEMVRAVEVNPNNRNQEVSGEYTIEAWTKFDFPGRGNTHSNFKWRWYHFDGVDWDQSRKLNNRIYKFRGDGKGYDWEVDTENGNYDYLMYADIDLDHPEVVNELRNWGVWYTNTLGLDGFRIDAVKHIKYSFTRDWINHVRSATGKNMFAVAEFWKNDLGAIENYLNKTNWNHSVFDVPLHYNLYNASKSGGNYDMRQIFNGTVVQRHPMHAVTFVDNHDSQPEEALESFVEEWFKPLAYALTLTREQGYPSVFYGDYYGIPTHGVPAMKSKIDPILEARQKYAYGRQNDYLDHHNIIGWTREGNTAHPNSGLATIMSDGAGGNKWMFVGRNKAGQVWTDITGNRAGTVTINADGWGNFSVNGGSVSIWVNK

SEQ ID NO: 22433 - protein, 485 aa, Bacillus sp. 707
HHNGTNGTMMQYFEWYLPNDGNHWNRLNSDASNLKSKGITAVWIPPAWKGASQNDVGYGAYDLYDLGEFNQKGTVRTKYGTRSQLQAAVTSLKNNGIQVYGDVVMNHKGGADATEMVRAVEVNPNNRNQEVTGEYTIEAWTRFDFPGRGNTHSSFKWRWYHFDGVDWDQSRRLNNRIYKFRGHGKAWDWEVDTENGNYDYLMYADIDMDHPEVVNELRNWGVWYTNTLGLDGFRIDAVKHIKYSFTRDWINHVRSATGKNMFAVAEFWKNDLGAIENYLQKTNWNHSVFDVPLHYNLYNASKSGGNYDMRNIFNGTVVQSHPSHAVTFVDNHDSQPEEALESFVEEWFKPLAYALTLTREQGYPSVFYGDYYGIPTHGVPAMRSKIDPILEARQKYAYGKQNDYLDHHNIIGWTREGNTAHPNSGLATIMSDGAGGSKWMFVGRNKAGQVWSDITGNRTGTVTINADGWGNFSVNGGSVSIWVNK

SEQ ID NO: 22434 - protein, 485 aa, Bacillus sp. 707
HHNGTNGTMMQYFEWYLPNDGNHWNRLNSDASNLKSKGITAVWIPPAWKGASQNDVGYGAYDLYDLGEFNQKGTVRTKYGTRSQLQAAVTSLKNNGIQVYGDVVMNHKGGADATEMVRAVEVNPNNRNQEVTGEYTIEAWTRFDFPGRGNTHSSFKWRWYHFDGVDWDQSRRLNNRIYKFRGHGKAWDWEVDTENGNYDYLMYADIDMDHPEVVNELRNWGVWYTNTLGLDGFRIDAVKHIKYSFTRDWINHVRSATGKNMFAVAEFWKNDLGAIENYLQKTNWNHSVFDVPLHYNLYNASKSGGNYDMRNIFNGTVVQRHPSHAVTFVDNHDSQPEEALESFVEEWFKPLAYALTLTREQGYPSVFYGDYYGIPTHGVPAMRSKIDPILEARQKYAYGKQNDYLDHHNIIGWTREGNTAHPNSGLATIMSDGAGGSKWMFVGRNKAGQVWSDITGNRNGTVTINADGWGNFSVNGGSVSIWVNK

SEQ ID NO: 22435 - protein, 485 aa, Bacillus sp. 707
HHNGTNGTMMQYFEWTLPNDGNHWNRLNSDASNLKSKGITAVWIPPAWKGASQNDVGYGAYDLYDLGEFNQKGTVRTKYGTRSQLQAAVTSLKNNGIQVYGDVVMNHKGGADATEMVRAVEVNPNNRNQEVTGEYTIEAWTRFDFPGRGNTHSSFKWRWYHFDGVDWDQSRRLNNRIYKFRGHGKAWDWEVDTENGNYDYLMYADIDMDHPEVVNELRNWGVWYTNTLGLDGFRIDAVKHIKYSFTRDWINHVRSATGKNMFAVAEFWKNDLGAIENYLQKTNWNHSVFDVPLHYNLYNASKSGGNYDMRNIFNGTVVQRHPSHAVTFVDNHDSQPEEALESFVEEWFKPLAYALTLTREQGYPSVFYGDYYGIPTHGVPAMRSKIDPILEARQKYAYGKQNDYLDHHNIIGWTREGNTAHPNSGLATIMSDGAGGSKWMFVGRNKAGQVWSDITGNRTGTVTINADGWGNFSVNGGSVSIWVNK

SEQ ID NO: 22436 - protein, 485 aa, Bacillus sp. 707
HHNGTNGTMMQYFEWYLPNDGNHWNRLNSDASNLKSKGITAVWIPPAWKGASQNDVGYGAYDLYDLGEFNQKGTVRTKYGTRSQLQAAVTSLKNNGIQVYGDVVMNHKGGADATEMVRAVEVNPNNRNQEVTGEYTIEAWTRFDFPGRGNTHSSFKWRWYHFDGVDWDQSRRLNNRIYKFRGHGKAWDWEVDTENGNYDYLMYADIDMDHPEVVNELRNWGVWYTNTLGLDGFRIDAVKHIKYSFTRDWINHVRSATGKNMFAVAEFWKNDLGAIENYLQKTNWNHSVFDVPLHYNLYNASKSGGNYDMRNIFNGTVVQYHPSHAVTFVDNHDSQPEEALESFVEEWFKPLAYALTLTREQGYPSVFYGDYYGIPTHGVPAMRSKIDPILEARQKYAYGKQNDYLDHHNIIGWTREGNTAHPNSGLATIMSDGAGGSKWMFVGRNKAGQVWSDITGNRTGTVTINADGWGNFSVNGGSVSIWVNK

SEQ ID NO: 22437 - protein, 485 aa, Bacillus sp. 707
HHNGTNGTMMQYFEWYLPNDGNHWNRLNSDASNLKSKGITAVWIPPAWKGASQNDVGYGAYDLYDLGEFNQKGTVRTKYGTRSQLQAAVTSLKNNGIQVYGDVVMNHKGGADATEMVRAVEVNPNNRNQEVTGEYTIEAWTRFDFPGRGNTHSSFKWRWYHFDGVDWDQSRRLNNRIYKFRGHGKAWDWEVDTENGNYDYLMYADIDMDHPEVVNELRNWGVWYTNTLGLDGFRIDAVKHIKYSFTRDWIWHVRSATGKNMFAVAEFWKNDLGAIENYLQKTNWNHSVFDVPLHYNLYNASKSGGNYDMRNIFNGTVVQRHPSHAVTFVDNHDSQPEEALESFVEEWFKPLAYALTLTREQGYPSVFYGDYYGIPTHGVPAMRSKIDPILEARQKYAYGKQNDYLDHHNIIGWTREGNTAHPNSGLATIMSDGAGGSKWMFVGRNKAGQVWSDITGNRTGTVTINADGWGNFSVNGGSVSIWVNK

SEQ ID NO: 22438 - protein, 485 aa, Bacillus sp. 707
HHNGTNGTMMQYFEWYLPNDGNHWNRLNSDASNLKSKGITAVWIPPAWKGASQNDVGYGAYDLYDLGEFNQKGTVRTKYGTRSQLQAAVTSLKNNGIQVYGDVVMNHKGGADATEMVRAVEVNPNNRNQEVTGEYTIEAWTRFDFPGRGNTHSSFKWRWYHFDGVDWDQSRRLNNRIYKFRGHGKAWDWEVDTENGNYDYLMYADIDMDHPEVVNELRNWGVWYTNTLGLDGFRIDAVKHIKYSFTRDWINHVRSATGKNMFAVAEFWKNDLGAIENYLQKTNWNHSVFDVPLHYNLYNASKSGGNYDMRNIFNGTVVQRHPSHAVTFVDNHDSQPEEALESFVEEWFKPLAYALTLTREQGYPSVFYGDYYGIPTHGVPAMRSKIDPILEARQGYAYGKQNDYLDHHNIIGWTREGNTAHPNSGLATIMSDGAGGSKWMFVGRNKAGQVWSDITGNRTGTVTINADGWGNFSVNGGSVSIWVNK

SEQ ID NO: 22439 - protein, 485 aa, Bacillus sp. 707
HHNGTNGTMMQYFEWYLPNDGNHWNRLNSDASNLKSKGITAVWIPPAWKGASQNDVGYGAYDLYDLGEFNQKGTVRTKYGTRSQLQAAVTSLKNNGIQVYGDVVMNHKGGADATEMVRAVEVNPNNRNQEVTGEYTIEAWTRFDFPGRGNTHSSFKWRWYHFDGVDWDQSRRLNNRIYKFRGHGKAWDWEVDTENGNYDYLMYADIDMDHPEVVNELRNWGVWYTNTLGLDGFRIDAVKHIKYSFTRDWINHVRSATGKNMFAVAEFWKNDLGAIENYLQKTNWNHSVFDVPLHYNLYNASKSGGNYDMRNIFNGTVVQRHPSHAVTFVDNHDSQPEEALESFVEEWFKPLAYALTLTREQGYPSVFYGDYYGIPTHGVPAMRSKIDPILEARQKYAYGKQNDYLDHHNIIGWTREGNTAHPNSGLATIMSDGAGGCKWMFVGRNKAGQVWSDITGNRTGTVTINADGWGNFSVNGGSVSIWVNK

SEQ ID NO: 22440 - protein, 485 aa, Bacillus sp.
HHNGTNGTLMQYFEWYLPNDGNHWNRLRSDASNLKDKGISAVWIPPAWKGASQNDVGYGAYDLYDLGEFNQKGTIRTKYGTRNQLQAAVNALKSNGIQVYGDVVMNHKGGADATEMVRAVEVNPNNRNQEVSGEYTIEAWTKFDFPGRGNTHSNFKWRWYHFDGVDWDQSRKLNNRIYKFRGDGKGWDWEVDTENGNYDYLIYADIDMDHPEVVNELRNWGVWYTNTLGLDGFRIDAVKHIKYSFTRDWINHVRSATGKNMFAVAEFWKNDLGAIENYLNKTNWNHSVFDVPLHYNLYNASKSGGNYDMRQIFNGTVVQRHPMHAVTFVDNHDSQPEEALESFVEEWFKPLAYALTLTREQGYPSVFYGDYYGIPTHGVPAMKSKIDPILEARQKYAYGRQNDYLDHHNIIGWTREGNTAHPNSGLATIMSDGAGGNKWMFVGRNKAGQVWTDITGNRAGTVTINADGWGNFSVNGGSVSIWVNK

SEQ ID NO: 22441 - protein, 485 aa, Bacillus sp. 707
HHNGTNGTMMQYFEWYLPNDGNHWNRLNSDASNLKSKGITAVWIPPAWKGASQNDVGYGAYDLYDLGEFNQKGTVRTKYGTRSQLQAAVTSLKNNGIQVYGDVVMNHKGGADATEMVRAVEVNPNNRNQEVTGEYTIEAWTRFDFPGRGNTHSSFKWRWYHFDGVDWDQSRRLNNRIYKFRGHGKAWDWEVDTENGNYDYLMYADIDMDHPEVVNELRNWGVWYTNTLGLDGFRIDAVKHIKYSFTRDWINHVRSATGKNMFAVAEFWKNDLGAIENYLQKTNWNHSVFDVPLHYNLYNASKSGGNYDMRNIFNGTVVQRHPYHAVTFVDNHDSQPEEALESFVEEWFKPLAYALTLTREQGYPSVFYGDYYGIPTHGVPAMRSKIDPILEARQKYAYGKQNDYLDHHNIIGWTREGNTAHPNSGLATIMSDGAGGSKWMFVGRNKAGQVWSDITGNRTGTVTINADGWGNFSVNGGSVSIWVNK

SEQ ID NO: 22442 - protein, 485 aa, Bacillus sp. 707
HHNGTNGTMMQYFEWYLPNDGNHWNRLNSDASNLKSKGITAVWIPPAWKGASQNDVGYGAYDLYDLGEFNQKGTVRTKYGTRSQLQAAVTSLKNNGIQVYGDVVMNHKGGADATEMVRAVEVNPNNRNQEVTGEYTIEAWTRFDFPGRGNTHSSFKWRWYHFDGVDWDQSRRLNNRIYKFRGHGKAWDWEVDTENGNYDYLMYADIDMDHPEVVNELRNWGVWYTNTLGLDGFRIDAVKHIKYSFTRDWINHVRSATGKNMFAVAEFWKNDLGAIENYLQKTNWNHSVFDVPLHYNLYNASKSGGNYDMRNIFNGTVVQRHPSHAVTFVDNHDSQPSEALESFVEEWFKPLAYALTLTREQGYPSVFYGDYYGIPTHGVPAMRSKIDPILEARQKYAYGKQNDYLDHHNIIGWTREGNTAHPNSGLATIMSDGAGGSKWMFVGRNKAGQVWSDITGNRTGTVTINADGWGNFSVNGGSVSIWVNK

SEQ ID NO: 22443 - protein, 485 aa, Bacillus sp. 707
HHNGTNGTMMQYFEWYLPNDGNHWNRLNSDASNLKSKGITAVWIPPAWKGASQNDVGYGAYDLYDLGEFNQKGTVRTKYGTRSQLQAAVTVLKNNGIQVYGDVVMNHKGGADATEMVRAVEVNPNNRNQEVTGEYTIEAWTRFDFPGRGNTHSSFKWRWYHFDGVDWDQSRRLNNRIYKFRGHGKAWDWEVDTENGNYDYLMYADIDMDHPEVVNELRNWGVWYTNTLGLDGFRIDAVKHIKYSFTRDWINHVRSATGKNMFAVAEFWKNDLGAIENYLQKTNWNHSVFDVPLHYNLYNASKSGGNYDMRNIFNGTVVQRHPSHAVTFVDNHDSQPEEALESFVEEWFKPLAYALTLTREQGYPSVFYGDYYGIPTHGVPAMRSKIDPILEARQKYAYGKQNDYLDHHNIIGWTREGNTAHPNSGLATIMSDGAGGSKWMFVGRNKAGQVWSDITGNRTGTVTINADGWGNFSVNGGSVSIWVNK

SEQ ID NO: 22444 - protein, 485 aa, Bacillus sp.
HHNGTNGTMMQYFEWYLPNDGNHWNRLRSDASNLKDKGISAVWIPPAWKGASQNDVGYGAYDLYDLGEFNQKGTIRTKYGTRNQLQAAVNALKSNGIQVYGDVVMNHKGGADATEMVRAVEVNPNNRNQEVSGEYTIEAWTKFDFPGRGNTHSNFKWRWYHFDGVDWDQSRKLNNRIYKFRGDGKGWDWEVDTENGNYDYLTYADIDMDHPEVVNELRNWGVWYTNTLGLDGFRIDAVKHIKYSFTRDWINHVRSATGKNMFAVAEFWKNDLGAIENYLNKTNWNHSVFDVPLHYNLYXASKSGGNYDMRQIFNGTVVQRHPMHAVTFVDNHDSQPEEALESFVEEWFKPLAYALTLTREQGYPSVFYGDYYGIPTHGVPAMKSKIDPILEARQKYAYGRQNDYLDHHNIIGWTREGNTAHPNSGLATIMSDGAGGNKWMFVGRNKAGQVWTDITGNRAGTVTINADGWGNFSVNGGSVSIWVNK

SEQ ID NO: 22445 - protein, 485 aa, Bacillus sp. 707
HHNGTNGTMMQYFEWYLPNDGNHWNRLNHDASNLKSKGITAVWIPPAWKGASQNDVGYGAYDLYDLGEFNQKGTVRTKYGTRSQLQAAVTSLKNNGIQVYGDVVMNHKGGADATEMVRAVEVNPNNRNQEVTGEYTIEAWTRFDFPGRGNTHSSFKWRWYHFDGVDWDQSRRLNNRIYKFRGHGKAWDWEVDTENGNYDYLMYADIDMDHPEVVNELRNWGVWYTNTLGLDGFRIDAVKHIKYSFTRDWINHVRSATGKNMFAVAEFWKNDLGAIENYLQKTNWNHSVFDVPLHYNLYNASKSGGNYDMRNIFNGTVVQRHPSHAVTFVDNHDSQPEEALESFVEEWFKPLAYALTLTREQGYPSVFYGDYYGIPTHGVPAMRSKIDPILEARQKYAYGKQNDYLDHHNIIGWTREGNTAHPNSGLATIMSDGAGGSKWMFVGRNKAGQVWSDITGNRTGTVTINADGWGNFSVNGGSVSIWVNK

SEQ ID NO: 22446 - protein, 485 aa, Bacillus subtilis
HHNGTNGTMMQYFEWYLPNDGNHWNRLRSDASNLKDKGISAVWIPPAWKGASQNDVGYGAYDLYDLGEFNQKGTIRTKYGTRNQLQAAVNALKSNGIQVYGDVVMNHKGGADATEMVRAVEVNPNNRNQEVSGEYTIEAWTKFDFPGRGNTHSNFKWRWYHFDGVDWDQSRKLNNRIYKFRGDGKGWDWEVDTENGNYDYLMYADIDMDHPEVVNELRNWGVWYTNTLGLDGFRIDAAKHIKYSFTRDWINHVRSATGKNMFAVAEFWKNDLGAIENYLNKTNWNHSVFDVPLHYNLYNASKSGGNYDMRQIFNGTVVQRHPMHAVTFVDNHDTQPEEALESFVEEWFKPLAYALTLTREQGYPSVFYGDYYGIPTHGVPAMKSKIDPILEARQKYAYGRQNDYLDHHNIIGWTREGNTAHPNSGLATIMSDGAGGNKWMFVGRNKAGQVWTDITGNRAGTVTINADGWGNFSVNGGSVSIWVNK

SEQ ID NO: 22447 - protein, 485 aa, Bacillus sp. 707
HHNGTNGTMMQYFEWYLPNDGNHWNRLNSDASNLKSKGITAVWIPPAWKGASQNDVGYGAYDLYDLGEFNQKGTVRTKYGTRSQLQAAVTSLKNNGIQVYGDVVMNHKGGADATEMVRAVEVNPNNRNQEVTGEYTIEAWTRFDFPGRGNTHSSFKWRWYHFDGVDWDQSRRLNNRIYKFRGHGKAWDWEVDTENGNYDYLMYADIDMDHPEVVNELRNWGVWYTNTLGLDGFRIDAVKHIKYSFTRDWINHVRSATGKNMFAVAEFWKNDLGAIENYLQKTNWNHSVFDVPLHYNLYNASKSGGNYDMRNIFNGTVVQRHPSHAVTFVDNHDSQPEEALESFVEEWFKPLAYALTLTREQGYPSVFYGDYYGIPTHGVPAMRSKIDPILEARQKYAYGKQNDYLDHHNIIGWTREGNTIHPNSGLATIMSDGAGGSKWMFVGRNKAGQVWSDITGNRTGTVTINADGWGNFSVNGGSVSIWVNK

SEQ ID NO: 22448 - protein, 485 aa, Bacillus sp. 707
HHNGTNGTMMQYFEWYLPNDGNHWNRLNSDASNLKSKGITAVWIPPAWKGASQNDVGYGAYDLYDLGEFNQKGTVRTKYGTRSQLQAAVTSLKNNGIQVYGDVVMNHKGGADATEMVRAVEVNPNNRNQEVTGEYTIEAWTRFDFPGRGNTHSSFKWRWYHFDGVDWDQSRRLNNRIYKFRGHGKAWDWEVDTENGNYDYLMYADIDMDHPEVVNELRNWGVWYTNTLGLDGFRIDAVKHIKYSFTRDWINHVRSATGKNMFAVAEFWKNDLGAIENYLQKTNWNHSVFDVPLHYNLYNASKSGGNYDMRNIFNGTVVQRHPAHAVTFVDNHDSQPEEALESFVEEWFKPLAYALTLTREQGYPSVFYGDYYGIPTHGVPAMRSKIDPILEARQKYAYGKQNDYLDHHNIIGWTREGNTAHPNSGLATIMSDGAGGSKWMFVGRNKAGQVWSDITGNRTGTVTINADGWGNFSVNGGSVSIWVNK

SEQ ID NO: 22449 - protein, 485 aa, Bacillus sp. 707
HHNGTNGTMMQYFEWYLPNDGNHWNRLNSDASNLKSKGITAVWIPPAWKGASQNDVGYGAYDLYDLGEFNQKGTVRTKYGTRSQLQAAVTSLKNNGIQVYGDVVMNHKGGADATEMVRAVEVNPNNRNQEVTGEYTIEAWTRFDFPGRGNTHSSFKWRWYHFDGVDWDQSRRLNNRIYKFRGHGKAWDWEVDTENGNYDYLMYADIDMDHPEVVNELRNWGVWYTNTLGLDGFRIDAVKHIKYSFTRDWINHVRSATGKNMFAVAEFWKNDLGAIENYLQKTNWNHSVFDVPLHYNLYNASKSGGNYDMRNIFNGTVVQRHPSHAVTFVDNHDSQPAEALESFVEEWFKPLAYALTLTREQGYPSVFYGDYYGIPTHGVPAMRSKIDPILEARQKYAYGKQNDYLDHHNIIGWTREGNTAHPNSGLATIMSDGAGGSKWMFVGRNKAGQVWSDITGNRTGTVTINADGWGNFSVNGGSVSIWVNK

SEQ ID NO: 22450 - protein, 485 aa, Bacillus sp. 707
HHNGTNGTMMQYFEWYLPNDGNHWNRLNSDASNLKSKGITAVWIPPAWKGASQNDVGYGAYDLYDLGEFNQKGTVRTKYGTRSQLQAAVTSLKNNGIQVYGDVVMNHKGGADATEMVRAVEVNPNNRNQEVTGEYTIEAWTRFDFPGRGNTHSSFKWRWYHFDGVDWDQSRRLNNRIYKFRGHGKAWDWEVDTENGNYDYLMYADIDMDHPEVVNELRNWGVWYTNTLGLDGFRIDAVKHIKYSFTRDWINHVRSATGKNMFAVAEFWKNDLGAIENYLQKTNWNHSVFDVPLHYNLYNASKSGGNYDMRNIFNGTVVQRHPSHAVTFVDNHDSQPEEALESFVEEWFKPLAYALTLTREQGYPSVFYGDYYGIPTHGVPAMRSKIDPILEARQKYAYGKQNDYLDHHNIIGWTREGNTAHPNSGLATIMSDGAGGSKWMFVGRNKAGQVWKDITGNRTGTVTINADGWGNFSVNGGSVSIWVNK

SEQ ID NO: 22451 - protein, 485 aa, Bacillus sp. 707
HHNGTNGTMMQYFEWYLPNDGNHWNRLNSDASNLKSKGITAVWIPPAWKGASQNDVGYGAYDLYDLGEFNQKGTVRTKYGTRSQLQAAVTSLKNNGIQVYGDVVMNHKGGADATEMVRAVEVNPNNRNQEVTGEYTIEAWTRFDFPGRGNTHSSFKWRWYHFDGVDWDQSRRLNNRIYKFRGDGKAWDWEVDTENGNYDYLMYADIDMDHPEVVNELRNWGVWYTNTLGLDGFRIDAVKHIKYSFTRDWINHVRSATGKNMFAVAEFWKNDLGAIENYLQKTNWNHSVFDVPLHYNLYNASKSGGNYDMRNIFNGTVVQRHPSHAVTFVDNHDSQPEEALESFVEEWFKPLAYALTLTREQGYPSVFYGDYYGIPTHGVPAMRSKIDPILEARQKYAYGKQNDYLDHHNIIGWTREGNTAHPNSGLATIMSDGAGGSKWMFVGRNKAGQVWSDITGNRTGTVTINADGWGNFSVNGGSVSIWVNK

SEQ ID NO: 22452 - protein, 485 aa, Bacillus sp. 707
HHNGTNGTMMQYFEWYLPNDGNHWNRLNSDASNLKSKGITAVWIPPAWKGASQNDVGYGAYDLYDLGEFNQKGTVRTKYGTRSQLQAAVTSLKNNGIQVYGDVVMNHKGGADATEMVRAVEVNPNNRNQEVTGEYTIEAWTRFDFPGRGNTHSSFKWRWYHFDGVDWDQSRRLNNRIYKFRGHGKAWDWEVDTENGNYDYLMYADIDMDHPEVVNELRNWGVWYTNTLGLDGFRIDAVKHIKYSFTRDWINHVRSATGKNMFAVAEFWKNDLGAIENYLQKTNWNHSVFDVPLHYNLYNASKSGGNYDMRNIFNGTVVQRHPEHAVTFVDNHDSQPEEALESFVEEWFKPLAYALTLTREQGYPSVFYGDYYGIPTHGVPAMRSKIDPILEARQKYAYGKQNDYLDHHNIIGWTREGNTAHPNSGLATIMSDGAGGSKWMFVGRNKAGQVWSDITGNRTGTVTINADGWGNFSVNGGSVSIWVNK

SEQ ID NO: 22453 - protein, 485 aa, Bacillus sp. 707
HHNGTNGTMMQYFEWYLPNDGNHWNRLNSDASNLKSKGITAVWIPPAWKGASQNDVGYGAYDLYDLGEFNQKGTVRTKYGTRSQLQAAVTSLKNNGIQVYGDVVMNHKGGADATEMVRAVEVNPNNRNQEVTGEYTIEAWTRFDFPGRGNTHSSFKWRWYHFDGVDWDQSRRLNNRIYKFRGHGKAWDWEVDTENGNYDYLMYADIDMDHPEVVNELRNWGVWYTNTLGLDGFRIDAVKHIKYSFTRDWINHVRSATGKNMFAVAEFWKNDLGAIENYLQKTNWNHSVFDVPLHYNLYNASKSGGNYDMRNIFNGTVVQRHPSHAVTFVDNHDSQPEEALESFVEEWFKPLAYALTLTREQGYPSVFYGDYYGIPTHGVPAMRSKIDPILEARQKYAYGHQNDYLDHHNIIGWTREGNTAHPNSGLATIMSDGAGGSKWMFVGRNKAGQVWSDITGNRTGTVTINADGWGNFSVNGGSVSIWVNK

SEQ ID NO: 22454 - protein, 485 aa, Bacillus sp. 707
HHNGTNGTMMQYFEWYLPNDGNHWNRLNSDASNLKSKGITAVWIPPAWKGASQNDVGYGAYDLYDLGEFNQKGTVRTKYGTRSQLQAAVTSLKNNGIQVYGDVVMNHKGGADATEMVRAVEVNPNNRNQEVTGEYTIEAWTRFDFPGRGNTHSSFKWRWYHFDGVDWDQSRRLNNRIYKFRGHGKAWDWEVDTENGNYDYLMYADIDMDHPEVVNELRNWGVWYTNTLGLDGFRIDAVKHIKYSFTRDWINHVRSATGKNMFAVAEFWKNDLGAIENYLQKTNWNHSVFDVPLHYNLYNASKSGGNYDMRQIFNGTVVQRHPSHAVTFVDNHDSQPEEALESFVEEWFKPLAYALTLTREQGYPSVFYGDYYGIPTHGVPAMRSKIDPILEARQKYAYGKQNDYLDHHNIIGWTREGNTAHPNSGLATIMSDGAGGSKWMFVGRNKAGQVWSDITGNRTGTVTINADGWGNFSVNGGSVSIWVNK

SEQ ID NO: 22455 - protein, 483 aa, Bacillus sp. SP70
HHNGTNGTMMQYFEWYLPNDGNHWNRLNSDASNLKSKGITAVWIPPAWKGASQNDVGYGAYDLYDLGEFNQKGTVRTKYGTRSQLQAAVTSLKNNGIQVYGDVVMNHKGGADATEMVRAVEVNPNNRNQEVTGEYTIEAWTRFDFPGRGNTHSSFKWRWYHFDGVDWDQSRRLNNRIYKFRGKAWDWEVDTENGNYDYLMYADIDMDHPEVVNELRNWGVWYTNTLGLDGFRIDAVKHIKYSFTRDWINHVRSATGKNMFAVAEFWKNDLGAIENYLQKTNWNHSVFDVPLHYNLYNASKSGGNYDMRNIFNGTVVQKHPSHAVTFVDNHDSQPEEALESFVEEWFKPLAYALTLTREQGYPSVFYGDYYGIPTHGVPAMRSKIDPILEARQKYAYGKQNDYLDHHNIIGWTREGNTAHPNSGLATIMSDGAGGSKRMFVGRNKAGQVWSDITGNRTGTVTINADGWGNFSVNGGSVSIWVNK

SEQ ID NO: 22456 - protein, 485 aa, Bacillus sp. 707
HHNGTNGTMMQYFEWYLPNDGNHWNRLNSDASNLKSKGITAVWIPPAWKGASQNDVGYGAYDLYDLGEFNQKGTVRTKYGTRSQLQAAVTSLKNNGIQVYGDVVMNHKGGADATEMVRAVEVNPNNRNQEVTGEYTIEAWTRFDFPGRGNTHSSFKWRWYHFDGVDWDQSRRLNNRIYKFRGHGKAWDWEVDTENGNYDYLMYADIDMDHPEVVNELRNWGMWYTNTLGLDGFRIDAVKHIKYSFTRDWINHVRSATGKNMFAVAEFWKNDLGAIENYLQKTNWNHSVFDVPLHYNLYNASKSGGNYDMRNIFNGTVVQRHPSHAVTFVDNHDSQPEEALESFVEEWFKPLAYALTLTREQGYPSVFYGDYYGIPTHGVPAMRSKIDPILEARQKYAYGKQNDYLDHHNIIGWTREGNTAHPNSGLATIMSDGAGGSKWMFVGRNKAGQVWSDITGNRTGTVTINADGWGNFSVNGGSVSIWVNK

SEQ ID NO: 22457 - protein, 485 aa, Bacillus sp.
HHNGTNGTLMQYFEWYLPNDGNHWNRLRSDASNLKDKGISAVWIPPAWKGASQNDVGYGAYDLYDLGEFNQKGTIRTKYGTRNQLQAAVNALKSNGIQVYGDVVMNHKGGADATEMVRAVEVNPNNRNQEVSGEYTIEAWTKFDFPGRGNTHSNFKWRWYHFDGVDWDQSRKLNNRIYKFRGDGKGWDWEVDTENGNYDYLMYADIDMDHPEVVNELRNWGVWYTNTLGLDGFRIDAVKHIKYSFTRDWINHVRSATGKNMFAVAEFWKNDLGAIENYLNKTNWNHSVFDVPLHYNLYNASKSGGNYDMRQIFNGTVVQRHPTHAVTFVDNHDSQPEEALESFVEEWFKPLAYALTLTREQGYPSVFYGDYYGIPTHGVPAMKSKIDPILEARQKYAYGRQNDYLDHHNIIGWTREGNTAHPNSGLATIMSDGAGGNKWMFVGRNKAGQVWTDITGNRAGTVTINADGWGNFSVNGGSVSIWVNK

SEQ ID NO: 22458 - protein, 485 aa, Bacillus sp.
HHNGTNGTMMQYFEWYLPNDGNHWNRLNSDASNLKSKGITAVWIPPAWKGASQNDVGYGAYDLYDLGEFNQKGTVRTKYGTRSQLQAAVTSLKNNGIQVYGDVVMNHKGGADATEMVRAVEVNPNNRNQEVTGEYTIEAWTRFDFPGRGNTHSSFKWRWYHFDGVDWDQSRRLNNRIYKFRGHGKAWDWEVDSEFGNYDYLMYADIDMDHPEVVNELRNWGVWYTNTLGLDGFRIDAVKHIKYSFTRDWINHVRSATGKNMFAVAEFWKNDLGAIENYLQKTNWNHSVFDVPLHYNLYNASKSGGNYDMRNIFNGTVVQRHPSHAVTFVDNHDSQPEEALESFVEEWFKPLAYALTLTREQGYPSVFYGDYYGIPTHGVPAMRSKIDPILEARQKYAYGKQNDYLDHHNIIGWTREGNTAHPNSGLATIMSDGAGGSKWMFVGRNKAGQVWSDITGNRTGTVTINADGWGNFSVNGGSVSIWVNK

SEQ ID NO: 22459 - protein, 485 aa, Bacillus sp. 707
HHNGTNGTMMQYFEWYLPNDGNHWNRLNSDASNLKSKGITAVWIPPAWKGASQNDVGYGAYDLYDLGEFNQKGTVRTKYGTRSQLIAAVTSLKNNGIQVYGDVVMNHKGGADATEMVRAVEVNPNNRNQEVTGEYTIEAWTRFDFPGRGNTHSSFKWRWYHFDGVDWDQSRRLNNRIYKFRGHGKAWDWEVDTENGNYDYLMYADIDMDHPEVVNELRNWGVWYTNTLGLDGFRIDAVKHIKYSFTRDWINHVRSATGKNMFAVAEFWKNDLGAIENYLQKTNWNHSVFDVPLHYNLYNASKSGGNYDMRNIFNGTVVQRHPSHAVTFVDNHDSQPEEALESFVEEWFKPLAYALTLTREQGYPSVFYGDYYGIPTHGVPAMRSKIDPILEARQKYAYGKQNDYLDHHNIIGWTREGNTAHPNSGLATIMSDGAGGSKWMFVGRNKAGQVWSDITGNRTGTVTINADGWGNFSVNGGSVSIWVNK

SEQ ID NO: 22460 - protein, 485 aa, Bacillus sp. 707
HHNGTNGTMMQYFEWYLPNDGNHWNRLNSDASNLKSKGITAVWIPPAWKGASQNDVGYGAYDLYDLGEFNQKGTVRTKYGTRSQLQAAVTSLKNNGIQVYGDVVMNHKGGADATEMVRAVEVNPNNRNQEVTGEYTIEAWTRFDFPGRGNTHSSFKWRWYHFDGVDWDQSRRLNNRIYKFRGHGKAWDWEVDTENGNYDYLMYADIDMDHPEVVNELRNWGVWYTNTLGLDGFRIDAVKHIKYSFTRDWIQHVRSATGKNMFAVAEFWKNDLGAIENYLQKTNWNHSVFDVPLHYNLYNASKSGGNYDMRNIFNGTVVQRHPSHAVTFVDNHDSQPEEALESFVEEWFKPLAYALTLTREQGYPSVFYGDYYGIPTHGVPAMRSKIDPILEARQKYAYGKQNDYLDHHNIIGWTREGNTAHPNSGLATIMSDGAGGSKWMFVGRNKAGQVWSDITGNRTGTVTINADGWGNFSVNGGSVSIWVNK

SEQ ID NO: 22461 - protein, 485 aa, Bacillus sp.
HHNGTNGTLMQYFEWYLPNDGNHWNRLRSDASNLKDKGISAVWIPPAWKGASQNDVGYGAYDLYDLGEFNQKGTIRTKYGTRNQLQAAVNALKSNGIQVYGDVVMNHKGGADATEMVRAVEVNPNNRNQEVSGEYTIEAWTKFDFPGRGNTHSNFKWRWYHFDGVDWDQSRKLNNRIYKFRGDGKGWDWEVDTENGNYDYLTYADIDMDHPEVVNELRNWGVWYTNTLGLDGFRIDAVKHIKYSFTRDWINHVRSATGKNMFAVAEFWKNDLGAIENYLNKTNWNHSVFDVPLHFNLYNASKSGGNYDMRQIFNGTVVQRHPMHAVTFVDNHDSQPEESLESFVEEWFKPLAYALTLTREQGYPSVFYGDYYGIPTHGVPAMKSKIDPILEARQKYAYGRQNDYLDHHNIIGWTREGNTAHPNSGLATIMSDGAGGNKWMFVGRNKAGQVWTDITGNRAGTVTINADGWGNFSVNGGSVSIWVNK

SEQ ID NO: 22462 - protein, 485 aa, Bacillus sp. 707
HHNGTNGTMMQYFEWYLPNDGNHWNRLNSDASNLKSKGITAVWIPPAWKGASQNDVGYGAYDLYDLGEFNQKGTVRTKYGTRSQLTAAVTSLKNNGIQVYGDVVMNHKGGADATEMVRAVEVNPNNRNQEVTGEYTIEAWTRFDFPGRGNTHSSFKWRWYHFDGVDWDQSRRLNNRIYKFRGHGKAWDWEVDTENGNYDYLMYADIDMDHPEVVNELRNWGVWYTNTLGLDGFRIDAVKHIKYSFTRDWINHVRSATGKNMFAVAEFWKNDLGAIENYLQKTNWNHSVFDVPLHYNLYNASKSGGNYDMRNIFNGTVVQRHPSHAVTFVDNHDSQPEEALESFVEEWFKPLAYALTLTREQGYPSVFYGDYYGIPTHGVPAMRSKIDPILEARQKYAYGKQNDYLDHHNIIGWTREGNTAHPNSGLATIMSDGAGGSKWMFVGRNKAGQVWSDITGNRTGTVTINADGWGNFSVNGGSVSIWVNK

SEQ ID NO: 22463 - protein, 485 aa, Bacillus sp. 707
HHNGTNGTMMQYFEWYLPNDGNHWNRLNSDASNLKSKGITAVWIPPAWKGASQNDVGYGAYDLYDLGEFNQKGTVRTKYGTRSQLQAAVTSLKNNGIQVYGDVVMNHKGGADATEMVRAVEVNPNNRNQEVTGEYTIEAWTRFDFPGRGNTHSSFKWRWYHFDGVDWDQSRRLNNRIYKFRGHGKAWDWEVDTENGNYDYLMYADIDMDHPEVVNELRNWGVWYTNTLGLDGFRIDAVKHIKYSFTRDWINHVRSATGKNMFAVAEFWKNDLGAIENYLQKTNWNHSVFDVPLHYNLYNASKSGGNYDMRNIFNGTVVQRHPSHAVTFVDNHDSQPEEALESFVEEWFKPLAYALTLTREQGYPSVFYGDYYGIPTHGVPAMRSKIDPILEARQKYAYGKQNDYLDHHNIIGWTREGNTAHPNSGLATIMSDGAGGSKWMFVGRNKAGQVWSDITGNRCGTVTINADGWGNFSVNGGSVSIWVNK

SEQ ID NO: 22464 - protein, 485 aa, Bacillus sp. 707
HHNGTNGTMMQYFEWYLPNDGNHWNRLNNDASNLKSKGITAVWIPPAWKGASQNDVGYGAYDLYDLGEFNQKGTVRTKYGTRSQLQAAVTSLKNNGIQVYGDVVMNHKGGADATEMVRAVEVNPNNRNQEVTGEYTIEAWTRFDFPGRGNTHSSFKWRWYHFDGVDWDQSRRLNNRIYKFRGHGKAWDWEVDTENGNYDYLMYADIDMDHPEVVNELRNWGVWYTNTLGLDGFRIDAVKHIKYSFTRDWINHVRSATGKNMFAVAEFWKNDLGAIENYLQKTNWNHSVFDVPLHYNLYNASKSGGNYDMRNIFNGTVVQRHPSHAVTFVDNHDSQPEEALESFVEEWFKPLAYALTLTREQGYPSVFYGDYYGIPTHGVPAMRSKIDPILEARQKYAYGKQNDYLDHHNIIGWTREGNTAHPNSGLATIMSDGAGGSKWMFVGRNKAGQVWSDITGNRTGTVTINADGWGNFSVNGGSVSIWVNK

SEQ ID NO: 22465 - protein, 485 aa, Bacillus sp. 707
HHNGTNGTMMQYFEWYLPNDGNHWNRLNSDASNLKSKGITAVWIPPAWKGASQNDVGYGAYDLYDLGEFNQKGTVRTKYGTRSQLQAAVTSLKNNGIQVYGDVVMNHKGGADATEMVRAVEVNPNNRNQEVTGEYTIEAWTRFDFPGRGNTHSSFKWRWYHFDGVDWDQSRRLNNRIYKFRGHGKAWDWEVDTENGNYDYLMYADIDMDHPEVVNELRNWGDWYTNTLGLDGFRIDAVKHIKYSFTRDWINHVRSATGKNMFAVAEFWKNDLGAIENYLQKTNWNHSVFDVPLHYNLYNASKSGGNYDMRNIFNGTVVQRHPSHAVTFVDNHDSQPEEALESFVEEWFKPLAYALTLTREQGYPSVFYGDYYGIPTHGVPAMRSKIDPILEARQKYAYGKQNDYLDHHNIIGWTREGNTAHPNSGLATIMSDGAGGSKWMFVGRNKAGQVWSDITGNRTGTVTINADGWGNFSVNGGSVSIWVNK

SEQ ID NO: 22466 - protein, 485 aa, Bacillus sp. 707
HHNGTNGTMMQYFEWYLPNDGNHWNRLNSDASNLKSKGITAVWIPPAWKGASQNDVGYGAYDLYDLGEFNQKGTVRTKYGTRSQLYAAVTSLKNNGIQVYGDVVMNHKGGADATEMVRAVEVNPNNRNQEVTGEYTIEAWTRFDFPGRGNTHSSFKWRWYHFDGVDWDQSRRLNNRIYKFRGHGKAWDWEVDTENGNYDYLMYADIDMDHPEVVNELRNWGVWYTNTLGLDGFRIDAVKHIKYSFTRDWINHVRSATGKNMFAVAEFWKNDLGAIENYLQKTNWNHSVFDVPLHYNLYNASKSGGNYDMRNIFNGTVVQRHPSHAVTFVDNHDSQPEEALESFVEEWFKPLAYALTLTREQGYPSVFYGDYYGIPTHGVPAMRSKIDPILEARQKYAYGKQNDYLDHHNIIGWTREGNTAHPNSGLATIMSDGAGGSKWMFVGRNKAGQVWSDITGNRTGTVTINADGWGNFSVNGGSVSIWVNK

SEQ ID NO: 22467 - protein, 485 aa, Bacillus sp. 707
HHNGTNGTMMQYFEWYLPNDGNHWNRLNSDASNLKSKGITAVWIPPAWKGASQNDVGYGAYDLYDLGEFNQKGTVRTKYGTRSQLQAAVTSLKNNGIQVYGDVVMNHKGGADATEMVRAVEVNPNNRNQEVTGEYTIEAWTRFDFPGRGNTHSSFKWRWYHFDGVDWDQSRRLNNRIYKFRGHGKAWDWEVDTENGNYDYLMYADIDMDHPEVVNELRNWGVWYTNTLGLDGFRIDAVKHIKYSFTRDWINHVRSATGKNMFAVAEFWKNDLGAIENYLQKTNWNHSVFDVPLHYNLYNASKSGGNYDMRDIFNGTVVQRHPSHAVTFVDNHDSQPEEALESFVEEWFKPLAYALTLTREQGYPSVFYGDYYGIPTHGVPAMRSKIDPILEARQKYAYGKQNDYLDHHNIIGWTREGNTAHPNSGLATIMSDGAGGSKWMFVGRNKAGQVWSDITGNRTGTVTINADGWGNFSVNGGSVSIWVNK

SEQ ID NO: 22468 - protein, 485 aa, Bacillus sp. 707
HHNGTNGTMMQYFEWYLPNDGNHWNRLNSDASNLKSKGITAVWIPPAWKGASQNDVGYGAYDLYDLGEFNQKGTVRTKYGTRSQLQAAVTSLKNNGIQVYGDVVMNHKGGADATEMVRAVEVNPNNRNQEVTGEYTIEAWTRFDFPGRGNTHSSFKWRWYHFDGVDWDQSRRLNNRIYKFRGHGKAWDWEVDTENGNYDYLMYADIDMDHPEVVNELRNWGVWYTNTLGLDGFRIDAVKHIKYSFTRDWINHVRSATGKNMFAVAEFWKNDLGAIENYLQKTNWNHSVFDVPLHYNLYNASKSGGNYDMRNIFNGTVVQRHPSHAVTFVDNHDSQPEEALESFVEEWFKPLAYALTLTREQGYPSVFYGDYYGIPTHGVPAMRSKIDPILEARQKYAYGKQSDYLDHHNIIGWTREGNTAHPNSGLATIMSDGAGGSKWMFVGRNKAGQVWSDITGNRTGTVTINADGWGNFSVNGGSVSIWVNK

SEQ ID NO: 22469 - protein, 485 aa, Bacillus sp. 707
HHNGTNGTMMQYFEWYLPNDGNHWNRLNSDASNLKSKGITAVWIPPAWKGASQNDVGYGAYDLYDLGEFNQKGTVRTKYGTRSQLQAAVTSLKNNGIQVYGDVVMNHKGGADATEMVRAVEVNPNNRNQEVTGEYTIEAWTRFDFPGRGNTHSSFKWRWYHFDGVDWDQSRRLNNRIYKFRGVGKAWDWEVDTENGNYDYLMYADIDMDHPEVVNELRNWGVWYTNTLGLDGFRIDAVKHIKYSFTRDWINHVRSATGKNMFAVAEFWKNDLGAIENYLQKTNWNHSVFDVPLHYNLYNASKSGGNYDMRNIFNGTVVQRHPSHAVTFVDNHDSQPEEALESFVEEWFKPLAYALTLTREQGYPSVFYGDYYGIPTHGVPAMRSKIDPILEARQKYAYGKQNDYLDHHNIIGWTREGNTAHPNSGLATIMSDGAGGSKWMFVGRNKAGQVWSDITGNRTGTVTINADGWGNFSVNGGSVSIWVNK

SEQ ID NO: 22470 - protein, 485 aa, Bacillus sp. 707
HHNGTNGTMMQYFEWYLPNDGNHWNRLNSDASNLKSKGITAVWIPPAWKGASQNDVGYGAYDLYDLGEFNQKGTVRTKYGTRSQLQAAVTSLKNNGIQVYGDVVMNHKGGADATEMVRAVEVNPNNRNQEVTGEYTIEAWTRFDFPGRGNTHSSFKWRWYHFDGVDWDQSRRLNNRIYKFRGHGKAWDWEVDTENGNYDYLMYADIDMDHPEVVNELRNWGYWYTNTLGLDGFRIDAVKHIKYSFTRDWINHVRSATGKNMFAVAEFWKNDLGAIENYLQKTNWNHSVFDVPLHYNLYNASKSGGNYDMRNIFNGTVVQRHPSHAVTFVDNHDSQPEEALESFVEEWFKPLAYALTLTREQGYPSVFYGDYYGIPTHGVPAMRSKIDPILEARQKYAYGKQNDYLDHHNIIGWTREGNTAHPNSGLATIMSDGAGGSKWMFVGRNKAGQVWSDITGNRTGTVTINADGWGNFSVNGGSVSIWVNK

SEQ ID NO: 22471 - protein, 485 aa, Bacillus sp.
HHNGTNGTMMQYFEWYLPNDGNHWNRLRSDASNLKDKGISAVWIPPAWKGASQNDVGYGAYDLYDLGEFNQKGTIRTKYGTRNQLQAAVNALKSNGIQVYGDVVMNHKGGADATEMVRAVEVNPNNRNQEVSGEYTIEAWTKFDFPGRGNTHSNFKWRWYHFDGVDWDQSRKLNNRIYKFRGDGKGWDWEVDTENGNYDYLIYADIDMDHPEVVNELRNWGVWYTNTLGLDGFRIDAVKHIKYSFTRDWINHVRSATGKNMFAVAEFWKNDLGAIENYLNKTNWNHSVFDVPLHFNLYNASKSGGNYDMRQIFNGTVVQRHPMHAVTFVDNHDSQPEEALESFVEEWFKPLAYALTLTREQGYPSVFYGDYYGIPTHGVPAMKSKIDPILEARQKYAYGRQNDYLDHHNIIGWTREGNTAHPNSGLATIMSDGAGGNKWMFVGRNKAGQVWTDITGNRAGTVTINADGWGNFSVNGGSVSIWVNK

SEQ ID NO: 22472 - protein, 485 aa, Bacillus sp. 707
HHNGTNGTMMQYFEWYLPNDGNHWNRLNSDASNLKSKGITAVWIPPAWKGASQNDVGYGAYDLYDLGEFNQKGTVRTKYGTRSQLQAAVTSLKNNGIQVYGDVVMNHKGGADATEMVRAVEVNPNNRNQEVTGEYTIEAWTRFDFPGRGNTHSSFKWRWYHFDGVDWDQSRRLNNRIYKFRGHGKAWDWEVDTENGNYDYLMYADIDMDHPEVVNELRNWGVWYTNTLGLDGFRIDAVKHIKYSFTRDWINHVRSATGKNMFAVAEFWKNDLGAIENYLQKTNWNHSVFDVPLHYNLYNASKSGGNYDMRNIFNGTVVQRHPSHAVTFVDNHDSQPEEALESFVEEWFKPLAYALTLTREQGYPSVFYGDYYGIPTHGVPAMRSKIDPILEARQKYAYGKQNDYLDHHNIIGWTREGNTAHPNSGLATIMSDGAGGSKWMFVGRNKAGQVWSDITGNVTGTVTINADGWGNFSVNGGSVSIWVNK

SEQ ID NO: 22473 - protein, 485 aa, Bacillus sp. 707
HHNGTNGTMMQYFEWYLPNDGNHWNRLNSDASNLKSKGITAVWIPPAWKGASQNDVGYGAYDLYDLGEFNQKGTVRTKYGTRSQLQAAVTSLKNNGIQVYGDVVMNHKGGADATEMVRAVEVNPNNRNQEVTGEYTIEAWTRFDFPGRGNTHSSFKWRWYHFDGVDWDQSRRLNNRIYKFRGHGKAWDWEVDTENGNYDYLMYADIDMDHPEVVNELRNWGVWYTNTLGLDGFRIDAVKHIKYSFTRDWINHVRSATGKNMFAVAEFWKNDLGAIENYLQKTNWNHSVFDVPLHYNLYNASKSGGNYDMRNIFNGTVVQRHPSHAVTFVDNHDSQPEEALESFVEEWFKPLAYALTLTREQGYPSVFYGDYYGIPTHGVPAMRSKIDPILEARQKYAYGKQNDYLDHHNIIGWTREGNTAHPNSGLATIMSDGAGGSKWMFVGRNKAGQVWSDITGNETGTVTINADGWGNFSVNGGSVSIWVNK

SEQ ID NO: 22474 - protein, 485 aa, Bacillus sp. 707
HHNGTNGTMMQYFEWALPNDGNHWNRLNSDASNLKSKGITAVWIPPAWKGASQNDVGYGAYDLYDLGEFNQKGTVRTKYGTRSQLQAAVTSLKNNGIQVYGDVVMNHKGGADATEMVRAVEVNPNNRNQEVTGEYTIEAWTRFDFPGRGNTHSSFKWRWYHFDGVDWDQSRRLNNRIYKFRGHGKAWDWEVDTENGNYDYLMYADIDMDHPEVVNELRNWGVWYTNTLGLDGFRIDAVKHIKYSFTRDWINHVRSATGKNMFAVAEFWKNDLGAIENYLQKTNWNHSVFDVPLHYNLYNASKSGGNYDMRNIFNGTVVQRHPSHAVTFVDNHDSQPEEALESFVEEWFKPLAYALTLTREQGYPSVFYGDYYGIPTHGVPAMRSKIDPILEARQKYAYGKQNDYLDHHNIIGWTREGNTAHPNSGLATIMSDGAGGSKWMFVGRNKAGQVWSDITGNRTGTVTINADGWGNFSVNGGSVSIWVNK

SEQ ID NO: 22475 - protein, 484 aa, Bacillus sp. 707
HNGTNGTMMQYFEWYLPNDGNHWNRLNSDASNLKSKGITAVWIPPAWKGASQNDVGYGAYDLYDLGEFNQKGTVRTKYGTRSQLQAAVTSLKNNGIQVYGDVVMNHKGGADATEMVRAVEVNPNNRNQEVTGEYTIEAWTRFDFPGRGNTHSSFKWRWYHFDGVDWDQSRRLNNRIYKFRGHGKAWDWEVDTENGNYDYLMYADIDMDHPEVVNELRNWGVWYTNTLGLDGFRIDAVKHIKYSFTRDWINHVRSATGKNMFAVAEFWKNDLGAIENYLQKTNWNHSVFDVPLHYNLYNASKSGGNYDMRNIFNGTVVQRHPSHAVTFVDNHDSQPEEALESFVEEWFKPLAYALTLTREQGYPSVFYGDYYGIPTHGVPAMRSKIDPILEARQKYAYGKQNDYLDHHNIIGWTREGNTAHPNSGLATIMSDGAGGSKWMFVGRNKAGQVWSDITGNRTGTVTINADGWGNFSVNGGSVSIWVNK

SEQ ID NO: 22476 - protein, 484 aa, Bacillus sp. 707
HHNGTNGTMMQYFEWYLPNDGNHWNRLNSDASNLKSKGITAVWIPPAWKGASQNDVGYGAYDLYDLGEFNQKGTVRTKYGTRSQLQAAVTSLKNNGIQVYGDVVMNHKGGADATEMVRAVEVNPNNRNQEVTGEYTIEAWTRFDFPGRGNTHSSFKWRWYHFDGVDWDQSRRLNNRIYKFRGHGKAWDWEVDTENGNYDYLMYADIDMDHPEVVNELRNWGVWYTNTLGLDGFRIDAVKHIKYSFTRDWINHVRSATGKNMFAVAEFWKNDLGAIENYLQKTNWNHSVFDVPLHYNLYNASKSGGNYDMRNIFNGTVVQRHPSHAVTFVDNHDSQPEEALESFVEEWFKPLAYALTLTREQGYPSVFYGDYYGIPTHGVPAMRSKIDPILEARQKYAYGKQNDYLDHHNIGWTREGNTAHPNSGLATIMSDGAGGSKWMFVGRNKAGQVWSDITGNRTGTVTINADGWGNFSVNGGSVSIWVNK

SEQ ID NO: 22477 - protein, 484 aa, Synthetic construct
HHNGTNGTMMQYFEWYLPNDGNHWNRLRSDASNLKDKGISAVWIPPAWKGASQNDVGYGAYDLYDLGEFNQKGTIRTKYGTRNQLQAAVNALKSNGIQVYGDVVMNHKAGADATEWVDAVEVNPSNRNQEVSGTYKIQAWTKFDFPGRGNTYSSFKWRWYHFDGTDWDQSRQLNRIYKFRGTGKAWDWEVDTENGNYDYLMFADLDMDHPEVVNELRNWGVWYTNTLGLDGFRIDAVKHIKYSFTRDWINHVRSATGKNMFAVAEFWKNDLGAIENYLNKTNWNHSVFDVPLHYNLYNASKSGGNYDMRQIFNGTVVQRHPMHAVTFVDNHDSQPEEALESFVEEWFKPLAYALTLTREQGYPSVFYGDYYGIPTHGVPAMKSKIDPILEARQKYAYGRQNDYLDHHNIIGWTREGNTAHPNSGLATIMSDGAGGNKWMFVGRNKAGQVWTDITGNRAGTVTINADGWGNFSVNGGSVSIWVNK

SEQ ID NO: 22478 - protein, 483 aa, Synthetic construct
HHNQTNGTMMQYFEWYLPNDGNHWNRLRSDASNLKDKGITAVWIPPAWKGASQNDVGYGAYDLYDLGEFNQKGTVRTKYGTRNQLQAAVTALKSNGIQVWGDVVMNHKGGADATEWVRAVEVNPSNRNQEVSGDTTIEAWTKFDFPGRGNTHSNFKWRWYHFDGVDWDQSRQLQNKIYKFQGDGKEWDWEVDEENGNYDYLMYADYDMDHPEVVNELRNWGVWYTNTLGLDGFRIDAVKHIKYSFTRDWLEHVRNTTQKNMFAVAEFWKNDIGAIENYLSKTNWNHSVFDVPLHYNLYNASRSGGNYDMRQIFNGTVVQRHPTHAVTFVDNHDSQPEEALESFVEEWFKPLAYALTLTRDQGYPSVFYGDYYGIPTHGVPAMKSKIDPILEARQKYAYGKQNDYMDHHNMIGWTREGNTAHPNSGLATIMSDGPGGNKWMYVGRNKAGQVWRDITGNRSGTVTINADGWGNFSVNGGSVSIWV

SEQ ID NO: 22479 - protein, 483 aa, Synthetic construct
HHNQTNGTMMQYFEWYLPNDGNHWNRLRSDASNLKDKGITAVWIPPAWKGASQNDVGYGAYDLYDLGEFNQKGTVRTKYGTRNQLQAAVTALKSNGIQVYGDVVMNHKGGADATEWVRAVEVNPSNRNQEVSGDYTIEAWTKFDFPGRGNTHSNFKWRWYHFDGVDWDQSRQLQNKIYKFQGDGKEWDWEVDEENGNYDYLMYADYDMDHPEVVNELRNWGVWYTNTLGLDGFRIDAVKHIKYSFTRDWLEHVRNTTQKNMFAVAEFWKNDIGAIENYLSNTNWNHSVFDVPLHYNLYNASRSGGNYDMRQIFNGTVVQRHPTHAVTFVDNHDSQPEEALESFVEEWFKPLAYALTLTRDQGHPSVFYGDYYGIPTHGVPAMKSKIDPILEARQKYAYGKQNDYMDHHNMIGWTREGNTAHPNSGLATIMSDGPGGNKWMYVGRNKAGQVWRDITGNRSGTVTINADGWGNFSVNGGSVSIWV

SEQ ID NO: 22480 - protein, 483 aa, Synthetic construct
HHNQTNGTMMQYFEWYLPNDGNHWNRLRSDASNLKDKGITAVWIPPAWKGASQNDVGYGAYDLYDLGEFNQKGTVRTKYGTRNQLQAAVTALKSNGIQVYGDVVMNHKGGADATEWVRAVEVNPSNRNQEVSGDTTIEAWTKFDFPGRGNTHSNFKWRWYHFDGVDWDQSRQLQNKIYKFQGDGKEWDWEVDEENGNYDYLMYADYDMDHPEVVNELRNWGVWYTNTLGLDGFRIDAVKHIKYSFTRDWLEHVRNTTQKNMFAVAEFWKNDIGAIENYLSKTNWNHSVFDVPLHYNLYNASRSGGNYDMRQIFNGTVVQRHPTHAVTFVDNHDSQPEEALESFVEEWFKPLAYALTLTRDQGHPSVFYGDYYGIPTHGVPAMKSKIDPILEARQKYAYGKQNDYMDHHNMIGWTREGNTAHPNSGLATIMSDGPGGNKWMYVGRNKAGQVWRDITGNRSGTVTINADGWGNFSVNGGSVSIWV

SEQ ID NO: 22481 - protein, 483 aa, Synthetic construct
HHNGTNGTMMQYFEWYLPNDGNHWHRLRSDASNLKDKGITAVWIPPAWKGASQNDVGYGAYDLYDLGEFNQKGTVRTKYGTRNQLQAAVTALKSNGIQVWGDVVMNHKGGADATEWVRAVEVNPSNRNQEVSGDTTIEAWTKFDFPGRGNTHSNFKWRWYHFDGVDWDQSRQLQNKIYKFQGDGKEWDWEVDTENGNYDYLMYADYDMDHPEVVNELRNWGVWYTNTLGLDGFRIDAVKHIKYSFTRDWLTHVRNTTGKNMFAVAEFWKNDIGAIENYLSNTNWNHSVFDVPLHYNLYNASRSGGNYDMRQIFNGTVVQRHPTHAVTFVDNHDSQPEEALESFVEEWFKPLAYALTLTRDQGEPSVFYGDYYGIPTHGVPAMKSKIDPILEARQKYAYGKQNDYLDHHNMIGWTREGNTAHPNSGLATIMSDGPGGNKWMYVGRNKAGQVWRDITGNRSGTVTINADGWGNFSVNGGSVSIWV

SEQ ID NO: 22482 - protein, 483 aa, Synthetic construct
HHNQTNGTMMQYFEWYLPNDGNHWNRLRSDASNLKDKGITAVWIPPAWKGASQNDVGYGAYDLYDLGEFNQKGTVRTKYGTRNQLQAAVTALKSNGIQVWGDVVMNHKGGADATEWVRAVEVNPSNRNQEVSGDYTIEAWTKFDFPGRGNTHSNFKWRWYHFDGVDWDQSRQLQNKIYKFQGDGKEWDWEVDEENGNYDYLMYADYDMDHPEVVNELRNWGVWYTNTLGLDGFRIDAVKHIKYSFTRDWLEHVQNTTGKNMFAVAEFWKNDIGAIENYLSKTNWNHSVFDVPLHYNLYNASRSGGNYDMRQIFNGTVVQRHPTHAVTFVDNHDSQPEEALESFVEEWFKPLAYALTLTRDQGHPSVFYGDYYGIPTHGVPAMKSKIDPILEARQKYAYGKQNDYMDHHNMIGWTREGNTAHPNSGLATIMSDGPGGNKWMYVGRNKAGQVWRDITGNRSGTVTINADGWGNFSVNGGSVSIWV

SEQ ID NO: 22483 - protein, 483 aa, Synthetic construct
HHNQTNGTMMQYFEWYLPNDGNHWNRLRSDASNLKDKGITAVWIPPAWKGASQNDVGYGAYDLYDLGEFNQKGTVRTKYGTRNQLQAAVTALKSNGIQVYGDVVMNHKGGADATEWVRAVEVNPSNRNQEVSGDTTIEAWTKFDFPGRGNTHSNFKWRWYHFDGVDWDQSRQLQNKIYKFRGDGKEWDWEVDEENGNYDYLMYADYDMDHPEVVNELRNWGVWYTNTLGLDGFRIDAVKHIKYSFTRDWLEHVRNTTQKNMFAVAEFWKNDIGAIENYLSNTNWNHSVFDVPLHYNLYNASRSGGNYDMRQIFNGTVVQRHPTHAVTFVDNHDSQPEEALESFVEEWFKPLAYALTLTRDQGEPSVFYGDYYGIPTHGVPAMKSKIDPILEARQKYAYGKQNDYMDHHNMIGWTREGNTAHPNSGLATIMSDGPGGNKWMYVGRNKAGQVWRDITGNRSGTVTINADGWGNFSVNGGSVSIWV

SEQ ID NO: 22484 - protein, 483 aa, Synthetic construct
HHNGTNGTMMQYFEWYLPNDGNHWHRLRSDASNLKDKGITAVWIPPAWKGASQNDVGYGAYDLYDLGEFNQKGTVRTKYGTRNQLQAAVTALKSNGIQVWGDVVMNHKGGADATEWVRAVEVNPSNRNQEVSGDTTIEAWTKFDFPGRGNTHSNFKWRWYHFDGVDWDQSRQLQNKIYKFRGDGKEWDWEVDTENGNYDYLMYADYDMDHPEVVNELRNWGVWYTNTLGLDGFRIDAVKHIKYSFTRDWLTHVRNTTQKNMFAVAEFWKNDIGAIENYLSNTNWNHSVFDVPLHYNLYNASRSGGNYDMRQIFNGTVVQRHPTHAVTFVDNHDSQPEEALESFVEEWFKPLAYALTLTRDQGEPSVFYGDYYGIPTHGVPAMKSKIDPILEARQKYAYGKQNDYLDHHNMIGWTREGNTAHPNSGLATIMSDGPGGNKWMYVGRNKAGQVWRDITGNRSGTVTINADGWGNFSVNGGSVSIWV

SEQ ID NO: 22485 - protein, 483 aa, Synthetic construct
HHNQTNGTMMQYFEWYLPNDGNHWNRLRSDASNLKDKGITAVWIPPAWKGASQNDVGYGAYDLYDLGEFNQKGTVRTKYGTRNQLQAAVTALKSNGIQVWGDVVMNHKGGADATEWVRAVEVNPSNRNQEVSGDYTIEAWTKFDFPGRGNTHSNFKWRWYHFDGVDWDQSRQLQNKIYKFQGDGKEWDWEVDEENGNYDYLMYADYDMDHPEVVNELRNWGVWYTNTLGLDGFRIDAVKHIKYSFTRDWLEHVRNTTQKNMFAVAEFWKNDIGAIENYLSNTNWNHSVFDVPLHYNLYNASRSGGNYDMRQIFNGTVVQRHPTHAVTFVDNHDSQPEEALESFVEEWFKPLAYALTLTRDQGYPSVFYGDYYGIPTHGVPAMKSKIDPILEARQKYAYGKQNDYMDHHNMIGWTREGNTAHPNSGLATIMSDGPGGNKWMYVGRNKAGQVWRDITGNRSGTVTINADGWGNFSVNGGSVSIWV

SEQ ID NO: 22486 - protein, 483 aa, Synthetic construct
HHNQTNGTMMQYFEWYLPNDGNHWNRLRSDASNLKDKGITAVWIPPAWKGASQNDVGYGAYDLYDLGEFNQKGTVRTKYGTRNQLQAAVTALKSNGIQVWGDVVMNHKGGADATEWVRAVEVNPSNRNQEVSGDYTIEAWTKFDFPGRGNTHSNFKWRWYHFDGVDWDQSRQLQNKIYKFRGDGKEWDWEVDEENGNYDYLMYADYDMDHPEVVNELRNWGVWYTNTLGLDGFRIDAVKHIKYSFTRDWLEHVRNTTQKNMFAVAEFWKNDIGAIENYLSNTNWNHSVFDVPLHYNLYNASRSGGNYDMRQIFNGTVVQRHPTHAVTFVDNHDSQPEEALESFVEEWFKPLAYALTLTRDQGHPSVFYGDYYGIPTHGVPAMKSKIDPILEARQKYAYGKQNDYMDHHNMIGWTREGNTAHPNSGLATIMSDGPGGNKWMYVGRNKAGQVWRDITGNRSGTVTINADGWGNFSVNGGSVSIWV

SEQ ID NO: 22487 - protein, 483 aa, Synthetic construct
HHNQTNGTMMQYFEWYLPNDGNHWNRLRSDASNLKDKGITAVWIPPAWKGASQNDVGYGAYDLYDLGEFNQKGTVRTKYGTRNQLQAAVTALKSNGIQVWGDVVMNHKGGADATEWVRAVEVNPSNRNQEVSGDTTIEAWTKFDFPGRGNTHSNFKWRWYHFDGVDWDQSRQLQNKIYKFQGDGKEWDWEVDEENGNYDYLMYADYDMDHPEVVNELRNWGVWYTNTLGLDGFRIDAVKHIKYSFTRDWLEHVRNTTGKNMFAVAEFWKNDIGAIENYLSKTNWNHSVFDVPLHYNLYNASRSGGNYDMRQIFNGTVVQRHPTHAVTFVDNHDSQPEEALESFVEEWFKPLAYALTLTRDQGHPSVFYGDYYGIPTHGVPAMKSKIDPILEARQKYAYGKQNDYMDHHNMIGWTREGNTAHPNSGLATIMSDGPGGNKWMYVGRNKAGQVWRDITGNRSGTVTINADGWGNFSVNGGSVSIWV

SEQ ID NO: 22488 - protein, 483 aa, Synthetic construct
HHNQTNGTMMQYFEWYLPNDGNHWNRLRSDASNLKDKGITAVWIPPAWKGASQNDVGYGAYDLYDLGEFNQKGTVRTKYGTRNQLQAAVTALKSNGIQVWGDVVMNHKGGADATEWVRAVEVNPSNRNQEVSGDYTIEAWTKFDFPGRGNTHSNFKWRWYHFDGVDWDQSRQLQNKIYKFQGDGKEWDWEVDEENGNYDYLMYADYDMDHPEVVNELRNWGVWYTNTLGLDGFRIDAVKHIKYSFTRDWLEHVRNTTQKNMFAVAEFWKNDIGAIENYLSKTNWNHSVFDVPLHYNLYNASRSGGNYDMRQIFNGTVVQRHPTHAVTFVDNHDSQPEEALESFVEEWFKPLAYALTLTRDQGEPSVFYGDYYGIPTHGVPAMKSKIDPILEARQKYAYGKQNDYMDHHNMIGWTREGNTAHPNSGLATIMSDGPGGNKWMYVGRNKAGQVWRDITGNRSGTVTINADGWGNFSVNGGSVSIWV

SEQ ID NO: 22489 - protein, 483 aa, Synthetic construct
HHNQTNGTMMQYFEWYLPNDGNHWNRLRSDASNLKDKGITAVWIPPAWKGASQNDVGYGAYDLYDLGEFNQKGTVRTKYGTRNQLQAAVTALKSNGIQVWGDVVMNHKGGADATEWVRAVEVNPSNRNQEVSGDYTIEAWTKFDFPGRGNTHSNFKWRWYHFDGVDWDQSRQLQNKIYKFQGDGKEWDWEVDEENGNYDYLMYADYDMDHPEVVNELRNWGVWYTNTLGLDGFRIDAVKHIKYSFTRDWLEHVRNTTGKNMFAVAEFWKNDIGAIENYLSNTNWNHSVFDVPLHYNLYNASRSGGNYDMRQIFNGTVVQRHPTHAVTFVDNHDSQPEEALESFVEEWFKPLAYALTLTRDQGHPSVFYGDYYGIPTHGVPAMKSKIDPILEARQKYAYGKQNDYMDHHNMIGWTREGNTAHPNSGLATIMSDGPGGNKWMYVGRNKAGQVWRDITGNRSGTVTINADGWGNFSVNGGSVSIWV

SEQ ID NO: 22490 - protein, 483 aa, Synthetic construct
HHNQTNGTMMQYFEWYLPNDGNHWNRLRSDASNLKDKGITAVWIPPAWKGASQNDVGYGAYDLYDLGEFNQKGTVRTKYGTRNQLQAAVTALKSNGIQVWGDVVMNHKGGADATEWVRAVEVNPSNRNQEVSGDTTIEAWTKFDFPGRGNTHSNFKWRWYHFDGVDWDQSRQLQNKIYKFRGDGKEWDWEVDEENGNYDYLMYADYDMDHPEVVNELRNWGVWYTNTLGLDGFRIDAVKHIKYSFTRDWLEHVRNTTQKNMFAVAEFWKNDIGAIENYLSKTNWNHSVFDVPLHYNLYNASRSGGNYDMRQIFNGTVVQRHPTHAVTFVDNHDSQPEEALESFVEEWFKPLAYALTLTRDQGEPSVFYGDYYGIPTHGVPAMKSKIDPILEARQKYAYGKQNDYMDHHNMIGWTREGNTAHPNSGLATIMSDGPGGNKWMYVGRNKAGQVWRDITGNRSGTVTINADGWGNFSVNGGSVSIWV

SEQ ID NO: 22491 - protein, 483 aa, Synthetic construct
HHNQTNGTMMQYFEWYLPNDGNHWNRLRSDASNLKDKGITAVWIPPAWKGASQNDVGYGAYDLYDLGEFNQKGTVRTKYGTRNQLQAAVTALKSNGIQVWGDVVMNHKGGADATEWVRAVEVNPSNRNQEVSGDTTIEAWTKFDFPGRGNTHSNFKWRWYHFDGVDWDQSRQLQNKIYKFQGDGKEWDWEVDEENGNYDYLMYADYDMDHPEVVNELRNWGVWYTNTLGLDGFRIDAVKHIKYSFTRDWLEHVRNTTGKNMFAVAEFWKNDIGAIENYLSNTNWNHSVFDVPLHYNLYNASRSGGNYDMRQIFNGTVVQRHPTHAVTFVDNHDSQPEEALESFVEEWFKPLAYALTLTRDQGYPSVFYGDYYGIPTHGVPAMKSKIDPILEARQKYAYGKQNDYMDHHNMIGWTREGNTAHPNSGLATIMSDGPGGNKWMYVGRNKAGQVWRDITGNRSGTVTINADGWGNFSVNGGSVSIWV

SEQ ID NO: 22492 - protein, 483 aa, Synthetic construct
HHNQTNGTMMQYFEWYLPNDGNHWNRLRSDASNLKDKGITAVWIPPAWKGASQNDVGYGAYDLYDLGEFNQKGTVRTKYGTRNQLQAAVTALKSNGIQVYGDVVMNHKGGADATEWVRAVEVNPSNRNQEVSGDTTIEAWTKFDFPGRGNTHSNFKWRWYHFDGVDWDQSRQLQNKIYKFQGDGKEWDWEVDEENGNYDYLMYADYDMDHPEVVNELRNWGVWYTNTLGLDGFRIDAVKHIKYSFTRDWLEHVRNTTQKNMFAVAEFWKNDIGAIENYLSNTNWNHSVFDVPLHYNLYNASRSGGNYDMRQIFNGTVVQRHPTHAVTFVDNHDSQPEEALESFVEEWFKPLAYALTLTRDQGYPSVFYGDYYGIPTHGVPAMKSKIDPILEARQKYAYGKQNDYMDHHNMIGWTREGNTAHPNSGLATIMSDGPGGNKWMYVGRNKAGQVWRDITGNRSGTVTINADGWGNFSVNGGSVSIWV

SEQ ID NO: 22493 - protein, 483 aa, Synthetic construct
HHNGTNGTMMQYFEWYLPNDGNHWHRLRSDASNLKDKGITAVWIPPAWKGASQNDVGYGAYDLYDLGEFNQKGTVRTKYGTRNQLQAAVTALKSNGIQVWGDVVMNHKGGADATEWVRAVEVNPSNRNQEVSGDYTIEAWTKFDFPGRGNTHSNFKWRWYHFDGVDWDQSRQLQDKIYKFQGDGKEWDWEVDTENGNYDYLMYADYDMDHPEVVNELRNWGVWYTNTLGLDGFRIDAVKHIKYSFTRDWLTHVRNTTGKNMFAVAEFWKNDIGAIENYLSNTNWNHSVFDVPLHYNLYNASRSGGNYDMRQIFNGTVVQRHPTHAVTFVDNHDSQPEEALESFVEEWFKPLAYALTLTRDQGEPSVFYGDYYGIPTHGVPAMKSKIDPILEARQKYAYGKQNDYLDHHNMIGWTREGNTAHPNSGLATIMSDGPGGNKWMYVGRNKAGQVWRDITGNRSGTVTINADGWGNFSVNGGSVSIWV

SEQ ID NO: 22494 - protein, 483 aa, Synthetic construct
HHNQTNGTMMQYFEWYLPNDGNHWNRLRSDASNLKDKGITAVWIPPAWKGASQNDVGYGAYDLYDLGEFNQKGTVRTKYGTRNQLQAAVTALKSNGIQVWGDVVMNHKGGADATEWVRAVEVNPSNRNQEVSGDYTIEAWTKFDFPGRGNTHSNFKWRWYHFDGVDWDQSRQLQNKIYKFRGDGKEWDWEVDEENGNYDYLMYADYDMDHPEVVNELRNWGVWYTNTLGLDGFRIDAVKHIKYSFTRDWLEHVRNTTQKNMFAVAEFWKNDIGAIENYLSNTNWNHSVFDVPLHYNLYNASRSGGNYDMRQIFNGTVVQRHPTHAVTFVDNHDSQPEEALESFVEEWFKPLAYALTLTRDQGEPSVFYGDYYGIPTHGVPAMKSKIDPILEARQKYAYGKQNDYMDHHNMIGWTREGNTAHPNSGLATIMSDGPGGNKWMYVGRNKAGQVWRDITGNRSGTVTINADGWGNFSVNGGSVSIWV

SEQ ID NO: 22495 - protein, 483 aa, Synthetic construct
HHNQTNGTMMQYFEWYLPNDGNHWNRLRSDASNLKDKGITAVWIPPAWKGASQNDVGYGAYDLYDLGEFNQKGTVRTKYGTRNQLQAAVTALKSNGIQVWGDVVMNHKGGADATEWVRAVEVNPSNRNQEVSGDTTIEAWTKFDFPGRGNTHSNFKWRWYHFDGVDWDQSRQLQNKIYKFRGDGKEWDWEVDEENGNYDYLMYADYDMDHPEVVNELRNWGVWYTNTLGLDGFRIDAVKHIKYSFTRDWLEHVRNTTQKNMFAVAEFWKNDIGAIENYLSNTNWNHSVFDVPLHYNLYNASRSGGNYDMRQIFNGTVVQRHPTHAVTFVDNHDSQPEEALESFVEEWFKPLAYALTLTRDQGYPSVFYGDYYGIPTHGVPAMKSKIDPILEARQKYAYGKQNDYMDHHNMIGWTREGNTAHPNSGLATIMSDGPGGNKWMYVGRNKAGQVWRDITGNRSGTVTINADGWGNFSVNGGSVSIWV

SEQ ID NO: 22496 - protein, 483 aa, Synthetic construct
HHNQTNGTMMQYFEWYLPNDGNHWNRLRSDASNLKDKGITAVWIPPAWKGASQNDVGYGAYDLYDLGEFNQKGTVRTKYGTRNQLQAAVTALKSNGIQVWGDVVMNHKGGADATEWVRAVEVNPSNRNQEVSGDTTIEAWTKFDFPGRGNTHSNFKWRWYHFDGVDWDQSRQLQNKIYKFQGDGKEWDWEVDEENGNYDYLMYADYDMDHPEVVNELRNWGVWYTNTLGLDGFRIDAVKHIKYSFTRDWLEHVRNTTGKNMFAVAEFWKNDIGAIENYLSKTNWNHSVFDVPLHYNLYNASRSGGNYDMRQIFNGTVVQRHPTHAVTFVDNHDSQPEEALESFVEEWFKPLAYALTLTRDQGEPSVFYGDYYGIPTHGVPAMKSKIDPILEARQKYAYGKQNDYMDHHNMIGWTREGNTAHPNSGLATIMSDGPGGNKWMYVGRNKAGQVWRDITGNRSGTVTINADGWGNFSVNGGSVSIWV

SEQ ID NO: 22497 - protein, 483 aa, Synthetic construct
HHNQTNGTMMQYFEWYLPNDGNHWNRLRSDASNLKDKGITAVWIPPAWKGASQNDVGYGAYDLYDLGEFNQKGTVRTKYGTRNQLQAAVTALKSNGIQVWGDVVMNHKGGADATEWVRAVEVNPSNRNQEVSGDYTIEAWTKFDFPGRGNTHSNFKWRWYHFDGVDWDQSRQLQNKIYKFQGDGKEWDWEVDEENGNYDYLMYADYDMDHPEVVNELRNWGVWYTNTLGLDGFRIDAVKHIKYSFTRDWLEHVRNTTQKNMFAVAEFWKNDIGAIENYLSKTNWNHSVFDVPLHYNLYNASRSGGNYDMRQIFNGTVVQRHPTHAVTFVDNHDSQPEEALESFVEEWFKPLAYALTLTRDQGHPSVFYGDYYGIPTHGVPAMKSKIDPILEARQKYAYGKQNDYMDHHNMIGWTREGNTAHPNSGLATIMSDGPGGNKWMYVGRNKAGQVWRDITGNRSGTVTINADGWGNFSVNGGSVSIWV

SEQ ID NO: 22498 - protein, 483 aa, Synthetic construct
HHNQTNGTMMQYFEWYLPNDGNHWNRLRSDASNLKDKGITAVWIPPAWKGASQNDVGYGAYDLYDLGEFNQKGTVRTKYGTRNQLQAAVTALKSNGIQVWGDVVMNHKGGADATEWVRAVEVNPSNRNQEVSGDTTIEAWTKFDFPGRGNTHSNFKWRWYHFDGVDWDQSRQLQNKIYKFRGDGKEWDWEVDEENGNYDYLMYADYDMDHPEVVNELRNWGVWYTNTLGLDGFRIDAVKHIKYSFTRDWLEHVRNTTQKNMFAVAEFWKNDIGAIENYLSKTNWNHSVFDVPLHYNLYNASRSGGNYDMRQIFNGTVVQRHPTHAVTFVDNHDSQPEEALESFVEEWFKPLAYALTLTRDQGHPSVFYGDYYGIPTHGVPAMKSKIDPILEARQKYAYGKQNDYMDHHNMIGWTREGNTAHPNSGLATIMSDGPGGNKWMYVGRNKAGQVWRDITGNRSGTVTINADGWGNFSVNGGSVSIWV

SEQ ID NO: 22499 - protein, 483 aa, Synthetic construct
HHNGTNGTMMQYFEWYLPNDGNHWHRLRSDASNLKDKGITAVWIPPAWKGASQNDVGYGAYDLYDLGEFNQKGTVRTKYGTRNQLQAAVTALKSNGIQVWGDVVMNHKGGADATEWVRAVEVNPSNRNQEVSGDTTIEAWTKFDFPGRGNTHSNFKWRWYHFDGVDWDQSRQLQNKIYKFQGDGKEWDWEVDEENGNYDYLMYADYDMDHPEVVNELRNWGVWYTNTLGLDGFRIDAVKHIKYSFTRDWLTHVRNTTQKNMFAVAEFWKNDIGAIENYLSKTNWNHSVFDVPLHYNLYNASRSGGNYDMRQIFNGTVVQRHPTHAVTFVDNHDSQPEEALESFVEEWFKPLAYALTLTRDQGEPSVFYGDYYGIPTHGVPAMKSKIDPILEARQKYAYGKQNDYLDHHNMIGWTREGNTAHPNSGLATIMSDGPGGNKWMYVGRNKAGQVWRDITGNRSGTVTINADGWGNFSVNGGSVSIWV

SEQ ID NO: 22500 - protein, 483 aa, Unidentified
SVPVNGTMMQYFEWYLPDDGTLWTKVANNAQSLANLGITALWLPPAYKGTSSSDVGYGVYDLYDLGEFNQKGTVRTKYGTKTQYIQAIQAAHTAGMQVYADVVFNHKAGADGTELVDAVEVNPSDRNQEISGTYQIQAWTKFDFPGRGNTYSSFKWRWYHFDGTDWDESRKLNRIYKFRGTGKAWDWEVDTENGNYDYLMYADLDMDHPEVVSELKNWGKWYVITTNIDGFRLDAVKHIKYSFFPDWLSYLRTQTQKPLFAVGEFWSYDINKLHNYITKTNGSMSLFDAPLHNNFYIASKSGGYFDMRTLLNNTLMKEQPTLSVTLVDNHDTEPGQSLQSWVEPWFKPLAYAFILTRQEGYPCVFYGDYYGIPKYNIPALKSKLDPLLIARRDYAYGTQHDYIDNADIIGWTREGVAEKANSGLAALITDGPGGSKWMYVGKQHAGKTFYDLTGNRSDTVTINADGWGEFKVNGGSVSIWVPK

SEQ ID NO: 22501 - protein, 482 aa, Synthetic construct
APVNGTMMQYFEWDLPNDGTLWTKVKNEAANLSSLGITALWLPPAYKGTSQSDVGYGVYDLYDLGEFNQKGTIRTKYGTKTQYIQAIQAAKAAGMQVYADVVFNHKAGADGTELVDAVEVNPSDRNQEISGTYQIQAWTKFDFPGRGNTYSSFKWRWYHFDGTDWDESRKLNRIYKFRGTGKAWDWEVDTENGNYDYLMYADLDMDHPEVVAELKNWGKWYVNTTNVDGFRLDAVKHIKYSFFPDWLSYVRNQTGKNLFAVGEFWSYDVNKLHNYITKTNGTMSLFDAPLHNNFYIASKSSGYFDMRYLLNNTLMKDQPALAVTLVDNHDTQPGQSLQSWVEPWFKPLAYAFILTRQEGYPCVFYGDYYGIPKYNIPGLKSKIDPLLIARRDYAYGTQRDYIDHPDIIGWTREGIDAKPNSGLAALITDGPGGSKWMYVGKKHAGKVFYDLTGNRSDTVTINADGWGQFKVNGGSVSIWVAK

SEQ ID NO: 22502 - protein, 485 aa, Bacillus sp. 707
HHNGTNGTMMQYFEWYLPNDGNHWNRLNSDASNLKSKGITAVWIPPAWKGASQNDVGYGAYDLYDLGEFNQKGTVRTKYGTRSQLQAAVTSLKNNGIQVYGDVVMNHKGGADATEMVRAVEVNPNNRNQEVTGEYTIEAWTRFDFPGRGNTHSSFKWRWYHFDGVDWDQSRRLNNRIYKFRGHGKAWDWEVDTENGNYDYLMYADIDMDHPEVVNELRNWGVWYTNTLGLDGFRIDAVKHIKYSFTRDWINHVRSATGKNMFAVAEFWKNDLGAIENYLQKTNWNHSVFDVPLHYNLYNASKSGGNYDMRNIFNGTVVQRHPSHAVTFVDNHDSQPEEALESFVEEWFKPLAYALTLTREQGYPSVFYGDYYGIPTHGVPAMRSKIDPILEARQKYAYGKQNDYLDHHNIIGWTREGNTAHPNSGLATIMSDGAGGSKWMFVGRNKAGQTWSDITGNRTGTVTINADGWGNFSVNGGSVSIWVNK

SEQ ID NO: 22503 - protein, 485 aa, Bacillus sp. 707
HHNGTNGTMMQYFEWYLPNDGNHWNRLNSDASNLKSKGITAVWIPPAWKGASQNDVGYGAYDLYDLGEFNQKGTVRTKYGTRSQLQAAVTSLKNNGIQVYGDVVMNHKGGADATEMVRAVEVNPNNRNQEVTGEYTIEAWTRFDFPGRGNTHSSFKWRWYHFDGVDWDQSRRLNNRIYKFRGHGKAWDWEVDTENGNYDYLMYADIDMDHDEVVNELRNWGVWYTNTLGLDGFRIDAVKHIKYSFTRDWINHVRSATGKNMFAVAEFWKNDLGAIENYLQKTNWNHSVFDVPLHYNLYNASKSGGNYDMRNIFNGTVVQRHPSHAVTFVDNHDSQPEEALESFVEEWFKPLAYALTLTREQGYPSVFYGDYYGIPTHGVPAMRSKIDPILEARQKYAYGKQNDYLDHHNIIGWTREGNTAHPNSGLATIMSDGAGGSKWMFVGRNKAGQVWSDITGNRTGTVTINADGWGNFSVNGGSVSIWVNK

SEQ ID NO: 22504 - protein, 485 aa, Bacillus sp. 707
HHNGTNGTMMQYFEWYLPNDGNHWNRLNSDASNLKSKGITAVWIPPAWKGASQNDVGYGAYDLYDLGEFNQKGTVRTKYGTRSQLQAAVTSLKNNGIQVYGDVVMNHKGGADATEMVRAVEVNPNNRNQEVTGEYTIEAWTRFDFPGRGNTHSSFKWRWPHFDGVDWDQSRRLNNRIYKFRGHGKAWDWEVDTENGNYDYLMYADIDMDHPEVVNELRNWGVWYTNTLGLDGFRIDAVKHIKYSFTRDWINHVRSATGKNMFAVAEFWKNDLGAIENYLQKTNWNHSVFDVPLHYNLYNASKSGGNYDMRNIFNGTVVQRHPSHAVTFVDNHDSQPEEALESFVEEWFKPLAYALTLTREQGYPSVFYGDYYGIPTHGVPAMRSKIDPILEARQKYAYGKQNDYLDHHNIIGWTREGNTAHPNSGLATIMSDGAGGSKWMFVGRNKAGQVWSDITGNRTGTVTINADGWGNFSVNGGSVSIWVNK

SEQ ID NO: 22505 - protein, 485 aa, Bacillus sp. 707
HHNGTNGTMMQYFEWYLPNDGNHWNRLNSDASNLKSKGITAVWIPPAWKGASQNDVGYGAYDLYDLGEFNQKGTVRTKYGTRSQLQAAVTSLKNNGIQVYGDVVMNHKGGADATEMVRAVEVNPNNRNQEVTGEYTIEAWTRFDFPGRGNTHSSFKWRWYHFDGVDWDQSRRLNNRIYKFRGHGKAWDWEVDTENGNYDYLMYADIDMDHPEVVNELRNWGVWYTNTLGLDGFRIDAVKHIKYSFTRDWINHVRSATGKNMFAVAEFWKNDLGAIENYLQKTNWNASVFDVPLHYNLYNASKSGGNYDMRNIFNGTVVQRHPSHAVTFVDNHDSQPEEALESFVEEWFKPLAYALTLTREQGYPSVFYGDYYGIPTHGVPAMRSKIDPILEARQKYAYGKQNDYLDHHNIIGWTREGNTAHPNSGLATIMSDGAGGSKWMFVGRNKAGQVWSDITGNRTGTVTINADGWGNFSVNGGSVSIWVNK

SEQ ID NO: 22506 - protein, 485 aa, Bacillus sp. 707
HHNGTNGTMMQYFEWYLPNDGNHWNRLNSDASNLKSKGITAVWIPPAWKGASQNDVGYGAYDLYDLGEFNQKGTVRTKYGTRSQLQAAVTSLKCNGIQVYGDVVMNHKGGADATEMVRAVEVNPNNRNQEVTGEYTIEAWTRFDFPGRGNTHSSFKWRWYHFDGVDWDQSRRLNNRIYKFRGHGKAWDWEVDTENGNYDYLMYADIDMDHPEVVNELRNWGVWYTNTLGLDGFRIDAVKHIKYSFTRDWINHVRSATGKNMFAVAEFWKNDLGAIENYLQKTNWNHSVFDVPLHYNLYNASKSGGNYDMRNIFNGTVVQRHPSHAVTFVDNHDSQPEEALESFVEEWFKPLAYALTLTREQGYPSVFYGDYYGIPTHGVPAMRSKIDPILEARQKYAYGKQNDYLDHHNIIGWTREGNTAHPNSGLATIMSDGAGGSKWMFVGRNKAGQVWSDITGNRTGTVTINADGWGNFSVNGGSVSIWVNK

SEQ ID NO: 22507 - protein, 485 aa, Bacillus sp. 707
HHNGTNGTMMQYFEWYLPNDGNHWNRLNSDASNLKSKGITAVWIPPAWKGASQNDVGYGAYDLYDLGEFNQKGTVRTKYGTRSQLQAAVTSLKNNGIQVYGDVVMNHKGGADATEMVRAVEVNPYNRNQEVTGEYTIEAWTRFDFPGRGNTHSSFKWRWYHFDGVDWDQSRRLNNRIYKFRGHGKAWDWEVDTENGNYDYLMYADIDMDHPEVVNELRNWGVWYTNTLGLDGFRIDAVKHIKYSFTRDWINHVRSATGKNMFAVAEFWKNDLGAIENYLQKTNWNHSVFDVPLHYNLYNASKSGGNYDMRNIFNGTVVQRHPSHAVTFVDNHDSQPEEALESFVEEWFKPLAYALTLTREQGYPSVFYGDYYGIPTHGVPAMRSKIDPILEARQKYAYGKQNDYLDHHNIIGWTREGNTAHPNSGLATIMSDGAGGSKWMFVGRNKAGQVWSDITGNRTGTVTINADGWGNFSVNGGSVSIWVNK

SEQ ID NO: 22508 - protein, 485 aa, Bacillus sp.
HHNGTNGTMMQYFEWYLPNDGNHWNRLRSDASNLKDKGISAVWIPPAWKGASQNDVGYGAYDLYDLGEFNQKGTIRTKYGTRNQLQAAVNALKSNGIQVYGDVVMNHKGGADATEMVRAVEVNPNNRNQEVSEEYTIEAWTKFDFPGRGNTHSNFKWRWYHFDGVDWDQSRKLNNRIYKFRGDGKGWDWEVDTENGNYDYLLYADIDMDHPEVVNELRNWGVWYTNTLGLDGFRIDAVKHIKYSFTRDWINHVRSATGKNMFAVAEFWKNDLGAIENYLNKTNWNHSVFDVPLHYNLYNASKSGGNYDMRQIFNGTVVQRHPMHAVTFVDNHDSQPEEALESFVEEWFKPLAYALTLTREEGYPSVFYGDYYGIPTHGVPAMKSKIDPILEARQKYAYGRQNDYLDHHNIIGWTREGNTAHPNSGLATIMSDGAGGNKWMFVGRNKAGQVWTDITGNRAGTVTINADGWGNFSVNGGSVSIWVNK

SEQ ID NO: 22509 - protein, 485 aa, Bacillus sp. 707
HHNGTSGTMMQYFEWYLPNDGNHWNRLNSDASNLKSKGITAVWIPPAWKGASQNDVGYGAYDLYDLGEFNQKGTVRTKYGTRSQLQAAVTSLKNNGIQVYGDVVMNHKGGADATEMVRAVEVNPNNRNQEVTGEYTIEAWTRFDFPGRGNTHSSFKWRWYHFDGVDWDQSRRLNNRIYKFRGHGKAWDWEVDTENGNYDYLMYADIDMDHPEVVNELRNWGVWYTNTLGLDGFRIDAVKHIKYSFTRDWINHVRSATGKNMFAVAEFWKNDLGAIENYLQKTNWNHSVFDVPLHYNLYNASKSGGNYDMRNIFNGTVVQRHPSHAVTFVDNHDSQPEEALESFVEEWFKPLAYALTLTREQGYPSVFYGDYYGIPTHGVPAMRSKIDPILEARQKYAYGKQNDYLDHHNIIGWTREGNTAHPNSGLATIMSDGAGGSKWMFVGRNKAGQVWSDITGNRTGTVTINADGWGNFSVNGGSVSIWVNK

SEQ ID NO: 22510 - protein, 485 aa, Bacillus sp. 707
HHNGTNGTMMQYFEWYLPNDGNHWNRLNSDASNLKSKGITAVWIPPAWKGASQNDVGYGAYDLYDLGEFNQKGTVRTKYGTRSQLQAAVTSLKNNGIQVYGDVVMNHKGGADATEMVRAVEVNPNNRNQEVTGEYTIEAWTRFDFPGRGNTHSSFKWRWYHFDGVDWDQSRRLNNRIYKFRGHGKAWDWEVDTENGNYDYLMYADIDMDHPEVVNELRNWGVWYTNTLGLDGFRIDAVKHIKYSFTRDWINHVRSATGKNMFAVAEFWKNDLGAIENYLQKTNWNHSVFDVPLHYNLYNASKSGGNYDMRNIFNGTVVQRHPSHAVTFVDNHDSQPEEALESFVEEWFKPLAYALTLTREQGYPSVFYGDYYGIPTHGSPAMRSKIDPILEARQKYAYGKQNDYLDHHNIIGWTREGNTAHPNSGLATIMSDGAGGSKWMFVGRNKAGQVWSDITGNRTGTVTINADGWGNFSVNGGSVSIWVNK

SEQ ID NO: 22511 - protein, 485 aa, Bacillus sp. 707
HHNGTNGTMMQYFEWYLPNDGNHWNRLNSDASNLKSKGITAVWIPPAWKGASQNDVGYGAYDLYDLGEFNQKGTVRTKYGTRSQLQAAVTSLKNNGIQVYGDVVMNHKGGADATEMVRAVEVNPNNRNQEVTGEYTIEAWTRFDFPGRGNTHSSFKWRWYHFDGVDWDQSRRLNNRIYKFRGHGKAWDWEVDTENGNYDYLMYADIDMDHPEVVNELRNWGVWYTNTLGLDGFRIDAVKHIKYSFTRDWINHVRSATGKNMFAVAEFWKNDLGAIENYLQKTNWNHSVFDVPLHYNLYNASKSGGNYDMRNIFNGTVVQRHPSHAVTFVDNHDSQPEEALESFVEEWFKPLAYALTLTREQGYPSVFYGDYQGIPTHGVPAMRSKIDPILEARQKYAYGKQNDYLDHHNIIGWTREGNTAHPNSGLATIMSDGAGGSKWMFVGRNKAGQVWSDITGNRTGTVTINADGWGNFSVNGGSVSIWVNK

SEQ ID NO: 22512 - protein, 485 aa, Bacillus sp. 707
HHNGTQGTMMQYFEWYLPNDGNHWNRLNSDASNLKSKGITAVWIPPAWKGASQNDVGYGAYDLYDLGEFNQKGTVRTKYGTRSQLQAAVTSLKNNGIQVYGDVVMNHKGGADATEMVRAVEVNPNNRNQEVTGEYTIEAWTRFDFPGRGNTHSSFKWRWYHFDGVDWDQSRRLNNRIYKFRGHGKAWDWEVDTENGNYDYLMYADIDMDHPEVVNELRNWGVWYTNTLGLDGFRIDAVKHIKYSFTRDWINHVRSATGKNMFAVAEFWKNDLGAIENYLQKTNWNHSVFDVPLHYNLYNASKSGGNYDMRNIFNGTVVQRHPSHAVTFVDNHDSQPEEALESFVEEWFKPLAYALTLTREQGYPSVFYGDYYGIPTHGVPAMRSKIDPILEARQKYAYGKQNDYLDHHNIIGWTREGNTAHPNSGLATIMSDGAGGSKWMFVGRNKAGQVWSDITGNRTGTVTINADGWGNFSVNGGSVSIWVNK

SEQ ID NO: 22513 - protein, 485 aa, Bacillus sp. 707
HHNGTNGTMMQYFEWYLPNDGNHWNRLNSDASNLKSKGITAVWIPPAWKGASQNDVGYGAYDLYDLGEFNQKGTVRTKYGTRSQLQAAVTSLKNNGIQVYGDVVMNHKGGADATEMVRAVEVNPNNRNQEVTGEYTIEAWTRFDFPGRGNTHSSFKWRWYHFDGVDWDHSRRLNNRIYKFRGHGKAWDWEVDTENGNYDYLMYADIDMDHPEVVNELRNWGVWYTNTLGLDGFRIDAVKHIKYSFTRDWINHVRSATGKNMFAVAEFWKNDLGAIENYLQKTNWNHSVFDVPLHYNLYNASKSGGNYDMRNIFNGTVVQRHPSHAVTFVDNHDSQPEEALESFVEEWFKPLAYALTLTREQGYPSVFYGDYYGIPTHGVPAMRSKIDPILEARQKYAYGKQNDYLDHHNIIGWTREGNTAHPNSGLATIMSDGAGGSKWMFVGRNKAGQVWSDITGNRTGTVTINADGWGNFSVNGGSVSIWVNK

SEQ ID NO: 22514 - protein, 485 aa, Bacillus sp. 707
HHNGTNGTMMQYFEWYLPNDGNHWNRLNSDASNLKSKGITAVWIPPAWKGASQNDVGYGAYDLYDLGEFNQKGTVRTKYGTRSQLQAAVTSLKNGGIQVYGDVVMNHKGGADATEMVRAVEVNPNNRNQEVTGEYTIEAWTRFDFPGRGNTHSSFKWRWYHFDGVDWDQSRRLNNRIYKFRGHGKAWDWEVDTENGNYDYLMYADIDMDHPEVVNELRNWGVWYTNTLGLDGFRIDAVKHIKYSFTRDWINHVRSATGKNMFAVAEFWKNDLGAIENYLQKTNWNHSVFDVPLHYNLYNASKSGGNYDMRNIFNGTVVQRHPSHAVTFVDNHDSQPEEALESFVEEWFKPLAYALTLTREQGYPSVFYGDYYGIPTHGVPAMRSKIDPILEARQKYAYGKQNDYLDHHNIIGWTREGNTAHPNSGLATIMSDGAGGSKWMFVGRNKAGQVWSDITGNRTGTVTINADGWGNFSVNGGSVSIWVNK

SEQ ID NO: 22515 - protein, 485 aa, Bacillus sp. 707
HHNGTNGTMMQYFEWYLPNDGNHWNRLNSDASNLKSKGITAVWIPPAWKGASQNDVGYGAYDLYDLGEFNQKGTVRTKYGTRSQLQAAVTSLKNNGIQVYGDVVMNHKGGADATEMVRAVEVNPNNRNQEVTGEYTIEAWTRFDFPGRGNTHSSFKWRWYHFDGVDWDQSRRLNNRIYKFVGHGKAWDWEVDTENGNYDYLMYADIDMDHPEVVNELRNWGVWYTNTLGLDGFRIDAVKHIKYSFTRDWINHVRSATGKNMFAVAEFWKNDLGAIENYLQKTNWNHSVFDVPLHYNLYNASKSGGNYDMRNIFNGTVVQRHPSHAVTFVDNHDSQPEEALESFVEEWFKPLAYALTLTREQGYPSVFYGDYYGIPTHGVPAMRSKIDPILEARQKYAYGKQNDYLDHHNIIGWTREGNTAHPNSGLATIMSDGAGGSKWMFVGRNKAGQVWSDITGNRTGTVTINADGWGNFSVNGGSVSIWVNK

SEQ ID NO: 22516 - protein, 485 aa, Bacillus sp.
HHNGTNGTLMQYFEWYLPNDGNHWNRLRSDASNLKDKGISAVWIPPAWKGASQNDVGYGAYDLYDLGEFNQKGTIRTKYGTRNQLQAAVNALKSNGIQVYGDVVMNHKGGADATEMVRAVEVNPNNRNQEVSGEYTIEAWTKFDFPGRGNTHSNFKWRWYHFDGVDWDQSRKLNNRIYKFRGDGKGWDWEVDTENGNYDYLIYADIDMDHPEVVNELRNWGVWYTNTLGLDGFRIDAVKHIKYSFTRDWINHVRSATGKNMFAVAEFWKNDLGAIENYLNKTNWNHSVFDVPLHFNLYNASKSGGNYDMRQIFNGTVVQRHPMHAVTFVDNHDSQPEEALESFVEEWFKPLAYALTLTREQGYPSVFYGDYYGIPTHGVPAMKSKIDPILEARQKYAYGRQNDYLDHHNIIGWTREGNTAHPNSGLATIMSDGAGGNKWMFVGRNKAGQVWTDITGNRAGTVTINADGWGNFSVNGGSVSIWVNK

SEQ ID NO: 22517 - protein, 485 aa, Bacillus sp. 707
HHNGTNGTMMQYFEWYLPNYGNHWNRLNSDASNLKSKGITAVWIPPAWKGASQNDVGYGAYDLYDLGEFNQKGTVRTKYGTRSQLQAAVTSLKNNGIQVYGDVVMNHKGGADATEMVRAVEVNPNNRNQEVTGEYTIEAWTRFDFPGRGNTHSSFKWRWYHFDGVDWDQSRRLNNRIYKFRGHGKAWDWEVDTENGNYDYLMYADIDMDHPEVVNELRNWGVWYTNTLGLDGFRIDAVKHIKYSFTRDWINHVRSATGKNMFAVAEFWKNDLGAIENYLQKTNWNHSVFDVPLHYNLYNASKSGGNYDMRNIFNGTVVQRHPSHAVTFVDNHDSQPEEALESFVEEWFKPLAYALTLTREQGYPSVFYGDYYGIPTHGVPAMRSKIDPILEARQKYAYGKQNDYLDHHNIIGWTREGNTAHPNSGLATIMSDGAGGSKWMFVGRNKAGQVWSDITGNRTGTVTINADGWGNFSVNGGSVSIWVNK

SEQ ID NO: 22518 - protein, 485 aa, Bacillus sp. 707
HHNGTNGTMMQYFEWYLPNDGNHWNRLNSDASNLKSKGITAVWIPPAWKGASQNDVGYGAYDLYDLGEFNQKGTVRTKYGTRSQLQAAVTSLKNNGIQVYGDVVMNHKGGADATEMVRAVEVNPNNRNQEVTGEYTIEAWTRFDFPGRGNTHSSFKWRWYHFDGVDWDQSRRLNNRIYKFRGHGKAWDWEVDTENGNYDYLMYADIDMDHPEVVNELRNWGVWYTNTLGLDGFRIDAVKHIKYSFTRDWINHVRSATGKNMFAVAEFWKNDLGAIENYLQKTNWNHSVFDVPLHYNLYNASKAGGNYDMRNIFNGTVVQRHPSHAVTFVDNHDSQPEEALESFVEEWFKPLAYALTLTREQGYPSVFYGDYYGIPTHGVPAMRSKIDPILEARQKYAYGKQNDYLDHHNIIGWTREGNTAHPNSGLATIMSDGAGGSKWMFVGRNKAGQVWSDITGNRTGTVTINADGWGNFSVNGGSVSIWVNK

SEQ ID NO: 22519 - protein, 485 aa, Bacillus sp. 707
HHNGTNGTMMQYFEWYLPNDGNHWNRLNSDASNLKSKGITAVWIPPAWKGASQNDVGYGAYDLYDLGEFNQKGTVRTKYGTRSQLQAAVTSLKNNGIQVYGDVVMNHKGGADATEMVRAVEVNPNNRNQEVTGEYTIEAWTRFDFPGRGNTHSSFKWRWYHFDGVDWDQSRRLNNRIYKFRGHGKAWDWEVDTENGNYDYLMYADIDMDHPEVVNELRNWGVWYTNTLGLDGFRIDAVKHIKYSFTRDWINHVRSATGKNMFAVAEFWKNDLGAIENYLQKTNWNHSVFDVPLHYNLYNASKSGGNYDMRNIFNGTVVQRHPSHAVTFVDNHDSQPEEALESFVEEWFKPLAYALTLTREQGYPSVFYGDYTGIPTHGVPAMRSKIDPILEARQKYAYGKQNDYLDHHNIIGWTREGNTAHPNSGLATIMSDGAGGSKWMFVGRNKAGQVWSDITGNRTGTVTINADGWGNFSVNGGSVSIWVNK

SEQ ID NO: 22520 - protein, 485 aa, Bacillus sp. 707
HHNGTNGTMMQYFEWYLPNDGNHWNRLNSDASNLKSKGITAVWIPPAWKGASQNDVGYGAYDLYDLGEFNQKGTVRTKYGTRSQLQAAVTSLKNNGIQVYGDVVMNHKGGADATEMVRAVEVNPNNRNQEVTGEYTIEAWTRFDFPGRGNTHSSFKWRWYHFDGVDWDQSRRLNNRIYKFRGHGKAWDWEVDTENGNYDYLMYADIDMDHPEVVNELRNWGVWYTNTLGLDGFRIDAVKHIKYSFTRDWINHVRSATGKNMFAVAEFWKNDLGAIENYLQKTNWNTSVFDVPLHYNLYNASKSGGNYDMRNIFNGTVVQRHPSHAVTFVDNHDSQPEEALESFVEEWFKPLAYALTLTREQGYPSVFYGDYYGIPTHGVPAMRSKIDPILEARQKYAYGKQNDYLDHHNIIGWTREGNTAHPNSGLATIMSDGAGGSKWMFVGRNKAGQVWSDITGNRTGTVTINADGWGNFSVNGGSVSIWVNK

SEQ ID NO: 22521 - protein, 485 aa, Bacillus sp. 707
HHNGTNGTMMQYFEWYLPNDGNHWNRLNSDASNLKSKGITAVWIPPAWKGASQNDVGYGAYDLYDLGEFNQKGTVRTKYGTRSQLQAAVTSLKNNGIQVYGDVVMNHKGGADATEMVRAVEVNPNNRNQEVTGEYTIEAWTRFDFPGRGNTHSSFKWRWYHFDGVDWDQSRRLNNRIYKFRGHGKAWDWEVDTENGNYDYLMYADIDMDHPEVVNELRNWGVWYTNTLGLDGFRIDAVKHIKYSFTRDWINHVRSATGKNMFAVAEFWKNDLGAIENYLQKTNWNHSVFDVPLHYNLYNASKSGGNYDMRNIFNGTVVQRHPSHAVTFVDNHDSQPEEALESFVEYWFKPLAYALTLTREQGYPSVFYGDYYGIPTHGVPAMRSKIDPILEARQKYAYGKQNDYLDHHNIIGWTREGNTAHPNSGLATIMSDGAGGSKWMFVGRNKAGQVWSDITGNRTGTVTINADGWGNFSVNGGSVSIWVNK

SEQ ID NO: 22522 - protein, 485 aa, Bacillus sp. 707
HHNGTNGTMMQYFEWYLPNDGNHWNRLNSDASNLKSKGITAVWIPPAWKGASQNDVGYGAYDLYDLGEFNQKGTVRTKYGTRSQLQAAVTSLKNNGIQVYGDVVMNHKGGADATEMVRAVEVNPNNRNQEVTGEYTIEAWTRFDFPGRGNTHSSFKWRWYHFDGVDWDQSRRLNNRIYKFRGHGKAWDWEVDTENGNYDYLIYADIDMDHPEVVNELRNWGVWYTNTLGLDGFRIDAVKHIKYSFTRDWINHVRSATGKNMFAVAEFWKNDLGAIENYLQKTNWNHSVFDVPLHYNLYNASKSGGNYDMRNIFNGTVVQRHPSHAVTFVDNHDSQPEEALESFVEEWFKPLAYALTLTREQGYPSVFYGDYYGIPTHGVPAMRSKIDPILEARQKYAYGKQNDYLDHHNIIGWTREGNTAHPNSGLATIMSDGAGGSKWMFVGRNKAGQVWSDITGNRTGTVTINADGWGNFSVNGGSVSIWVNK

SEQ ID NO: 22523 - protein, 485 aa, Bacillus sp. 707
HHNGTNGTMMQYFEWYLPNDGNHWNRLNSDASNLKSKGITAVWIPPAWKGASQNDVGYGAYDLYDLGEFNQKGTVRTKYGTRSQLQAAVTSLKNNGIQVYGDVVMNHKGGADATEMVRAVEVNPNNRNQEVTGEYTIEAWTRFDFPGRGNTHSSFKWRWYHFDGVDWDQSRRLNNRIYKFRGHGKAWDWEVDTENGNYDYLMYADIDMDHPEVVNELRNWGVWYTNTLGLDGFRIDAVKHIKYSFTRDWINHVRSATGKNMFAVAEFWKNDLKAIENYLQKTNWNHSVFDVPLHYNLYNASKSGGNYDMRNIFNGTVVQRHPSHAVTFVDNHDSQPEEALESFVEEWFKPLAYALTLTREQGYPSVFYGDYYGIPTHGVPAMRSKIDPILEARQKYAYGKQNDYLDHHNIIGWTREGNTAHPNSGLATIMSDGAGGSKWMFVGRNKAGQVWSDITGNRTGTVTINADGWGNFSVNGGSVSIWVNK

SEQ ID NO: 22524 - protein, 485 aa, Bacillus sp. 707
HHNGTNGTMMQYFEWYLPNDGNHWNRLNSDASNLKSKGITAVWIPPAWKGASQNDVGYGAYDLYDLGEFNQKGTVRTKYGTRSQLQAAVTSLKNNGIQVYGDVVMNHKGGADATEMVRAVEVNPNNRNQEVTGEYTIEAWTRFDFPGRGNTHSSFKWRWYHFDGVDWDQSRRLNNRIYKFRGHGKAWDWEVDTENGNYDYLMYADIDMDHPEVVNELRNWGVWYTNTLGLDGFRIDAVKHIKYSFTRDWINHVRSATGKNMFAVAEFWKNDLGAIENYLQKTNWNHSVFDVPLHYNLYNASKSGGNYDMRNIFNGTVVQRHPSHAVTFVDNHDSQPEEALESFVEEWFKPLAYALTLTREQGYPSVFYGDYYGIPTHGVPAMRSKIDPILEARQKYAYGKQNDYLDHHNIIGWTREGNTAHPRSGLATIMSDGAGGSKWMFVGRNKAGQVWSDITGNRTGTVTINADGWGNFSVNGGSVSIWVNK

SEQ ID NO: 22525 - protein, 485 aa, Bacillus sp. 707
HHNGTNGTMMQYFEWYLPNDGNHWNRLNSDASNLKSKGITAVWIPPAWKGASQNDVGYGAYDLYDLGEFNQKGTVRTKYGTRSQLQAAVTSLKNNGIQVYGDVVMNHKGGADATEMVRAVEVNPNNRNQEVTGEYDIEAWTRFDFPGRGNTHSSFKWRWYHFDGVDWDQSRRLNNRIYKFRGHGKAWDWEVDTENGNYDYLMYADIDMDHPEVVNELRNWGVWYTNTLGLDGFRIDAVKHIKYSFTRDWINHVRSATGKNMFAVAEFWKNDLGAIENYLQKTNWNHSVFDVPLHYNLYNASKSGGNYDMRNIFNGTVVQRHPSHAVTFVDNHDSQPEEALESFVEEWFKPLAYALTLTREQGYPSVFYGDYYGIPTHGVPAMRSKIDPILEARQKYAYGKQNDYLDHHNIIGWTREGNTAHPNSGLATIMSDGAGGSKWMFVGRNKAGQVWSDITGNRTGTVTINADGWGNFSVNGGSVSIWVNK

SEQ ID NO: 22526 - protein, 485 aa, Bacillus sp. 707
HHNGTNGTMMQYFEWYLPNDGNHWNRLNSDASNLKSKGITAVWIPPAWKGASQNDVGYGAYDLYDLGEFNQKGTVRTKYGTRSQLQAAVTSLKNSGIQVYGDVVMNHKGGADATEMVRAVEVNPNNRNQEVTGEYTIEAWTRFDFPGRGNTHSSFKWRWYHFDGVDWDQSRRLNNRIYKFRGHGKAWDWEVDTENGNYDYLMYADIDMDHPEVVNELRNWGVWYTNTLGLDGFRIDAVKHIKYSFTRDWINHVRSATGKNMFAVAEFWKNDLGAIENYLQKTNWNHSVFDVPLHYNLYNASKSGGNYDMRNIFNGTVVQRHPSHAVTFVDNHDSQPEEALESFVEEWFKPLAYALTLTREQGYPSVFYGDYYGIPTHGVPAMRSKIDPILEARQKYAYGKQNDYLDHHNIIGWTREGNTAHPNSGLATIMSDGAGGSKWMFVGRNKAGQVWSDITGNRTGTVTINADGWGNFSVNGGSVSIWVNK

SEQ ID NO: 22527 - protein, 485 aa, Bacillus sp. 707
HHNGTNGTMMQYFEWYGPNDGNHWNRLNSDASNLKSKGITAVWIPPAWKGASQNDVGYGAYDLYDLGEFNQKGTVRTKYGTRSQLQAAVTSLKNNGIQVYGDVVMNHKGGADATEMVRAVEVNPNNRNQEVTGEYTIEAWTRFDFPGRGNTHSSFKWRWYHFDGVDWDQSRRLNNRIYKFRGHGKAWDWEVDTENGNYDYLMYADIDMDHPEVVNELRNWGVWYTNTLGLDGFRIDAVKHIKYSFTRDWINHVRSATGKNMFAVAEFWKNDLGAIENYLQKTNWNHSVFDVPLHYNLYNASKSGGNYDMRNIFNGTVVQRHPSHAVTFVDNHDSQPEEALESFVEEWFKPLAYALTLTREQGYPSVFYGDYYGIPTHGVPAMRSKIDPILEARQKYAYGKQNDYLDHHNIIGWTREGNTAHPNSGLATIMSDGAGGSKWMFVGRNKAGQVWSDITGNRTGTVTINADGWGNFSVNGGSVSIWVNK

SEQ ID NO: 22528 - protein, 485 aa, Bacillus sp. 707
HHNGTNGTMMQYFEWYLPNDGNHWNRLNSDASNLKSKGITAVWIPPAWKGASQNDVGYGAYDLYDLGEFNQKGTVRTKYGTRSQLQAAVTSLKNNGIQVYGDVVMNHKGGADATEMVRAVEVNPNNRNQEVTSEYTIEAWTRFDFPGRGNTHSSFKWRWYHFDGVDWDQSRRLNNRIYKFRGHGKAWDWEVDTENGNYDYLMYADIDMDHPEVVNELRNWGVWYTNTLGLDGFRIDAVKHIKYSFTRDWINHVRSATGKNMFAVAEFWKNDLGAIENYLQKTNWNHSVFDVPLHYNLYNASKSGGNYDMRNIFNGTVVQRHPSHAVTFVDNHDSQPEEALESFVEEWFKPLAYALTLTREQGYPSVFYGDYYGIPTHGVPAMRSKIDPILEARQKYAYGKQNDYLDHHNIIGWTREGNTAHPNSGLATIMSDGAGGSKWMFVGRNKAGQVWSDITGNRTGTVTINADGWGNFSVNGGSVSIWVNK

SEQ ID NO: 22529 - protein, 485 aa, Bacillus sp. 707
HHNGTNGTMMQYFEWYLPNDGNHWNRLNSDASNLKSKGITAVWIPPAWKGASQNDVGYGAYDLYDLGEFNQKGTVRTKYGTRSQLQAAVTSLKNNGIQVYGDVVMNHKGGADATEMVRAVEVNPNNRNQEVTGEYTIEAWTRFDFPGRGNTHSSFKWRWYHFDGVDWDQSRRLNNRIYKFRGHGKAWDWEVDTENGNYDYLMYADIDMDHPEVVNELRNWGVWYTNTLGLDGFRIDAVKHIKYSFTRDWINHVRSATGKNMFAVAEFWKNDLGAIENYLQKTNWNHSVFDVPLHYNLYNASKSGGNYDMRNIFNGTVVQRHPSHAVTFVDNHDSQPEEALESFVEEWFKPLAYALTLTREQGDPSVFYGDYYGIPTHGVPAMRSKIDPILEARQKYAYGKQNDYLDHHNIIGWTREGNTAHPNSGLATIMSDGAGGSKWMFVGRNKAGQVWSDITGNRTGTVTINADGWGNFSVNGGSVSIWVNK

SEQ ID NO: 22530 - protein, 485 aa, Bacillus sp. 707
HHNGTNGTMMQYFEWYLPNDGNHWNRLNSDASNLKSKGITAVWIPPAWKGASQNDVGYGAYDLYDLGEFNQKGTVRTKYGTRSQLQAAVTSLKNNGIQVYGDVVMNHKGGADATEMVRAVEVNPNNRNQEVTGEYTIEAWTRFDFPGRGNTHSSFKWRWYHFDGVDWDQSRRLNNRIYKFRGHGKAWDWEVDTENGNYDYLMYADIDMDHPEVVNELRNWGVWYTNTLGLDGFRIDAVKHIKYSFTRDWINHVRSATGKNMFAVAEFWKNDLGAIENYLQKTNWNHSVFDVPLHYNLYNASKSGGNYDMRNIFNGTVVQRHPSHAVTFVDNHDSQPEEALESFVEEWFKPLAYALTLTRHQGYPSVFYGDYYGIPTHGVPAMRSKIDPILEARQKYAYGKQNDYLDHHNIIGWTREGNTAHPNSGLATIMSDGAGGSKWMFVGRNKAGQVWSDITGNRTGTVTINADGWGNFSVNGGSVSIWVNK

SEQ ID NO: 22531 - protein, 485 aa, Bacillus sp. 707
HGNGTNGTMMQYFEWYLPNDGNHWNRLNSDASNLKSKGITAVWIPPAWKGASQNDVGYGAYDLYDLGEFNQKGTVRTKYGTRSQLQAAVTSLKNNGIQVYGDVVMNHKGGADATEMVRAVEVNPNNRNQEVTGEYTIEAWTRFDFPGRGNTHSSFKWRWYHFDGVDWDQSRRLNNRIYKFRGHGKAWDWEVDTENGNYDYLMYADIDMDHPEVVNELRNWGVWYTNTLGLDGFRIDAVKHIKYSFTRDWINHVRSATGKNMFAVAEFWKNDLGAIENYLQKTNWNHSVFDVPLHYNLYNASKSGGNYDMRNIFNGTVVQRHPSHAVTFVDNHDSQPEEALESFVEEWFKPLAYALTLTREQGYPSVFYGDYYGIPTHGVPAMRSKIDPILEARQKYAYGKQNDYLDHHNIIGWTREGNTAHPNSGLATIMSDGAGGSKWMFVGRNKAGQVWSDITGNRTGTVTINADGWGNFSVNGGSVSIWVNK

SEQ ID NO: 22532 - protein, 485 aa, Bacillus sp. 707
HHNGTNGTMMQYFEWYLPNDGNHWNRLNSDASNLKSKGITAVWIPPAWKGASQNDVGYGAYDLYDLGEFNQKGTVRTKYGTRSQLQAAVTSLKNNGIQVYGDVVMNHKGGADATEMVRAVEVNPNNRNQEVTGEYTIEAWTRFDFPGRGNTHSSFKWRWYHFDGVDWDQSRRLNNRIYKFRGHGKAWDWEVDTENGNYDYLMYADIDMDHPEVVNELRNWGVWYTNTLGLDGFRIDAVKHIKYSFTRDWINHVRSATGKNMFAVAEFWKNDLGAIENYLQKTNWNHSVFDVPLHYNLYNASKSGGNYDMRNIFNGTVVQRHPSHAVTFVDNHDSQPEEALESFVEEWFKPLAYALTLTREQGYPSVFYGDYYGIPTHGVPAMRSKIDPILEARLKYAYGKQNDYLDHHNIIGWTREGNTAHPNSGLATIMSDGAGGSKWMFVGRNKAGQVWSDITGNRTGTVTINADGWGNFSVNGGSVSIWVNK

SEQ ID NO: 22533 - protein, 485 aa, Bacillus sp. 707
HHNGTNGTMMQYFEWYLPNDGNHWNRLNSDASNLKSKGITAVWIPPAWKGASQNDVGYGAYDLYDLGEFNQKGTVRTKYGTRSQLQAAVTSLKNNGIQVYGDVVMNHKGGADATEMVRAVEVNPNNRNQEVTGEYTIEAWTRFDFPGRGNTHSSFKWRWYHFDGVDWDQSRRLNNRIYKFRGHGKAWDWEVDTENGNYDYLMYADIDMDHPEVVNELRNWGVWYTNTLGLDGWRIDAVKHIKYSFTRDWINHVRSATGKNMFAVAEFWKNDLGAIENYLQKTNWNHSVFDVPLHYNLYNASKSGGNYDMRNIFNGTVVQRHPSHAVTFVDNHDSQPEEALESFVEEWFKPLAYALTLTREQGYPSVFYGDYYGIPTHGVPAMRSKIDPILEARQKYAYGKQNDYLDHHNIIGWTREGNTAHPNSGLATIMSDGAGGSKWMFVGRNKAGQVWSDITGNRTGTVTINADGWGNFSVNGGSVSIWVNK

SEQ ID NO: 22534 - protein, 485 aa, Bacillus sp. 707
HHNGTNGTMMQYFEWYLPNDGNHWNRLNSDASNLKSKGITAVWIPPAWKGASQNDVGYGAYDLYDLGEFNQKGTVRTKYGTRSQLQAAVTSLKNNGIQVYGDVVMNHKGGADATEMVRAVEVNPNNRNQEVTGEYTIEAWTRFDFPGRGNTHSSFKWRWYHFDGVDWDQSRRLNNRIYKFRGHGKAWDWEVDTENGNYDYLMYADIDMDHPEVVNELRNWGVWYTNTLGLDGHRIDAVKHIKYSFTRDWINHVRSATGKNMFAVAEFWKNDLGAIENYLQKTNWNHSVFDVPLHYNLYNASKSGGNYDMRNIFNGTVVQRHPSHAVTFVDNHDSQPEEALESFVEEWFKPLAYALTLTREQGYPSVFYGDYYGIPTHGVPAMRSKIDPILEARQKYAYGKQNDYLDHHNIIGWTREGNTAHPNSGLATIMSDGAGGSKWMFVGRNKAGQVWSDITGNRTGTVTINADGWGNFSVNGGSVSIWVNK

SEQ ID NO: 22535 - protein, 485 aa, Bacillus sp. 707
HHNGTNGTMMQYFEWYLPNDGNHWNRLNSDASTLKSKGITAVWIPPAWKGASQNDVGYGAYDLYDLGEFNQKGTVRTKYGTRSQLQAAVTSLKNNGIQVYGDVVMNHKGGADATEMVRAVEVNPNNRNQEVTGEYTIEAWTRFDFPGRGNTHSSFKWRWYHFDGVDWDQSRRLNNRIYKFRGHGKAWDWEVDTENGNYDYLMYADIDMDHPEVVNELRNWGVWYTNTLGLDGFRIDAVKHIKYSFTRDWINHVRSATGKNMFAVAEFWKNDLGAIENYLQKTNWNHSVFDVPLHYNLYNASKSGGNYDMRNIFNGTVVQRHPSHAVTFVDNHDSQPEEALESFVEEWFKPLAYALTLTREQGYPSVFYGDYYGIPTHGVPAMRSKIDPILEARQKYAYGKQNDYLDHHNIIGWTREGNTAHPNSGLATIMSDGAGGSKWMFVGRNKAGQVWSDITGNRTGTVTINADGWGNFSVNGGSVSIWVNK

SEQ ID NO: 22536 - protein, 485 aa, Bacillus sp. 707
HHNGTNGTMMQYFEWYLPNDGNHWNRLNSDASNLKSKGITAVWIPPAWKGASQNDVGYGAYDLYDLGEFNQKGTVRTKYGTRSQLQAAVTSLKNNGIQVYGDVVMNHKGGADATEMVRAVEVNPTNRNQEVTGEYTIEAWTRFDFPGRGNTHSSFKWRWYHFDGVDWDQSRRLNNRIYKFRGHGKAWDWEVDTENGNYDYLMYADIDMDHPEVVNELRNWGVWYTNTLGLDGFRIDAVKHIKYSFTRDWINHVRSATGKNMFAVAEFWKNDLGAIENYLQKTNWNHSVFDVPLHYNLYNASKSGGNYDMRNIFNGTVVQRHPSHAVTFVDNHDSQPEEALESFVEEWFKPLAYALTLTREQGYPSVFYGDYYGIPTHGVPAMRSKIDPILEARQKYAYGKQNDYLDHHNIIGWTREGNTAHPNSGLATIMSDGAGGSKWMFVGRNKAGQVWSDITGNRTGTVTINADGWGNFSVNGGSVSIWVNK

SEQ ID NO: 22537 - protein, 485 aa, Bacillus sp. 707
HHNGTNGTMMQYFEWYLPNDGNHWNRLNSDASNLKSKGITAVWIPPAWKGASQNDVGYGAYDLYDLGEFNQKGTVRTKYGTRSQLQAAVTSLKNNGIQVYGDVVMNHKGGADATEMVRAVEVNPNNRNQEVTGEYTIEAWTRFDFPGRGNTHSSFKWRWYHFDGVDWDQSRRLNNRIYKFRGHGKAWDWEVDTENGNYDYLMYADIDMDHPEVVNELRNWGVWYTNTLGLDGFRIDAVKHIKYSFTRDWINHVRSATGKNMFAVAEFWKNDLGAIENYLQKTNWNHSVFDVPLHYNLYNASKGGGNYDMRNIFNGTVVQRHPSHAVTFVDNHDSQPEEALESFVEEWFKPLAYALTLTREQGYPSVFYGDYYGIPTHGVPAMRSKIDPILEARQKYAYGKQNDYLDHHNIIGWTREGNTAHPNSGLATIMSDGAGGSKWMFVGRNKAGQVWSDITGNRTGTVTINADGWGNFSVNGGSVSIWVNK

SEQ ID NO: 22538 - protein, 485 aa, Bacillus sp. 707
HHNGTNGTMMQYFEWYLPNDGNHWNRLNSDASNLKSKGITAVWIPPAWKGASQNDVGYGAYDLYDLGEFNQKGTVRTKYGTRSQLQAAVTSLKNNGIQVYGDVVMNHKGGADATEMVRAVEVNPNNRNQEVTGEYTIEAWTRFDFPGRGNTHSSFKWRWYHFDGVDWDQSRRLNNRIYKFRGHGKAWDWEVDTENGNYDYLMYADIDMDHPEVVNELRNWGVWYTNTLGLDGFRIDAVKHIKYSFTRDWINHVRSATGKNMFAVAEFWKNDLGAIENYLQKTNWNHSVFDVPLHYNLYNASKSGGNYDMRNIFNGTVVQRHPSHAVTFVDNHDSQPEEALESFVEEWFKPLAYALTLTREQGYPSVFYGDYYGIPTHGVPAMRSKIDPSLEARQKYAYGKQNDYLDHHNIIGWTREGNTAHPNSGLATIMSDGAGGSKWMFVGRNKAGQVWSDITGNRTGTVTINADGWGNFSVNGGSVSIWVNK

SEQ ID NO: 22539 - protein, 485 aa, Bacillus sp. 707
HHNGTNGTMMQYFEWYLPNDGNHWNRLNSDASNLKSKGITAVWIPPAWKGASQQDVGYGAYDLYDLGEFNQKGTVRTKYGTRSQLQAAVTSLKNNGIQVYGDVVMNHKGGADATEMVRAVEVNPNNRNQEVTGEYTIEAWTRFDFPGRGNTHSSFKWRWYHFDGVDWDQSRRLNNRIYKFRGHGKAWDWEVDTENGNYDYLMYADIDMDHPEVVNELRNWGVWYTNTLGLDGFRIDAVKHIKYSFTRDWINHVRSATGKNMFAVAEFWKNDLGAIENYLQKTNWNHSVFDVPLHYNLYNASKSGGNYDMRNIFNGTVVQRHPSHAVTFVDNHDSQPEEALESFVEEWFKPLAYALTLTREQGYPSVFYGDYYGIPTHGVPAMRSKIDPILEARQKYAYGKQNDYLDHHNIIGWTREGNTAHPNSGLATIMSDGAGGSKWMFVGRNKAGQVWSDITGNRTGTVTINADGWGNFSVNGGSVSIWVNK

SEQ ID NO: 22540 - protein, 485 aa, Bacillus sp. 707
HHNGTNGTMMQYFEWYLPNDGNHWNRLNSDASNLKSKGITSVWIPPAWKGASQNDVGYGAYDLYDLGEFNQKGTVRTKYGTRSQLQAAVTSLKNNGIQVYGDVVMNHKGGADATEMVRAVEVNPNNRNQEVTGEYTIEAWTRFDFPGRGNTHSSFKWRWYHFDGVDWDQSRRLNNRIYKFRGHGKAWDWEVDTENGNYDYLMYADIDMDHPEVVNELRNWGVWYTNTLGLDGFRIDAVKHIKYSFTRDWINHVRSATGKNMFAVAEFWKNDLGAIENYLQKTNWNHSVFDVPLHYNLYNASKSGGNYDMRNIFNGTVVQRHPSHAVTFVDNHDSQPEEALESFVEEWFKPLAYALTLTREQGYPSVFYGDYYGIPTHGVPAMRSKIDPILEARQKYAYGKQNDYLDHHNIIGWTREGNTAHPNSGLATIMSDGAGGSKWMFVGRNKAGQVWSDITGNRTGTVTINADGWGNFSVNGGSVSIWVNK

SEQ ID NO: 22541 - protein, 485 aa, Bacillus sp. 707
HHNGTNGTMMQYFEWYLPNDGNHWNRLNSDASNLKSKGITAVWIPPAWKGASQNDVGYGAYDLYDLGEFNQKGTVRTKYGTRSQLQAAVTSLKNNGIAVYGDVVMNHKGGADATEMVRAVEVNPNNRNQEVTGEYTIEAWTRFDFPGRGNTHSSFKWRWYHFDGVDWDQSRRLNNRIYKFRGHGKAWDWEVDTENGNYDYLMYADIDMDHPEVVNELRNWGVWYTNTLGLDGFRIDAVKHIKYSFTRDWINHVRSATGKNMFAVAEFWKNDLGAIENYLQKTNWNHSVFDVPLHYNLYNASKSGGNYDMRNIFNGTVVQRHPSHAVTFVDNHDSQPEEALESFVEEWFKPLAYALTLTREQGYPSVFYGDYYGIPTHGVPAMRSKIDPILEARQKYAYGKQNDYLDHHNIIGWTREGNTAHPNSGLATIMSDGAGGSKWMFVGRNKAGQVWSDITGNRTGTVTINADGWGNFSVNGGSVSIWVNK

SEQ ID NO: 22542 - protein, 485 aa, Bacillus sp. 707
HHNGTNGTMMQYFEWYLPNDGNHWNRLNSDASNLKSKGITAVWIPPAWKGASQNDVGYGAYDLYDLGEFNQKGTVRTKYGTRSQLQAAVTSLKNNGIQVYGDVVMNHKGGADATEMVRAVEVNPNNRNQEVTGEYTIEAWTRFDFPGRGNTHSSFKWRWYHFDGVDWDQSRRLNNRIYKFRGHGKAWDWEVDTENGNYDYLMYADIDMDHPEVVNELRNWGVWYTNTLGLDGFRIDAVKHIKYSFTRDWINHVRSATGKNMFAVAEFWKNDLGAIENYLQKTNWNHSVFDVPLHYNLYNASKSGGNYDMRNIFNGTVVQRHPSHAVTFVDNHDSQPEEALESFVEEWFKPLAYALTLTREQGYPSVFYGDYYGIPTHGVPAMRSKIDPILEARQKYAYGKQNDYLDHHNIIGWTREGNTAHPNSGLATIMSDGAGGSKWMFVGRNKAGQVWSDITGNRTGTVTINNDGWGNFSVNGGSVSIWVNK

SEQ ID NO: 22543 - protein, 485 aa, Bacillus sp. 707
HHNGCNGTMMQYFEWYLPNDGNHWNRLNSDASNLKSKGITAVWIPPAWKGASQNDVGYGAYDLYDLGEFNQKGTVRTKYGTRSQLQAAVTSLKNNGIQVYGDVVMNHKGGADATEMVRAVEVNPNNRNQEVTGEYTIEAWTRFDFPGRGNTHSSFKWRWYHFDGVDWDQSRRLNNRIYKFRGHGKAWDWEVDTENGNYDYLMYADIDMDHPEVVNELRNWGVWYTNTLGLDGFRIDAVKHIKYSFTRDWINHVRSATGKNMFAVAEFWKNDLGAIENYLQKTNWNHSVFDVPLHYNLYNASKSGGNYDMRNIFNGTVVQRHPSHAVTFVDNHDSQPEEALESFVEEWFKPLAYALTLTREQGYPSVFYGDYYGIPTHGVPAMRSKIDPILEARQKYAYGKQNDYLDHHNIIGWTREGNTAHPNSGLATIMSDGAGGSKWMFVGRNKAGQVWSDITGNRTGTVTINADGWGNFSVNGGSVSIWVNK

SEQ ID NO: 22544 - protein, 485 aa, Bacillus sp. 707
HHNGTNGTMMQYFEWYLPNDGNHWNRLNSDASNLKSKGITAVWIPPAWKGASQNDVGYGAYDLYDLGEFNQKGTVRTKYGTRSQLQAAVTSLKNNGIQVYGDVVMNHKGGADATEMVRAVEVNPNNRNQEVTGEYTIEAWTRFDFPGRGNTHSSFKWRWYHFDGVDWDQSRRLNNRIYKFRGHGKAWDWEVDTENGNYDYLMYADIDMDHPEVVNELRNWGVWYTNTLGLDGFRIDAVKHIKYSFTRDWINHVRSATGKNMFAVAEFWKNDLGAIENYLQKTNWNHSVFDVPLHYNLYNASKSGGNYDMRNIFNGTVVRRHPSHAVTFVDNHDSQPEEALESFVEEWFKPLAYALTLTREQGYPSVFYGDYYGIPTHGVPAMRSKIDPILEARQKYAYGKQNDYLDHHNIIGWTREGNTAHPNSGLATIMSDGAGGSKWMFVGRNKAGQVWSDITGNRTGTVTINADGWGNFSVNGGSVSIWVNK

SEQ ID NO: 22545 - protein, 485 aa, Bacillus sp. 707
HHNGTNGTMMQYFEWYLPNDGNHWNRLNSDASNLKSKGITAVWIPPAWKGASQNDVGYGAYDLYDLGEFNQKGTVRTKYGTRSQLQAAVTSLKNNGIQVYGDVVMNHKGGADATEMVRAVEVNPNNRNQEVTGEYTIEAWTRFDFPGRGNTHSSFKWRWYHFDGVDWDQSRRLNNRIYKFRGHGKAWDWEVDTENGNYDYLMYADIDMDHPEVVNELRNWGVWYTNTLGLDGLRIDAVKHIKYSFTRDWINHVRSATGKNMFAVAEFWKNDLGAIENYLQKTNWNHSVFDVPLHYNLYNASKSGGNYDMRNIFNGTVVQRHPSHAVTFVDNHDSQPEEALESFVEEWFKPLAYALTLTREQGYPSVFYGDYYGIPTHGVPAMRSKIDPILEARQKYAYGKQNDYLDHHNIIGWTREGNTAHPNSGLATIMSDGAGGSKWMFVGRNKAGQVWSDITGNRTGTVTINADGWGNFSVNGGSVSIWVNK

SEQ ID NO: 22546 - protein, 485 aa, Bacillus sp. 707
HHNGTNGTMMQYFEWYLPNDGNHWNRLNSDASNLKSKGITAVWIPPAWKGASQNDVGYGAYDLYDLGEFNQKGTVRTKYGTRSQLQAAVTSLKNNGIQVYGDVVMNHKGGADATEMVRAVEVNPNNRNQEVTGEYTIEAWTRFDFPGRGNQHSSFKWRWYHFDGVDWDQSRRLNNRIYKFRGHGKAWDWEVDTENGNYDYLMYADIDMDHPEVVNELRNWGVWYTNTLGLDGFRIDAVKHIKYSFTRDWINHVRSATGKNMFAVAEFWKNDLGAIENYLQKTNWNHSVFDVPLHYNLYNASKSGGNYDMRNIFNGTVVQRHPSHAVTFVDNHDSQPEEALESFVEEWFKPLAYALTLTREQGYPSVFYGDYYGIPTHGVPAMRSKIDPILEARQKYAYGKQNDYLDHHNIIGWTREGNTAHPNSGLATIMSDGAGGSKWMFVGRNKAGQVWSDITGNRTGTVTINADGWGNFSVNGGSVSIWVNK

SEQ ID NO: 22547 - protein, 485 aa, Bacillus sp. 707
HHNGTNGTMMQYFEWYLPNDGNHWNRLNSDASNLKSKGITAVWIPPAWKGASQNDVGYGAYDLYDLGEFNQKGTVRTKYGTRSQLQAAVTSLKNNGIQVYGDVVMNHKGGADATEMVRAVEVNPNNRNQEVTGEYTIEAWTRFDFPGRGNTHSSFKWRWYHFDGVDWDQSRRLNNRIYKFRGHGKAWDWEVDTENGNYDYLMYADIDMDHPEVVNELRNWGVWYTNTLGLDGFRIDAVKHIKYSFTRDWINHVRSATGKNMFAVAEFWKNDLGAIENYLQKTNWNHSVFDVPLHYNLYNASKSGGNYDMRNIFMGTVVQRHPSHAVTFVDNHDSQPEEALESFVEEWFKPLAYALTLTREQGYPSVFYGDYYGIPTHGVPAMRSKIDPILEARQKYAYGKQNDYLDHHNIIGWTREGNTAHPNSGLATIMSDGAGGSKWMFVGRNKAGQVWSDITGNRTGTVTINADGWGNFSVNGGSVSIWVNK

SEQ ID NO: 22548 - protein, 483 aa, Bacillus sp.
HHNGTNGTLMQYFEWYLPNDGNHWNRLRSDASNLKDKGISAVWIPPAWKGTSQNDVGYGAYDLYDLGEFNQKGTIRTKYGTRNQLQAAVNALKSNGIQVYGDVVMNHKGGADATEMVKAVEVNPNNRNQEVSGEYTIEAWTKFDFPGRANTHSNFKWRWYHFDGVDWDQSRKLNNRIYKFRTKAWDWEVDTEFGNYDYLMYADIDMDHPEVVNELRNWGVWYTNTLGLDGFRIDAVKHIKYSFTRDWINHVRSAIGKNMFAVAEFWKNDLGAIENYLNKTNWNHSVFDVPLHFNLYYASKSGGNYDMRHIFNGTVVQKHPTHAVTFVDNHDSQPEESLESFVREWFKPLAYALTLTREQGYPSVFYGDYYGIPTHGVPAMKSKIDPILEARQKYAYGRQNDYLDHHNIIGWTREGNTAHPNSGLATIMSDGAGGNKWMFVGRNKAGQVWTDITGNKAGTVTINADGWGNFSVNGGSVSIWVNK

SEQ ID NO: 22549 - protein, 485 aa, Bacillus sp. 707
HHNGTNGTMMQYFEWYLPNDGNHWNRLNSDASNLKSKGITAVWIPPAWKGASQNDVGYGAYDLYDLGEFNQKGTVRTKYGTRSQLQAAVTSLKNNGIQVYGDVVMNHKGGADATEMVRAVEVNPNNRNQEVTGEYTIEAWTRFDFPGRGNTHSSFKWRWKHFDGVDWDQSRRLNNRIYKFRGHGKAWDWEVDTENGNYDYLMYADIDMDHPEVVNELRNWGVWYTNTLGLDGFRIDAVKHIKYSFTRDWINHVRSATGKNMFAVAEFWKNDLGAIENYLQKTNWNHSVFDVPLHYNLYNASKSGGNYDMRNIFNGTVVQRHPSHAVTFVDNHDSQPEEALESFVEEWFKPLAYALTLTREQGYPSVFYGDYYGIPTHGVPAMRSKIDPILEARQKYAYGKQNDYLDHHNIIGWTREGNTAHPNSGLATIMSDGAGGSKWMFVGRNKAGQVWSDITGNRTGTVTINADGWGNFSVNGGSVSIWVNK

SEQ ID NO: 22550 - protein, 485 aa, Bacillus sp. 707
HHNGTNGTMMQYFEWYLPNDGNHWNRLNSDASNLKSKGITAVWIPPAWKGASQNDVGYGAYDLYDLGEFNQKGTVRTKYGTRSQLQAAVTSLKNNGIQVYGDVVMNHKGGADATEMVRAVEVNPNNRNQEVTGEYTIEAWTRFDFPGRGNTHSSFKWRWYHFDGVDWDQSRRLNNRIYKFRGHGKAWDWEVDTENGNYDYLMYADIDMDHPEVVNELRNWGVWYTNTLGLDGFRIDAVKHIKYSFTRDWINHVRSATNKNMFAVAEFWKNDLGAIENYLQKTNWNHSVFDVPLHYNLYNASKSGGNYDMRNIFNGTVVQRHPSHAVTFVDNHDSQPEEALESFVEEWFKPLAYALTLTREQGYPSVFYGDYYGIPTHGVPAMRSKIDPILEARQKYAYGKQNDYLDHHNIIGWTREGNTAHPNSGLATIMSDGAGGSKWMFVGRNKAGQVWSDITGNRTGTVTINADGWGNFSVNGGSVSIWVNK

SEQ ID NO: 22551 - protein, 485 aa, Bacillus sp. 707
HHNGTNGTMMQYFEWYLPNDGNHWNRLNSDASNLKSKGITAVWIPPAWKGASQNDVGYGAYDLYDLGEFNQKGTVRTKYGTRSQLQAAVTSLKNNGIQVYGDVVMNHKGGADATEMVRAVEVNPNNRNQEVTGEYTIEAWTRFDFPGRGNTHSSFKWRWYHFDGVDWDQSRRLNNRIYKFRGHGKAWDWEVDTENGNYDYLMYADIDMDHPEVVNELRNWGVWYTNTLGLDGFRIDAVKHIKYSFTRDWINHVRSATGKNMFAVAEFWKNDLCAIENYLQKTNWNHSVFDVPLHYNLYNASKSGGNYDMRNIFNGTVVQRHPSHAVTFVDNHDSQPEEALESFVEEWFKPLAYALTLTREQGYPSVFYGDYYGIPTHGVPAMRSKIDPILEARQKYAYGKQNDYLDHHNIIGWTREGNTAHPNSGLATIMSDGAGGSKWMFVGRNKAGQVWSDITGNRTGTVTINADGWGNFSVNGGSVSIWVNK

SEQ ID NO: 22552 - protein, 485 aa, Bacillus sp.
HHNGTNGTLMQYFEWYLPNDGNHWNRLRSDASNLKDKGISAVWIPPAWKGASQNDVGYGAYDLYDLGEFNQKGTIRTKYGTRNQLQAAVNALKSNGIQVYGDVVMNHKGGADATEMVRAVEVNPNNRNQEVSGEYTIEAWTKFDFPGRGNTHSNFKWRWYHFDGVDWDQSRKLNNRIYKFRGDGKGWDWEVDTENGNYDYLLYADIDMDHPEVVNELRNWGVWYTNTLGLDGFRIDAVKHIKYSFTRDWINHVRSATGKNMFAVAEFWKNDLGAIENYLNKTNWNHSVFDVPLHFNLYNASKSGGNYDMRQIFNGTVVQRHPMHAVTFVDNHDSQPEEALESFVEEWFKPLAYALTLTREQGYPSVFYGDYYGIPTHGVPAMKSKIDPILEARQKYAYGRQNDYLDHHNIIGWTREGNTAHPNSGLATIMSDGAGGNKWMFVGRNKAGQVWTDITGNRAGTVTINADGWGNFSVNGGSVSIWVNK

SEQ ID NO: 22553 - protein, 485 aa, Bacillus sp.
HHNGTNGTLMQYFEWYLPNDGNHWNRLRSDASNLKDKGISAVWIPPAWKGASQNDVGYGAYDLYDLGEFNQKGTIRTKYGTRNQLQAAVNALKSNGIQVYGDVVMNHKGGADATEMVRAVEVNPNNRNQEVSGEYTIEAWTKFDFPGRGNTHSNFKWRWYHFDGVDWDQSRKLNNRIYKFRGDGKGWDWEVDTENGNYDYLVYADIDMDHPEVVNELRNWGVWYTNTLGLDGFRIDAVKHIKYSFTRDWINHVRSATGKNMFAVAEFWKNDLGAIENYLNKTNWNHSVFDVPLHYNLYNASKSGGNYDMRQIFNGTVVQRHPTHAVTFVDNHDSQPEEALESFVEEWFKPLAYALTLTREQGYPSVFYGDYYGIPTHGVPAMKSKIDPILEARQKYAYGRQNDYLDHHNIIGWTREGNTAHPNSGLATIMSDGAGGNKWMFVGRNKAGQVWTDITGNRAGTVTINADGWGNFSVNGGSVSIWVNK

SEQ ID NO: 22554 - protein, 483 aa, Bacillus sp. SP70
HHNGTNGTMMQYFEWYLPNDGNHWNRLNSDASNLKSKGITAVWIPPAWKGASQNDVGYGAYDLYDLGEFNQKGTVRTKYGTRSQLQAAVTSLKNNGIQVYGDVVMNHKGGADATEMVRAVEVNPNNRNQEVTGEYTIEAWTRFDFPGRGNTHSSFKWRWYHFDGVDWDQSRRLNNRIYKFRGKAWDWEVDTENGNYDYLMYADIDMDHPEVVNELRNWGVWYTNTLGLDGFRIDAVKHIKYSFTRDWINHVRSATGKNMFAVAEFWKNDLGAIENYLQKTNWNHSVFDVPLHYNLYNASKSGGNYDMRNIFNGTVVQRHPSHAVTFVDNHDSQPEEALESFVEEWFKPLAYALTLTREQGYPSVFYGDYYGIPTHGVPAMRSKIDPILEARQKYAYGKQNDYLDHHNIIGWTREGNTAHPNSGLATIMSDGAGGSKWMFVGRNKAGQVWSDITGNRTGTVTINADGWGNFSVNGQSVSIWVNK

SEQ ID NO: 22555 - protein, 485 aa, Bacillus sp. 707
HHNGTNGTMMQYFEWYLPNDGNHWNRLNSDASNLKSKGITAVWIPPAWKGASQNDVGYGAYDLYDLGEFNQKGTVRTKYGTRSQLQAAVTSLKNNGIQVYGDVVMNHKGGADATEMVRAVEVNPNNRNQEVTGEYTIEAWTRFDFPGRGNTHSSFKWRWYHFDGVDWDQSRRLNNRIYKFRGHGKAWDWEVDTENGNYDYLMYADIDMDHPEVVNELRNWGVWYTNTLGLDGFRIDAVKHIKYSFTRDWINHVRSATGKNMFAVAEFWKNDLGAIENYLQKTNWNHSVFDVPLHYNLYNASKSGGNYDMRNIFNGTVVQRHPSHAVTFVDNHDSQPEEALESFVEEWFKPLAYALTLTREQGYPSVFYGDYYGIVTHGVPAMRSKIDPILEARQKYAYGKQNDYLDHHNIIGWTREGNTAHPNSGLATIMSDGAGGSKWMFVGRNKAGQVWSDITGNRTGTVTINADGWGNFSVNGGSVSIWVNK

SEQ ID NO: 22556 - protein, 485 aa, Bacillus sp. 707
HHNGTNGTMMQYFEWYLPNDGNHWNRLNSDASNLKSKGITAVWIPPAWKGASQNDVGYGAYDLYDLGEFNQKGTVRTKYGTRSQLQAAVTSLKNNGIQVYGDVVMNHKGGADATEMVRAVEVNPNNRNQEVTGEYTIEAWTRFDFPGRGNTHSSFKWRWYHFDGVDWDQSRRLNNRIYKFRGHGKAWDWEVDTENGNYDYLMYADIDMDHPEVVNELRNWGVWYTNTLGLDGFRIDAVKHIKYSFTRDWINHVRSATGKNMFAVAEFWKNDLGAIENYLQKTNWNHSVFDVPLHYNLYNASKSGGNYDMRNIFNGTVVQRHPSHAVTFVDNHDSQPEEALESFVEEWFKPLAYALTLTREQGYPSVFYGDYYGIPTHGVPAMRSKIDPILEARQKYAYGKQNDYLDHHNIIGWTREGNTAIPNSGLATIMSDGAGGSKWMFVGRNKAGQVWSDITGNRTGTVTINADGWGNFSVNGGSVSIWVNK

SEQ ID NO: 22557 - protein, 485 aa, Bacillus sp.
HHNGTNGTLMQYFEWYLPNDGNHWNRLRSDASNLKDKGISAVWIPPAWKGASQNDVGYGAYDLYDLGEFNQKGTIRTKYGTRNQLQAAVNALKSNGIQVYGDVVMNHKGGADATEMVRAVEVNPNNRNQEVSGEYTIEAWTKFDFPGRGNTHSNFKWRWYHFDGVDWDQSRKLNNRIYKFRGDGKGWDWEVDTENGNYDYLTYADIDMDHPEVVNELRNWGVWYTNTLGLDGFRIDAVKHIKYSFTRDWINHVRSATGKNMFAVAEFWKNDLGAIENYLNKTNWNHSVFDVPLHYNLYNASKSGGNYDMRQIFNGTVVQRHPTHAVTFVDNHDSQPEEALESFVEEWFKPLAYALTLTREQGYPSVFYGDYYGIPTHGVPAMKSKIDPILEARQKYAYGRQNDYLDHHNIIGWTREGNTAHPNSGLATIMSDGAGGNKWMFVGRNKAGQVWTDITGNRAGTVTINADGWGNFSVNGGSVSIWVNK

SEQ ID NO: 22558 - protein, 485 aa, Bacillus sp.
HHNGTNGTMMQYFEWYLPNDGNHWNRLRSDASNLKDKGISAVWIPPAWKGASQNDVGYGAYDLYDLGEFNQKGTIRTKYGTRNQLQAAVNALKSNGIQVYGDVVMNHKGGADATEMVRAVEVNPNNRNQEVSGEYTIEAWTKFDFPGRGNTHSNFKWRWYHFDGVDWDQSRKLNNRIYKFRGDGKGWDWEVDTENGNYDYLLYADIDMDHPEVVNELRNWGVWYTNTLGLDGFRIDAVKHIKYSFTRDWINHVRSATGKNMFAVAEFWKNDLGAIENYLNKTNWNHSVFDVPLHYNLYNASKSGGNYDMRQIFNGTVVQRHPTHAVTFVDNHDSQPEEALESFVEEWFKPLAYALTLTREQGYPSVFYGDYYGIPTHGVPAMKSKIDPILEARQKYAYGRQNDYLDHHNIIGWTREGNTAHPNSGLATIISDGAGGNKWMFVGRNKAGQVWTDITGNRAGTVTINADGWGNFSVNGGSVSIWVNK

SEQ ID NO: 22559 - protein, 485 aa, Bacillus sp. 707
HHNGTNGTMMQYFEWYLPNDGNHWNRLNSDASNLKSKGITAVWIPPAWKGASQNDVGYGAYDLYDLGEFNQKWTVRTKYGTRSQLQAAVTSLKNNGIQVYGDVVMNHKGGADATEMVRAVEVNPNNRNQEVTGEYTIEAWTRFDFPGRGNTHSSFKWRWYHFDGVDWDQSRRLNNRIYKFRGHGKAWDWEVDTENGNYDYLMYADIDMDHPEVVNELRNWGVWYTNTLGLDGFRIDAVKHIKYSFTRDWINHVRSATGKNMFAVAEFWKNDLGAIENYLQKTNWNHSVFDVPLHYNLYNASKSGGNYDMRNIFNGTVVQRHPSHAVTFVDNHDSQPEEALESFVEEWFKPLAYALTLTREQGYPSVFYGDYYGIPTHGVPAMRSKIDPILEARQKYAYGKQNDYLDHHNIIGWTREGNTAHPNSGLATIMSDGAGGSKWMFVGRNKAGQVWSDITGNRTGTVTINADGWGNFSVNGGSVSIWVNK

SEQ ID NO: 22560 - protein, 485 aa, Bacillus sp. 707
HHNGTNGTMMQYFEWYLPNDGNHWNRLNSDASNLKSKGITAVWIPPAWKGASQNDVGYGAYDLYDLGEFNQKGTVRTKYGTRSQLQAAVTSLKNNGIQVYGDVVMNHKGGADATEMVRAVEVNPNNRNQEVTGEYTIEAWTRFDFPGRGNTHSSFKWRWYHFDGVDWDQSRRLNNRIYKFRGHGKAWDWEVDTENGNYDYLMYADIDMDHPEVVNELRNWGVWYTNTLGLDGFRIDAVKHIKYSFTRDWINHVRSATGKNMFAVAEFWKNDLGAIENYLQKTNWNHSVFDVPLHYNLYNASKSGGNYDMRNIFNGTVVQRHPSHAVTFVDNHDSQPEEALESFVEEWFKPLAYALTLTREQGYPSVFYGDYYGIPTHGVPAMRSKIDPILEARQKYAYGKQNDYLDHHNIIGWTREGNTAHPNSGLATIMSDCAGGSKWMFVGRNKAGQVWSDITGNRTGTVTINADGWGNFSVNGGSVSIWVNK

SEQ ID NO: 22561 - protein, 485 aa, Bacillus sp. 707
HHNGTNGTMMQYFEWYLPNDGNHWNRLNSDASNLKSKGITAVWIPPAWKGASQNDVGYGAYDLYDLGEFNQKGTVRTKYGTRSQLQAAVTSLKNNGIQVYGDVVMNHKGGADATEMVRAVEVNPNNRNQEVTGEYTIEAWTRFDFPGRGNTHSSFKWRWYHFDGVDWDQSRRLNNRIYKFRGHGKAWDWEVDTENGNYDYLVYADIDMDHPEVVNELRNWGVWYTNTLGLDGFRIDAVKHIKYSFTRDWINHVRSATGKNMFAVAEFWKNDLGAIENYLQKTNWNHSVFDVPLHYNLYNASKSGGNYDMRNIFNGTVVQRHPSHAVTFVDNHDSQPEEALESFVEEWFKPLAYALTLTREQGYPSVFYGDYYGIPTHGVPAMRSKIDPILEARQKYAYGKQNDYLDHHNIIGWTREGNTAHPNSGLATIMSDGAGGSKWMFVGRNKAGQVWSDITGNRTGTVTINADGWGNFSVNGGSVSIWVNK

SEQ ID NO: 22562 - protein, 485 aa, Bacillus sp.
HHNGTNGTMMQYFEWYLPNDGNHWNRLRSDASNLKDKGISAVWIPPAWKGASQNDVGYGAYDLYDLGEFNQKGTIRTKYGTRNQLQAAVNALKSNGIQVYGDVVMNHKGGADATEMVRAVEVNPNNRNQEVSGEYTIEAWTKFDFPGRGNTHSNFKWRWYHFDGVDWDQSRKLNNRIYKFRGDGKGWDWEVDTENGNYDYLTYADIDMDHPEVVNELRNWGVWYTNTLGLDGFRIDAVKHIKYSFTRDWINHVRSATGKNMFAVAEFWKNDLGAIENYLNKTNWNHSVFDVPLHYNLYNASKSGGNYDMRQIFNGTVVQRHPTHAVTFVDNHDSQPEEALESFVEEWFKPLAYALTLTREQGYPSVFYGDYYGIPTHGVPAMKSKIDPILEARQKYAYGRQNDYLDHHNIIGWTREGNTAHPNSGLATIISDGAGGNKWMFVGRNKAGQVWTDITGNRAGTVTINADGWGNFSVNGGSVSIWVNK

SEQ ID NO: 22563 - protein, 485 aa, Bacillus sp. 707
HHNGTNGTMMQYFEWYLPNDGNHWNRLNSDASNLKSKGITAVWIPPAWKGASQNDVGYGAYDLYDLGEFNQKGTVRTKYGTRSQLQAAVTSLKNNGIKVYGDVVMNHKGGADATEMVRAVEVNPNNRNQEVTGEYTIEAWTRFDFPGRGNTHSSFKWRWYHFDGVDWDQSRRLNNRIYKFRGHGKAWDWEVDTENGNYDYLMYADIDMDHPEVVNELRNWGVWYTNTLGLDGFRIDAVKHIKYSFTRDWINHVRSATGKNMFAVAEFWKNDLGAIENYLQKTNWNHSVFDVPLHYNLYNASKSGGNYDMRNIFNGTVVQRHPSHAVTFVDNHDSQPEEALESFVEEWFKPLAYALTLTREQGYPSVFYGDYYGIPTHGVPAMRSKIDPILEARQKYAYGKQNDYLDHHNIIGWTREGNTAHPNSGLATIMSDGAGGSKWMFVGRNKAGQVWSDITGNRTGTVTINADGWGNFSVNGGSVSIWVNK

SEQ ID NO: 22564 - protein, 485 aa, Bacillus sp. 707
HHNGTNGTMMQYFEWYLPNDGNHWNRLNSDASNLKSKGITAVWIPPAWKGASQNDVGYGAYDLYDLGEFNQKGTVRTKYGTRSQLQAAVTSLKNNGIQVYGDVVMNHKGGADATEMVRAVEVNPNNRNQEVTGEYTIEAWTRFDFPGRGNTHSSFKWRWYHFDGVDWDQSRRLNNRIYKFRGHGKAWDWEVDTENGNYDYLMYADIDMDHPEVVNELRNWGVWYTNTLGLDGFRIDAVKHIKYSFTRDWINHVRSATGKNMFAVAEFWKNDLGAIENYLQKTNWNHSVFDVPLHYNLYNASKSGGNYDMRNIFNGTVVQRHPSHAVTFVDNHDSQPEEALESFVEEWFKPLAYALTLTREQGYPSVFYGDYYGIPTHGVPAMRSKIDPILEARQKYAYGKQNDYLDHHNIIGWTRQGNTAHPNSGLATIMSDGAGGSKWMFVGRNKAGQVWSDITGNRTGTVTINADGWGNFSVNGGSVSIWVNK

SEQ ID NO: 22565 - protein, 485 aa, Bacillus sp. 707
HHNGTNGTMMQYFEWYLPNDGNHWNRLNSDASNLKSKGITAVWIPPAWKGASQNDVGYGAYDLYDLGEFNQKGTVRTKYGTRSDLQAAVTSLKNNGIQVYGDVVMNHKGGADATEMVRAVEVNPNNRNQEVTGEYTIEAWTRFDFPGRGNTHSSFKWRWYHFDGVDWDQSRRLNNRIYKFRGHGKAWDWEVDTENGNYDYLMYADIDMDHPEVVNELRNWGVWYTNTLGLDGFRIDAVKHIKYSFTRDWINHVRSATGKNMFAVAEFWKNDLGAIENYLQKTNWNHSVFDVPLHYNLYNASKSGGNYDMRNIFNGTVVQRHPSHAVTFVDNHDSQPEEALESFVEEWFKPLAYALTLTREQGYPSVFYGDYYGIPTHGVPAMRSKIDPILEARQKYAYGKQNDYLDHHNIIGWTREGNTAHPNSGLATIMSDGAGGSKWMFVGRNKAGQVWSDITGNRTGTVTINADGWGNFSVNGGSVSIWVNK

SEQ ID NO: 22566 - protein, 485 aa, Bacillus sp. 707
HHNGTNGTMMQYFEWYLPNDGNHWNRLNSDASNLKSKGITAVWIPPAWKGASQNDVGYGAYDLYDLGEFNQKGTVRTKYGTRSQLQAAVTSLKNNGIQVYGDVVMNHKGGADATEMVRAVEVNPNNRNQEVTGEYTIEAWTRFDFPGRGNTHSSFKWRWYHFDGVDWDQSRRLNNRIYKFRGHGKAWDWEVDTENGNYDYLMYADIDMDHPEVVNELRNWGVWYTNTLGLDGFRIDAVKHIKYSFTRDWINHVRSATGKNMFAVAEFWKNDLGAIENYLQKTNWNHSVFDVPLHYNLYNASKSGGNYDMRNIFNGTVVQRHPSHAVTFVDNHDSQPEEALESFVEKWFKPLAYALTLTREQGYPSVFYGDYYGIPTHGVPAMRSKIDPILEARQKYAYGKQNDYLDHHNIIGWTREGNTAHPNSGLATIMSDGAGGSKWMFVGRNKAGQVWSDITGNRTGTVTINADGWGNFSVNGGSVSIWVNK

SEQ ID NO: 22567 - protein, 485 aa, Bacillus sp. 707
HHNGTNGTMMQYFEWYLPNDGNHWNRLNSDASNLKSKGITAVWIPPAWKGASQNDVGYGAYDLYDLGEFNQKGTVRTKYGTRSQLQAAVTSLKNNGIQVYGDVVMNHKGGADATEMVRAVEVNPNNRNQEVTGEYTIEAWTRFDFPGRGNTHSSFKWRWYHFDGVDWDQSRRLNNRIYKFRGHGKAWDWEVDTENGNYDYLMYADIDMDHPEVVNELRNWGVWYTNTLGLDGFRIDAVKHIKYSFTRDWINHVRSATGKNMFAVAEFWKNDLGAIENYLQKTNWNHSVFDVPLHYNLYNASKSGGNYDMRNIFNGTVVQRHPSHAVTFVDNHDSQPEEALESFVEEWFKPLAYALTLTREQGYPSVFYGDYYGIPTHGVPAMRSKIDPILEARQKYAYGKQNDYLDHHNIIGWTRYGNTAHPNSGLATIMSDGAGGSKWMFVGRNKAGQVWSDITGNRTGTVTINADGWGNFSVNGGSVSIWVNK

SEQ ID NO: 22568 - protein, 485 aa, Bacillus sp. 707
HHNGTNGTMMQYFEWYLPNDGNHWNRLNSDASNLKSKGITAVWIPPAWKGASQNDVGYGAYDLYDLGEFNQKGTVRTKYGTRSQLQAAVTSLKNNGIQVYGDVVMNHKGGADATEMVRAVEVNPNNRNQEVTGEYTIEAWTRFDFPGRGNTHSSFKWRWYHFDGVDWDQSRRLNNRIYKFRGHGKAWDWEVDTENGNYDYLMYADIDMDHPEVVNELRNWGVWYTNTLGLDGFRIDAVKHIKYSFTRDWINHVRSATGKNMFAVAEFWKNDLGAIENYLQKTNWNHSVFDVPLHYNLYNASKSGGNYDMRNIFNGTVVQRHPSHAVTFVDNHDSQPEEALESFVEEWFKPLAYALTLTREQGYPSVFYGDYYGIPTHGVPAMRSKIDPILEARQKYAYGKQNDYLDHHNIIGWTREGNTAHPNSGLATIMSDGAGGSKWMFVGRNKAGQVWSDITGNRTGTVTINADGWGNFSVNGPSVSIWVNK

SEQ ID NO: 22569 - protein, 485 aa, Bacillus sp. 707
HHNGTNGTMMQYFEWYLPNDGLHWNRLNSDASNLKSKGITAVWIPPAWKGASQNDVGYGAYDLYDLGEFNQKGTVRTKYGTRSQLQAAVTSLKNNGIQVYGDVVMNHKGGADATEMVRAVEVNPNNRNQEVTGEYTIEAWTRFDFPGRGNTHSSFKWRWYHFDGVDWDQSRRLNNRIYKFRGHGKAWDWEVDTENGNYDYLMYADIDMDHPEVVNELRNWGVWYTNTLGLDGFRIDAVKHIKYSFTRDWINHVRSATGKNMFAVAEFWKNDLGAIENYLQKTNWNHSVFDVPLHYNLYNASKSGGNYDMRNIFNGTVVQRHPSHAVTFVDNHDSQPEEALESFVEEWFKPLAYALTLTREQGYPSVFYGDYYGIPTHGVPAMRSKIDPILEARQKYAYGKQNDYLDHHNIIGWTREGNTAHPNSGLATIMSDGAGGSKWMFVGRNKAGQVWSDITGNRTGTVTINADGWGNFSVNGGSVSIWVNK

SEQ ID NO: 22570 - protein, 485 aa, Bacillus sp.
HHNGTNGTMMQYFEWYLPNDGNHWNRLNSDASNLKSKGITAVWIPPAWKGASQNDVGYGAYDLYDLGEFNQKGTVRTKYGTRSQLQAAVTSLKNNGIQVYGDVVMNHKGGADATEMVRAVEVNPNNRNQEVTGEYTIEAWTRFDFPGRGNTHSSFKWRWYHFDGVDWDQSRRLNNRIYKFRGHGKAWDWEVDNEFGNYDYLMYADIDMDHPEVVNELRNWGVWYTNTLGLDGFRIDAVKHIKYSFTRDWINHVRSATGKNMFAVAEFWKNDLGAIENYLQKTNWNHSVFDVPLHYNLYNASKSGGNYDMRNIFNGTVVQRHPSHAVTFVDNHDSQPEEALESFVEEWFKPLAYALTLTREQGYPSVFYGDYYGIPTHGVPAMRSKIDPILEARQKYAYGKQNDYLDHHNIIGWTREGNTAHPNSGLATIMSDGAGGSKWMFVGRNKAGQVWSDITGNRTGTVTINADGWGNFSVNGGSVSIWVNK

SEQ ID NO: 22571 - protein, 485 aa, Bacillus sp. 707
HHNGTNGTMMQYFEWYLPNDGNHWNRLNSDASNLKSKGITAVWIPPAWKGASQNDVGYGAYDLYDLGEFNQKGTVRTKYGTRSQLQAAVTSLKNNGIQVYGDVVMNHKGGADATEMVRAVEVNPNNRNQEVTHEYTIEAWTRFDFPGRGNTHSSFKWRWYHFDGVDWDQSRRLNNRIYKFRGHGKAWDWEVDTENGNYDYLMYADIDMDHPEVVNELRNWGVWYTNTLGLDGFRIDAVKHIKYSFTRDWINHVRSATGKNMFAVAEFWKNDLGAIENYLQKTNWNHSVFDVPLHYNLYNASKSGGNYDMRNIFNGTVVQRHPSHAVTFVDNHDSQPEEALESFVEEWFKPLAYALTLTREQGYPSVFYGDYYGIPTHGVPAMRSKIDPILEARQKYAYGKQNDYLDHHNIIGWTREGNTAHPNSGLATIMSDGAGGSKWMFVGRNKAGQVWSDITGNRTGTVTINADGWGNFSVNGGSVSIWVNK

SEQ ID NO: 22572 - protein, 485 aa, Bacillus sp.
HHNGTNGTMMQYFEWYLPNDGNHWNRLNSDASNLKSKGITAVWIPPAWKGASQNDVGYGAYDLYDLGEFNQKGTVRTKYGTRSQLQAAVTSLKNNGIQVYGDVVMNHKGGADATEMVRAVEVNPNNRNQEVTGEYTIEAWTRFDFPGRGNTHSSFKWRWYHFDGVDWDQSRRLNNRIYKFRGHGKAWDWEVDDEFGNYDYLMYADIDMDHPEVVNELRNWGVWYTNTLGLDGFRIDAVKHIKYSFTRDWINHVRSATGKNMFAVAEFWKNDLGAIENYLQKTNWNHSVFDVPLHYNLYNASKSGGNYDMRNIFNGTVVQRHPSHAVTFVDNHDSQPEEALESFVEEWFKPLAYALTLTREQGYPSVFYGDYYGIPTHGVPAMRSKIDPILEARQKYAYGKQNDYLDHHNIIGWTREGNTAHPNSGLATIMSDGAGGSKWMFVGRNKAGQVWSDITGNRTGTVTINADGWGNFSVNGGSVSIWVNK

SEQ ID NO: 22573 - protein, 485 aa, Bacillus sp. 707
HHNGTNGTMMQYFEWYLPNDGNHWNRLNSDASNLKSKGITAVWIPPAWKGASQNDVGYGAYDLYDLGEFNQKGTVRTKYGARSQLQAAVTSLKNNGIQVYGDVVMNHKGGADATEMVRAVEVNPNNRNQEVTGEYTIEAWTRFDFPGRGNTHSSFKWRWYHFDGVDWDQSRRLNNRIYKFRGHGKAWDWEVDTENGNYDYLMYADIDMDHPEVVNELRNWGVWYTNTLGLDGFRIDAVKHIKYSFTRDWINHVRSATGKNMFAVAEFWKNDLGAIENYLQKTNWNHSVFDVPLHYNLYNASKSGGNYDMRNIFNGTVVQRHPSHAVTFVDNHDSQPEEALESFVEEWFKPLAYALTLTREQGYPSVFYGDYYGIPTHGVPAMRSKIDPILEARQKYAYGKQNDYLDHHNIIGWTREGNTAHPNSGLATIMSDGAGGSKWMFVGRNKAGQVWSDITGNRTGTVTINADGWGNFSVNGGSVSIWVNK

SEQ ID NO: 22574 - protein, 485 aa, Bacillus sp. 707
HHNGTNGTMMQYFEWYLPNDGNHWNRLNSDASNLKSKGITAVWIPPAWKGASQNDVGYGAYDLYDLGEFNQKGTVRTKYGTRSQLQAAVTSLKNQGIQVYGDVVMNHKGGADATEMVRAVEVNPNNRNQEVTGEYTIEAWTRFDFPGRGNTHSSFKWRWYHFDGVDWDQSRRLNNRIYKFRGHGKAWDWEVDTENGNYDYLMYADIDMDHPEVVNELRNWGVWYTNTLGLDGFRIDAVKHIKYSFTRDWINHVRSATGKNMFAVAEFWKNDLGAIENYLQKTNWNHSVFDVPLHYNLYNASKSGGNYDMRNIFNGTVVQRHPSHAVTFVDNHDSQPEEALESFVEEWFKPLAYALTLTREQGYPSVFYGDYYGIPTHGVPAMRSKIDPILEARQKYAYGKQNDYLDHHNIIGWTREGNTAHPNSGLATIMSDGAGGSKWMFVGRNKAGQVWSDITGNRTGTVTINADGWGNFSVNGGSVSIWVNK

SEQ ID NO: 22575 - protein, 485 aa, Bacillus sp. 707
HHNGTNGTMMQYFEWYLPNDGNHWNRLNSDASNLKSKGITAVWIPPAWKGASQNDVGYGAYDLYDLGEFNQKGTVRTKYGTRSQLQAAVTSLKNNGIQVYGDVVMNHKGGADATEMVRAVEVNPNNRNQEVTGEYTIEAWTRFDFPGRGNTHSSFKWRWYHFDGVDWDQSRRLNNRIYKFRGHGKAWDWEVDTENGNYDYLQYADIDMDHPEVVNELRNWGVWYTNTLGLDGFRIDAVKHIKYSFTRDWINHVRSATGKNMFAVAEFWKNDLGAIENYLQKTNWNHSVFDVPLHYNLYNASKSGGNYDMRNIFNGTVVQRHPSHAVTFVDNHDSQPEEALESFVEEWFKPLAYALTLTREQGYPSVFYGDYYGIPTHGVPAMRSKIDPILEARQKYAYGKQNDYLDHHNIIGWTREGNTAHPNSGLATIMSDGAGGSKWMFVGRNKAGQVWSDITGNRTGTVTINADGWGNFSVNGGSVSIWVNK

SEQ ID NO: 22576 - protein, 485 aa, Bacillus sp. 707
HHNGTNGTMMQYFEWYLPNDGNHWNRLNSDASNLKSKGITAVWIPPAWKGASQEDVGYGAYDLYDLGEFNQKGTVRTKYGTRSQLQAAVTSLKNNGIQVYGDVVMNHKGGADATEMVRAVEVNPNNRNQEVTGEYTIEAWTRFDFPGRGNTHSSFKWRWYHFDGVDWDQSRRLNNRIYKFRGHGKAWDWEVDTENGNYDYLMYADIDMDHPEVVNELRNWGVWYTNTLGLDGFRIDAVKHIKYSFTRDWINHVRSATGKNMFAVAEFWKNDLGAIENYLQKTNWNHSVFDVPLHYNLYNASKSGGNYDMRNIFNGTVVQRHPSHAVTFVDNHDSQPEEALESFVEEWFKPLAYALTLTREQGYPSVFYGDYYGIPTHGVPAMRSKIDPILEARQKYAYGKQNDYLDHHNIIGWTREGNTAHPNSGLATIMSDGAGGSKWMFVGRNKAGQVWSDITGNRTGTVTINADGWGNFSVNGGSVSIWVNK

SEQ ID NO: 22577 - protein, 485 aa, Bacillus sp. 707
HHNGTNGTMMQYFEWYLPNDGNHWNRLNSDASNLKSKGITAVWIPPAWKGASQNDVGYGAYDLYDLGEFNQKGTVRTKYGTRSQLQAAVTSLKNNGIQVYGDVVMNHKGGADATEMVRAVEVNPNNRNQEVTGEYTIEAWTRFDFHGRGNTHSSFKWRWYHFDGVDWDQSRRLNNRIYKFRGHGKAWDWEVDTENGNYDYLMYADIDMDHPEVVNELRNWGVWYTNTLGLDGFRIDAVKHIKYSFTRDWINHVRSATGKNMFAVAEFWKNDLGAIENYLQKTNWNHSVFDVPLHYNLYNASKSGGNYDMRNIFNGTVVQRHPSHAVTFVDNHDSQPEEALESFVEEWFKPLAYALTLTREQGYPSVFYGDYYGIPTHGVPAMRSKIDPILEARQKYAYGKQNDYLDHHNIIGWTREGNTAHPNSGLATIMSDGAGGSKWMFVGRNKAGQVWSDITGNRTGTVTINADGWGNFSVNGGSVSIWVNK

SEQ ID NO: 22578 - protein, 483 aa, Bacillus sp. SP70
HHNGTNGTMMQYFEWYLPNDGNHWNRLNSDASNLKSKGITAVWIPPAWKGASQNDVGYGAYDLYDLGEFNQKGTVRTKYGTRSQLQAAVTSLKNNGIQVYGDVVMNHKGGADATEMVRAVEVNPNNRNQEVTGEYTIEAWTRFDFPGRGNTHSSFKWRWYHFDGVDWDQSRRLNNRIYKFRGKAWDWEVDTENGNYDYLMYADIDMDHPEVVNELRNWGVWYTNTLGLDGFRIDAVKHIKYSFTRDWINHVRSATGKNMFAVAEFWKNDLGAIENYLQKTNWNHSVFDVPLHYNLYNASKSGGNYDMRNIFNGTVVQMHPSHAVTFVDNHDSQPEEALESFVEEWFKPLAYALTLTREQGYPSVFYGDYYGIPTHGVPAMRSKIDPILEARQKYAYGKQNDYLDHHNIIGWTREGNTAHPNSGLATIMSDGAGGSKRMFVGRNKAGQVWSDITGNRTGTVTINADGWGNFSVNGGSVSIWVNK

SEQ ID NO: 22579 - protein, 485 aa, Bacillus sp. 707
HHNGTNGTMMQYFEWYLPNDGNHWNRLNSDASNLKSKGITAVWIPPAWKGASQNDVGYGAYDLYDLGEFNQKGTVRTKYGTRSQLQAAVTSLKNNGIQVYGDVVMNHKGGADVTEMVRAVEVNPNNRNQEVTGEYTIEAWTRFDFPGRGNTHSSFKWRWYHFDGVDWDQSRRLNNRIYKFRGHGKAWDWEVDTENGNYDYLMYADIDMDHPEVVNELRNWGVWYTNTLGLDGFRIDAVKHIKYSFTRDWINHVRSATGKNMFAVAEFWKNDLGAIENYLQKTNWNHSVFDVPLHYNLYNASKSGGNYDMRNIFNGTVVQRHPSHAVTFVDNHDSQPEEALESFVEEWFKPLAYALTLTREQGYPSVFYGDYYGIPTHGVPAMRSKIDPILEARQKYAYGKQNDYLDHHNIIGWTREGNTAHPNSGLATIMSDGAGGSKWMFVGRNKAGQVWSDITGNRTGTVTINADGWGNFSVNGGSVSIWVNK

SEQ ID NO: 22580 - protein, 485 aa, Bacillus sp. 707
HHNGTNGTMMQYFEWYLPNDGNHWNRLNSDASNLKSKGITAVWIPPAWKGASQNDVGYGAYDLYDLGEFNQKGTVRTKYGTRSQLQAAVTSLKNNGIQVYGDVVMNHKGGADATEMVRAVEVNPNNRNQEVTGEYTIEAWTRFDFPGRGNTHSSFKWRWYHFDGVDWDQSRRLNNRIYKFRGHGKAWDWEVDTENGNYDYLMYADIDMDHPEVVNELRNWGVWYTNTLGLDGFRIDAVKHIKYSFTRDWINHVRSATGKNMFAVAEFWKNDLGAIENYLQKTNWNHSVFDVPLHYNLYNASKSGGNYDMRNIFNGTVVQRHPSHAVTFVDNHDSQPEEALESFVEEWFKPLAYALTLTREQGYPSVFYGDYYGIPTHGVPAMRSKIDVILEARQKYAYGKQNDYLDHHNIIGWTREGNTAHPNSGLATIMSDGAGGSKWMFVGRNKAGQVWSDITGNRTGTVTINADGWGNFSVNGGSVSIWVNK

SEQ ID NO: 22581 - protein, 485 aa, Bacillus sp. 707
HHNGTNGTMMQYFEWYLPNDGNHWNRLNSDASNLKSKGITAVWIPPAWKGASQNDVGYGAYDLYDLGEFNQKGTVRTKYGTRSQLQAAVTSLKNNGIQVYGDVVMNHKGGADATEMVRAVEVNPNNRNQEVTGEYTIEAWTRFDFPGRGNTHSSFKWRWYHFDGVDWDQSRRLNNRIYKFRGHGKAWDWEVDTENGNYDYLMYADIDMDHPEVVNELRNWGVWYTNTLGLDGFRIDAVKHIKYSFTRDWINHVRSATGKNMFAVAEFWKNDLGAIENYLQKTNWNHSVFDVPLHYNLYNASKSGGNYDMRNIFNGTVVQRHPSHAVTFVDNHDSQPEEALESFVEEWFKPLAYALTLTREQGYPSVFYGDYYGIPTHGVPAMRSKIDTILEARQKYAYGKQNDYLDHHNIIGWTREGNTAHPNSGLATIMSDGAGGSKWMFVGRNKAGQVWSDITGNRTGTVTINADGWGNFSVNGGSVSIWVNK

SEQ ID NO: 22582 - protein, 485 aa, Bacillus sp.
HHNGTNGTMMQYFEWYLPNDGNHWNRLRSDASNLKDKGISAVWIPPAWKGASQNDVGYGAYDLYDLGEFNQKGTIRTKYGTRNQLQAAVNALKSNGIQVYGDVVFNHKGGADATEMVRAVEVNPNNRNQEVSGEYTIEAWTKFDFPGRGNTHSNFKWRWYHFDGVDWDQSRKLNNRIYKFRGDGKGWDWEVDTENGNYDYLIYADIDFDHPEVVNELRNWGVWYTNTLGLDGFRIDAVKHIKYSFTRDWINHVRSATGKNMFAVAEFWKNDLGAIENYLNKTNWNHSVFDVPLHYNLYNASKSGGNYDMRQIFNGTVVQRHPMHAVTFVDNHDSQPEEALESFVEEWFKPLAYALTLTREQGYPSVFYGDYYGIPTHGVPAMKSKIDPILEARQKYAYGRQNDYLDHHNIIGWTREGNTAHPNSGLATIMSDGAGGNKWMFVGRNKAGQVWTDITGNRAGTVTINADGWGNFSVNGGSVSIWVNK

SEQ ID NO: 22583 - protein, 483 aa, Bacillus sp.
HHNGTNGTMMQYFEWYLPNDGNHWNRLNSDASNLKSKGITAVWIPPAWKGASQNDVGYGAYDLYDLGEFNQKGTVRTKYGTRSQLQAAVTSLKNNGIQVYGDVVMNHKGGADATEMVRAVEVNPNNRNQEVTGEYTIEAWTRFDFPGRGNTHSSFKWRWYHFDGVDWDQSRRLNNRIYKFRHKAWDWEVDTENGNYDYLMYADIDMDHPEVVNELRNWGVWYTNTLGLDGFRIDAVKHIKYSFTRDWINHVRSATGKNMFAVAEFWKNDLGAIENYLQKTNWNHSVFDVPLHYNLYNASKSGGNYDMRNIFNGTVVQRHPSHAVTFVDNHDSQPEEALESFVEEWFKPLAYALTLTREQGYPSVFYGDYYGIPTHGVPAMRSKIDPILEARQKYAYGKQNDYLDHHNIIGWTREGNTAHPNSGLATIMSDGAGGSKWMFVGRNKAGQVWSDITGNRTGTVTINADGWGNFSVNGGSVSIWVNK

SEQ ID NO: 22584 - protein, 485 aa, Bacillus sp. 707
HHNGTNGTMMQYFEWYLPNDGNHWNRLNSDASNLKSKGITAVWIPPAWKGASQNDVGYGAYDLYDLGEFNQKGTVRTKYGTRSQLQAAVTSLKNTGIQVYGDVVMNHKGGADATEMVRAVEVNPNNRNQEVTGEYTIEAWTRFDFPGRGNTHSSFKWRWYHFDGVDWDQSRRLNNRIYKFRGHGKAWDWEVDTENGNYDYLMYADIDMDHPEVVNELRNWGVWYTNTLGLDGFRIDAVKHIKYSFTRDWINHVRSATGKNMFAVAEFWKNDLGAIENYLQKTNWNHSVFDVPLHYNLYNASKSGGNYDMRNIFNGTVVQRHPSHAVTFVDNHDSQPEEALESFVEEWFKPLAYALTLTREQGYPSVFYGDYYGIPTHGVPAMRSKIDPILEARQKYAYGKQNDYLDHHNIIGWTREGNTAHPNSGLATIMSDGAGGSKWMFVGRNKAGQVWSDITGNRTGTVTINADGWGNFSVNGGSVSIWVNK

SEQ ID NO: 22585 - protein, 485 aa, Bacillus sp. 707
HHNGTNGTMMQYFEWYLPNDGNHWNRLNSDASNLKSKGITAVWIPPAWKGASQNDVGYGAYDLYDLGEFNQKGTVRTKYGTRSQLQAAVTSLKNNGIQVYGDVVMNHKGGADATEMVRAVEVNPNNRNQEVTGEYTIEAWTRFDFPGRGNTHSSFKWRWYHFDGVDWDQSRRLNNRIYKFRGHGKAWDWEVDTENGNYDYLMYADIDMDHPEVVNELRNWGVWYTNTLGLDGFRIDAVKHIKYSFTRDWINHVRSATGKNMFAVAEFWKNDLGAIENYLQKTNWNHSVFDVPLHYNLYNASKSGGNYDMRNIFNGTVVQRHPSHAVTFVDNHDSQPEEALESFVEEWFKPLAYALTLTREQGYPSVFYGDYYGIPTHGVPAMRSKIDPILLARQKYAYGKQNDYLDHHNIIGWTREGNTAHPNSGLATIMSDGAGGSKWMFVGRNKAGQVWSDITGNRTGTVTINADGWGNFSVNGGSVSIWVNK

SEQ ID NO: 22586 - protein, 485 aa, Bacillus sp. 707
HHNGTNGTMMQYFEWYLPNDGNHWNRLNSDASNLKSKGITAVWIPPAWKGASQNDVGYGAYDLYDLGEFNQKGTVRTKYGTRSQLQAAVTSLKNNGIQVYGDVVMNHKGGADATEMVRAVEVNPNNRNQEVTGEYTIEAWTRFDFPGRGNTHSSFKWRWYHFDGVDWDQSRRLNNRIYKFRGHGKAWDWEVDTENGNYDYLMYADIDMDHPEVVNELRNWGVWYTNTLGLDGFRIDAVKHIKYSFTRDWINHVRSATGKNMFAVAEFWKNDLGAIENYLQKTNWNHSVFDVPLHYNLYNASKSGGNYDMRNIFNGTVVQRHPSHAVTFVDNHDSQPEEALESFVEEWFKPLAYALTLTREQGYPSVFYGDYYGIPTHGVPAMRSKIDPILIARQKYAYGKQNDYLDHHNIIGWTREGNTAHPNSGLATIMSDGAGGSKWMFVGRNKAGQVWSDITGNRTGTVTINADGWGNFSVNGGSVSIWVNK

SEQ ID NO: 22587 - protein, 485 aa, Bacillus sp. 707
HHNGTNGTMMQYFEWYLPNDGNHWNRLNSDASNLKSKGITAVWIPPAWKGASQNDVGYGAYDLYDLGEFNQKGTVRTKYGTRSQLQAAVTSLKNNGIQVYGDVVMNHKGGADATEMVRAVEVNPNNRNQEVTGEYTIEAWTRFDFPGRWNTHSSFKWRWYHFDGVDWDQSRRLNNRIYKFRGHGKAWDWEVDTENGNYDYLMYADIDMDHPEVVNELRNWGVWYTNTLGLDGFRIDAVKHIKYSFTRDWINHVRSATGKNMFAVAEFWKNDLGAIENYLQKTNWNHSVFDVPLHYNLYNASKSGGNYDMRNIFNGTVVQRHPSHAVTFVDNHDSQPEEALESFVEEWFKPLAYALTLTREQGYPSVFYGDYYGIPTHGVPAMRSKIDPILEARQKYAYGKQNDYLDHHNIIGWTREGNTAHPNSGLATIMSDGAGGSKWMFVGRNKAGQVWSDITGNRTGTVTINADGWGNFSVNGGSVSIWVNK

SEQ ID NO: 22588 - protein, 485 aa, Bacillus sp. 707
HHNGTNGTMMQYFEWYLPNDGNHWNRLNSDASNLKSKGITAVWIPPAWKGASQNDVGYGAYDLYDLGEFNQKGTVRTKYGTRSQLQAAVTSLKNNGIQVYGDVVMNHKGGADATEMVRAVEVNPNNRNQEVTGEYTIEAWTRFDFPGRGNTHSSFKWRWYHFDGVDWDQSRRLNNRIYKFRGHGKAWDWEVDTENGNYDYLMYADIDMDHPEVVNELRNWGVWYTNTLGLDGFRIDAVKHIKYSFTRDWINHVRSATGKNMFAVAEFWKNDLGAIENYLQKTNWNHSVFDVPLHYNLYNASKSGGNYDMRNIFNGTVVQRHPSHAVTFVDNHDSQPEEALESFVEEWFKPLAYALTLTREQGYPSVFYGDYYGIHTHGVPAMRSKIDPILEARQKYAYGKQNDYLDHHNIIGWTREGNTAHPNSGLATIMSDGAGGSKWMFVGRNKAGQVWSDITGNRTGTVTINADGWGNFSVNGGSVSIWVNK

SEQ ID NO: 22589 - protein, 485 aa, Bacillus sp. 707
HHNGTNGTMMQYFEWYLPNDGNHWNRLNSDASNLKSKGITAVWIPPAWKGASQNDVGYGAYDLYDLGEFNQKGTVRTKYGTRSQLQAAVTSLKNNGIQVYGDVVMNHKGGADATEMVRAVEVNPNNRNQEVTGEYTIEAWTRFDFPGRGNTHSSFKWRWYHFDGVDWDQSRRLNNRIYKFRGHGKAWDWEVDTENGNYDYLMYADIDMDHPEVVNELRNWGVWYTNTLGLDGFRIDAVKHIKYSFTRDWINHVRSATGKNMFAVAEFWKNDLGAIENYLQKTNWNHSVFDVPLHYNLYNASKSGGNYDMRNIFNGTVVQRHPSHAVTFVDNHDSQPEEALESFVEEWFKPLAYALTLTREQGYPSVFYGDYYGIPTHGMPAMRSKIDPILEARQKYAYGKQNDYLDHHNIIGWTREGNTAHPNSGLATIMSDGAGGSKWMFVGRNKAGQVWSDITGNRTGTVTINADGWGNFSVNGGSVSIWVNK

SEQ ID NO: 22590 - protein, 485 aa, Bacillus sp. 707
HHNGTNYTMMQYFEWYLPNDGNHWNRLNSDASNLKSKGITAVWIPPAWKGASQNDVGYGAYDLYDLGEFNQKGTVRTKYGTRSQLQAAVTSLKNNGIQVYGDVVMNHKGGADATEMVRAVEVNPNNRNQEVTGEYTIEAWTRFDFPGRGNTHSSFKWRWYHFDGVDWDQSRRLNNRIYKFRGHGKAWDWEVDTENGNYDYLMYADIDMDHPEVVNELRNWGVWYTNTLGLDGFRIDAVKHIKYSFTRDWINHVRSATGKNMFAVAEFWKNDLGAIENYLQKTNWNHSVFDVPLHYNLYNASKSGGNYDMRNIFNGTVVQRHPSHAVTFVDNHDSQPEEALESFVEEWFKPLAYALTLTREQGYPSVFYGDYYGIPTHGVPAMRSKIDPILEARQKYAYGKQNDYLDHHNIIGWTREGNTAHPNSGLATIMSDGAGGSKWMFVGRNKAGQVWSDITGNRTGTVTINADGWGNFSVNGGSVSIWVNK

SEQ ID NO: 22591 - protein, 485 aa, Bacillus sp. 707
HHNGTNGTMMQYFEWYLPNDGNHWNRLNSDASNLKSKGITAVWIPPAWKGASQNDVGYGAYDLYDLGEFNQKGTVRTKYGTRSQLQAAVTSLKNNGIQVYGDVVMNHKGGADATEMVRAVEVNPNNRNQEVTGEYTIEAWTRFDFPGRGNTHSSFKWRWGHFDGVDWDQSRRLNNRIYKFRGHGKAWDWEVDTENGNYDYLMYADIDMDHPEVVNELRNWGVWYTNTLGLDGFRIDAVKHIKYSFTRDWINHVRSATGKNMFAVAEFWKNDLGAIENYLQKTNWNHSVFDVPLHYNLYNASKSGGNYDMRNIFNGTVVQRHPSHAVTFVDNHDSQPEEALESFVEEWFKPLAYALTLTREQGYPSVFYGDYYGIPTHGVPAMRSKIDPILEARQKYAYGKQNDYLDHHNIIGWTREGNTAHPNSGLATIMSDGAGGSKWMFVGRNKAGQVWSDITGNRTGTVTINADGWGNFSVNGGSVSIWVNK

SEQ ID NO: 22592 - protein, 485 aa, Bacillus sp.
HHNGTNGTLMQYFEWYLPNDGNHWNRLRSDASNLKDKGISAVWIPPAWKGASQNDVGYGAYDLYDLGEFNQKGTIRTKYGTRNQLQAAVNALKSNGIQVYGDVVMNHKGGADATEMVRAVEVNPNNRNQEVSGEYTIEAWTKFDFPGRANTHSNFKWRWYHFDGVDWDQSRKLNNRIYKFRGDGKGWDWEVDTENGNYDYLIYADIDMDHPEVVNELRNWGVWYTNTLGLDGFRIDAVKHIKYSFTRDWINHVRSATGKNMFAVAEFWKNDLGAIENYLNKTNWNHSVFDVPLHFNLYNASKSGGNYDMRQIFNGTVVQRHPMHAVTFVDNHDSQPEESLESFVREWFKPLAYALTLTREQGYPSVFYGDYYGIPTHGVPAMKSKIDPILEARQKYAYGRQNDYLDHHNIIGWTREGNTAHPNSGLATIMSDGAGGNKWMFVGRNKAGQVWTDITGNRAGTVTINADGWGNFSVNGGSVSIWVNK

SEQ ID NO: 22593 - protein, 485 aa, Bacillus sp. 707
HHNGTTGTMMQYFEWYLPNDGNHWNRLNSDASNLKSKGITAVWIPPAWKGASQNDVGYGAYDLYDLGEFNQKGTVRTKYGTRSQLQAAVTSLKNNGIQVYGDVVMNHKGGADATEMVRAVEVNPNNRNQEVTGEYTIEAWTRFDFPGRGNTHSSFKWRWYHFDGVDWDQSRRLNNRIYKFRGHGKAWDWEVDTENGNYDYLMYADIDMDHPEVVNELRNWGVWYTNTLGLDGFRIDAVKHIKYSFTRDWINHVRSATGKNMFAVAEFWKNDLGAIENYLQKTNWNHSVFDVPLHYNLYNASKSGGNYDMRNIFNGTVVQRHPSHAVTFVDNHDSQPEEALESFVEEWFKPLAYALTLTREQGYPSVFYGDYYGIPTHGVPAMRSKIDPILEARQKYAYGKQNDYLDHHNIIGWTREGNTAHPNSGLATIMSDGAGGSKWMFVGRNKAGQVWSDITGNRTGTVTINADGWGNFSVNGGSVSIWVNK

SEQ ID NO: 22594 - protein, 485 aa, Bacillus sp. 707
HHNGTNGTMMQYFEWYLPNDGNHWNRLNSDASNLKSKGITAVWIPPAWKGASQNDVGYGAYDLYDLGEFNQKGTVRTKYGTRSQLQAAVTSLKNNGIQVYGDVVMNHKGGADATEMVRAVEVNPNNRNQEVTGEYTIEAWTRFDFPGRGNTHSSFKWRWYHFDGVDWDQSRRLNNRIYKFRGHGKAWDWEVDTENGNYDYLMYADIDMDHPEVVNELRNWGVWYTNTLGLDGFRIDAVKHIKYSFTRDWINHVRSATGKNMFAVAEFWKNDLGAIENYLQKTNWNHSVFDVPLHYNLYNASKSGGNYDMRNIFNGTVVQRHPSHAVTFVDNHDSQPEEALESFVEEWFKPLAYALTLTREQGYPSVFYGDYYGIPTHGVPAMRSKIDPILSARQKYAYGKQNDYLDHHNIIGWTREGNTAHPNSGLATIMSDGAGGSKWMFVGRNKAGQVWSDITGNRTGTVTINADGWGNFSVNGGSVSIWVNK

SEQ ID NO: 22595 - protein, 485 aa, Bacillus sp. 707
HHNGTNGTMMQYFEWYLPNDGNHWNRLNSDASNLKSKGITAVWIPPAWKGASQNDVGYGAYDLYDLGEFNQKGTVRTKYGTRSQLQAAVTSLKNNGIQVYGDVVMNHKGGADATEMVRAVEVNPNNRNQEVTGEYTIEAWTRFDFPGRGNTHSSFKWRWYHFDGVDWDQSRRLNNRIYKFRGHGKAWDWEVDTENGNYDYLMYADIDMDHPEVVNELRNWGVWYTNTLGLDGFRIDAVKHIKYSFTRDWINHVRSATGKNMFAVAEFWKNDLGAIENYLQKTNWNHSVFDVPLHYNLYNASKSGGNYDMRNIFNGTVVQRHPSHAVTFVDNHDSQPEEALESFVEEWFKPLAYALTLTREQGYPSVFYGDYYGIPTHGVPAMRSKIDPILEARQKYAYGKQNDYLDHHNIIGWTREGNTAHPNSGLATIMSDGAEGSKWMFVGRNKAGQVWSDITGNRTGTVTINADGWGNFSVNGGSVSIWVNK

SEQ ID NO: 22596 - protein, 485 aa, Bacillus sp. 707
HHNGTNGTMMQYFEWYLPNDGNHWNRLNSDASNLKSKGITAVWIPPAWKGASQNDVGYGAYDLYDLGEFNQKGTVRTKYGTRSQLQAAVTSLKNNGIQVYGDVVMNHKGGADATEMVRAVEVNPNNRNQEVTPEYTIEAWTRFDFPGRGNTHSSFKWRWYHFDGVDWDQSRRLNNRIYKFRGHGKAWDWEVDTENGNYDYLMYADIDMDHPEVVNELRNWGVWYTNTLGLDGFRIDAVKHIKYSFTRDWINHVRSATGKNMFAVAEFWKNDLGAIENYLQKTNWNHSVFDVPLHYNLYNASKSGGNYDMRNIFNGTVVQRHPSHAVTFVDNHDSQPEEALESFVEEWFKPLAYALTLTREQGYPSVFYGDYYGIPTHGVPAMRSKIDPILEARQKYAYGKQNDYLDHHNIIGWTREGNTAHPNSGLATIMSDGAGGSKWMFVGRNKAGQVWSDITGNRTGTVTINADGWGNFSVNGGSVSIWVNK

SEQ ID NO: 22597 - protein, 485 aa, Bacillus sp. 707
HHNGTNGTMMQYFEWYLPNDGNHWNRLNSDASNLKSKGITAVWIPPAWKGASQNDVGYGAYDLYDLGEFNQKGTVRTKYGTRSQLQAAVTSLKNNGIQVYGDVVMNHKGGADATEMVRAVEVNPNNRNQEVTGEYTIEAWTRFDFPGRGNTHSSFKWRWYHFDGVDWDQSRRLNNRIYKFRGHGKAWDWEVDTENGNYDYLMYADIDMDHPEVVNELRNWGVWYTNTLGLDGFRIDAVKHIKYSFTRDWINHVRSATGKNMFAVAEFWKNDLGAIENYLQKTNWNHSVFDVPLHYNLYNASKSGGNYDMRNIFNGTVVQRHPSHAVTFVDNHDSQPEEALESFVENWFKPLAYALTLTREQGYPSVFYGDYYGIPTHGVPAMRSKIDPILEARQKYAYGKQNDYLDHHNIIGWTREGNTAHPNSGLATIMSDGAGGSKWMFVGRNKAGQVWSDITGNRTGTVTINADGWGNFSVNGGSVSIWVNK

SEQ ID NO: 22598 - protein, 485 aa, Bacillus sp. 707
HHNGTNGTMMQYFEWYLPNDGNHWNRLNSDASNLKSKGITAVWIPPAWKGASQNDVGYGAYDLYDLGEFNQKGTVRTKYGTRSQLQAAVTSLKNNGIQVYGDVVMNHKGGADATEMVRAVEVNPNNRNQEVTGEYTIEAWTRFDFPGRGNTHSSFKWRWYHFDGVDWDQSRRLNNRIYKFRGHGKAWDWEVDTENGNYDYLMYADIDMDHPEVVNELRNWGVWYTNTLGLDGFRIDAVKHIKYSFTRDWINHVRSATGKNMFAVAEFWKNDLGAIENYLQKTNWNHSVFDVPLHYNLYNASKSGGNYDMRNIFNGTVVQRHPSHAVTFVDNHDSQPEEALESFVEEWFKPLAYALTLTREQGYPSVFYGDYYGIPTHGVPAMRSKIDPILEARQKYAYGKQNDYLDHHNIIGWTREGNTAHPNSGLATIMSDGAGGSKWMFVGRNKAGQEWSDITGNRTGTVTINADGWGNFSVNGGSVSIWVNK

SEQ ID NO: 22599 - protein, 485 aa, Bacillus sp. 707
HHNGTNGTMMQYFEWYLPNDGNHWARLNSDASNLKSKGITAVWIPPAWKGASQNDVGYGAYDLYDLGEFNQKGTVRTKYGTRSQLQAAVTSLKNNGIQVYGDVVMNHKGGADATEMVRAVEVNPNNRNQEVTGEYTIEAWTRFDFPGRGNTHSSFKWRWYHFDGVDWDQSRRLNNRIYKFRGHGKAWDWEVDTENGNYDYLMYADIDMDHPEVVNELRNWGVWYTNTLGLDGFRIDAVKHIKYSFTRDWINHVRSATGKNMFAVAEFWKNDLGAIENYLQKTNWNHSVFDVPLHYNLYNASKSGGNYDMRNIFNGTVVQRHPSHAVTFVDNHDSQPEEALESFVEEWFKPLAYALTLTREQGYPSVFYGDYYGIPTHGVPAMRSKIDPILEARQKYAYGKQNDYLDHHNIIGWTREGNTAHPNSGLATIMSDGAGGSKWMFVGRNKAGQVWSDITGNRTGTVTINADGWGNFSVNGGSVSIWVNK

SEQ ID NO: 22600 - protein, 485 aa, Bacillus sp. 707
HHNGTNGTMMQYFEWYLPNDGNHWNRLNSDASNLKSKGITAVWIPPAWKGASQNDVGYGAYDLYDLGEFNQKGTVRTKYGTRSQLQAAVTSLKNNGIQVYGDVVMNHKGGADATEMVRAVEVNPNNRNQEVTGEYTIEAWTRFDFPGRGNTHSSFKWRWYHFDGVDWDQSRRLNNRIYKFRGHGKAWDWEVDTENGNYDYLMYADIDMDHPEVVNELRNWGVWYTNTLGLDGFRIDAVKHIKYSFTRDWINHVRSATGKNMFAVAEFWKNDLGAIENYLQKTNWNHSVFDVPLHYNLYNASKSGGNYDMRNIFNGTVVQRHPSHAVTFVDNHDSQPEEALESFVEEWFKPLAYALTLTRESGYPSVFYGDYYGIPTHGVPAMRSKIDPILEARQKYAYGKQNDYLDHHNIIGWTREGNTAHPNSGLATIMSDGAGGSKWMFVGRNKAGQVWSDITGNRTGTVTINADGWGNFSVNGGSVSIWVNK

SEQ ID NO: 22601 - protein, 485 aa, Bacillus sp. 707
HHNGTNGTMMQYFEWYLPNDGNHWNRLNSDASNLKSKGITAVWIPPAWKGASQNDVGYGAYDLYDLGEFNQKGTVRTKYGTRSQLQAAVTSLKNNGIQVYGDVVMNHKGGADATEMVRAVEVNPNNRNQEVTGEYTIEAWTRFDFPGRGNTHSSFKWRWYHFDGVDWDQSRRLNNRIYKFRGHGKAWDWEVDTENGNYDYLMYADIDMDHPEVVNELRNWGVWYTNTLGLDGFRIDAVKHIKYSFTRDWINHVRSATGKNMFAVAEFWKNDLGAIENYLQKTNWNHSVFDVPLHYNLYNASKSGGNYDMRNIFNGTVVQRHPSHAVTFVDNHDSQPEEALESFVEEWFKPLAYALTLTREQGYPSVFYGDYYGIPTHGVPAMRSKIDPILEARQKYAYGKQNDYLDHHNIIGWTREGNTAHPNSGLATIMSDGAGGSKWMFVGRNKAGQVWSDITGNRTGTVTINGDGWGNFSVNGGSVSIWVNK

SEQ ID NO: 22602 - protein, 485 aa, Bacillus sp. 707
HHNGTNGTMMQYFEWYLPNDGNHWNRLNSDASNLKSKGITAVWIPPAWKGASQNDVGYGAYDLYDLGEFNQKGTVRTKYGTRSQLQAAVTSLKNNGIQVYGDVVMNHKGGADATEMVRAVEVNPNNRNQEVTGEYTIEAWTRFDFPGRGNTHSSFKWRWYHFDGVDWDQSRRLNNRIYKFRGHGKAWDWEVDTENGNYDYLMYADIDMDHPEVVNELRNWGVWYTNTLGLDGFRIDAVKHIKYSFTRDWINHVRSATGKNMFAVAEFWKNDLGAIENYLQKTNWNHSVFDVPLHYNLYNASKSGGNYDMRNIFNGTVVQRHPSHAVTFVDNHDSQPEEALESFVEEWFKPLAYALTLTREQGYPSVFYGDYYGIPTHGVPAMRSKIDPFLEARQKYAYGKQNDYLDHHNIIGWTREGNTAHPNSGLATIMSDGAGGSKWMFVGRNKAGQVWSDITGNRTGTVTINADGWGNFSVNGGSVSIWVNK

SEQ ID NO: 22603 - protein, 485 aa, Bacillus sp. 707
HHNGTNGTMMQYFEWYLPNDGNHWNRLNSDASNLKSKGITCVWIPPAWKGASQNDVGYGAYDLYDLGEFNQKGTVRTKYGTRSQLQAAVTSLKNNGIQVYGDVVMNHKGGADATEMVRAVEVNPNNRNQEVTGEYTIEAWTRFDFPGRGNTHSSFKWRWYHFDGVDWDQSRRLNNRIYKFRGHGKAWDWEVDTENGNYDYLMYADIDMDHPEVVNELRNWGVWYTNTLGLDGFRIDAVKHIKYSFTRDWINHVRSATGKNMFAVAEFWKNDLGAIENYLQKTNWNHSVFDVPLHYNLYNASKSGGNYDMRNIFNGTVVQRHPSHAVTFVDNHDSQPEEALESFVEEWFKPLAYALTLTREQGYPSVFYGDYYGIPTHGVPAMRSKIDPILEARQKYAYGKQNDYLDHHNIIGWTREGNTAHPNSGLATIMSDGAGGSKWMFVGRNKAGQVWSDITGNRTGTVTINADGWGNFSVNGGSVSIWVNK

SEQ ID NO: 22604 - protein, 485 aa, Bacillus sp.
HHNGTNGTMMQYFEWYLPNDGNHWNRLRSDASNLKDKGISAVWIPPAWKGASQNDVGYGAYDLYDLGEFNQKGTIRTKYGTRNQLQAAVNALKSNGIQVYGDVVMNHKGGADATEMVRAVEVNPNNRNQEVSGEYTIEAWTKFDFPGRGNTHSNFKWRWYHFDGVDWDQSRKLNNRIYKFRGDGKGWDWEVDTENGNYDYLVYADIDMDHPEVVNELRNWGVWYTNTLGLDGFRIDAVKHIKYSFTRDWINHVRSATGKNMFAVAEFWKNDLGAIENYLNKTNWNHSVFDVPLHYNLYNASKSGGNYDLRQIFNGTVVQRHPTHAVTFVDNHDSQPEEALESFVEEWFKPLAYALTLTREQGYPSVFYGDYYGIPTHGVPAMKSKIDPILEARQKYAYGRQNDYLDHHNIIGWTREGNTAHPNSGLATIMSDGAGGNKWMFVGRNKAGQVWTDITGNRAGTVTINADGWGNFSVNGGSVSIWVNK

SEQ ID NO: 22605 - protein, 485 aa, Bacillus sp. 707
HHNGTNGTMMQYFEWYLPNDGNHWNRLNSDASNLKSKGITAVWIPPAWKGASQNDVGYGAYDLYDLGEFNQKGTVRTKYGTRSQLQAAVTSLKNNGIQVYGDVVMNHKGGADATEMVRAVEVNPNNRNQEVTGEYTIEAWTRFDFPGRGNTHSSFKWRWYHFDGVDWDQSRRLNNRIYKFRGHGKAWDWEVDTENGNYDYLMYADIDMDHPEVVNELRNWGVWYTNTLGLDGFRIDAVKHIKYSFTRDWINHVRSATGKNMFAVAEFWKNDLGAIENYLQKTNWNHSVFDVPLHYNLYYASKSGGNYDMRNIFNGTVVQRHPSHAVTFVDNHDSQPEEALESFVEEWFKPLAYALTLTREQGYPSVFYGDYYGIPTHGVPAMRSKIDPILEARQKYAYGKQNDYLDHHNIIGWTREGNTAHPNSGLATIMSDGAGGSKWMFVGRNKAGQVWSDITGNRTGTVTINADGWGNFSVNGGSVSIWVNK

SEQ ID NO: 22606 - protein, 485 aa, Bacillus sp. 707
HHNGTNGTMMQYFEWYLPNDGNHWNRLNSDASNLKSKGITAVWIPPAWKGASQNDVGYGAYDLYDLGEFNQKGTVRTKYGTRSQLQAAVTSLKNNGIQVYGDVVMNHKGGADATEMVRAVEVNPNNRNQEVTGEYTIEAWTRFDFPGRGNTHSSFKWRWYHFDGVDWDQSRRLNNRIYKFRGHGKAWDWEVDTENGNYDYLMYADIDMDHPEVVNELRNWGVWYTNTLGLDGFRIDAVKHIKYSFTRDWINHVRSATGKNMFAVAEFWKNDLGAIENYLQKTNWNHSVFDVPLHYNLYNASKSGGNYDMRNIFNGTVVQRHPSHAVTFVDNHDSQPEEALESFVEEWFKPLAYALTLTREQGYPSVFYGDYYGIPTHGVPAMRSKIDPILEARQKYAYGKQNDYLDHHNIIGWTREGNTAHPNSGLATIMSDGAGGSKWMFVGRNKAGQVWSDLTGNRTGTVTINADGWGNFSVNGGSVSIWVNK

SEQ ID NO: 22607 - protein, 485 aa, Bacillus sp. 707
HHNGTNGTMMQYFEWYLPNDGNHWNRLNSDASNLKSKGITAVWIPPAWKGASQNDVGYGAYDLYDLGEFNQKGTVRTKYGTRSQLQAAVTSLKNNGIQVYGDVVMNHKGGADATEMVRAVEVNPNNRNQEVTGEYTIEAWTRFDFPGRGNTHSSFKWRWYHFDGVDWDQSRRLNNRIYKFRGHGKAWDWEVDTENGNYDYLMYADIDMDHPEVVNELRNWGVWYTNTLGLDGFRIDAVKHIKYSFTRDWINHVRSATGKNMFAVAEFWKNDLGAIENYLQKTNWNHSVFDVPLHYNLYNASKSGGNYDMRNIFNGTVVQRHPSHAVTFVDNHDSQPEEALESFVEEWFKPLAYALTLTREQGYPSVFYGDYYGIPTHGVPAMRSKIDPILEARVKYAYGKQNDYLDHHNIIGWTREGNTAHPNSGLATIMSDGAGGSKWMFVGRNKAGQVWSDITGNRTGTVTINADGWGNFSVNGGSVSIWVNK

SEQ ID NO: 22608 - protein, 485 aa, Bacillus sp. 707
HHNGTNGTMMQYFEWYLPNDGNHWNRLNSDASNLKSKGITAVWIPPAWKGASQNDVGYGAYDLYDLGEFNQKGTVRTKYGTRSQLQAAVTSLKNNGIQVYGDVVMNHKGGADATEMVRAVEVNPNNRNQEVTGEYTIEAWTRFDFPGRGNTHSSFKWRWYHFDGVDWDQSRRLNNRIYKFRGHGKAWDWEVDTENGNYDYLMYADIDMDHPEVVNELRNWGVWYTNTLGLDGFRIDAVKHIKYSFTRDWINHVRSATGKNMFAVAEFWKNDLGAIENYLQKTNWNHSVFDVPLHYNLYNASKSGGNYDMRNIFNGTVVQRHPSHAVTFVDNHDSQPEEALESFVEEWFKPLAYALTLTREQGYPSVFYGDYYGIPTHGVPAMRSKIDPILEARQKYAYGKQNDYLDHHNIIGWTREGNTAHPNSGLATIMSDGAGGSKWMFVGRNKAGQVWSDITGNRTGFVTINADGWGNFSVNGGSVSIWVNK

SEQ ID NO: 22609 - protein, 485 aa, Bacillus sp. 707
HHNGTNGTMMQYFEWYLPNDGNHWNRLNSDASNLKSKGITAVWIPPAWKGASQNDVGYGAYDLYDLGEFNQKGTVRTKYGTRSQLQAAVTSLKNNGIQVYGDVVMNHKGGADATEMVRAVEVNPNNRNQEVTGEYTIEAWTRFDFPGRGNTHSSFKWRWYHFDGVDWDQSRRLNNRIYKFRGHGKAWDWEVDTENGNYDYLWYADIDMDHPEVVNELRNWGVWYTNTLGLDGFRIDAVKHIKYSFTRDWINHVRSATGKNMFAVAEFWKNDLGAIENYLQKTNWNHSVFDVPLHYNLYNASKSGGNYDMRNIFNGTVVQRHPSHAVTFVDNHDSQPEEALESFVEEWFKPLAYALTLTREQGYPSVFYGDYYGIPTHGVPAMRSKIDPILEARQKYAYGKQNDYLDHHNIIGWTREGNTAHPNSGLATIMSDGAGGSKWMFVGRNKAGQVWSDITGNRTGTVTINADGWGNFSVNGGSVSIWVNK

SEQ ID NO: 22610 - protein, 485 aa, Bacillus sp. 707
HHNGTNGTMMQYFEWYLPNDGNHWNRLNSDASNLKSKGITAVWIPPAWKGASQNDVGYGAYDLYDLGEFNQKGTVRTKYGTRSQLQAAVTSLKNNGIQVYGDVVMNHKGGADATEMVRAVEVNPNNRNQEVTGEYTIEAWTRFEFPGRGNTHSSFKWRWYHFDGVDWDQSRRLNNRIYKFRGHGKAWDWEVDTENGNYDYLMYADIDMDHPEVVNELRNWGVWYTNTLGLDGFRIDAVKHIKYSFTRDWINHVRSATGKNMFAVAEFWKNDLGAIENYLQKTNWNHSVFDVPLHYNLYNASKSGGNYDMRNIFNGTVVQRHPSHAVTFVDNHDSQPEEALESFVEEWFKPLAYALTLTREQGYPSVFYGDYYGIPTHGVPAMRSKIDPILEARQKYAYGKQNDYLDHHNIIGWTREGNTAHPNSGLATIMSDGAGGSKWMFVGRNKAGQVWSDITGNRTGTVTINADGWGNFSVNGGSVSIWVNK

SEQ ID NO: 22611 - protein, 485 aa, Bacillus sp. 707
HHNGTNGTMMQYFEWYLPNDGNHWNRLNSDASNLKSKGITAVWIPPAWKGASQNDVGYGAYDLYDLGEFNQKGTVRTKYGKRSQLQAAVTSLKNNGIQVYGDVVMNHKGGADATEMVRAVEVNPNNRNQEVTGEYTIEAWTRFDFPGRGNTHSSFKWRWYHFDGVDWDQSRRLNNRIYKFRGHGKAWDWEVDTENGNYDYLMYADIDMDHPEVVNELRNWGVWYTNTLGLDGFRIDAVKHIKYSFTRDWINHVRSATGKNMFAVAEFWKNDLGAIENYLQKTNWNHSVFDVPLHYNLYNASKSGGNYDMRNIFNGTVVQRHPSHAVTFVDNHDSQPEEALESFVEEWFKPLAYALTLTREQGYPSVFYGDYYGIPTHGVPAMRSKIDPILEARQKYAYGKQNDYLDHHNIIGWTREGNTAHPNSGLATIMSDGAGGSKWMFVGRNKAGQVWSDITGNRTGTVTINADGWGNFSVNGGSVSIWVNK

SEQ ID NO: 22612 - protein, 485 aa, Bacillus sp. 707
HHNGTNGTMMQYFEWYLPNDGNHWNRLNSDASNLKSKGITAVWIPPAWKGASQNDVGYGAYDLYDLGEFNQKGTVRTKYGTRSQLQAAVTSLKNNGIQVYGDVVMNHKGGADATEMVRAVEVNPNNRNQEVTGEYTIEAWTRFDFPGRGNTHSSFKWRWYHFDGVDWDQSRRLNNRIYKFRGHGKAWDWEVDTENGNYDYLMYADIDMDHPEVVNELRNWGVWYTNTLGLDGFRIDAVKHIKYSFTRDWINHVRSATGKNMFAVAEFWKNDLGAIENYLQKTNWNHSVFDVPLHYNLYNASKSGGNYDMRNIFNGTVVQRHPSHAVTFVDNHDSQPEEALESFVEEWFKPLAYALTLTRVQGYPSVFYGDYYGIPTHGVPAMRSKIDPILEARQKYAYGKQNDYLDHHNIIGWTREGNTAHPNSGLATIMSDGAGGSKWMFVGRNKAGQVWSDITGNRTGTVTINADGWGNFSVNGGSVSIWVNK

SEQ ID NO: 22613 - protein, 485 aa, Bacillus sp. 707
HHNGTNGTMMQYFEWYLPNDGNHWNRLNSDASNLKSKGITAVWIPPAWKGASQNDVGYGAYDLYDLGEFNQKGTVRTKYGTRSQLQAAVTSLKNNGIQVYGDVVMNHKGGADATEMVRAVEVNPNNRNQEVTGEYTIEAWTRFDFPGRGNTHSSFKWRWYHFDGVDWDQSRRLNNRIYKFRGHGKAWDWEVDTENGNYDYLMYADIDMDHPEVVNELRNWGVWYTNTLGLDGFRIDAVKHIKYSFTRDWINHVRSATGKNMFAVAEFWKNDLGAIENYLQKTNWNHSVFDVPLHYNLYNASKSGGNYDMRNIFNGTVVQRHPSHAVTFVDNHDSQPEEALESFVEEWFKPLAYALTLTREQGYPSVFYGDYYGIPTHGVPAMRSKIDPILEARQKYAYGKQNDYLDHHNIIGWTREGNTAHPCSGLATIMSDGAGGSKWMFVGRNKAGQVWSDITGNRTGTVTINADGWGNFSVNGGSVSIWVNK

SEQ ID NO: 22614 - protein, 485 aa, Bacillus sp. 707
HHNGTNGTMMQYFEWYLPNDGNHWNRLNSDASNLKSKGITAVWIPPAWKGASQNDVGYGAYDLYDLGEFNQKGTVRTKYGTRSQLQAAVTSLKNNGIQVYGDVVMNHKGGADATEMVRAVEVNPNNRNQEVTGEYTIEAWTRFDFPGRFNTHSSFKWRWYHFDGVDWDQSRRLNNRIYKFRGHGKAWDWEVDTENGNYDYLMYADIDMDHPEVVNELRNWGVWYTNTLGLDGFRIDAVKHIKYSFTRDWINHVRSATGKNMFAVAEFWKNDLGAIENYLQKTNWNHSVFDVPLHYNLYNASKSGGNYDMRNIFNGTVVQRHPSHAVTFVDNHDSQPEEALESFVEEWFKPLAYALTLTREQGYPSVFYGDYYGIPTHGVPAMRSKIDPILEARQKYAYGKQNDYLDHHNIIGWTREGNTAHPNSGLATIMSDGAGGSKWMFVGRNKAGQVWSDITGNRTGTVTINADGWGNFSVNGGSVSIWVNK

SEQ ID NO: 22615 - protein, 485 aa, Bacillus sp. 707
HENGTNGTMMQYFEWYLPNDGNHWNRLNSDASNLKSKGITAVWIPPAWKGASQNDVGYGAYDLYDLGEFNQKGTVRTKYGTRSQLQAAVTSLKNNGIQVYGDVVMNHKGGADATEMVRAVEVNPNNRNQEVTGEYTIEAWTRFDFPGRGNTHSSFKWRWYHFDGVDWDQSRRLNNRIYKFRGHGKAWDWEVDTENGNYDYLMYADIDMDHPEVVNELRNWGVWYTNTLGLDGFRIDAVKHIKYSFTRDWINHVRSATGKNMFAVAEFWKNDLGAIENYLQKTNWNHSVFDVPLHYNLYNASKSGGNYDMRNIFNGTVVQRHPSHAVTFVDNHDSQPEEALESFVEEWFKPLAYALTLTREQGYPSVFYGDYYGIPTHGVPAMRSKIDPILEARQKYAYGKQNDYLDHHNIIGWTREGNTAHPNSGLATIMSDGAGGSKWMFVGRNKAGQVWSDITGNRTGTVTINADGWGNFSVNGGSVSIWVNK

SEQ ID NO: 22616 - protein, 485 aa, Bacillus sp. 707
HHNGTNGTMMQYFEWYLPNDGNHWNRLNSDASNLKSKGITAVWIPPAWKGASQNDVGYGAYDLYDLGEFNQKGTVRTKYGTRSQLQAAVTSLKNNGIQVYGDVVMNHKGGADATEMVRAVEVNPNNRNQEVTGEYTIEAWTRFDFPGRGNTHSSFKWRWYHFDGVDWDQSRRLNNRIYKFRGHGKAWDWEVDTENGNYDYLMYADIDMDHPEVVNELRNWGVWYTNTLGLDGFRIDAVKHIKYSFTRDWINHVRSATGKNMFAVAEFWKNDLGAIENYLQKTNWNHSVFDVPLHYNLYNASKSGGNYDMRNIFNGTVVQRHPSHAVTFVDNHDSQPEEALESFVEEWFKPLAYALTLTREVGYPSVFYGDYYGIPTHGVPAMRSKIDPILEARQKYAYGKQNDYLDHHNIIGWTREGNTAHPNSGLATIMSDGAGGSKWMFVGRNKAGQVWSDITGNRTGTVTINADGWGNFSVNGGSVSIWVNK

SEQ ID NO: 22617 - protein, 485 aa, Bacillus sp. 707
HHNGTNGTMMQYFEWYLPNDGNHWNRLNSDASNLKSKGITAVWIPPAWKGASQNDVGYGAYDLYDLGEFNQKGTVRTKYGTRSQLQAAVTSLKNNGIQVYGDVVMNHKGGADATEMVRAVEVNPNNRNQEVTGEYTIEAWTRFDFPGRGNTHSSFKWRWYHFDGVDWDQSRRLNNRIYKFRGHGKAWDWEVDTENGNYDYLMYADIDMDHPEVVNELRNWGVWYTNTLGLDGFRIDAVKHIKYSFTRDWINHVRSATGKNMFAVAEFWKNDLGAIENYLQKTNWNHSVFDVPLHYNLYNASKSGGNYDMRNIFNGTVVQRHPSHAVTFVDNHDSQPEEALESFVEEWFKPLAYALTLTREQGYPSVFYGDYYGIPTHGVPAMRSKIDPILEARQKYAYGKQNDYLDHHNILGWTREGNTAHPNSGLATIMSDGAGGSKWMFVGRNKAGQVWSDITGNRTGTVTINADGWGNFSVNGGSVSIWVNK

SEQ ID NO: 22618 - protein, 485 aa, Bacillus sp. 707
HHNGTNGTMMQYFEWYLPNDGNHWNRLNSDASNLKSKGITAVWIPPAWKGASQNDVGYGAYDLYDLGEFNQKGTVRTKYGTRSQLQAAVTSLKNNGIQVYGDVVMNHKGGADATEMVRAVEVNPNNRNQEVTGEYTIEAWTRFDFPGRGNTHSSFKWRWYHFDGVDWDQSRRLNNRIYKFRGHGKAWDWEVDTENGNYDYLMYADIDMDHPEVVNELRNWGVWYTNTLGLDGFRIDAVKHIKYSFTRDWINHVRSATGKNMFAVAEFWKNDLGAIENYLQKTNWNHSVFDVPLHYNLYNASKSGGNYDMRNIFNGTVVQRHPSHAVTFVDNHDSQPEEALESFVEEWFKPLAYALTLTREQGYPSVFYGDYYGIDTHGVPAMRSKIDPILEARQKYAYGKQNDYLDHHNIIGWTREGNTAHPNSGLATIMSDGAGGSKWMFVGRNKAGQVWSDITGNRTGTVTINADGWGNFSVNGGSVSIWVNK

SEQ ID NO: 22619 - protein, 485 aa, Bacillus sp. 707
HHNGTNGTMMQYFEWYLPNDGNHWNRLNSDASNLKSKGITAVWIPPAWKGASQNDVGYGAYDLYDLGEFNQKGTVRTKYGTRSQLQAAVTSLKNNGIQVYGDVVMNHKGGADATEMVRAVEVNPNNRNQEVTGEYTIEAWTRFDFPGRGNTHSSFKWRWYHFDGVDWDQSRRLNNRIYKFRGHGKAWDWEVDTENGNYDYLMYADIDMDHPEVVNELRNWGVWYTNTLGLDGFRIDAVKHIKYSFTRDWINHVRSATGKNMFAVAEFWKNDLGAIENYLQKTNWNHSVFDVPLHYNLYNASKSGGNYDMRNIFNGTVVQRHPSHAVTFVDNHDSQPEEALESFVEEWFKPLAYALTLTREQGYPSVFYGDYYGIPTHGVPAMRSKIDPILEARQKYAYGKQNDYLDHHNIIGWTREGNTAHPFSGLATIMSDGAGGSKWMFVGRNKAGQVWSDITGNRTGTVTINADGWGNFSVNGGSVSIWVNK

SEQ ID NO: 22620 - protein, 485 aa, Bacillus sp. 707
HHNGTNGTMMQYFEWYLPNDGNHWNRLNSDASNLKSKGITAVWIPPAWKGASQNDVGYGAYDLYDLGEFNQKGTVRTKYGTRSQLQAAVTSLKNNGIQVYGDVVMNHKGGADATEMERAVEVNPNNRNQEVTGEYTIEAWTRFDFPGRGNTHSSFKWRWYHFDGVDWDQSRRLNNRIYKFRGHGKAWDWEVDTENGNYDYLMYADIDMDHPEVVNELRNWGVWYTNTLGLDGFRIDAVKHIKYSFTRDWINHVRSATGKNMFAVAEFWKNDLGAIENYLQKTNWNHSVFDVPLHYNLYNASKSGGNYDMRNIFNGTVVQRHPSHAVTFVDNHDSQPEEALESFVEEWFKPLAYALTLTREQGYPSVFYGDYYGIPTHGVPAMRSKIDPILEARQKYAYGKQNDYLDHHNIIGWTREGNTAHPNSGLATIMSDGAGGSKWMFVGRNKAGQVWSDITGNRTGTVTINADGWGNFSVNGGSVSIWVNK

SEQ ID NO: 22621 - protein, 485 aa, Bacillus sp. 707
HHNGTNGTMMQYFEWYLPNDGNHWNRLNSDASNLKSKGITAVWIPPAWKGASQNDVGYGAYDLYDLGEFNQKGTVRTKYGTRSQLQAAVTSLKNNGIQVYGDVVMNHKGGADATEMVRAVEVNPNNRNQEVTGEYTIEAWTRFDFPGRGNTHSSFKWRWYHFDGVDWDQSRRLNNRIYKFRGHGKAWDWEVDTENGNYDYLMYADIDMDHPEVVNELRNWGVWYTNTLGLDGFRIDAVKHIKYSFTRDWINHVRSATGKNMFAVAEFWKNDLGAIENYLQKTNWNHSVFDVPLHYNLYNASKSGGNYDMRNIFNGTVVQRHPSHAVTFVDNHDSQPEEALESFVEEWFKPLAYALTLTREQGYPSVFYGDYYGIPTHGVPAMRSKIDPILEARQKYAYGKQNDYLDHHNIIGWTRHGNTAHPNSGLATIMSDGAGGSKWMFVGRNKAGQVWSDITGNRTGTVTINADGWGNFSVNGGSVSIWVNK

SEQ ID NO: 22622 - protein, 485 aa, Bacillus sp. 707
HHNGTNGTMMQYFEWYLPNDGNHWNRLNSDASNLKSKGITAVWIPPAWKGASQNDVGYGAYDLYDLGEFNQKGTVRTKYGTRSQLQAAVTSLKNNGIQVYGDVVMNHKGGADATEMVRAVEVNPNNRNQEVTGEYTIEAWTRFDFPGRGNTHSSFKWRWHHFDGVDWDQSRRLNNRIYKFRGHGKAWDWEVDTENGNYDYLMYADIDMDHPEVVNELRNWGVWYTNTLGLDGFRIDAVKHIKYSFTRDWINHVRSATGKNMFAVAEFWKNDLGAIENYLQKTNWNHSVFDVPLHYNLYNASKSGGNYDMRNIFNGTVVQRHPSHAVTFVDNHDSQPEEALESFVEEWFKPLAYALTLTREQGYPSVFYGDYYGIPTHGVPAMRSKIDPILEARQKYAYGKQNDYLDHHNIIGWTREGNTAHPNSGLATIMSDGAGGSKWMFVGRNKAGQVWSDITGNRTGTVTINADGWGNFSVNGGSVSIWVNK

SEQ ID NO: 22623 - protein, 485 aa, Bacillus sp. 707
HHNGWNGTMMQYFEWYLPNDGNHWNRLNSDASNLKSKGITAVWIPPAWKGASQNDVGYGAYDLYDLGEFNQKGTVRTKYGTRSQLQAAVTSLKNNGIQVYGDVVMNHKGGADATEMVRAVEVNPNNRNQEVTGEYTIEAWTRFDFPGRGNTHSSFKWRWYHFDGVDWDQSRRLNNRIYKFRGHGKAWDWEVDTENGNYDYLMYADIDMDHPEVVNELRNWGVWYTNTLGLDGFRIDAVKHIKYSFTRDWINHVRSATGKNMFAVAEFWKNDLGAIENYLQKTNWNHSVFDVPLHYNLYNASKSGGNYDMRNIFNGTVVQRHPSHAVTFVDNHDSQPEEALESFVEEWFKPLAYALTLTREQGYPSVFYGDYYGIPTHGVPAMRSKIDPILEARQKYAYGKQNDYLDHHNIIGWTREGNTAHPNSGLATIMSDGAGGSKWMFVGRNKAGQVWSDITGNRTGTVTINADGWGNFSVNGGSVSIWVNK

SEQ ID NO: 22624 - protein, 485 aa, Bacillus sp.
HHNGTNGTMMQYFEWYLPNDGNHWNRLNSDASNLKSKGITAVWIPPAWKGASQNDVGYGAYDLYDLGEFNQKGTVRTKYGTRSQLQAAVTSLKNNGIQVYGDVVMNHKGGADATEMVRAVEVNPNNRNQEVTGEYTIEAWTRFDFPGRGNTHSSFKWRWYHFDGVDWDQSRRLNNRIYKFRGHGKAWDWEVDTENGNYDYLMYADIDMDHPEVVNELRNWGVWYTNTLGLDGFRIDAVKHIKYSFTRDWINHVRSATGKNMFAVAEFWKNDLGAIENYLQKTNWNHSVFDVPLHYNLYNASKSGGNYDMRNIFNGTVVQRHPSHAVTFVDNHDSQPEEALESFVEEWFKPLAYALTLFREQGYPSVFYGDYYGIPTHGVPAMRSKIDPILEARQKYAYGKQNDYLDHHNIIGWTREGNTAHPNSGLATIMSDGAGGSKWMFVGRNKAGQVWSDITGNRTGTVTINADGWGNFSVNGGSVSIWVNK

SEQ ID NO: 22625 - protein, 485 aa, Bacillus sp. 707
HHNGINGTMMQYFEWYLPNDGNHWNRLNSDASNLKSKGITAVWIPPAWKGASQNDVGYGAYDLYDLGEFNQKGTVRTKYGTRSQLQAAVTSLKNNGIQVYGDVVMNHKGGADATEMVRAVEVNPNNRNQEVTGEYTIEAWTRFDFPGRGNTHSSFKWRWYHFDGVDWDQSRRLNNRIYKFRGHGKAWDWEVDTENGNYDYLMYADIDMDHPEVVNELRNWGVWYTNTLGLDGFRIDAVKHIKYSFTRDWINHVRSATGKNMFAVAEFWKNDLGAIENYLQKTNWNHSVFDVPLHYNLYNASKSGGNYDMRNIFNGTVVQRHPSHAVTFVDNHDSQPEEALESFVEEWFKPLAYALTLTREQGYPSVFYGDYYGIPTHGVPAMRSKIDPILEARQKYAYGKQNDYLDHHNIIGWTREGNTAHPNSGLATIMSDGAGGSKWMFVGRNKAGQVWSDITGNRTGTVTINADGWGNFSVNGGSVSIWVNK

SEQ ID NO: 22626 - protein, 483 aa, Bacillus sp. SP70
HHNGTNGTMMQYFEWYLPNDGNHWNRLNSDASNLKSKGITAVWIPPAWKGASQNDVGYGAYDLYDLGEFNQKGTVRTKYGTRSQLQAAVTSLKNNGIQVYGDVVMNHKGGADATEMVRAVEVNPNNRNQEVTGEYTIEAWTRFDFPGRGNTHSSFKWRWYHFDGVDWDNSRRLNNRIYKFRGKAWDWEVDTENGNYDYLMYADIDMDHPEVVNELRNWGVWYTNTLGLDGFRIDAVKHIKYSFTRDWINHVRSATGKNMFAVAEFWKNDLGAIENYLQKTNWNHSVFDVPLHYNLYNASKSGGNYDMRNIFNGTVVQRHPSHAVTFVDNHDSQPEEALESFVEEWFKPLAYALTLTREQGYPSVFYGDYYGIPTHGVPAMRSKIDPILEARQKYAYGKQNDYLDHHNIIGWTREGNTAHPNSGLATIMSDGAGGSKWMFVGRNKAGQVWSDITGNRTGTVTINADGWGNFSVNGGSVSIWVNK

SEQ ID NO: 22627 - protein, 485 aa, Bacillus sp.
HHNGTNGTMMQYFEWYLPNDGNHWNRLRSDASNLKDKGISAVWIPPAWKGASQNDVGYGAYDLYDLGEFNQKGTIRTKYGTRNQLQAAVNALKSNGIQVYGDVVMNHKGGADATEMVRAVEVNPNNRNQEVSGEYTIEAWTKFDFPGRGNTHSNFKWRWYHFDGVDWDQSRKLNNRIYKFRGDGKGWDWEVDTENGNYDYLVYADIDMDHPEVVNELRNWGVWYTNTLGLDGFRIDAVKHIKYSFTRDWINHVRSATGKNMFAVAEFWKNDLGAIENYLNKTNWNHSVFDVPLHYNLYNASKSGGNYDMRQIFNGTVVQRHPTHAVTFVDNHDSQPEEALESFVEEWFKPLAYALTLTREQGYPSVFYGDYYGIPTHGVPAMKSKIDPILEARQKYAYGRQNDYLDHHNIIGWTREGNTAHPNSGLATIISDGAGGNKWMFVGRNKAGQVWTDITGNRAGTVTINADGWGNFSVNGGSVSIWVNK

SEQ ID NO: 22628 - protein, 485 aa, Bacillus sp. 707
HHNGTNGTMMQYFEWYLPNDGNHWNRLNSDASNLKSKGITAVWIPPAWKGASQNDVGYGAYDLYDLGEFNQKGTVRTKYGTRSQLQAAVTSLKNNGIQVYGDVVMNHKGGADATEMVRAVEVNPNNRNQEVTGEYTIEAWTRFDFPGRGNTHSSFKWRWYHFDGVDWDQSRRLNNRIYKFRGHGKAWDWEVDTENGNYDYLMYADIDMDHPEVVNELRNWGVWYTNTLGLDGFRIDAVKHIKYSFTRDWINHVRSATGKNMFAVAEFWKNDLGAIENYLQKTNWNHSVFDVPLHYNLYNASKSGGNYDMRNIFNGTVVQRHPSHAVTFVDNHDSQPEEALESFVEEWFKPLAYALTLTREQGYPSVFYGDYYGIPTHGVPAMRSKIDPILEARQKYAYGKQNDYLDHHNIIGWTREGNTAEPNSGLATIMSDGAGGSKWMFVGRNKAGQVWSDITGNRTGTVTINADGWGNFSVNGGSVSIWVNK

SEQ ID NO: 22629 - protein, 485 aa, Bacillus sp. 707
HHNGTNGTMMQYFEWYLPNDGNHWNRLNSDASNLKSKGITAVWIPPAWKGASQNDVGYGAYDLYDLGEFNQKGTVRTKYGTRSQLQAAVTSLKNNGIQVYGDVVMNHKGGADATEMVRAVEVNPNNRNQEVTGEYTIEAWTRFDFPGRGNTHSSFKWRWYHFDGVDWDQSRRLNNRIYKFRGHGKAWDWEVDTENGNYDYLMYADIDMDHPEVVNELRNWGVWYTNTLGLDGFRIDAVKHIKYSFTRDWINHVRSATGKNMFAVAEFWKNDLGAIENYLQKTNWNHSVFDVPLHYNLYNASKSGGNYDMRNIFNGTVVQRHPSHAVTFVDNHDSQPEEALESFVEEWFKPLAYALTLTREQGYPSVFYGDYYGIPTHGVPAMRSKIDSILEARQKYAYGKQNDYLDHHNIIGWTREGNTAHPNSGLATIMSDGAGGSKWMFVGRNKAGQVWSDITGNRTGTVTINADGWGNFSVNGGSVSIWVNK

SEQ ID NO: 22630 - protein, 485 aa, Bacillus sp. 707
HHNGTNGTMMQYFEWYLPNDGNHWNRLNSDASNLKSKGITAVWIPPAWKGASQNDVGYGAYDLYDLGEFNQKGTVRTKYGTRSQLQAAVTSLKNNGIQVYGDVVMNHKGGADATEMVRAVEVNPNNRNQEVTGEYTIEAWTRFDFPGRGNTHSSFKWRWYHFDGVDWDQSRRLNNRIYKFRGHGKAWDWEVDTENGNYDYLMYADIDMDHPEVVNELRNWGVWYTNTLGLDGFRIDAVKHIKYSFTRDWINHVRSATGKNMFAVAEFWKNDLGAIENYLQKTNWNHSVFDVPLHYNLYNASKSGGNYDMRNIFNGTVVQRHPSHAVTFVDNHDSQPEEALESFVEEWFKPLAYALTLTREQGYPSVFYGDYYGIPTHGVPAMRSKIDDILEARQKYAYGKQNDYLDHHNIIGWTREGNTAHPNSGLATIMSDGAGGSKWMFVGRNKAGQVWSDITGNRTGTVTINADGWGNFSVNGGSVSIWVNK

SEQ ID NO: 22631 - protein, 485 aa, Bacillus sp. 707
HHNGTNGTMMQYFEWYLPNDGNHWNRLNSDASNLKSKGITAVWIPPAWKGASQNDVGYGAYDLYDLGEFNQKGTVRTKYGTRSQLQAAVTSLKNNGIQVYGDVVMNHKGGADATEMVRAVEVNPNNRNQEVTGEYTIEAWTRFDFPGRGNTHSSFKWRWYHFDGVDWDQSRRLNRRIYKFRGHGKAWDWEVDTENGNYDYLMYADIDMDHPEVVNELRNWGVWYTNTLGLDGFRIDAVKHIKYSFTRDWINHVRSATGKNMFAVAEFWKNDLGAIENYLQKTNWNHSVFDVPLHYNLYNASKSGGNYDMRNIFNGTVVQRHPSHAVTFVDNHDSQPEEALESFVEEWFKPLAYALTLTREQGYPSVFYGDYYGIPTHGVPAMRSKIDPILEARQKYAYGKQNDYLDHHNIIGWTREGNTAHPNSGLATIMSDGAGGSKWMFVGRNKAGQVWSDITGNRTGTVTINADGWGNFSVNGGSVSIWVNK

SEQ ID NO: 22632 - protein, 485 aa, Bacillus sp. 707
HHNGTNGTMMQYFEWYLPNDGNHWNRLNSDASNLKSKGITAVWIPPAWKGASQGDVGYGAYDLYDLGEFNQKGTVRTKYGTRSQLQAAVTSLKNNGIQVYGDVVMNHKGGADATEMVRAVEVNPNNRNQEVTGEYTIEAWTRFDFPGRGNTHSSFKWRWYHFDGVDWDQSRRLNNRIYKFRGHGKAWDWEVDTENGNYDYLMYADIDMDHPEVVNELRNWGVWYTNTLGLDGFRIDAVKHIKYSFTRDWINHVRSATGKNMFAVAEFWKNDLGAIENYLQKTNWNHSVFDVPLHYNLYNASKSGGNYDMRNIFNGTVVQRHPSHAVTFVDNHDSQPEEALESFVEEWFKPLAYALTLTREQGYPSVFYGDYYGIPTHGVPAMRSKIDPILEARQKYAYGKQNDYLDHHNIIGWTREGNTAHPNSGLATIMSDGAGGSKWMFVGRNKAGQVWSDITGNRTGTVTINADGWGNFSVNGGSVSIWVNK

SEQ ID NO: 22633 - protein, 485 aa, Bacillus sp. 707
HHNGTNGTMMQYFEWYLPNDGNHWNRLNSDASNLKSKGITAVWIPPAWKGASQNDVGYGAYDLYDLGEFNQKGTVRTKYGTRSQLQAAVTSLKNNGIQVYGDVVMNHKGGADATEMVRAVEVNPNNRNQEVTGEYTIEAWTRFDFPGRGNTHSSFKWRWYHFDGVDWDQSRRLNNRIYKFEGHGKAWDWEVDTENGNYDYLMYADIDMDHPEVVNELRNWGVWYTNTLGLDGFRIDAVKHIKYSFTRDWINHVRSATGKNMFAVAEFWKNDLGAIENYLQKTNWNHSVFDVPLHYNLYNASKSGGNYDMRNIFNGTVVQRHPSHAVTFVDNHDSQPEEALESFVEEWFKPLAYALTLTREQGYPSVFYGDYYGIPTHGVPAMRSKIDPILEARQKYAYGKQNDYLDHHNIIGWTREGNTAHPNSGLATIMSDGAGGSKWMFVGRNKAGQVWSDITGNRTGTVTINADGWGNFSVNGGSVSIWVNK

SEQ ID NO: 22634 - protein, 485 aa, Bacillus sp. 707
HHNGTNGTMMQYFEWYLPNDGNHWNRLNSDASNLKSKGITAVWIPPAWKGASQNDVGYGAYDLYDLGEFNQKGTVRTKYGTRSQLQAAVTSLKNNGIQVYGDVVMNHKGGADATEMVRAVEVNPNNRNQEVTGEYTIEAWTRFDFPGRGNTHSSFKWRWYHFDGVDWDQSRRLNNRIYKFRGHGKAWDWEVDTENGNYDYLMYADIDMDHPEVVNELRNWGVWYTNTLGLDGFRIDAVKHIKYSFTRDWINHVRSATGKNMFAVAEFWKNDLGAIENYLQKTNWNHSVFDVPLHYNLYNASKSGGNYDMRNIFTGTVVQRHPSHAVTFVDNHDSQPEEALESFVEEWFKPLAYALTLTREQGYPSVFYGDYYGIPTHGVPAMRSKIDPILEARQKYAYGKQNDYLDHHNIIGWTREGNTAHPNSGLATIMSDGAGGSKWMFVGRNKAGQVWSDITGNRTGTVTINADGWGNFSVNGGSVSIWVNK

SEQ ID NO: 22635 - protein, 485 aa, Bacillus sp. 707
HHNHTNGTMMQYFEWYLPNDGNHWNRLNSDASNLKSKGITAVWIPPAWKGASQNDVGYGAYDLYDLGEFNQKGTVRTKYGTRSQLQAAVTSLKNNGIQVYGDVVMNHKGGADATEMVRAVEVNPNNRNQEVTGEYTIEAWTRFDFPGRGNTHSSFKWRWYHFDGVDWDQSRRLNNRIYKFRGHGKAWDWEVDTENGNYDYLMYADIDMDHPEVVNELRNWGVWYTNTLGLDGFRIDAVKHIKYSFTRDWINHVRSATGKNMFAVAEFWKNDLGAIENYLQKTNWNHSVFDVPLHYNLYNASKSGGNYDMRNIFNGTVVQRHPSHAVTFVDNHDSQPEEALESFVEEWFKPLAYALTLTREQGYPSVFYGDYYGIPTHGVPAMRSKIDPILEARQKYAYGKQNDYLDHHNIIGWTREGNTAHPNSGLATIMSDGAGGSKWMFVGRNKAGQVWSDITGNRTGTVTINADGWGNFSVNGGSVSIWVNK

SEQ ID NO: 22636 - protein, 485 aa, Bacillus sp. 707
HHNGTNGTMMQYFEWYLPNDGNHWNRLNSDASNLKSKGITAVWIPPAWKGASQNDVGYGAYDLYDLGEFNQKGTVRTKYGTRSQLQAAVTSLKNNGIQVYGDVVMNHKGGADATEMVRAVEVNPNNRNQEVTGEYTIEAWTRFDFPGRGNTHSSFKWRWYHFDGVDWDQSRRLNNRIYKFRGHGKAWDWEVDTENGNYDYLMYADIDMDHPEVVNELRNWGVWYTNTLGLDGFRIDAVKHIKYSFTRDWINHVRSATGKNMFAVAEFWKNDLGAIENYLQKTNWNHSVFDVPLHYNLYNASKSGGNYDMRNIFNGTVVQRHPSHAVTFVDNHDSQPEEALESFVEEWFKPLAYALTLTREQGYPSVFYGDYMGIPTHGVPAMRSKIDPILEARQKYAYGKQNDYLDHHNIIGWTREGNTAHPNSGLATIMSDGAGGSKWMFVGRNKAGQVWSDITGNRTGTVTINADGWGNFSVNGGSVSIWVNK

SEQ ID NO: 22637 - protein, 485 aa, Bacillus sp. 707
HHNPTNGTMMQYFEWYLPNDGNHWNRLNSDASNLKSKGITAVWIPPAWKGASQNDVGYGAYDLYDLGEFNQKGTVRTKYGTRSQLQAAVTSLKNNGIQVYGDVVMNHKGGADATEMVRAVEVNPNNRNQEVTGEYTIEAWTRFDFPGRGNTHSSFKWRWYHFDGVDWDQSRRLNNRIYKFRGHGKAWDWEVDTENGNYDYLMYADIDMDHPEVVNELRNWGVWYTNTLGLDGFRIDAVKHIKYSFTRDWINHVRSATGKNMFAVAEFWKNDLGAIENYLQKTNWNHSVFDVPLHYNLYNASKSGGNYDMRNIFNGTVVQRHPSHAVTFVDNHDSQPEEALESFVEEWFKPLAYALTLTREQGYPSVFYGDYYGIPTHGVPAMRSKIDPILEARQKYAYGKQNDYLDHHNIIGWTREGNTAHPNSGLATIMSDGAGGSKWMFVGRNKAGQVWSDITGNRTGTVTINADGWGNFSVNGGSVSIWVNK

SEQ ID NO: 22638 - protein, 483 aa, Bacillus sp.
HHNGTNGTMMQYFEWYLPNDGNHWNRLNSDASNLKSKGITAVWIPPAWKGASQNDVGYGAYDLYDLGEFNQKGTVRTKYGTRSQLQAAVTSLKNNGIQVYGDVVMNHKGGADATEMVRAVEVNPNNRNQEVTGEYTIEAWTRFDFPGRGNTHSSFKWRWYHFDGVDWDQSRRLNNRIYKFGGKAWDWEVDTENGNYDYLMYADIDMDHPEVVNELRNWGVWYTNTLGLDGFRIDAVKHIKYSFTRDWINHVRSATGKNMFAVAEFWKNDLGAIENYLQKTNWNHSVFDVPLHYNLYNASKSGGNYDMRNIFNGTVVQRHPSHAVTFVDNHDSQPEEALESFVEEWFKPLAYALTLTREQGYPSVFYGDYYGIPTHGVPAMRSKIDPILEARQKYAYGKQNDYLDHHNIIGWTREGNTAHPNSGLATIMSDGAGGSKWMFVGRNKAGQVWSDITGNRTGTVTINADGWGNFSVNGGSVSIWVNK

SEQ ID NO: 22639 - protein, 485 aa, Bacillus sp.
HHNGTNGTLMQYFEWYLPNDGNHWNRLRSDASNLKDKGISAVWIPPAWKGASQNDVGYGAYDLYDLGEFNQKGTIRTKYGTRNQLQAAVNALKSNGIQVYGDVVMNHKGGADATEMVRAVEVNPNNRNQEVSGEYTIEAWTKFDFPGRGNTHSNFKWRWYHFDGVDWDQSRKLNNRIYKFRGDGKGWDWEVDTENGNYDYLLYADIDMDHPEVVNELRNWGVWYTNTLGLDGFRIDAVKHIKYSFTRDWINHVRSATGKNMFAVAEFWKNDLGAIENYLNKTNWNHSVFDVPLHYNLYNASKSGGNYDMRQIFNGTVVQRHPTHAVTFVDNHDSQPEEALESFVEEWFKPLAYALTLTREQGYPSVFYGDYYGIPTHGVPAMKSKIDPILEARQKYAYGRQNDYLDHHNIIGWTREGNTAHPNSGLATIMSDGAGGNKWMFVGRNKAGQVWTDITGNRAGTVTINADGWGNFSVNGGSVSIWVNK

SEQ ID NO: 22640 - protein, 485 aa, Bacillus sp. 707
HHNGGNGTMMQYFEWYLPNDGNHWNRLNSDASNLKSKGITAVWIPPAWKGASQNDVGYGAYDLYDLGEFNQKGTVRTKYGTRSQLQAAVTSLKNNGIQVYGDVVMNHKGGADATEMVRAVEVNPNNRNQEVTGEYTIEAWTRFDFPGRGNTHSSFKWRWYHFDGVDWDQSRRLNNRIYKFRGHGKAWDWEVDTENGNYDYLMYADIDMDHPEVVNELRNWGVWYTNTLGLDGFRIDAVKHIKYSFTRDWINHVRSATGKNMFAVAEFWKNDLGAIENYLQKTNWNHSVFDVPLHYNLYNASKSGGNYDMRNIFNGTVVQRHPSHAVTFVDNHDSQPEEALESFVEEWFKPLAYALTLTREQGYPSVFYGDYYGIPTHGVPAMRSKIDPILEARQKYAYGKQNDYLDHHNIIGWTREGNTAHPNSGLATIMSDGAGGSKWMFVGRNKAGQVWSDITGNRTGTVTINADGWGNFSVNGGSVSIWVNK

SEQ ID NO: 22641 - protein, 483 aa, Bacillus sp. SP70
HHNGTNGTMMQYFEWYLPNDGNHWNRLNSDASNLKSKGITAVWIPPAWKGASQNDVGYGAYDLYDLGEFNQKGTVRTKYGTRSQLQAAVTSLKNNGIQVYGDVVMNHKGGADATEMVRAVEVNPNNRNQEVTGEYTIEAWTRFDFPGRGNTHSSFKWRWYHFDGVDWDQSRRLNNRIYKFRGKAWDWEVDTENGNYDYLMYADIDMDHPEVVNELRNWGVWYTNTLGLDGFRIDAVKHIKYSFTRDWINHVRSATGKNMFAVAEFWKNDLGAIENYLQKTNWNHSVFDVPLHYNLYNASKSGGNYDMRNIFNGTVVQRHPSHAVTFVDNHDSQPEEALESFVEEWFKPLAYALTLTREQGYPSVFYGDYYGIPTHGVPAMRSKIDPILEARQKYAYGKQNDYLDHHNIIGWTREGNTAHPNSGLATIMSDGAGGSKWMFVGRNKAGQVWSDITGNRTGTVTINADGWGNFSVNGESVSIWVNK

SEQ ID NO: 22642 - protein, 485 aa, Bacillus sp. 707
HHNGTNGTMMQYFEWYLPNDGNHWNRLNSDASMLKSKGITAVWIPPAWKGASQNDVGYGAYDLYDLGEFNQKGTVRTKYGTRSQLQAAVTSLKNNGIQVYGDVVMNHKGGADATEMVRAVEVNPNNRNQEVTGEYTIEAWTRFDFPGRGNTHSSFKWRWYHFDGVDWDQSRRLNNRIYKFRGHGKAWDWEVDTENGNYDYLMYADIDMDHPEVVNELRNWGVWYTNTLGLDGFRIDAVKHIKYSFTRDWINHVRSATGKNMFAVAEFWKNDLGAIENYLQKTNWNHSVFDVPLHYNLYNASKSGGNYDMRNIFNGTVVQRHPSHAVTFVDNHDSQPEEALESFVEEWFKPLAYALTLTREQGYPSVFYGDYYGIPTHGVPAMRSKIDPILEARQKYAYGKQNDYLDHHNIIGWTREGNTAHPNSGLATIMSDGAGGSKWMFVGRNKAGQVWSDITGNRTGTVTINADGWGNFSVNGGSVSIWVNK

SEQ ID NO: 22643 - protein, 485 aa, Bacillus sp. 707
HHNGTNGTMMQYFEWYLPNDGNHWNRLNSDASNLKSKGITAVWIPPAWKGASQNDVGYGAYDLYDLGEFNQKGTVRTKYGTRSQLQAAVTSLKNNGIQVYGDVVMNHKGGADATEMVRAVEVNPNNRNQEVTGEYTIEAWTRFDFPGRGNVHSSFKWRWYHFDGVDWDQSRRLNNRIYKFRGHGKAWDWEVDTENGNYDYLMYADIDMDHPEVVNELRNWGVWYTNTLGLDGFRIDAVKHIKYSFTRDWINHVRSATGKNMFAVAEFWKNDLGAIENYLQKTNWNHSVFDVPLHYNLYNASKSGGNYDMRNIFNGTVVQRHPSHAVTFVDNHDSQPEEALESFVEEWFKPLAYALTLTREQGYPSVFYGDYYGIPTHGVPAMRSKIDPILEARQKYAYGKQNDYLDHHNIIGWTREGNTAHPNSGLATIMSDGAGGSKWMFVGRNKAGQVWSDITGNRTGTVTINADGWGNFSVNGGSVSIWVNK

SEQ ID NO: 22644 - protein, 485 aa, Bacillus sp. 707
HHNGTNGTMMQYFEWYLPNDGNHWNRLNSDASNLKSKGITAVWIPPAWKGASQNDVGYGAYDLYDLGEFNQKGTVRTKYGTRSQLQAAVTSLKNNGIQVYGDVVMNHKGGADATEMVRAVEVNPNNRNQEVTGEYTIEAWTRFDFPGRGNTHSSFKWRWYHFDGVDWDQSRRLNNRIYKFRGHGKAWDWEVDTENGNYDYLMYADIDMDHPEVVNELRNWGVWYTNTLGLDGFRIDAVKHIKYSFTRDWINHVRSATGKNAFAVAEFWKNDLGAIENYLQKTNWNHSVFDVPLHYNLYNASKSGGNYDMRNIFNGTVVQRHPSHAVTFVDNHDSQPEEALESFVEEWFKPLAYALTLTREQGYPSVFYGDYYGIPTHGVPAMRSKIDPILEARQKYAYGKQNDYLDHHNIIGWTREGNTAHPNSGLATIMSDGAGGSKWMFVGRNKAGQVWSDITGNRTGTVTINADGWGNFSVNGGSVSIWVNK

SEQ ID NO: 22645 - protein, 485 aa, Bacillus sp. 707
HHNGTNGTMMQYFEWYLPNDGNHWNRLNSDASNLKSKGITAVWIPPAWKGASQNDVGYGAYDLYDLGEFNQKGTVRTKYGTRSLLQAAVTSLKNNGIQVYGDVVMNHKGGADATEMVRAVEVNPNNRNQEVTGEYTIEAWTRFDFPGRGNTHSSFKWRWYHFDGVDWDQSRRLNNRIYKFRGHGKAWDWEVDTENGNYDYLMYADIDMDHPEVVNELRNWGVWYTNTLGLDGFRIDAVKHIKYSFTRDWINHVRSATGKNMFAVAEFWKNDLGAIENYLQKTNWNHSVFDVPLHYNLYNASKSGGNYDMRNIFNGTVVQRHPSHAVTFVDNHDSQPEEALESFVEEWFKPLAYALTLTREQGYPSVFYGDYYGIPTHGVPAMRSKIDPILEARQKYAYGKQNDYLDHHNIIGWTREGNTAHPNSGLATIMSDGAGGSKWMFVGRNKAGQVWSDITGNRTGTVTINADGWGNFSVNGGSVSIWVNK

SEQ ID NO: 22646 - protein, 485 aa, Bacillus sp. 707
HHNGTNGTMMQYFEWYLPNDGNHWNRLNSDASNLKSKGITAVWIPPAWKGASQNDVGYGAYDLYDLGEFNQKGTVRTKYGTRSQLQAAVTSLKGNGIQVYGDVVMNHKGGADATEMVRAVEVNPNNRNQEVTGEYTIEAWTRFDFPGRGNTHSSFKWRWYHFDGVDWDQSRRLNNRIYKFRGHGKAWDWEVDTENGNYDYLMYADIDMDHPEVVNELRNWGVWYTNTLGLDGFRIDAVKHIKYSFTRDWINHVRSATGKNMFAVAEFWKNDLGAIENYLQKTNWNHSVFDVPLHYNLYNASKSGGNYDMRNIFNGTVVQRHPSHAVTFVDNHDSQPEEALESFVEEWFKPLAYALTLTREQGYPSVFYGDYYGIPTHGVPAMRSKIDPILEARQKYAYGKQNDYLDHHNIIGWTREGNTAHPNSGLATIMSDGAGGSKWMFVGRNKAGQVWSDITGNRTGTVTINADGWGNFSVNGGSVSIWVNK

SEQ ID NO: 22647 - protein, 485 aa, Bacillus sp. 707
HHNGTNGTMMQYFEWYLPNDGNHWNRLNSDASNLKSKGITAVWIPPAWKGASQNDVGYGAYDLYDLGEFNQKGTVRTKYGTRSQLQAAVTSLKNNGIQVYGDVVMNHKGGADATEMVRAVEVNPNNRNQEVTGEYTIEAWTRFDFPGRGNTHSSFKWRWYHFDGVDWDQSRRLNNRIYKFRGHGKAWDWEVDTENGNYDYLMYADIDMDHPEVVNELRNWGVWYTNTLGLDGFRIDAVKHIKYSFTRDWINHVRSATGKNMFAVAEFWKNDLGAIENYLQKTNWNHSVFDVPLHYNLYNASKSGGNYDMRNIFNGTVVQRHPSHAVTFVDNHDSQPEEALESFVEEWFKPLAYALTLTREQGYPSVFYGDYYGIPTHGVPAMRSKIDPILEARQKYAYGKQNDYLDHHNIIGWTREGNTAHPNSGLATIMSDGAAGSKWMFVGRNKAGQVWSDITGNRTGTVTINADGWGNFSVNGGSVSIWVNK

SEQ ID NO: 22648 - protein, 485 aa, Bacillus sp. 707
HHNGTNGTMMQYFEWYLPNDGNHWNRLNSDASNLKSKGITAVWIPPAWKGASQNDVGYGAYDLYDLGEFNQKGTVRTKYGTRSQLQAAVTSLKNNGIQVYGDVVMNHKGGADATEMVRAVEVNPNNRNQEVTGEYTIEAWTRFDFPGRGNTHSSFKWRWYHFDGVDWDQSRRLNNRIYKFRGHGKAWDWEVDTENGNYDYLMYADIDMDHPEVVNELRNWGVWYTNTLGLDGFRIDAVKHIKYSFTRDWINHVRSATGKNMFAVAEFWKNDLGAIENYLQKTNWNHSVFDVPLHYNLYNASKSGGNYDMRNIFNGTVVYRHPSHAVTFVDNHDSQPEEALESFVEEWFKPLAYALTLTREQGYPSVFYGDYYGIPTHGVPAMRSKIDPILEARQKYAYGKQNDYLDHHNIIGWTREGNTAHPNSGLATIMSDGAGGSKWMFVGRNKAGQVWSDITGNRTGTVTINADGWGNFSVNGGSVSIWVNK

SEQ ID NO: 22649 - protein, 485 aa, Bacillus sp. 707
HHNGTNGTMMQYFEWYLPNDGNHWNRLNSDASNLKSKGITAVWIPPAWKGASQNDVGYGAYDLYDLGEFNQKGTVRTKYGTRSQLQAAVTSLKNRGIQVYGDVVMNHKGGADATEMVRAVEVNPNNRNQEVTGEYTIEAWTRFDFPGRGNTHSSFKWRWYHFDGVDWDQSRRLNNRIYKFRGHGKAWDWEVDTENGNYDYLMYADIDMDHPEVVNELRNWGVWYTNTLGLDGFRIDAVKHIKYSFTRDWINHVRSATGKNMFAVAEFWKNDLGAIENYLQKTNWNHSVFDVPLHYNLYNASKSGGNYDMRNIFNGTVVQRHPSHAVTFVDNHDSQPEEALESFVEEWFKPLAYALTLTREQGYPSVFYGDYYGIPTHGVPAMRSKIDPILEARQKYAYGKQNDYLDHHNIIGWTREGNTAHPNSGLATIMSDGAGGSKWMFVGRNKAGQVWSDITGNRTGTVTINADGWGNFSVNGGSVSIWVNK

SEQ ID NO: 22650 - protein, 485 aa, Bacillus sp. 707
HHNGTNGTMMQYFEWYLPNGGNHWNRLNSDASNLKSKGITAVWIPPAWKGASQNDVGYGAYDLYDLGEFNQKGTVRTKYGTRSQLQAAVTSLKNNGIQVYGDVVMNHKGGADATEMVRAVEVNPNNRNQEVTGEYTIEAWTRFDFPGRGNTHSSFKWRWYHFDGVDWDQSRRLNNRIYKFRGHGKAWDWEVDTENGNYDYLMYADIDMDHPEVVNELRNWGVWYTNTLGLDGFRIDAVKHIKYSFTRDWINHVRSATGKNMFAVAEFWKNDLGAIENYLQKTNWNHSVFDVPLHYNLYNASKSGGNYDMRNIFNGTVVQRHPSHAVTFVDNHDSQPEEALESFVEEWFKPLAYALTLTREQGYPSVFYGDYYGIPTHGVPAMRSKIDPILEARQKYAYGKQNDYLDHHNIIGWTREGNTAHPNSGLATIMSDGAGGSKWMFVGRNKAGQVWSDITGNRTGTVTINADGWGNFSVNGGSVSIWVNK

SEQ ID NO: 22651 - protein, 485 aa, Bacillus sp. 707
HHNGTNGTMMQYFEWYLPNDGNHWNRLNSDASNLKSKGITAVWIPPAWKGASQNDVGYGAYDLYDLGEFNQKGTVRTKYGTRSQLQAAVTSLKNNGIQVYGDVVMNHKGGADATEMVRAVEVNPNNRNQEVTGEYTIEAWTRFDFPGRGNTHSSFKWRWYHFDGVDWDQSRRLNNRIYKFRGHGKAWDWEVDTENGNYDYLMYADIDMDHPEVVNELRNWGVWYTNTLGLDGFRIDAVKHIKYSFTRDWINHVRSATGKNIFAVAEFWKNDLGAIENYLQKTNWNHSVFDVPLHYNLYNASKSGGNYDMRNIFNGTVVQRHPSHAVTFVDNHDSQPEEALESFVEEWFKPLAYALTLTREQGYPSVFYGDYYGIPTHGVPAMRSKIDPILEARQKYAYGKQNDYLDHHNIIGWTREGNTAHPNSGLATIMSDGAGGSKWMFVGRNKAGQVWSDITGNRTGTVTINADGWGNFSVNGGSVSIWVNK

SEQ ID NO: 22652 - protein, 485 aa, Bacillus sp. 707
HHNGTNGTMMQYFEWYLPNDGNHWNRLNSDASNLKSKGITAVWIPPAWKGASQNDVGYGAYDLYDLGEFNQKGTVRTKYGTRSQLQAAVTSLKNNGIQVYGDVVMNHKGGADATEMVRAVEVNPNNRNQEVTGEYTIEAWTRFDFPGRGNTHSSFKWRWYHFDGVDWDQSRRLNNRIYKFRGHGKAWDWEVDTENGNYDYLMYADIDMDHPEVVNELRNWGVWYTNTLGLDGFRIDAVKHIKYSFTRDWINHVRSATGKNMFAVAEFWKNDLGAIENYLQKTNWNHSVFDVPLHYNLYNASKSGGNYDMRNIFAGTVVQRHPSHAVTFVDNHDSQPEEALESFVEEWFKPLAYALTLTREQGYPSVFYGDYYGIPTHGVPAMRSKIDPILEARQKYAYGKQNDYLDHHNIIGWTREGNTAHPNSGLATIMSDGAGGSKWMFVGRNKAGQVWSDITGNRTGTVTINADGWGNFSVNGGSVSIWVNK

SEQ ID NO: 22653 - protein, 485 aa, Bacillus sp. 707
HHNGTNGTMMQYFEWYLPNDGNHWYRLNSDASNLKSKGITAVWIPPAWKGASQNDVGYGAYDLYDLGEFNQKGTVRTKYGTRSQLQAAVTSLKNNGIQVYGDVVMNHKGGADATEMVRAVEVNPNNRNQEVTGEYTIEAWTRFDFPGRGNTHSSFKWRWYHFDGVDWDQSRRLNNRIYKFRGHGKAWDWEVDTENGNYDYLMYADIDMDHPEVVNELRNWGVWYTNTLGLDGFRIDAVKHIKYSFTRDWINHVRSATGKNMFAVAEFWKNDLGAIENYLQKTNWNHSVFDVPLHYNLYNASKSGGNYDMRNIFNGTVVQRHPSHAVTFVDNHDSQPEEALESFVEEWFKPLAYALTLTREQGYPSVFYGDYYGIPTHGVPAMRSKIDPILEARQKYAYGKQNDYLDHHNIIGWTREGNTAHPNSGLATIMSDGAGGSKWMFVGRNKAGQVWSDITGNRTGTVTINADGWGNFSVNGGSVSIWVNK

SEQ ID NO: 22654 - protein, 485 aa, Bacillus sp. 707
HHNGTNGTMMQYFEWYLPNDGNHWNRLNSDASNLKSKGITAVWIPPAWKGASQNDVGYGAYDLYDLGEFNQKGTVRTKYGTRSQLQAAVTSLKNNGIQVYGDVVMNHKGGADATEMVRAVEVNPNNRNQEVTGEYTIEAWTRFDFPGRGNTHSSFKWRWYHFDGVDWDQSRRLNNRIYKFRGHGKAWDWEVDTENGNYDYLMYADIDMDHPEVVNELRNWGVWYTNTLGLDGFRIDAVKHIKYSFTRDWINHVRSATGKNMFAVAEFWKNDLGAIENYLQKTNWNHSVFDVPLHYNLYNASKSGGNYDMRNIFNGTVVQRHPSHAMTFVDNHDSQPEEALESFVEEWFKPLAYALTLTREQGYPSVFYGDYYGIPTHGVPAMRSKIDPILEARQKYAYGKQNDYLDHHNIIGWTREGNTAHPNSGLATIMSDGAGGSKWMFVGRNKAGQVWSDITGNRTGTVTINADGWGNFSVNGGSVSIWVNK

SEQ ID NO: 22655 - protein, 485 aa, Bacillus sp. 707
HHNGTNGTMMQYFEWYLPNDGNHWNRLNSDASNLKSKGITAVWIPPAWKGASQNDVGYGAYDLYDLGEFNQKGTVRTKYGTRSQLQAAVTSLKNNGIHVYGDVVMNHKGGADATEMVRAVEVNPNNRNQEVTGEYTIEAWTRFDFPGRGNTHSSFKWRWYHFDGVDWDQSRRLNNRIYKFRGHGKAWDWEVDTENGNYDYLMYADIDMDHPEVVNELRNWGVWYTNTLGLDGFRIDAVKHIKYSFTRDWINHVRSATGKNMFAVAEFWKNDLGAIENYLQKTNWNHSVFDVPLHYNLYNASKSGGNYDMRNIFNGTVVQRHPSHAVTFVDNHDSQPEEALESFVEEWFKPLAYALTLTREQGYPSVFYGDYYGIPTHGVPAMRSKIDPILEARQKYAYGKQNDYLDHHNIIGWTREGNTAHPNSGLATIMSDGAGGSKWMFVGRNKAGQVWSDITGNRTGTVTINADGWGNFSVNGGSVSIWVNK

SEQ ID NO: 22656 - protein, 485 aa, Bacillus sp. 707
HHNGTNGTMMQYFEWYLPNDGNHWNRLNSDASNLKSKGITAVWIPPAWKGASQNDVGYGAYDLYDLGEFNQKGTVRTKYGTRSQLQAAVTSLKNNGIQVYGDVVMNHKGGADATEMVRAVEVNPNNRNQEVTGEYTIEAWTRFDFPGRGNTHSSFKWRWYHFDGVDWDMSRRLNNRIYKFRGHGKAWDWEVDTENGNYDYLMYADIDMDHPEVVNELRNWGVWYTNTLGLDGFRIDAVKHIKYSFTRDWINHVRSATGKNMFAVAEFWKNDLGAIENYLQKTNWNHSVFDVPLHYNLYNASKSGGNYDMRNIFNGTVVQRHPSHAVTFVDNHDSQPEEALESFVEEWFKPLAYALTLTREQGYPSVFYGDYYGIPTHGVPAMRSKIDPILEARQKYAYGKQNDYLDHHNIIGWTREGNTAHPNSGLATIMSDGAGGSKWMFVGRNKAGQVWSDITGNRTGTVTINADGWGNFSVNGGSVSIWVNK

SEQ ID NO: 22657 - protein, 485 aa, Bacillus sp. 707
HHNGTNGTMMQYFEWYLPNDGNHWNRLNSDASNLKSKGITAVWIPPAWKGASQNDVGYGAYDLYDLGEFNQKGTVRTKYGTRSQLQAAVTSLKNNGIQVYGDVVMNHKGGADATEMVRAVEVNPNNRNQEVTGEYTIEAWTRFDFPGRGNTHSSFKWRWYHFDGVDWDQSRRLNNRIYKFRGHGKAWDWEVDTENGNYDYLMYADIDMDHPEVVNELRNWGVWYTNTLGLDGFRIDAVKHIKYSFTRDWINHVRSATGKNMFAVAEFWKNDLGAIENYLQKTNWNHSVFDVPLHYNLYNASKSGGNYDMRNIFNGTVVQRHPSHAVTFVDNHDSQPEEALESFVEEWFKPLAYALTLTREQGYPSVFYGDYYGIPTHGVPAMRSKIDPILEARQKYAYGKQNDYLDHHNIIGWTREGNTAHPNQGLATIMSDGAGGSKWMFVGRNKAGQVWSDITGNRTGTVTINADGWGNFSVNGGSVSIWVNK

SEQ ID NO: 22658 - protein, 485 aa, Bacillus sp. 707
HHNGTNGTMMQYFEWYLPNDGNHWNRLNSDASNLKSKGITAVWIPPAWKGASQNDVGYGAYDLYDLGEFNQKGTVRTKYGTRSQLQAAVTSLKNNGIQVYGDVVMNHKGGADATEMVRAVEVNPNNRNQEVTGEYTIEAWTRFDFPGRGNTHSSFKWRWYHFDGVDWDQSRRLNNRIYKFRGHGKAWDWEVDTENGNYDYLMYADIDMDHPEVVNELRNWGVWYTNTLGLDGFRIDAVKHIKYSFTRDWINHVRSATGRNMFAVAEFWKNDLGAIENYLQKTNWNHSVFDVPLHYNLYNASKSGGNYDMRNIFNGTVVQRHPSHAVTFVDNHDSQPEEALESFVEEWFKPLAYALTLTREQGYPSVFYGDYYGIPTHGVPAMRSKIDPILEARQKYAYGKQNDYLDHHNIIGWTREGNTAHPNSGLATIMSDGAGGSKWMFVGRNKAGQVWSDITGNRTGTVTINADGWGNFSVNGGSVSIWVNK

SEQ ID NO: 22659 - protein, 485 aa, Bacillus sp. 707
HHNGTNGTMMQYFEWYLPNDGNHWNRLNSDASNLKSKGITAVWIPPAWKGASQNDVGYGAYDLYDLGEFNQKGTVRTKYGTRSQLQAAVTSLKNNGIQVYGDVVMNHKGGADATEMVRAVEVNPNNRNQEVTGEYNIEAWTRFDFPGRGNTHSSFKWRWYHFDGVDWDQSRRLNNRIYKFRGHGKAWDWEVDTENGNYDYLMYADIDMDHPEVVNELRNWGVWYTNTLGLDGFRIDAVKHIKYSFTRDWINHVRSATGKNMFAVAEFWKNDLGAIENYLQKTNWNHSVFDVPLHYNLYNASKSGGNYDMRNIFNGTVVQRHPSHAVTFVDNHDSQPEEALESFVEEWFKPLAYALTLTREQGYPSVFYGDYYGIPTHGVPAMRSKIDPILEARQKYAYGKQNDYLDHHNIIGWTREGNTAHPNSGLATIMSDGAGGSKWMFVGRNKAGQVWSDITGNRTGTVTINADGWGNFSVNGGSVSIWVNK

SEQ ID NO: 22660 - protein, 485 aa, Bacillus sp. 707
HHNGTNGTMMQYFEWYLPNDGNHWNRLNSDASNLKSKGITAVWIPPAWKGASQNDVGYGAYDLYDLGEFRQKGTVRTKYGTRSQLQAAVTSLKNNGIQVYGDVVMNHKGGADATEMVRAVEVNPNNRNQEVTGEYTIEAWTRFDFPGRGNTHSSFKWRWYHFDGVDWDQSRRLNNRIYKFRGHGKAWDWEVDTENGNYDYLMYADIDMDHPEVVNELRNWGVWYTNTLGLDGFRIDAVKHIKYSFTRDWINHVRSATGKNMFAVAEFWKNDLGAIENYLQKTNWNHSVFDVPLHYNLYNASKSGGNYDMRNIFNGTVVQRHPSHAVTFVDNHDSQPEEALESFVEEWFKPLAYALTLTREQGYPSVFYGDYYGIPTHGVPAMRSKIDPILEARQKYAYGKQNDYLDHHNIIGWTREGNTAHPNSGLATIMSDGAGGSKWMFVGRNKAGQVWSDITGNRTGTVTINADGWGNFSVNGGSVSIWVNK

SEQ ID NO: 22661 - protein, 485 aa, Bacillus sp.
HHNGTNGTMMQYFEWYLPNDGNHWNRLRSDASNLKDKGISAVWIPPAWKGASQNDVGYGAYDLYDLGEFNQKGTIRTKYGTRNQLQAAVNALKSNGIQVYGDVVFNHKGGADATEMVRAVEVNPNNRNQEVSGEYTIEAWTKFDFPGRGNTHSNFKWRWYHFDGVDWDQSRKLNNRIYKFRGDGKGWDWEVDTENGNYDYLTYADIDFDHPEVVNELRNWGVWYTNTLGLDGFRIDAVKHIKYSFTRDWINHVRSATGKNMFAVAEFWKNDLGAIENYLNKTNWNHSVFDVPLHYNLYNASKSGGNYDMRQIFNGTVVQRHPMHAVTFVDNHDSQPEEALESFVEEWFKPLAYALTLTREQGYPSVFYGDYYGIPTHGVPAMKSKIDPILEARQKYAYGRQNDYLDHHNIIGWTREGNTAHPNSGLATIMSDGAGGNKWMFVGRNKAGQVWTDITGNRAGTVTINADGWGNFSVNGGSVSIWVNK

SEQ ID NO: 22662 - protein, 485 aa, Bacillus subtilis
HHNGTNGTMMQYFEWYLPNDGNHWNRLRSDASNLKDKGISAVWIPPAWKGASQNDVGYGAYDLYDLGEFNQKGTIRTKYGTRNQLQAAVNALKSNGIQVYGDVVMNHKGGADATEMVRAVEVNPNNRNQEVSGEYTIEAWTKFDFPGRGNTHSNFKWRWYHFDGVDYDQSRKLNNRIYKFRGDGKGWDWEVDTENGNYDYLMYADIDMDNPEVVNELRNWGVWYTNTLGLDGFRIDAVKHIKYSFTRDWINHVRSATGKNMFAVAEFWKNDLGAIENYLNKTNWNHSVFDVPLHYNLYNASKSGGNYDMRQIFNGTVVQRHPMHAVTFVDNHDSQPEEALESFVEEWFKPLAYALTLTREQGYPSIFYGDYYGIPTHGVPAMKSKIDPILEARQKYAYGRQNDYLDHHNIIGWTREGNTAHPNSGLATIMSDGAGGNKWMFVGRNKAGQVWTDITGNRAGTVTINADGWGNFSVNGGSVSIWVNK

SEQ ID NO: 22663 - protein, 485 aa, Bacillus sp.
HHNGTNGTLMQYFEWYLPNDGNHWNRLRSDASNLKDKGISAVWIPPAWKGASQNDVGYGAYDLYDLGEFNQKGTIRTKYGTRNQLQAAVNALKSNGIQVYGDVVMNHKGGADATEMVRAVEVNPNNRNQEVSGEYTIEAWTKFDFPGRGNTHSNFKWRWYHFDGVDWDQSRKLNNRIYKFRGDGKGWDWEVDTENGNYDYLTYADIDMDHPEVVNELRNWGVWYTNTLGLDGFRIDAVKHIKYSFTRDWINHVRSATGKNMFAVAEFWKNDLGAIENYLNKTNWNHSVFDVPLHFNLYNASKSGGNYDMRQIFNGTVVQRHPMHAVTFVDNHDSQPEEALESFVEEWFKPLAYALTLTREQGYPSVFYGDYYGIPTHGVPAMKSKIDPILEARQKYAYGRQNDYLDHHNIIGWTREGNTAHPNSGLATIMSDGAGGNKWMFVGRNKAGQVWTDITGNRAGTVTINADGWGNFSVNGGSVSIWVNK

SEQ ID NO: 22664 - protein, 485 aa, Bacillus sp. 707
HHNGTNGTMMQYFEWYLPNDGNHWNRLNSDASNLKSKGITAVWIPPAWKGASQNDVGYGAYDLYDLGEFNQKGTVRTKYGTRSQLQAAVTSLKNNGIQVYGDVVMNHKGGADATEMVRAVEVNPNNRNQEVTGEYTIEAWTRFDFPGRGNTHSSFKWRWYHFDGVDWDQSRRLNNRIYKFRGHGKAWDWEVDTENGNYDYLMYADIDMDHPEVVNELRNWGVWYTNTLGLDGFRIDAVKHIKYSFTRDWINHVRSATGKNMFAVAEFWKNDLGAIENYLQKTNWNHSVFDVPLHYNLYNASKSGGNYDMRNIFNGTVVQRHPSHAVTFVDNHDSQPEEALESFVEEWFKPLAYALTLTREQGYPSVFYGDYYGIPTHGVPAMRSKIDPILEARQKYAYGKQNDYLDHHNIIGWTREGNTAYPNSGLATIMSDGAGGSKWMFVGRNKAGQVWSDITGNRTGTVTINADGWGNFSVNGGSVSIWVNK

SEQ ID NO: 22665 - protein, 485 aa, Bacillus sp. 707
HHNGTNGTMMQYFEWYLPNDGNHWNRLNSDASNLKSKGITAVWIPPAWKGASQNDVGYGAYDLYDLGEFNQKGTVRTKYGTRSQLQAAVTSLKNNGIQVYGDVVMNHKGGADATEMVRAVEVNPNNRNQEVTGEYTIEAWTRFDFPGRGNTHSSFKWRWYHFDGVDWDCSRRLNNRIYKFRGHGKAWDWEVDTENGNYDYLMYADIDMDHPEVVNELRNWGVWYTNTLGLDGFRIDAVKHIKYSFTRDWINHVRSATGKNMFAVAEFWKNDLGAIENYLQKTNWNHSVFDVPLHYNLYNASKSGGNYDMRNIFNGTVVQRHPSHAVTFVDNHDSQPEEALESFVEEWFKPLAYALTLTREQGYPSVFYGDYYGIPTHGVPAMRSKIDPILEARQKYAYGKQNDYLDHHNIIGWTREGNTAHPNSGLATIMSDGAGGSKWMFVGRNKAGQVWSDITGNRTGTVTINADGWGNFSVNGGSVSIWVNK

SEQ ID NO: 22666 - protein, 485 aa, Bacillus sp. 707
HHNGTNGTMMQYFEWYLPNDGNHWNRLNSDASNLKSKGITAVWIPPAWKGASQNDVGYGAYDLYDLGEFNQKGTVRTKYGTRSQLQAAVTSLKNNGIQVYGDVVMNHKGGADATEMVRAVEVNPNNRNQEVTGEYTIEAWTRFDFPGRGNTHSSFKWRWYHFDGVDWDQSRRLNNRIYKFRGHGKAWDWEVDTENGNYDYLMYADIDMDHPEVVNELRNWGVWYTNTLGLDGFRIDAVKHIKYSFTRDWINHVRSATGKNMFAVAEFWKNDLGAIENYLQKTNWNHSVFDVPLHYNLYNASKSGGNYDMRNIFNGTVVQRHPSHAVTFVDNHDSQPEEALESFVEEWFKPLAYALTLTREQGAPSVFYGDYYGIPTHGVPAMRSKIDPILEARQKYAYGKQNDYLDHHNIIGWTREGNTAHPNSGLATIMSDGAGGSKWMFVGRNKAGQVWSDITGNRTGTVTINADGWGNFSVNGGSVSIWVNK

SEQ ID NO: 22667 - protein, 485 aa, Bacillus sp. 707
HHNGTNGTMMQYFEWYLPNDGNHWNRLNSDASNLKSKGITAVWIPPAWKGASQNDVGYGAYDLYDLGEFNQKGTVRTKYGTRSQLQAAVTSLKNNGIQVYGDVVMNHKGGADATEMVRAVEVNPNNRNQEVTGEYTIEAWTRFDFPGRGNTHSSFKWRWYHFDGVDWDQSRRLNNRIYKFRGHGKAWDWEVDTENGNYDYLMYADIDMDHPEVVNELRNWGVWYTNTLGLDGFRIDAVKHIKYSFTRDWINHVRSATGKNMHAVAEFWKNDLGAIENYLQKTNWNHSVFDVPLHYNLYNASKSGGNYDMRNIFNGTVVQRHPSHAVTFVDNHDSQPEEALESFVEEWFKPLAYALTLTREQGYPSVFYGDYYGIPTHGVPAMRSKIDPILEARQKYAYGKQNDYLDHHNIIGWTREGNTAHPNSGLATIMSDGAGGSKWMFVGRNKAGQVWSDITGNRTGTVTINADGWGNFSVNGGSVSIWVNK

SEQ ID NO: 22668 - protein, 485 aa, Bacillus sp. 707
HHNGTNGTMMQYFEWYLPNDGNHWNRLNSDASNLKSKGITAVWIPPAWKGASQNDVGYGAYDLYDLGEFNQKGTVRTKYGTRSQLQAAVTSLKNNGIQVYGDVVMNHKGGADATEMVRAVEVNPNNRNQEVTGEYTIEAWTRFDFPGRGNTHSSFKWRWYHFDGVDWDQSRRLNNRIYKFRGHGKAWDWEVDTENGNYDYLMYADIDMDHPEVVNELRNWGVWYTNTLGLDGFRIDAVKHIKYSFTRDWINHVRSATGKNMFAVAEFWKNDLGAIENYLQKTNWNHSVFDVPLHYNLYNASKSGGNYDMRNIFNGTVVQRHPSHAVTFVDNHDSQPEEALESFVEEWFKPLAYALTLTREQGYPSVFYGDYYGIPTHGVPAMRSKIDPILEARDKYAYGKQNDYLDHHNIIGWTREGNTAHPNSGLATIMSDGAGGSKWMFVGRNKAGQVWSDITGNRTGTVTINADGWGNFSVNGGSVSIWVNK

SEQ ID NO: 22669 - protein, 485 aa, Bacillus sp. 707
HHNGTNGTMMQYFEWYLPNDGNHWNRLNSDASNLKSKGITAVWIPPAWKGASQNDVGYGAYDLYDLGEFNQKGTVRTKYGTRSQLQAAVTSLKNNGIQVYGDVVMNHKGGADATEMVRAVEVNPNNRNQEVTGEYTIEAWTRFDFPGRGNTHSSFKWRWYHFDGVDWDQSRRLNNRIYKFYGHGKAWDWEVDTENGNYDYLMYADIDMDHPEVVNELRNWGVWYTNTLGLDGFRIDAVKHIKYSFTRDWINHVRSATGKNMFAVAEFWKNDLGAIENYLQKTNWNHSVFDVPLHYNLYNASKSGGNYDMRNIFNGTVVQRHPSHAVTFVDNHDSQPEEALESFVEEWFKPLAYALTLTREQGYPSVFYGDYYGIPTHGVPAMRSKIDPILEARQKYAYGKQNDYLDHHNIIGWTREGNTAHPNSGLATIMSDGAGGSKWMFVGRNKAGQVWSDITGNRTGTVTINADGWGNFSVNGGSVSIWVNK

SEQ ID NO: 22670 - protein, 485 aa, Bacillus sp. 707
HHNGTNGTMMQYFEWYLPNDGNHWNRLNSDASNLKSKGITAVWIPPAWKGASQNDVGYGAYDLYDLGEFNQKGTVRTKYGTRSQLQAAVTSLKNNGIQVYGDVVMNHKGGADATEMVRAVEVNPNNRNQEVTGEYTIEAWTRFDFPGRGNTHSSFKWRWYHFDGVDWDQSRRLNNRIYKFRGHGKAWDWEVDTENGNYDYLMYADIDMDHPEVVNELRNWGVWYTNTLGLDGFRIDAVKHIKYSFTRDWINHVRSATGKNMFAVAEFWKNDLGAIENYLQKTNWNCSVFDVPLHYNLYNASKSGGNYDMRNIFNGTVVQRHPSHAVTFVDNHDSQPEEALESFVEEWFKPLAYALTLTREQGYPSVFYGDYYGIPTHGVPAMRSKIDPILEARQKYAYGKQNDYLDHHNIIGWTREGNTAHPNSGLATIMSDGAGGSKWMFVGRNKAGQVWSDITGNRTGTVTINADGWGNFSVNGGSVSIWVNK

SEQ ID NO: 22671 - protein, 485 aa, Bacillus sp.
HHNGTNGTMMQYFEWYLPNDGNHWNRLNSDASNLKSKGITAVWIPPAWKGASQNDVGYGAYDLYDLGEFNQKGTVRTKYGTRSQLQAAVTSLKNNGIQVYGDVVLNHKGGADATEMVRAVEVNPNNRNQEVTGEYTIEAWTRFDFPGRGNTHSSFKWRWYHFDGVDWDQSRRLNNRIYKFRGHGKAWDWEVDTENGNYDYLMYADYDMDHPEVVNELRNWGVWYTNTLGLDGFRIDAVKHIKYSFTRDWINHVRSATGKNMFAVAEFWKNDLGAIENYLQKTNWNHSVFDVPLHYNLYNASKSGGNYDMRNIFNGTVVQRHPSHAVTFVDNHDSQPEEALESFVEEWFKPLAYALTLTREQGYPSVFYGDYYGIPTHGVPAMRSKIDPILEARQKYAYGKQNDYLDHHNIIGWTREGNTAHPNSGLATIMSDGAGGSKWMFVGRNKAGQVWSDITGNRTGTVTINADGWGNFSVNGGSVSIWVNK

SEQ ID NO: 22672 - protein, 485 aa, Bacillus sp. 707
HHNGTNGTMMQYFEWYLPNDGNHWNRLNSDASNLKSKGITAVWIPPAWKGASQNDVGYGAYDLYDLGEFNQKGTVRTKYGTRSQLQAAVTSLKNNGIQVYGDVVMNHKGGADATEMVRAVEVNPNNRNQEVTGEYTIEAWTRFDFPGRGNTHSSFKWRWYHFDGVDWDQSRRLNNRIYKFRGHGKAWDWEVDTENGNYDYLMYADIDMDHPEVVNELRNWGVWYTNTLGLDGFRIDAVKHIKYSFTRDWINHVRSATGKNMFAVAEFWKNDLGAIENYLQKTNWNHSVFDVPLHYNLYNASKSGGNYDMRNIFNGTVVQRHPSHAVTFVDNHDSQPEEALESFVEEWFKPLAYALTLTREQGYPSVFYGDYYGIPTHGVPAMRSKIDPILEARQKYAYGKQNDYLDHNNIIGWTREGNTAHPNSGLATIMSDGAGGSKWMFVGRNKAGQVWSDITGNRTGTVTINADGWGNFSVNGGSVSIWVNK

SEQ ID NO: 22673 - protein, 485 aa, Bacillus sp. 707
HHNGTNGTMMQYFEWYLPNDGNHWNRLNSDASNLKSKGITAVWIPPAWKGASQNDVGYGAYDLYDLGEFNQKGTVRTKYGTRSQLQAAVTSLKNNGIQVYGDVVMNHKGGADATEMVRAVEVNPINRNQEVTGEYTIEAWTRFDFPGRGNTHSSFKWRWYHFDGVDWDQSRRLNNRIYKFRGHGKAWDWEVDTENGNYDYLMYADIDMDHPEVVNELRNWGVWYTNTLGLDGFRIDAVKHIKYSFTRDWINHVRSATGKNMFAVAEFWKNDLGAIENYLQKTNWNHSVFDVPLHYNLYNASKSGGNYDMRNIFNGTVVQRHPSHAVTFVDNHDSQPEEALESFVEEWFKPLAYALTLTREQGYPSVFYGDYYGIPTHGVPAMRSKIDPILEARQKYAYGKQNDYLDHHNIIGWTREGNTAHPNSGLATIMSDGAGGSKWMFVGRNKAGQVWSDITGNRTGTVTINADGWGNFSVNGGSVSIWVNK

SEQ ID NO: 22674 - protein, 485 aa, Bacillus sp. 707
HHNGTNGTMMQYFEWYLPNDGNHWNRLNSDASNLKSKGITAVWIPPAWKGASQNDVGYGAYDLYDLGEFNQKGTVRTKYGTRSQLQAAVTSLKNNGIQVYGDVVMNHKGGADATEMVRAVEVNPLNRNQEVTGEYTIEAWTRFDFPGRGNTHSSFKWRWYHFDGVDWDQSRRLNNRIYKFRGHGKAWDWEVDTENGNYDYLMYADIDMDHPEVVNELRNWGVWYTNTLGLDGFRIDAVKHIKYSFTRDWINHVRSATGKNMFAVAEFWKNDLGAIENYLQKTNWNHSVFDVPLHYNLYNASKSGGNYDMRNIFNGTVVQRHPSHAVTFVDNHDSQPEEALESFVEEWFKPLAYALTLTREQGYPSVFYGDYYGIPTHGVPAMRSKIDPILEARQKYAYGKQNDYLDHHNIIGWTREGNTAHPNSGLATIMSDGAGGSKWMFVGRNKAGQVWSDITGNRTGTVTINADGWGNFSVNGGSVSIWVNK

SEQ ID NO: 22675 - protein, 485 aa, Bacillus sp. 707
HHNGTNGTMMQYFEWYLPNDGNHWNRLNSDASNLKSKGITAVWIPPAWKGASQNDVGYGAYDLYDLGEFNQKGTVRTKYGTRSQLQAAVTSLKNNGIQVYGDVVMNHKGGADATEMVRAVEVNPNNRNQEVTGEYTIEAWTRFDFPGRGNTHSSFKWRWYHFDGVDWDQSRRLNNRIYKFRGHGKAWDWEVDTENGNYDYLMYADIDMDHFEVVNELRNWGVWYTNTLGLDGFRIDAVKHIKYSFTRDWINHVRSATGKNMFAVAEFWKNDLGAIENYLQKTNWNHSVFDVPLHYNLYNASKSGGNYDMRNIFNGTVVQRHPSHAVTFVDNHDSQPEEALESFVEEWFKPLAYALTLTREQGYPSVFYGDYYGIPTHGVPAMRSKIDPILEARQKYAYGKQNDYLDHHNIIGWTREGNTAHPNSGLATIMSDGAGGSKWMFVGRNKAGQVWSDITGNRTGTVTINADGWGNFSVNGGSVSIWVNK

SEQ ID NO: 22676 - protein, 485 aa, Bacillus sp. 707
HHNGTNGTMMQYFEWYLPNDGNHWNRLNSDASNLKSKGITAVWIPPAWKGASQNDVGYGAYDLYDLGEFNQKGTVRTKYGTRSQLQAAVTSLKNNGIQVYGDVVMNHKGGADATEMVRAVEVNPNNRNQEVTGEYTIEAWTRFDFMGRGNTHSSFKWRWYHFDGVDWDQSRRLNNRIYKFRGHGKAWDWEVDTENGNYDYLMYADIDMDHPEVVNELRNWGVWYTNTLGLDGFRIDAVKHIKYSFTRDWINHVRSATGKNMFAVAEFWKNDLGAIENYLQKTNWNHSVFDVPLHYNLYNASKSGGNYDMRNIFNGTVVQRHPSHAVTFVDNHDSQPEEALESFVEEWFKPLAYALTLTREQGYPSVFYGDYYGIPTHGVPAMRSKIDPILEARQKYAYGKQNDYLDHHNIIGWTREGNTAHPNSGLATIMSDGAGGSKWMFVGRNKAGQVWSDITGNRTGTVTINADGWGNFSVNGGSVSIWVNK

SEQ ID NO: 22677 - protein, 485 aa, Bacillus sp. 707
HHNGTNGTMMQYFEWYLPNDGNHWNRLNSDASNLKSKGITAVWIPPAWKGASQNDVGYGAYDLYDLGEFNQKGTVRTKYGTRSQLQAAVTSLKNNGIQVYGDVVMNHKGGADATEMVRAVEVNPNNRNQEVTGEYTIEAWTRFDFPGRGNTHSSFKWRWYHFDGVDWDQSRRLNNRIYKFRGHGKAWDWEVDTENGNYDYLMYADIDMDHPEVVNEFRNWGVWYTNTLGLDGFRIDAVKHIKYSFTRDWINHVRSATGKNMFAVAEFWKNDLGAIENYLQKTNWNHSVFDVPLHYNLYNASKSGGNYDMRNIFNGTVVQRHPSHAVTFVDNHDSQPEEALESFVEEWFKPLAYALTLTREQGYPSVFYGDYYGIPTHGVPAMRSKIDPILEARQKYAYGKQNDYLDHHNIIGWTREGNTAHPNSGLATIMSDGAGGSKWMFVGRNKAGQVWSDITGNRTGTVTINADGWGNFSVNGGSVSIWVNK

SEQ ID NO: 22678 - protein, 485 aa, Bacillus sp. 707
HHNGTNGTMMQYFEWYLPNDGNHWNRLNSDASNLKSKGITAVWIPPAWKGASQSDVGYGAYDLYDLGEFNQKGTVRTKYGTRSQLQAAVTSLKNNGIQVYGDVVMNHKGGADATEMVRAVEVNPNNRNQEVTGEYTIEAWTRFDFPGRGNTHSSFKWRWYHFDGVDWDQSRRLNNRIYKFRGHGKAWDWEVDTENGNYDYLMYADIDMDHPEVVNELRNWGVWYTNTLGLDGFRIDAVKHIKYSFTRDWINHVRSATGKNMFAVAEFWKNDLGAIENYLQKTNWNHSVFDVPLHYNLYNASKSGGNYDMRNIFNGTVVQRHPSHAVTFVDNHDSQPEEALESFVEEWFKPLAYALTLTREQGYPSVFYGDYYGIPTHGVPAMRSKIDPILEARQKYAYGKQNDYLDHHNIIGWTREGNTAHPNSGLATIMSDGAGGSKWMFVGRNKAGQVWSDITGNRTGTVTINADGWGNFSVNGGSVSIWVNK

SEQ ID NO: 22679 - protein, 485 aa, Bacillus sp. 707
HHNGTNGTMMQYFEWYLPNDGNHWNRLNSDASNLKSKGITAVWIPPAWKGASQNDVGYGAYDLYDLGEFNQKGTVRTKYGTRSQLQAAVTSLKNNGIQVYGDVVMNHKGGADATEMVRAVEVNPNNRNQEVTGEYTIEAWTRFDFPGRGNTHSSFKWRWYHFDGVDWDQSRRLNNRIYKFRGHGKAWDWEVDTENGNYDYLMYADIDMDDPEVVNELRNWGVWYTNTLGLDGFRIDAVKHIKYSFTRDWINHVRSATGKNMFAVAEFWKNDLGAIENYLQKTNWNHSVFDVPLHYNLYNASKSGGNYDMRNIFNGTVVQRHPSHAVTFVDNHDSQPEEALESFVEEWFKPLAYALTLTREQGYPSVFYGDYYGIPTHGVPAMRSKIDPILEARQKYAYGKQNDYLDHHNIIGWTREGNTAHPNSGLATIMSDGAGGSKWMFVGRNKAGQVWSDITGNRTGTVTINADGWGNFSVNGGSVSIWVNK

SEQ ID NO: 22680 - protein, 485 aa, Bacillus sp. 707
HHNGTNGTMMQYFEWYLPNDGNHWNRLNSDASNLKSKGITAVWIPPAWKGASQNDVGYGAYDLYDLGEFNQKGTVRTKYGTRSQLQAAVTSLKNNGIQVYGDVVMNHKGGADATEMVRAVEVNPNNRNQEVTGEYTIEAWTRFKFPGRGNTHSSFKWRWYHFDGVDWDQSRRLNNRIYKFRGHGKAWDWEVDTENGNYDYLMYADIDMDHPEVVNELRNWGVWYTNTLGLDGFRIDAVKHIKYSFTRDWINHVRSATGKNMFAVAEFWKNDLGAIENYLQKTNWNHSVFDVPLHYNLYNASKSGGNYDMRNIFNGTVVQRHPSHAVTFVDNHDSQPEEALESFVEEWFKPLAYALTLTREQGYPSVFYGDYYGIPTHGVPAMRSKIDPILEARQKYAYGKQNDYLDHHNIIGWTREGNTAHPNSGLATIMSDGAGGSKWMFVGRNKAGQVWSDITGNRTGTVTINADGWGNFSVNGGSVSIWVNK

SEQ ID NO: 22681 - protein, 485 aa, Bacillus sp. 707
HHNGTAGTMMQYFEWYLPNDGNHWNRLNSDASNLKSKGITAVWIPPAWKGASQNDVGYGAYDLYDLGEFNQKGTVRTKYGTRSQLQAAVTSLKNNGIQVYGDVVMNHKGGADATEMVRAVEVNPNNRNQEVTGEYTIEAWTRFDFPGRGNTHSSFKWRWYHFDGVDWDQSRRLNNRIYKFRGHGKAWDWEVDTENGNYDYLMYADIDMDHPEVVNELRNWGVWYTNTLGLDGFRIDAVKHIKYSFTRDWINHVRSATGKNMFAVAEFWKNDLGAIENYLQKTNWNHSVFDVPLHYNLYNASKSGGNYDMRNIFNGTVVQRHPSHAVTFVDNHDSQPEEALESFVEEWFKPLAYALTLTREQGYPSVFYGDYYGIPTHGVPAMRSKIDPILEARQKYAYGKQNDYLDHHNIIGWTREGNTAHPNSGLATIMSDGAGGSKWMFVGRNKAGQVWSDITGNRTGTVTINADGWGNFSVNGGSVSIWVNK

SEQ ID NO: 22682 - protein, 485 aa, Bacillus sp. 707
HHNGTNGTMMQYFEWYLPNDGNHWNRLNSDASNLKSKGITQVWIPPAWKGASQNDVGYGAYDLYDLGEFNQKGTVRTKYGTRSQLQAAVTSLKNNGIQVYGDVVMNHKGGADATEMVRAVEVNPNNRNQEVTGEYTIEAWTRFDFPGRGNTHSSFKWRWYHFDGVDWDQSRRLNNRIYKFRGHGKAWDWEVDTENGNYDYLMYADIDMDHPEVVNELRNWGVWYTNTLGLDGFRIDAVKHIKYSFTRDWINHVRSATGKNMFAVAEFWKNDLGAIENYLQKTNWNHSVFDVPLHYNLYNASKSGGNYDMRNIFNGTVVQRHPSHAVTFVDNHDSQPEEALESFVEEWFKPLAYALTLTREQGYPSVFYGDYYGIPTHGVPAMRSKIDPILEARQKYAYGKQNDYLDHHNIIGWTREGNTAHPNSGLATIMSDGAGGSKWMFVGRNKAGQVWSDITGNRTGTVTINADGWGNFSVNGGSVSIWVNK

SEQ ID NO: 22683 - protein, 485 aa, Bacillus sp. 707
HHNGTNGTMMQYFEWYLPNDGNHWNRLNSDASNLKSKGITAVWIPPAWKGASQNDVGYGAYDLYDLGEFNQKGTVRTKYGTRSQLQAAVTSLKNNGIQVYGDVVMNHKGGADMTEMVRAVEVNPNNRNQEVTGEYTIEAWTRFDFPGRGNTHSSFKWRWYHFDGVDWDQSRRLNNRIYKFRGHGKAWDWEVDTENGNYDYLMYADIDMDHPEVVNELRNWGVWYTNTLGLDGFRIDAVKHIKYSFTRDWINHVRSATGKNMFAVAEFWKNDLGAIENYLQKTNWNHSVFDVPLHYNLYNASKSGGNYDMRNIFNGTVVQRHPSHAVTFVDNHDSQPEEALESFVEEWFKPLAYALTLTREQGYPSVFYGDYYGIPTHGVPAMRSKIDPILEARQKYAYGKQNDYLDHHNIIGWTREGNTAHPNSGLATIMSDGAGGSKWMFVGRNKAGQVWSDITGNRTGTVTINADGWGNFSVNGGSVSIWVNK

SEQ ID NO: 22684 - protein, 485 aa, Bacillus sp. 707
HHNGTNGTMMQYFEWYLPNDGNHWNRLNSDASNLKSKGITAVWIPPAWKGASQNDVGYGAYDLYDLGEFNQKGTVRTKYGTRSQLQAAVTSLKNNGIQVYGDVVMNHKGGADATEMVRAVEVNPNNRNQEVTGEYTIEAWTRFDFPGRGNTHSSFKWRWYHFDGVDWDQSRRLNNRIYKFRGHGKAWDWEVDTENGNYDYLMYADIDMDHPEVVNELRNWGVWYTNTLGLDGFRIDAVKHIKYSFTRDWINHVRSATGKNMFAVAEFWKNDLGAIENYLQKTNWNHSVFDVPLHYNLYNASKSGGNYDMRNIFNGTVVQRHPSHAVTFVDNHDSQPEEALESFVEEWFKPLAYALTLTRKQGYPSVFYGDYYGIPTHGVPAMRSKIDPILEARQKYAYGKQNDYLDHHNIIGWTREGNTAHPNSGLATIMSDGAGGSKWMFVGRNKAGQVWSDITGNRTGTVTINADGWGNFSVNGGSVSIWVNK

SEQ ID NO: 22685 - protein, 485 aa, Bacillus sp. 707
HHNGTNGTMMQYFEWYLPNDGNHWNRLNSDASNLKSKGITAVWIPPAWKGASQNDVGYGAYDLYDLGEFNQKGTVRTKYGTRSQLQAAVTSLKNNGIQVYGDVVMNHKGGADATEMVRAVEVNPNNRNQEVTGEYTIEAWTRFDFPGRGNTHSSFKWRWYHFDGVDWDQSRRLNNRIYKFRGHGKAWDWEVDTENGNYDYLMYADIDMDHPEVVMELRNWGVWYTNTLGLDGFRIDAVKHIKYSFTRDWINHVRSATGKNMFAVAEFWKNDLGAIENYLQKTNWNHSVFDVPLHYNLYNASKSGGNYDMRNIFNGTVVQRHPSHAVTFVDNHDSQPEEALESFVEEWFKPLAYALTLTREQGYPSVFYGDYYGIPTHGVPAMRSKIDPILEARQKYAYGKQNDYLDHHNIIGWTREGNTAHPNSGLATIMSDGAGGSKWMFVGRNKAGQVWSDITGNRTGTVTINADGWGNFSVNGGSVSIWVNK

SEQ ID NO: 22686 - protein, 485 aa, Bacillus sp. 707
HNNGTNGTMMQYFEWYLPNDGNHWNRLNSDASNLKSKGITAVWIPPAWKGASQNDVGYGAYDLYDLGEFNQKGTVRTKYGTRSQLQAAVTSLKNNGIQVYGDVVMNHKGGADATEMVRAVEVNPNNRNQEVTGEYTIEAWTRFDFPGRGNTHSSFKWRWYHFDGVDWDQSRRLNNRIYKFRGHGKAWDWEVDTENGNYDYLMYADIDMDHPEVVNELRNWGVWYTNTLGLDGFRIDAVKHIKYSFTRDWINHVRSATGKNMFAVAEFWKNDLGAIENYLQKTNWNHSVFDVPLHYNLYNASKSGGNYDMRNIFNGTVVQRHPSHAVTFVDNHDSQPEEALESFVEEWFKPLAYALTLTREQGYPSVFYGDYYGIPTHGVPAMRSKIDPILEARQKYAYGKQNDYLDHHNIIGWTREGNTAHPNSGLATIMSDGAGGSKWMFVGRNKAGQVWSDITGNRTGTVTINADGWGNFSVNGGSVSIWVNK

SEQ ID NO: 22687 - protein, 485 aa, Bacillus sp. 707
HHNGTNGTMMQYFEWYLPNDGNHWNRLNSDASNLKSKGITAVWIPPAWKGASQNDVGYGAYDLYDLGEFNQKGTVRTKYGTRSQLQAAVTSLKNNGIQVYGDVVMNHKGGADFTEMVRAVEVNPNNRNQEVTGEYTIEAWTRFDFPGRGNTHSSFKWRWYHFDGVDWDQSRRLNNRIYKFRGHGKAWDWEVDTENGNYDYLMYADIDMDHPEVVNELRNWGVWYTNTLGLDGFRIDAVKHIKYSFTRDWINHVRSATGKNMFAVAEFWKNDLGAIENYLQKTNWNHSVFDVPLHYNLYNASKSGGNYDMRNIFNGTVVQRHPSHAVTFVDNHDSQPEEALESFVEEWFKPLAYALTLTREQGYPSVFYGDYYGIPTHGVPAMRSKIDPILEARQKYAYGKQNDYLDHHNIIGWTREGNTAHPNSGLATIMSDGAGGSKWMFVGRNKAGQVWSDITGNRTGTVTINADGWGNFSVNGGSVSIWVNK

SEQ ID NO: 22688 - protein, 485 aa, Bacillus sp. 707
HHNGTNGTMMQYFEWYLPNDGNHWNRLNSDASNLKSKGITAVWIPPAWKGASQNDVGYGAYDLYDLGEFNQKGTVRTKYGTRSQLQAAVTSLKNNGIQVYGDVVMNHKGGADATEMVRAVEVNPNNRNQEVTQEYTIEAWTRFDFPGRGNTHSSFKWRWYHFDGVDWDQSRRLNNRIYKFRGHGKAWDWEVDTENGNYDYLMYADIDMDHPEVVNELRNWGVWYTNTLGLDGFRIDAVKHIKYSFTRDWINHVRSATGKNMFAVAEFWKNDLGAIENYLQKTNWNHSVFDVPLHYNLYNASKSGGNYDMRNIFNGTVVQRHPSHAVTFVDNHDSQPEEALESFVEEWFKPLAYALTLTREQGYPSVFYGDYYGIPTHGVPAMRSKIDPILEARQKYAYGKQNDYLDHHNIIGWTREGNTAHPNSGLATIMSDGAGGSKWMFVGRNKAGQVWSDITGNRTGTVTINADGWGNFSVNGGSVSIWVNK

SEQ ID NO: 22689 - protein, 485 aa, Bacillus sp. 707
HHNGTNSTMMQYFEWYLPNDGNHWNRLNSDASNLKSKGITAVWIPPAWKGASQNDVGYGAYDLYDLGEFNQKGTVRTKYGTRSQLQAAVTSLKNNGIQVYGDVVMNHKGGADATEMVRAVEVNPNNRNQEVTGEYTIEAWTRFDFPGRGNTHSSFKWRWYHFDGVDWDQSRRLNNRIYKFRGHGKAWDWEVDTENGNYDYLMYADIDMDHPEVVNELRNWGVWYTNTLGLDGFRIDAVKHIKYSFTRDWINHVRSATGKNMFAVAEFWKNDLGAIENYLQKTNWNHSVFDVPLHYNLYNASKSGGNYDMRNIFNGTVVQRHPSHAVTFVDNHDSQPEEALESFVEEWFKPLAYALTLTREQGYPSVFYGDYYGIPTHGVPAMRSKIDPILEARQKYAYGKQNDYLDHHNIIGWTREGNTAHPNSGLATIMSDGAGGSKWMFVGRNKAGQVWSDITGNRTGTVTINADGWGNFSVNGGSVSIWVNK

SEQ ID NO: 22690 - protein, 485 aa, Bacillus sp. 707
HHNGTNGTMMQYFEWYLPNDGNHWNRLNSDASNLKSKGITAVWIPPAWKGASQNDVGYGAYDLYDLGEFNQKGTVRTKYGTRSQLQAAVTSLKNNGIQVYGDVVMNHKGGADATEMVRAVEVNPNNRNQEVTGEYTIEAWTRFDFPGRGNTHSSFKWRWYHFDGVDWDQSRRLNNRIYKFRGHGKAWDWEVDTENGNYDYLMYADIDMDHPEVVNELRNWGVWYTNTLGLDGFRIDAVKHIKYSFTRDWINHVRSATGKNMFAVAEFWKNDLGAIENYLQKTNWNHSVFDVPLHYNLYNASKSGGNYDMRNIFNGTVVQRHPSHAVTFVDNHDSQPEEALESFVEEWFKPLAYALTLTREQGYPSVFYGDYYGIPTHGVPAMRSKIDPILEARQKYAYGKQNDYLDHHNIIGWTREGNMAHPNSGLATIMSDGAGGSKWMFVGRNKAGQVWSDITGNRTGTVTINADGWGNFSVNGGSVSIWVNK

SEQ ID NO: 22691 - protein, 485 aa, Bacillus sp. 707
HHNGTNGTMMQYFEWYLPNDGNHWNRLNSDASNLKSKGITAVWIPPAWKGASQNDVGYGAYDLYDLGEFNQKGTVRTKYGTRSQLQAAVTSLKNNGIQVYGDVVMNHKGGADATEMVRAVEVNPNNRNQEVTGEYTIEAWTRFDFPGRGNTHSSFKWRWYHFDGVDWDQSRRLNNRIYKFRGHGKAWDWEVDTENGNYDYLMYADIDMDHPEVVNELRNWGVWYTNTLGLDGFRIDAVKHIKYSFTRDWINHVRSATGKNMFAVAEFWKNDLGAIENYLQKTNWNHSVFDVPLHYNLYNASKSGGNYDMRNIFGGTVVQRHPSHAVTFVDNHDSQPEEALESFVEEWFKPLAYALTLTREQGYPSVFYGDYYGIPTHGVPAMRSKIDPILEARQKYAYGKQNDYLDHHNIIGWTREGNTAHPNSGLATIMSDGAGGSKWMFVGRNKAGQVWSDITGNRTGTVTINADGWGNFSVNGGSVSIWVNK

SEQ ID NO: 22692 - protein, 485 aa, Bacillus sp. 707
HHNGTNGTMMQYFEWYLPNDGNHWNRLNSDASNLKSKGITAVWIPPAWKGASQNDVGYGAYDLYDLGEFNQKGTVRTKYGTRSQLQAAVTSLKNNGIQVYGDVVMNHKGGADATEMVRAVEVNPNNRNQEVTGEYTIEAWTRFDFPGRGNTHSSFKWRWYHFDGVDWDQSRRLNNRIYKFRGHGKAWDWEVDTENGNYDYLMYADIDMDHPEVVNELRNWGVWYTNTLGLDGFRIDAVKHIKYSFTRDWINHVRSATGKNMFAVAEFWKNDLGAIENYLQKTNWNLSVFDVPLHYNLYNASKSGGNYDMRNIFNGTVVQRHPSHAVTFVDNHDSQPEEALESFVEEWFKPLAYALTLTREQGYPSVFYGDYYGIPTHGVPAMRSKIDPILEARQKYAYGKQNDYLDHHNIIGWTREGNTAHPNSGLATIMSDGAGGSKWMFVGRNKAGQVWSDITGNRTGTVTINADGWGNFSVNGGSVSIWVNK

SEQ ID NO: 22693 - protein, 485 aa, Bacillus sp. 707
HHNGTNGTMMQYFEWYLPNDGNHWNRLNSDASNLKSKGITAVWIPPAWKGASQNDVGYGAYDLYDLGEFNQKGTVRTKYGTFSQLQAAVTSLKNNGIQVYGDVVMNHKGGADATEMVRAVEVNPNNRNQEVTGEYTIEAWTRFDFPGRGNTHSSFKWRWYHFDGVDWDQSRRLNNRIYKFRGHGKAWDWEVDTENGNYDYLMYADIDMDHPEVVNELRNWGVWYTNTLGLDGFRIDAVKHIKYSFTRDWINHVRSATGKNMFAVAEFWKNDLGAIENYLQKTNWNHSVFDVPLHYNLYNASKSGGNYDMRNIFNGTVVQRHPSHAVTFVDNHDSQPEEALESFVEEWFKPLAYALTLTREQGYPSVFYGDYYGIPTHGVPAMRSKIDPILEARQKYAYGKQNDYLDHHNIIGWTREGNTAHPNSGLATIMSDGAGGSKWMFVGRNKAGQVWSDITGNRTGTVTINADGWGNFSVNGGSVSIWVNK

SEQ ID NO: 22694 - protein, 485 aa, Bacillus sp. 707
HHNGTNRTMMQYFEWYLPNDGNHWNRLNSDASNLKSKGITAVWIPPAWKGASQNDVGYGAYDLYDLGEFNQKGTVRTKYGTRSQLQAAVTSLKNNGIQVYGDVVMNHKGGADATEMVRAVEVNPNNRNQEVTGEYTIEAWTRFDFPGRGNTHSSFKWRWYHFDGVDWDQSRRLNNRIYKFRGHGKAWDWEVDTENGNYDYLMYADIDMDHPEVVNELRNWGVWYTNTLGLDGFRIDAVKHIKYSFTRDWINHVRSATGKNMFAVAEFWKNDLGAIENYLQKTNWNHSVFDVPLHYNLYNASKSGGNYDMRNIFNGTVVQRHPSHAVTFVDNHDSQPEEALESFVEEWFKPLAYALTLTREQGYPSVFYGDYYGIPTHGVPAMRSKIDPILEARQKYAYGKQNDYLDHHNIIGWTREGNTAHPNSGLATIMSDGAGGSKWMFVGRNKAGQVWSDITGNRTGTVTINADGWGNFSVNGGSVSIWVNK

SEQ ID NO: 22695 - protein, 485 aa, Bacillus sp. 707
HHNGTNITMMQYFEWYLPNDGNHWNRLNSDASNLKSKGITAVWIPPAWKGASQNDVGYGAYDLYDLGEFNQKGTVRTKYGTRSQLQAAVTSLKNNGIQVYGDVVMNHKGGADATEMVRAVEVNPNNRNQEVTGEYTIEAWTRFDFPGRGNTHSSFKWRWYHFDGVDWDQSRRLNNRIYKFRGHGKAWDWEVDTENGNYDYLMYADIDMDHPEVVNELRNWGVWYTNTLGLDGFRIDAVKHIKYSFTRDWINHVRSATGKNMFAVAEFWKNDLGAIENYLQKTNWNHSVFDVPLHYNLYNASKSGGNYDMRNIFNGTVVQRHPSHAVTFVDNHDSQPEEALESFVEEWFKPLAYALTLTREQGYPSVFYGDYYGIPTHGVPAMRSKIDPILEARQKYAYGKQNDYLDHHNIIGWTREGNTAHPNSGLATIMSDGAGGSKWMFVGRNKAGQVWSDITGNRTGTVTINADGWGNFSVNGGSVSIWVNK

SEQ ID NO: 22696 - protein, 485 aa, Bacillus sp. 707
HHNGTNGTMMQYFEWYLPNDGNHWNRLNSDASNLKSKGITAVWIPPAWKGASQNDVGYGAYDLYDLGEFNQKGTVRTKYGTRSQLQAAVTSLKNNGIQVYGDVVMNHKGGADATEMVRAVEVNPNNRNQEVTGEYTIEAWTRFDFPGRGNTHSSFKWRWYHFDGVDWDQSRRLNNRIYKFRGHGKAWDWEVDTENGNYDYLMYADIDMDHPEVVNELRNWGVWYTNTLGLDGFRIDAVKHIKYSFTRDWINHVRSATGANMFAVAEFWKNDLGAIENYLQKTNWNHSVFDVPLHYNLYNASKSGGNYDMRNIFNGTVVQRHPSHAVTFVDNHDSQPEEALESFVEEWFKPLAYALTLTREQGYPSVFYGDYYGIPTHGVPAMRSKIDPILEARQKYAYGKQNDYLDHHNIIGWTREGNTAHPNSGLATIMSDGAGGSKWMFVGRNKAGQVWSDITGNRTGTVTINADGWGNFSVNGGSVSIWVNK

SEQ ID NO: 22697 - protein, 485 aa, Bacillus sp. 707
HHNGTNGTMMQYFEWYLPNDGNHWNRLNSDASNLKSKGITAVWIPPAWKGASQNDVGYGAYDLYDLGEFNQKGTVRTKYGTRSQLQAAVTSLKNNGIQVYGDVVMNHKGGADATEMVRAVEVNPNNRNQEVTGEYTIEAWTRFDFPGRGNTHSSFKWRWYHFDGVDWDQSRRLNNRIYKFRGHGKAWDWEVDTENGNYDYLMYADIDMDHPEVVNELRNWGVWYTNTLGLDGFRIDAVKHIKYSFTRDWINHVRSATGKNMFAVAEFWKNDLGAIENYLQKTNWNHSVFDVPLHYNLYNASKSGGNYDMRNIFNGTVVQRHPSHAVTFVDNHDSQPEEALESFVEEWFKPLAYALTLTREQGYPSVFYGDYYGIPTHGVPAMRSKIDPILEARQKYAYGKQNDYLDHHNIIGWTREGNTAHYNSGLATIMSDGAGGSKWMFVGRNKAGQVWSDITGNRTGTVTINADGWGNFSVNGGSVSIWVNK

SEQ ID NO: 22698 - protein, 485 aa, Bacillus sp. 707
HHNGTNGTMMQYFEWYLPNDGNHWNRLNSDASNLKSKGITAVWIPPAWKGASQNDVGYGAYDLYDLGEFNQKGTVRTKYGTRSQLQAAVTSLKNNGIQVYGDVVMNHKGGADATEMVRAVEVNPNNRNQEVTGEYTIEAWTRFDFPGRGNTHSSFKWRWYHFDGVDWDQSRRLNNRIYKFRGHGKAWDWEVDTENGNYDYLMYADIDMDHPEVVNELRNWGVWYTNTLGLDGFRIDAVKHIKYSFTRDWINHVRSATGKNMFAVAEFWKNDLGAIENYLQKTNWNHSVFDVPLHYNLYNASKSGGNYDMRNIFNGTVVQRHPSHAVTFVDNHDSQPEEALESFVEEWFKPLAYALTLTREQGYPSVFYGDYYGIPTHGVPAMRSKIDPILEARQKYAYGKQNDYLDHHNIIGWTREGNTAHVNSGLATIMSDGAGGSKWMFVGRNKAGQVWSDITGNRTGTVTINADGWGNFSVNGGSVSIWVNK

SEQ ID NO: 22699 - protein, 485 aa, Bacillus sp.
HHNGTNGTMMQYFEWYLPNDGNHWNRLNSDASNLKSKGITAVWIPPAWKGASQNDVGYGAYDLYDLGEFNQKGTVRTKYGTRSQLQAAVTSLKNNGIQVYGDVVMNHKGGADATEMVRAVEVNPNNRNQEVTGEYTIEAWTRFDFPGRGNTHSSFKWRWYHFDGVDWDQSRRLNNRIYKFRGHGKAWDWEVDTENGNYDYLMYADYDMDHPEVVNEIRNWGVWYTNTLGLDGFRIDAVKHIKYSFTRDWINHVRSATGKNMFAVAEFWKNDLGAIENYLQKTNWNHSVFDVPLHYNLYNASKSGGNYDMRNIFNGTVVQRHPSHAVTFVDNHDSQPEEALESFVEEWFKPLAYALTLTREQGYPSVFYGDYYGIPTHGVPAMRSKIDPILEARQKYAYGKQNDYLDHHNIIGWTREGNTAHPNSGLATIMSDGAGGSKWMFVGRNKAGQVWSDITGNRTGTVTINADGWGNFSVNGGSVSIWVNK

SEQ ID NO: 22700 - protein, 485 aa, Bacillus sp.
HHNGTNGTMMQYFEWYLPNDGNHWNRLRSDASNLKDKGISAVWIPPAWKGASQNDVGYGAYDLYDLGEFNQKGTIRTKYGTRNQLQAAVNALKSNGIQVYGDVVMNHKGGADATEMVRAVEVNPNNRNQEVSEEYTIEAWTKFDFPGRGNTHSNFKWRWYHFDGVDWDQSRKLNNRIYKFRGDGKGWDWEVDTENGNYDYLIYADIDMDHPEVVNELRNWGVWYTNTLGLDGFRIDAVKHIKYSFTRDWINHVRSATGKNMFAVAEFWKNDLGAIENYLNKTNWNHSVFDVPLHYNLYNASKSGGNYDMRQIFNGTVVQRHPMHAVTFVDNHDSQPEEALESFVEEWFKPLAYALTLTREEGYPSVFYGDYYGIPTHGVPAMKSKIDPILEARQKYAYGRQNDYLDHHNIIGWTREGNTAHPNSGLATIMSDGAGGNKWMFVGRNKAGQVWTDITGNRAGTVTINADGWGNFSVNGGSVSIWVNK

SEQ ID NO: 22701 - protein, 483 aa, Bacillus sp. SP70
HHNGTNGTMMQYFEWYLPNDGNHWNRLNSDASNLKSKGITAVWIPPAWKGASQNDVGYGAYDLYDLGEFNQKGTVRTKYGTRSQLQAAVTSLKNNGIQVYGDVVMNHKGGADATEMVRAVEVNPNNRNQEVTGEYTIEAWTRFDFPGRGNTHSSFKWRWYHFDGVDWDASRRLNNRIYKFRGKAWDWEVDTENGNYDYLMYADIDMDHPEVVNELRNWGVWYTNTLGLDGFRIDAVKHIKYSFTRDWINHVRSATGKNMFAVAEFWKNDLGAIENYLQKTNWNHSVFDVPLHYNLYNASKSGGNYDMRNIFNGTVVQRHPSHAVTFVDNHDSQPEEALESFVEEWFKPLAYALTLTREQGYPSVFYGDYYGIPTHGVPAMRSKIDPILEARQKYAYGKQNDYLDHHNIIGWTREGNTAHPNSGLATIMSDGAGGSKWMFVGRNKAGQVWSDITGNRTGTVTINADGWGNFSVNGGSVSIWVNK

SEQ ID NO: 22702 - protein, 485 aa, Bacillus sp. 707
HHNGTNGTMMQYFEWYLPNDGNHWNRLNSDASNLKSKGITAVWIPPAWKGASQNDVGYGAYDLYDLGEFNQKGTVRTKYGTRSQLQAAVTSLKNNGIQVYGDVVMNHKGGADATEMVRAVEVNPNNRNQEVTGEYTIEAWTRFDFPGRGNTHSSFKWRWYHFDGVDWDQSRRLNNRIYKFRGHGKAWDWEVDTENGNYDYLMYADIDMDHPEVVNELRNWGVWYTNTLGLDGFRIDAVKHIKYSFTRDWINHVRSATGKNMFAVAEFWKNDLGAIENYLQKTNWNHSVFDVPLHYNLYNASKSGGNYDMRNIFNGTVVQRHPSHAVTFVDNHDSQPEEALESFVEEWFKPLAYALTLTREQGYPSVFYGDYYGIPTHGVPAMRSKIDPILEARQKYAYGKQNDYLDHHNIIGWTREGNTAHMNSGLATIMSDGAGGSKWMFVGRNKAGQVWSDITGNRTGTVTINADGWGNFSVNGGSVSIWVNK

SEQ ID NO: 22703 - protein, 485 aa, Bacillus sp. 707
HHNGTNGTMMQYFEWYLPNDGNHWNRLNSDASNLKSKGITAVWIPPAWKGASQNDVGYGAYDLYDLGEFNQKGTVRTKYGTRSQLQAAVTSLKNNGIQVYGDVVMNHKGGADATEMVRAVEVNPNNRNQEVTGEYTIEAWTRFDFPGRGNTHSSFKWRWYHFDGVDWDQSRRLNNRIYKFRGHGKAWDWEVDTENGNYDYLMYADIDMDHPEVVNELRNWGVWYTNTLGLDGFRIDAVKHIKYSFTRDWINHVRSATGKNMFAVAEFWKNDLGAIENYLQKTNWNHSVFDVPLHYNLYNASKSGGNYDMRNIFNGTVVQRHPSHAVTFVDNHDSQPEEALESFVEEWFKPLAYALTLTREQGYPSVFYGDYYGIPTHGVPAMRSKIDPILEARQKYAYGKQNDYLDHHNIIGWTREGNTAHPNSGLATIMSDGAGGSKWMFVGRNKAGQVWSDITGNRTGTVTINPDGWGNFSVNGGSVSIWVNK

SEQ ID NO: 22704 - protein, 485 aa, Bacillus sp. 707
HHNGTNGTMMQYFEWYLPNDGNHWNRLNSDASNLKSKGITAVWIPPAWKGASQNDVGYGAYDLYDLGEFNQKGTVRTKYGTRSQLQAAVTSLKNNGIQVYGDVVMNHKGGADATEMVRAVEVNPNNRNQEVTTEYTIEAWTRFDFPGRGNTHSSFKWRWYHFDGVDWDQSRRLNNRIYKFRGHGKAWDWEVDTENGNYDYLMYADIDMDHPEVVNELRNWGVWYTNTLGLDGFRIDAVKHIKYSFTRDWINHVRSATGKNMFAVAEFWKNDLGAIENYLQKTNWNHSVFDVPLHYNLYNASKSGGNYDMRNIFNGTVVQRHPSHAVTFVDNHDSQPEEALESFVEEWFKPLAYALTLTREQGYPSVFYGDYYGIPTHGVPAMRSKIDPILEARQKYAYGKQNDYLDHHNIIGWTREGNTAHPNSGLATIMSDGAGGSKWMFVGRNKAGQVWSDITGNRTGTVTINADGWGNFSVNGGSVSIWVNK

SEQ ID NO: 22705 - protein, 485 aa, Bacillus sp. 707
HHNGTNGTMMQYFEWYLPNDGNHWNRLNSDASNLKSKGITAVWIPPAWKGASQNDVGYGAYDLYDLGEFNQKGTVRTKYGTRSELQAAVTSLKNNGIQVYGDVVMNHKGGADATEMVRAVEVNPNNRNQEVTGEYTIEAWTRFDFPGRGNTHSSFKWRWYHFDGVDWDQSRRLNNRIYKFRGHGKAWDWEVDTENGNYDYLMYADIDMDHPEVVNELRNWGVWYTNTLGLDGFRIDAVKHIKYSFTRDWINHVRSATGKNMFAVAEFWKNDLGAIENYLQKTNWNHSVFDVPLHYNLYNASKSGGNYDMRNIFNGTVVQRHPSHAVTFVDNHDSQPEEALESFVEEWFKPLAYALTLTREQGYPSVFYGDYYGIPTHGVPAMRSKIDPILEARQKYAYGKQNDYLDHHNIIGWTREGNTAHPNSGLATIMSDGAGGSKWMFVGRNKAGQVWSDITGNRTGTVTINADGWGNFSVNGGSVSIWVNK

SEQ ID NO: 22706 - protein, 485 aa, Bacillus sp. 707
HHNGTNGTMMQYFEWYLPNDGNHWNRLNSDASNLKSKGITAVWIPPAWKGASQNDVGYGAYDLYDLGEFNQKGTVRTKYGTRSQLQAAVTSLKNNGIQVYGDVVMNHKGGADITEMVRAVEVNPNNRNQEVTGEYTIEAWTRFDFPGRGNTHSSFKWRWYHFDGVDWDQSRRLNNRIYKFRGHGKAWDWEVDTENGNYDYLMYADIDMDHPEVVNELRNWGVWYTNTLGLDGFRIDAVKHIKYSFTRDWINHVRSATGKNMFAVAEFWKNDLGAIENYLQKTNWNHSVFDVPLHYNLYNASKSGGNYDMRNIFNGTVVQRHPSHAVTFVDNHDSQPEEALESFVEEWFKPLAYALTLTREQGYPSVFYGDYYGIPTHGVPAMRSKIDPILEARQKYAYGKQNDYLDHHNIIGWTREGNTAHPNSGLATIMSDGAGGSKWMFVGRNKAGQVWSDITGNRTGTVTINADGWGNFSVNGGSVSIWVNK

SEQ ID NO: 22707 - protein, 485 aa, Bacillus sp. 707
HHNGTNGTMMQYFEWYLPNDGNHWNRLNSDASNLKSKGITAVWIPPAWKGASQNDVGYGAYDLYDLGEFNQKGTVRTKYGTRSQLQAAVTSLKNNGIQVYGDVVMNHKGGADATEMVRAVEVNPNNRNQEVTGEYTIEAWTRFDFPGRPNTHSSFKWRWYHFDGVDWDQSRRLNNRIYKFRGHGKAWDWEVDTENGNYDYLMYADIDMDHPEVVNELRNWGVWYTNTLGLDGFRIDAVKHIKYSFTRDWINHVRSATGKNMFAVAEFWKNDLGAIENYLQKTNWNHSVFDVPLHYNLYNASKSGGNYDMRNIFNGTVVQRHPSHAVTFVDNHDSQPEEALESFVEEWFKPLAYALTLTREQGYPSVFYGDYYGIPTHGVPAMRSKIDPILEARQKYAYGKQNDYLDHHNIIGWTREGNTAHPNSGLATIMSDGAGGSKWMFVGRNKAGQVWSDITGNRTGTVTINADGWGNFSVNGGSVSIWVNK

SEQ ID NO: 22708 - protein, 485 aa, Bacillus sp. 707
HHNGTNGTMMQYFEWYLPNDGNHWNRLNSDASNLKSKGITAVWIPPAWKGASQNDVGYGAYDLYDLGEFNQKGTVRTKYGTRSQLQAAVTSLKNFGIQVYGDVVMNHKGGADATEMVRAVEVNPNNRNQEVTGEYTIEAWTRFDFPGRGNTHSSFKWRWYHFDGVDWDQSRRLNNRIYKFRGHGKAWDWEVDTENGNYDYLMYADIDMDHPEVVNELRNWGVWYTNTLGLDGFRIDAVKHIKYSFTRDWINHVRSATGKNMFAVAEFWKNDLGAIENYLQKTNWNHSVFDVPLHYNLYNASKSGGNYDMRNIFNGTVVQRHPSHAVTFVDNHDSQPEEALESFVEEWFKPLAYALTLTREQGYPSVFYGDYYGIPTHGVPAMRSKIDPILEARQKYAYGKQNDYLDHHNIIGWTREGNTAHPNSGLATIMSDGAGGSKWMFVGRNKAGQVWSDITGNRTGTVTINADGWGNFSVNGGSVSIWVNK

SEQ ID NO: 22709 - protein, 485 aa, Bacillus sp. 707
HHNGTNGTMMQYFEWYLPNDGNHWNRLNSDASNLKSKGITAVWIPPAWKGASQNDVGYGAYDLYDLGEFNQKGTVRTKYGTRSQLQAAVTSLKNNGIQVYGDVVMNHKGGADATEMVRAVEVNPNNRNQEVTGEYTIEAWTRFDFPGRGNTHSSFKWRWYHFDGVDWDQSRRLNNRIYKFRGHGKAWDWEVDTENGNYDYLMYADIDMDHPEVVNELRNWGVWYTNTLGLDGFRIDAVKHIKYSFTRDWINHVRSATGKNMFAVAEFWKNDLGAIENYLQKTNWNHSVFDVPLHYNLYNASKSGGNYDMRNIFNGTVVQRHPSHAVTFVDNHDSQPEEALESFVEEWFKPLAYALTLTREQGYPSVFYGDYYGIPTHGVPAMRSKIDPILEARQKYAYGKQNDYLDHHNIIGWTREGITAHPNSGLATIMSDGAGGSKWMFVGRNKAGQVWSDITGNRTGTVTINADGWGNFSVNGGSVSIWVNK

SEQ ID NO: 22710 - protein, 485 aa, Bacillus sp. 707
HHNGTNGTMMQYFEWYLPNDGNHWNRLNSDASNLKSKGITAVWIPPAWKGASQNDVGYGAYDLYDLGEFNQKGTVRTKYGTRSQLQAAVTSLKNNGIQVYGDVVMNHKGGADATEMVRAVEVNPNNRNQEVTGEYTIEAWTRFDFPGRGNTHSSFKWRWYHFDGVDWDQSRRLNNRIYKFRGHGKAWDWEVDTENGNYDYLMYADIDMDHPEVVNELRNWGVWYTNTLGLDGFRIDAVKHIKYSFTRDWINHVRSATGKNMFAVAEFWKNDLGAIENYLQKTNWNHSVFDVPLHYNLYNASKSGGNYDMRNIFNGTVVQRHPSHAVTFVDNHDSQPEEALESFVEEWFKPLAYALTLTRYQGYPSVFYGDYYGIPTHGVPAMRSKIDPILEARQKYAYGKQNDYLDHHNIIGWTREGNTAHPNSGLATIMSDGAGGSKWMFVGRNKAGQVWSDITGNRTGTVTINADGWGNFSVNGGSVSIWVNK

SEQ ID NO: 22711 - protein, 485 aa, Bacillus sp. 707
HHNGTNGTMMQYFEWYDPNDGNHWNRLNSDASNLKSKGITAVWIPPAWKGASQNDVGYGAYDLYDLGEFNQKGTVRTKYGTRSQLQAAVTSLKNNGIQVYGDVVMNHKGGADATEMVRAVEVNPNNRNQEVTGEYTIEAWTRFDFPGRGNTHSSFKWRWYHFDGVDWDQSRRLNNRIYKFRGHGKAWDWEVDTENGNYDYLMYADIDMDHPEVVNELRNWGVWYTNTLGLDGFRIDAVKHIKYSFTRDWINHVRSATGKNMFAVAEFWKNDLGAIENYLQKTNWNHSVFDVPLHYNLYNASKSGGNYDMRNIFNGTVVQRHPSHAVTFVDNHDSQPEEALESFVEEWFKPLAYALTLTREQGYPSVFYGDYYGIPTHGVPAMRSKIDPILEARQKYAYGKQNDYLDHHNIIGWTREGNTAHPNSGLATIMSDGAGGSKWMFVGRNKAGQVWSDITGNRTGTVTINADGWGNFSVNGGSVSIWVNK

SEQ ID NO: 22712 - protein, 485 aa, Bacillus sp. 707
HHNGTNGTMMQYFEWYLPNDGNHWNRLNSDASNLKSKGITAVWIPPAWKGASQNDVGYGAYDLYDLGEFNQKGTVRTKYGTRSQLQAAVTSLKNNGIQVYGDVVMNHKGGADATEMVRAVEVNPNNRNQEVTGEYTIEAWTRFDFPGRGNTHSSFKWRWYHFDGVDWDQSRRLNNRIYKFRGHGKAWDWEVDTENGNYDYLMYADIDMDHPEVVNELRNWGVWYTNTLGLDGFRIDAVKHIKYSFTRDWINHVRSATGKNMFAVAEFWKNDLGAIENYLQKTNWNHSVFDVPLHYNLYNASKSGGNYDMRNIFNGTVVQRHPSHAVTFVDNHDSQPEEALESFVEEWFKPLAYALTLTREQGYPSVFYGDYYGIPTHGVPAMRSKIDPILEARQKYAYGKQNDYLDHHNIIGWTREGNTAHPESGLATIMSDGAGGSKWMFVGRNKAGQVWSDITGNRTGTVTINADGWGNFSVNGGSVSIWVNK

SEQ ID NO: 22713 - protein, 485 aa, Bacillus sp. 707
HHNGTNGTMMQYFEWYLPNDGNHWNRLNSDASNLKSKGITAVWIPPAWKGASQNDVGYGAYDLYDLGEFNQKGTVRTKYGTRSQLQAAVTSLKNNGIQVYGDVVMNHKGGADATEMVRAVEVNPNNRNQEVTGEYTIEAWTRFDFPGRGNTHSSFKWRWYHFDGVDWDQSRRLNNRIYKFRGHGKAWDWEVDTENGNYDYLMYADIDMDHPEVVNELRNWGVWYTNTLGLDGFRIDAVKHIKYSFTRDWINHVRSATGKNMFAVAEFWKNDLGAIENYLQKTNWNHSVFDVPLHYNLYNASKSGGNYDMRNIFNGTVVQRHPSHAVTFVDNHDSQPEEALESFVEEWFKPLAYALTLTREQGYPSVFYGDYYGIPTHGVPAMRSKIDPILEARGKYAYGKQNDYLDHHNIIGWTREGNTAHPNSGLATIMSDGAGGSKWMFVGRNKAGQVWSDITGNRTGTVTINADGWGNFSVNGGSVSIWVNK

SEQ ID NO: 22714 - protein, 485 aa, Bacillus sp. 707
HHNGTNGTMMQYFEWYLPNDGNHWNRLNSDASNLKSKGITAVWIPPAWKGASQNDVGYGAYDLYDLGEFNQKGTVRTKYGTRSQLQAAVTSLKNNGIQVYGDVVMNHKGGADATEMVRAVEVNPNNRNQEVTGEYTIEAWTRFDFPGRDNTHSSFKWRWYHFDGVDWDQSRRLNNRIYKFRGHGKAWDWEVDTENGNYDYLMYADIDMDHPEVVNELRNWGVWYTNTLGLDGFRIDAVKHIKYSFTRDWINHVRSATGKNMFAVAEFWKNDLGAIENYLQKTNWNHSVFDVPLHYNLYNASKSGGNYDMRNIFNGTVVQRHPSHAVTFVDNHDSQPEEALESFVEEWFKPLAYALTLTREQGYPSVFYGDYYGIPTHGVPAMRSKIDPILEARQKYAYGKQNDYLDHHNIIGWTREGNTAHPNSGLATIMSDGAGGSKWMFVGRNKAGQVWSDITGNRTGTVTINADGWGNFSVNGGSVSIWVNK

SEQ ID NO: 22715 - protein, 485 aa, Bacillus sp. 707
HHNGTNGTMMQYFEWYLPNDGNHWNRLNSDASNLKSKGITAVWIPPAWKGASQNDVGYGAYDLYDLGEFNQKGTVRTKYGTRSQLQAAVTSLKNNGIGVYGDVVMNHKGGADATEMVRAVEVNPNNRNQEVTGEYTIEAWTRFDFPGRGNTHSSFKWRWYHFDGVDWDQSRRLNNRIYKFRGHGKAWDWEVDTENGNYDYLMYADIDMDHPEVVNELRNWGVWYTNTLGLDGFRIDAVKHIKYSFTRDWINHVRSATGKNMFAVAEFWKNDLGAIENYLQKTNWNHSVFDVPLHYNLYNASKSGGNYDMRNIFNGTVVQRHPSHAVTFVDNHDSQPEEALESFVEEWFKPLAYALTLTREQGYPSVFYGDYYGIPTHGVPAMRSKIDPILEARQKYAYGKQNDYLDHHNIIGWTREGNTAHPNSGLATIMSDGAGGSKWMFVGRNKAGQVWSDITGNRTGTVTINADGWGNFSVNGGSVSIWVNK

SEQ ID NO: 22716 - protein, 485 aa, Bacillus sp. 707
HHNGTNGTMMQYFEWYLPNDGNHWNRLNSDASNLKSKGITAVWIPPAWKGASQNDVGYGAYDLYDLGEFNQKGTVRTKYGTRSQLQAAVTSLKNNGIQVYGDVVMNHKGGADATEMVRAVEVNPNNRNQEVTGEYTIEAWTRFDFPGRGNTHSSFKWRWYHFDGVDWDQSRRLNNRIYKFRGHGKAWDWEVDTENGNYDYLMYADIDMDHPEVVNELRNWGVWYTNTLGLDGFRIDAVKHIKYSFTRDWINHVRSATGKNMLAVAEFWKNDLGAIENYLQKTNWNHSVFDVPLHYNLYNASKSGGNYDMRNIFNGTVVQRHPSHAVTFVDNHDSQPEEALESFVEEWFKPLAYALTLTREQGYPSVFYGDYYGIPTHGVPAMRSKIDPILEARQKYAYGKQNDYLDHHNIIGWTREGNTAHPNSGLATIMSDGAGGSKWMFVGRNKAGQVWSDITGNRTGTVTINADGWGNFSVNGGSVSIWVNK

SEQ ID NO: 22717 - protein, 485 aa, Bacillus sp. 707
HHNGTNGTMMQYFEWYLPNDGNHWNRLNSDASNLKSKGITAVWIPPAWKGASQNDVGYGAYDLYDLGEFNQKGTVRTKYGTRSQLQAAVTSLKNNGIQVYGDVVMNHKGGADATEMVRAVEVNPRNRNQEVTGEYTIEAWTRFDFPGRGNTHSSFKWRWYHFDGVDWDQSRRLNNRIYKFRGHGKAWDWEVDTENGNYDYLMYADIDMDHPEVVNELRNWGVWYTNTLGLDGFRIDAVKHIKYSFTRDWINHVRSATGKNMFAVAEFWKNDLGAIENYLQKTNWNHSVFDVPLHYNLYNASKSGGNYDMRNIFNGTVVQRHPSHAVTFVDNHDSQPEEALESFVEEWFKPLAYALTLTREQGYPSVFYGDYYGIPTHGVPAMRSKIDPILEARQKYAYGKQNDYLDHHNIIGWTREGNTAHPNSGLATIMSDGAGGSKWMFVGRNKAGQVWSDITGNRTGTVTINADGWGNFSVNGGSVSIWVNK

SEQ ID NO: 22718 - protein, 485 aa, Bacillus sp. 707
HHNGTNGTMMQYFEWYLPNDGNHWNRLNSDASNLKSKGITAVWIPPAWKGASQNDVGYGAYDLYDLGEFNQKGTVRTKYGTRSQLQAAVTSLKNNGIQVYGDVVMNHKGGADATEMVRAVEVNPNNRNQEVTGEYTIEAWTRFDFPGRGNTHSSFKWRWYHFDGVDWDQSRRLNNRIYKFRGHGKAWDWEVDTENGNYDYLMYADIDMDHPEVVNELRNWGVWYTNTLGLDGFRIDAVKHIKYSFTRDWINHVRSATGKNMFAVAEFWKNDLGAIENYLQKTNWNHSVFDVPLHYNLYNASKSGGNYDMRNIFNGTVVQRHPSHAVTFVDNHDSQPEEALESFVEEWFKPLAYALTLTREQGYPSVFYGDYYGIPTHGVPAMRSKIDPILEARQKYAYGKQNDYLDHHNIIGWTREGNTAHPNSGLATIMSDGAGGSKWMFVGRNKAGQSWSDITGNRTGTVTINADGWGNFSVNGGSVSIWVNK

SEQ ID NO: 22719 - protein, 485 aa, Bacillus sp. 707
HHNGTNGTMMQYFEWYLPNEGNHWNRLNSDASNLKSKGITAVWIPPAWKGASQNDVGYGAYDLYDLGEFNQKGTVRTKYGTRSQLQAAVTSLKNNGIQVYGDVVMNHKGGADATEMVRAVEVNPNNRNQEVTGEYTIEAWTRFDFPGRGNTHSSFKWRWYHFDGVDWDQSRRLNNRIYKFRGHGKAWDWEVDTENGNYDYLMYADIDMDHPEVVNELRNWGVWYTNTLGLDGFRIDAVKHIKYSFTRDWINHVRSATGKNMFAVAEFWKNDLGAIENYLQKTNWNHSVFDVPLHYNLYNASKSGGNYDMRNIFNGTVVQRHPSHAVTFVDNHDSQPEEALESFVEEWFKPLAYALTLTREQGYPSVFYGDYYGIPTHGVPAMRSKIDPILEARQKYAYGKQNDYLDHHNIIGWTREGNTAHPNSGLATIMSDGAGGSKWMFVGRNKAGQVWSDITGNRTGTVTINADGWGNFSVNGGSVSIWVNK

SEQ ID NO: 22720 - protein, 485 aa, Bacillus sp. 707
HHNGTNGTMMQYFEWYLPNDGNHWNRLNSDASNLKSKGITAVWIPPAWKGASQNDVGYGAYDLYDLGEFNQKGTVRTKYGTRSQLQAAVTSLKNNGIQVYGDVVMNHKGGADATEMVRAVEVNPNNRNQEVTGEYTIEAWTRFDFPGRGNTHSSFKWRWYHFDGVDWDQSRRLNNRIYKFLGHGKAWDWEVDTENGNYDYLMYADIDMDHPEVVNELRNWGVWYTNTLGLDGFRIDAVKHIKYSFTRDWINHVRSATGKNMFAVAEFWKNDLGAIENYLQKTNWNHSVFDVPLHYNLYNASKSGGNYDMRNIFNGTVVQRHPSHAVTFVDNHDSQPEEALESFVEEWFKPLAYALTLTREQGYPSVFYGDYYGIPTHGVPAMRSKIDPILEARQKYAYGKQNDYLDHHNIIGWTREGNTAHPNSGLATIMSDGAGGSKWMFVGRNKAGQVWSDITGNRTGTVTINADGWGNFSVNGGSVSIWVNK

SEQ ID NO: 22721 - protein, 485 aa, Bacillus sp. 707
HHNGTNGTMMQYFEWYLPNDGNHWNRLNSDASNLKSKGITAVWIPPAWKGASQNDVGYGAYDLYDLGEFNQKGTVRTKYGTRSQLQAAVTSLKNNGIQVYGDVVMNHKGGADATEMVRAVEVNPNNRNQEVTGEYTIEAWTRFDFPGRGNTHSSFKWRWYHFDGVDWDQSRRLNNRIYKFRGHGKAWDWEVDTENGNYDYLMYADIDMDHPEVVNELRNWGVWYTNTLGLDGFRIDAVKHIKYSFTRDWINHVRSATGKNMFAVAEFWKNDLGAIENYLQKTNWNHSVFDVPLHYNLYNASKSGGNYDMRNIFNGTVVQRHPSHAVTFVDNHDSQPEEALESFVEDWFKPLAYALTLTREQGYPSVFYGDYYGIPTHGVPAMRSKIDPILEARQKYAYGKQNDYLDHHNIIGWTREGNTAHPNSGLATIMSDGAGGSKWMFVGRNKAGQVWSDITGNRTGTVTINADGWGNFSVNGGSVSIWVNK

SEQ ID NO: 22722 - protein, 485 aa, Bacillus sp. 707
HHNGTNGTMMQYFEWYLPNDGNHWNRLNSDAENLKSKGITAVWIPPAWKGASQNDVGYGAYDLYDLGEFNQKGTVRTKYGTRSQLQAAVTSLKNNGIQVYGDVVMNHKGGADATEMVRAVEVNPNNRNQEVTGEYTIEAWTRFDFPGRGNTHSSFKWRWYHFDGVDWDQSRRLNNRIYKFRGHGKAWDWEVDTENGNYDYLMYADIDMDHPEVVNELRNWGVWYTNTLGLDGFRIDAVKHIKYSFTRDWINHVRSATGKNMFAVAEFWKNDLGAIENYLQKTNWNHSVFDVPLHYNLYNASKSGGNYDMRNIFNGTVVQRHPSHAVTFVDNHDSQPEEALESFVEEWFKPLAYALTLTREQGYPSVFYGDYYGIPTHGVPAMRSKIDPILEARQKYAYGKQNDYLDHHNIIGWTREGNTAHPNSGLATIMSDGAGGSKWMFVGRNKAGQVWSDITGNRTGTVTINADGWGNFSVNGGSVSIWVNK

SEQ ID NO: 22723 - protein, 485 aa, Bacillus sp. 707
HHNGTNGTMMQYFEWYLPNDGNHWNRLNSDASNLKSKGITAVWIPPAWKGASQNDVGYGAYDLYDLGEFNQKGTVRTKYGTRSQLQAAVTSLKNNGIEVYGDVVMNHKGGADATEMVRAVEVNPNNRNQEVTGEYTIEAWTRFDFPGRGNTHSSFKWRWYHFDGVDWDQSRRLNNRIYKFRGHGKAWDWEVDTENGNYDYLMYADIDMDHPEVVNELRNWGVWYTNTLGLDGFRIDAVKHIKYSFTRDWINHVRSATGKNMFAVAEFWKNDLGAIENYLQKTNWNHSVFDVPLHYNLYNASKSGGNYDMRNIFNGTVVQRHPSHAVTFVDNHDSQPEEALESFVEEWFKPLAYALTLTREQGYPSVFYGDYYGIPTHGVPAMRSKIDPILEARQKYAYGKQNDYLDHHNIIGWTREGNTAHPNSGLATIMSDGAGGSKWMFVGRNKAGQVWSDITGNRTGTVTINADGWGNFSVNGGSVSIWVNK

SEQ ID NO: 22724 - protein, 485 aa, Bacillus subtilis
HHNGTNGTMMQYFEWYLPNDGNHWNRLRSDASNLKDKGISAVWIPPAWKGASQNDVGYGAYDLYDLGEFNQKGTIRTKYGTRNQLQAAVNALKSNGIQVYGDVVMNHKGGADATEMVRAVEVNPNNRNQEVSGEYTIEAWTKFDFPGRGNTHSNFKWRWYHFDGVDWDQSRKLNNRIYKFRGDGKGWDWEVDTENGNYDYLMYADIDMDHPEVVNELRNWGVWYTNTLGLDGFRIDAAKHIKYSFTRDWINHVRSATGKNMFAVAEFWKNDLGAIENYLNKTNWNHSVFDVPLHYNLYNASKSGGNYDMRQIFNGTVVQRHPMHAVTFVDNHDTQPEEALESFVEEWFKPLAYALTLTREQGYPSVFYGDYYGIPTHGVPAMKSKIDPILEARQKYAYGRQNDYLDHHNIIGWTREGNTAHPNSGLATIMSDGAGGNKWMFVGRNKAGQVWTDITGNRAGTVTINADGWGNFSVNGGSVSIYVNK

SEQ ID NO: 22725 - protein, 485 aa, Bacillus sp. 707
HHNGTNGTMMQYFEWYLPNDGNHWNRLNSDASNLKSKGITAVWIPPAWKGASQNDVGYGAYDLYDLGEFNQKGTVRTKYGTRSQLQAAVTSLKNNGIQVYGDVVMNHKGGADATEMVRAVEVNPNNRNQEVTGEYTIEAWTRFDFPGRGNTHSSFKWRWYHFDGVDWDQSRRLNNRIYKFRGHGKAWDWEVDTENGNYDYLMYADIDMDHPEVVNELRNWGVWYTNTLGLDGFRIDAVKHIKYSFTRDWINHVRSATGKNMFAVAEFWKNDLGAIENYLQKTNWNHSVFDVPLHYNLYNASKSGGNYDMRNIFNGTVVQRHPSHAVTFVDNHDSQPEEALESFVEEWFKPLAYALTLTREQGYPSVFYGDYYGIPTHGVPAMRSKIDPILEARQKYAYGKQNDYLDHHNIIGWTREGNTAHPNSGLATIMSDDAGGSKWMFVGRNKAGQVWSDITGNRTGTVTINADGWGNFSVNGGSVSIWVNK

SEQ ID NO: 22726 - protein, 485 aa, Bacillus sp. 707
HHNGTNGTMMQYFEWYLPNDGNHWNRLNSDASNLKSKGITAVWIPPAWKGASQNDVGYGAYDLYDLGEFNQKGTVRTKYGTRSQLQAAVTSLKNNGIQVYGDVVMNHKGGADATEMVRAVEVNPNNRNQEVTGEYTIEAWTRFDFPGRGNTHSSFKWRWYHFDGVDWDQSRRLNNRIYKFRGHGKAWDWEVDTENGNYDYLMYADIDMDHPEVVNELRNWGVWYTNTLGLDGFRIDAVKHIKYSFTRDWINHVRSATSKNMFAVAEFWKNDLGAIENYLQKTNWNHSVFDVPLHYNLYNASKSGGNYDMRNIFNGTVVQRHPSHAVTFVDNHDSQPEEALESFVEEWFKPLAYALTLTREQGYPSVFYGDYYGIPTHGVPAMRSKIDPILEARQKYAYGKQNDYLDHHNIIGWTREGNTAHPNSGLATIMSDGAGGSKWMFVGRNKAGQVWSDITGNRTGTVTINADGWGNFSVNGGSVSIWVNK

SEQ ID NO: 22727 - protein, 485 aa, Bacillus sp. 707
HHNGTNGTMMQYFEWYLPNDGNHWNRLNSDASNLKSKGITAVWIPPAWKGASQNDVGYGAYDLYDLGEFNQKGTVRTKYGTRSQLQAAVTSLKNNGIQVYGDVVMNHKGGADATEMVRAVEVNPNNRNQEVTGEYTIEAWTRFDFPGRGNTHSSFKWRWYHFDGVDWDQSRRLNNRIYKFRGHGKAWDWEVDTENGNYDYLMYADIDMDHPEVVNELRNWGVWYTNTLGLDGFRIDAVKHIKYSFTRDWINHVRSATGENMFAVAEFWKNDLGAIENYLQKTNWNHSVFDVPLHYNLYNASKSGGNYDMRNIFNGTVVQRHPSHAVTFVDNHDSQPEEALESFVEEWFKPLAYALTLTREQGYPSVFYGDYYGIPTHGVPAMRSKIDPILEARQKYAYGKQNDYLDHHNIIGWTREGNTAHPNSGLATIMSDGAGGSKWMFVGRNKAGQVWSDITGNRTGTVTINADGWGNFSVNGGSVSIWVNK

SEQ ID NO: 22728 - protein, 485 aa, Bacillus sp. 707
HHNGTNGTMMQYFEWYLPNDGNHWNRLNSDASNLKSKGITAVWIPPAWKGASQNDVGYGAYDLYDLGEFNQKGTVRTKYGTRSQLQAAVTSLKNNGIQVYGDVVMNHKGGADATEMVRAVEVNPNNRNQEVTGEYTIEAWTRFDFPGRGNTHSSFKWRWYHFDGVDWDQSRRLNNRIYKFRGHGKAWDWEVDTENGNYDYLMYADIDMDHPEVVNELRNWGVWYTNTLGLDGFRIDAVKHIKYSFTRDWINHVRSATGKNMFAVAEFWKNDLGAIENYLQKTNWNHSVFDVPLHYNLYNASKSGGNYDMRNIFNGTVVQRHPSHAVTFVDNHDSQPEEALESFVEEWFKPLAYALTLTREQGYPSVFYGDYYGIPTHGVPAMRSKIDPILEARQKYAYGKQNDYLDHHNIIGWTREGNTAHPNSGLATIMSDKAGGSKWMFVGRNKAGQVWSDITGNRTGTVTINADGWGNFSVNGGSVSIWVNK

SEQ ID NO: 22729 - protein, 485 aa, Bacillus sp.
HHNGTNGTMMQYFEWYLPNDGNHWNRLNSDASNLKSKGITAVWIPPAWKGASQNDVGYGAYDLYDLGEFNQKGTVRTKYGTRSQLQAAVTSLKNNGIQVYGDVVMNHKGGADATEMVRAVEVNPNNRNQEVTGEYTIEAWTRFDFPGRGNTHSSFKWRWYHFDGVDWDQSRRLNNRIYKFRGHGKAWDWEVDTENGNYDYLMYADYDMDHPEVVNEMRNWGVWYTNTLGLDGFRIDAVKHIKYSFTRDWINHVRSATGKNMFAVAEFWKNDLGAIENYLQKTNWNHSVFDVPLHYNLYNASKSGGNYDMRNIFNGTVVQRHPSHAVTFVDNHDSQPEEALESFVEEWFKPLAYALTLTREQGYPSVFYGDYYGIPTHGVPAMRSKIDPILEARQKYAYGKQNDYLDHHNIIGWTREGNTAHPNSGLATIMSDGAGGSKWMFVGRNKAGQVWSDITGNRTGTVTINADGWGNFSVNGGSVSIWVNK

SEQ ID NO: 22730 - protein, 483 aa, Bacillus sp.
HHNGTNGTLMQYFEWYLPNDGNHWNRLRSDASNLKDKGISAVWIPPAWKGASQNDVGYGAYDLYDLGEFNQKGTIRTKYGTRNQLQAAVNALKSNGIQVYGDVVMNHKGGADATEMVKAVEVNPNNRNQEVSGEYTIEAWTKFDFPGRANTHSNFKWRWYHFDGVDWDQSRKLQNRIYKFRTKAWDWEVDTEFGNYDYLMYADIDMDHPEVVNELRNWGVWYTNTLGLDGFRIDAVKHIKYSFTRDWINHVRSAIGKNMFAVAEFWKNDLGAIENYLNKTNWNHSVFDVPLHFNLYYASKSGGNYDMRQIFNGTVVQKHPTHAVTFVDNHDSQPEESLESFVREWFKPLAYALTLTREQGYPSVFYGDYYGIPTHGVPAMKSKIDPILEARQKYAYGRQNDYLDHHNIIGWTREGNTAHPNSGLATIMSDGAGGNKWMFVGRNKAGQVWTDITGNKAGTVTINADGWGNFSVNGGSVSIWVNK

SEQ ID NO: 22731 - protein, 485 aa, Bacillus sp. 707
HHNGTNGTMMQYFEWYLPNDGNHWNRLNSDASNLKSKGITAVWIPPAWKGASQNDVGYGAYDLYDLGEFNQKGTVRTKYGTQSQLQAAVTSLKNNGIQVYGDVVMNHKGGADATEMVRAVEVNPNNRNQEVTGEYTIEAWTRFDFPGRGNTHSSFKWRWYHFDGVDWDQSRRLNNRIYKFRGHGKAWDWEVDTENGNYDYLMYADIDMDHPEVVNELRNWGVWYTNTLGLDGFRIDAVKHIKYSFTRDWINHVRSATGKNMFAVAEFWKNDLGAIENYLQKTNWNHSVFDVPLHYNLYNASKSGGNYDMRNIFNGTVVQRHPSHAVTFVDNHDSQPEEALESFVEEWFKPLAYALTLTREQGYPSVFYGDYYGIPTHGVPAMRSKIDPILEARQKYAYGKQNDYLDHHNIIGWTREGNTAHPNSGLATIMSDGAGGSKWMFVGRNKAGQVWSDITGNRTGTVTINADGWGNFSVNGGSVSIWVNK

SEQ ID NO: 22732 - protein, 485 aa, Bacillus sp. 707
HHNGTNGTMMQYFEWYLPNDGNHWNRLNSDASNLKSKGITAVWIPPAWKGASQNDVGYGAYDLYDLGEFNQKGTVRTKYGTRSQLQAAVTSLKNNGIQVYGDVVMNHKGGADATEMVRAVEVNPNNRNQEVTGEYTIEAWTRFDFPGRGNTHSSFKWRWYHFDGVDWDQSRRLNNRIYKFRGHGKAWDWEVDTENGNYDYLMYADIDMDHPEVVNELRNWGVWYTNTLGLDGFRIDAVKHIKYSFTRDWINHVRSATGKNMFAVAEFWKNDLGAIENYLQKTNWNHSVFDVPLHYNLYNASKSGGNYDMRNIFNGTVVQRHPSHAVTFVDNHDSQPEEALESFVEEWFKPLAYALTLTREQGYPSVFYGDYYGIPTHGYPAMRSKIDPILEARQKYAYGKQNDYLDHHNIIGWTREGNTAHPNSGLATIMSDGAGGSKWMFVGRNKAGQVWSDITGNRTGTVTINADGWGNFSVNGGSVSIWVNK

SEQ ID NO: 22733 - protein, 485 aa, Bacillus sp. 707
HHNGTNGTMMQYFEWYLPNDGNHWCRLNSDASNLKSKGITAVWIPPAWKGASQNDVGYGAYDLYDLGEFNQKGTVRTKYGTRSQLQAAVTSLKNNGIQVYGDVVMNHKGGADATEMVRAVEVNPNNRNQEVTGEYTIEAWTRFDFPGRGNTHSSFKWRWYHFDGVDWDQSRRLNNRIYKFRGHGKAWDWEVDTENGNYDYLMYADIDMDHPEVVNELRNWGVWYTNTLGLDGFRIDAVKHIKYSFTRDWINHVRSATGKNMFAVAEFWKNDLGAIENYLQKTNWNHSVFDVPLHYNLYNASKSGGNYDMRNIFNGTVVQRHPSHAVTFVDNHDSQPEEALESFVEEWFKPLAYALTLTREQGYPSVFYGDYYGIPTHGVPAMRSKIDPILEARQKYAYGKQNDYLDHHNIIGWTREGNTAHPNSGLATIMSDGAGGSKWMFVGRNKAGQVWSDITGNRTGTVTINADGWGNFSVNGGSVSIWVNK

SEQ ID NO: 22734 - protein, 485 aa, Bacillus sp. 707
HHNGTNGTMMQYFEWYLPNDGNHWNRLNSDASNLKSKGITAVWIPPAWKGASQNDVGYGAYDLYDLGEFNQKGTVRTKYGTRSQLQAAVTSLKNNGIQVYGDVVMNHKGGADATEMVRAVEVNPNNRNQEVTGEYTIEAWTRFDFPGRGNTHSSFKWRWYHFDGVDWDQSRRLNNRIYKFRGHGKAWDWEVDTENGNYDYLMYADIDMDHPEVVNELRNWGVWYTNTLGLDGFRIDAVKHIKYSFTRDWINHVRSATGKNMSAVAEFWKNDLGAIENYLQKTNWNHSVFDVPLHYNLYNASKSGGNYDMRNIFNGTVVQRHPSHAVTFVDNHDSQPEEALESFVEEWFKPLAYALTLTREQGYPSVFYGDYYGIPTHGVPAMRSKIDPILEARQKYAYGKQNDYLDHHNIIGWTREGNTAHPNSGLATIMSDGAGGSKWMFVGRNKAGQVWSDITGNRTGTVTINADGWGNFSVNGGSVSIWVNK

SEQ ID NO: 22735 - protein, 485 aa, Bacillus sp. 707
HHNGTNGTMMQYFEWYLPNDGNHWNRLNSDASNLKSKGITAVWIPPAWKGASQNDVGYGAYDLYDLGEFNQKGTVRTKYGTRSQLQAAVTSLKNNGIQVYGDVVMNHKGGADATEMVRAVEVNPNNRNQEVTGEYTIEAWTRFDFPGRGNTHSSFKWRWYHFDGVDWDQSRRLNNRIYKFRGHGKAWDWEVDTENGNYDYLMYADIDMDHPEVVNELRNWGVWYTNTLGLDGFRIDAVKHIKYSFTRDWINHVRSATGKNMFAVAEFWKNDLGAIENYLQKTNWNHSVFDVPLHYNLYNASKSGGNYDMRNIFNGTVVQRHPSHAVTFVDNHDSQPEEALESFVEEWFKPLAYALTLTREQGYPSVFYGDYYGIPTHGVPAMRSKIDPILEARQKYAYGKQNDYLDHHNIIGWTREGNTAHPNSGLATIMSDGAGGSKWMFVGREKAGQVWSDITGNRTGTVTINADGWGNFSVNGGSVSIWVNK

SEQ ID NO: 22736 - protein, 485 aa, Bacillus subtilis
HHNGTNGTMMQYFEWYLPNDGNHWNRLRSDASNLKDKGISAVWIPPAWKGASQNDVGYGAYDLYDLGEFNQKGTIRTKYGTRNQLQAAVNALKSNGIQVYGDVVMNHKGGADATEMVRAVEVNPNNRNQEVSGEYTIEAWTKFDFPGRGNTHSNFKWRWYHFDGVDWDQSRKLNNRIYKFRGDGKGWDWEVDTENGNYDYLMYADIDMDHPEVVNELRNWGVWYTNTLGLDGFRIDAVKHIKYSFTRDWINHVRSATGKNMFAVAEFWSGDLGKIENYLNKTNWNHSVFDVPLHYNLYNASKSGGNYDMRQIFNGTVVQRHPMHAVTFVDNHDSQPEEALESFVEEWFKPLAYALTLTREQGYPSVFYGDYYGIPTHGVPAMKSKIDPILEARQKYAYGRQNDYLDHHNIIGWTREGNTAHPNSGLATIMSDGAGGNKWMFVGRNKAGQVWTDITGNRAGTVTINADGWGNFSVNGGSVSIWVNK

SEQ ID NO: 22737 - protein, 485 aa, Bacillus sp. 707
HHNGTNGTMMQYFEWYLPNDGNHWNRLNSDASNLKSKGITAVWIPPAWKGASQNDVGYGAYDLYDLGEFNQKGTVRTKYGTRSQLQAAVTSLKNNGIQVYGDVVMNHKGGADATEMVRAVEVNPNNRNQEVTGEYTIEAWTRFDFPGRGNTHSSFKWRWYHFDGVDWDQSRRLNNRIYKFRGHGKAWDWEVDTENGNYDYLMYADIDMDHPEVVNEQRNWGVWYTNTLGLDGFRIDAVKHIKYSFTRDWINHVRSATGKNMFAVAEFWKNDLGAIENYLQKTNWNHSVFDVPLHYNLYNASKSGGNYDMRNIFNGTVVQRHPSHAVTFVDNHDSQPEEALESFVEEWFKPLAYALTLTREQGYPSVFYGDYYGIPTHGVPAMRSKIDPILEARQKYAYGKQNDYLDHHNIIGWTREGNTAHPNSGLATIMSDGAGGSKWMFVGRNKAGQVWSDITGNRTGTVTINADGWGNFSVNGGSVSIWVNK

SEQ ID NO: 22738 - protein, 485 aa, Bacillus sp. 707
HHNGTNGTMMQYFEWYLPNDGNHWNRLNSDASNLKSKGITAVWIPPAWKGASQNDVGYGAYDLYDLGEFNQKGTVRTKYGTRSQLQAAVTSLKNNGIQVYGDVVMNHKGGADATEMVRAVEVNPNNRNQEVTGEYTIEAWTRFDFPGRGNTHSSFKWRWYHFDGVDWDQSRRLNNRIYKFRGHGKAWDWEVDTENGNYDYLMYADIDMDHPEVVNELRNWGVWYTNTLGLDGFRIDAVKHIKYSFTRDWINHVRSATGKNMFAVAEFWKNDLSAIENYLQKTNWNHSVFDVPLHYNLYNASKSGGNYDMRNIFNGTVVQRHPSHAVTFVDNHDSQPEEALESFVEEWFKPLAYALTLTREQGYPSVFYGDYYGIPTHGVPAMRSKIDPILEARQKYAYGKQNDYLDHHNIIGWTREGNTAHPNSGLATIMSDGAGGSKWMFVGRNKAGQVWSDITGNRTGTVTINADGWGNFSVNGGSVSIWVNK

SEQ ID NO: 22739 - protein, 485 aa, Bacillus sp. 707
HHNGTNGTMMQYFEWYLPNDGNHWNRLNSDASNLKSKGITAVWIPPAWKGASQNDVGYGAYDLYDLGEFNQKGTVRTKYGTRSQLQAAVTSLKNNGIQVYGDVVMNHKGGADATEMVRAVEVNPNNRNQEVTGEYTIEAWTRFDFPGRGNTHSSFKWRWYHFDGVDWDQSRRLNNRIYKFRGHGKAWDWEVDTENGNYDYLMYADIDMDHPEVVNELRNWGVWYTNTLGLDGFRIDAVKHIKYSFTRDWINHVRSATGKNMFAVAEFWKNDLGAIENYLQKTNWNHSVFDVPLHYNLYNASKSGGNYDMRNIFNGTVVQRHPSHAVTFVDNHDSQPEEALESFVEEWFKPLAYALTLTREQGYPSVFYGDYYGIPTHGVPAMRSKIDPELEARQKYAYGKQNDYLDHHNIIGWTREGNTAHPNSGLATIMSDGAGGSKWMFVGRNKAGQVWSDITGNRTGTVTINADGWGNFSVNGGSVSIWVNK

SEQ ID NO: 22740 - protein, 485 aa, Bacillus sp. 707
HHNGTNGTMMQYFEWYLPNDGNHWNRLNSDASNLKSKGITAVWIPPAWKGASQNDVGYGAYDLYDLGEFNQKGTVRTKYGTRSQLQAAVTSLKNNGIQVYGDVVMNHKGGADATEMVRAVEVNPNNRNQEVTGEYTIEAWTRFDFPGRGNTHSSFKWRWYHFDGVDWDQSRRLNNRIYKFRGHGKAWDWEVDTENGNYDYLMYADIDMDHPEVVNELRNWGVWYTNTLGLDGFRIDAVKHIKYSFTRDWINHVRSATGKNMFAVAEFWKNDLGAIENYLQKTNWNHSVFDVPLHYNLYNASKSGGNYDMRNIFNGTVVQRHPSHAVTFVDNHDSQPEEALESFVEEWFKPLAYALTLTREQGYPSVFYGDYYGIPTHGVPAMRSKIDPILEARQKYAYGKQNDYLDHHNIIGWTREGNTAHPNSGLATIMSDGAGGSKWMFVGRKKAGQVWSDITGNRTGTVTINADGWGNFSVNGGSVSIWVNK

SEQ ID NO: 22741 - protein, 485 aa, Bacillus sp. 707
HHQGTNGTMMQYFEWYLPNDGNHWNRLNSDASNLKSKGITAVWIPPAWKGASQNDVGYGAYDLYDLGEFNQKGTVRTKYGTRSQLQAAVTSLKNNGIQVYGDVVMNHKGGADATEMVRAVEVNPNNRNQEVTGEYTIEAWTRFDFPGRGNTHSSFKWRWYHFDGVDWDQSRRLNNRIYKFRGHGKAWDWEVDTENGNYDYLMYADIDMDHPEVVNELRNWGVWYTNTLGLDGFRIDAVKHIKYSFTRDWINHVRSATGKNMFAVAEFWKNDLGAIENYLQKTNWNHSVFDVPLHYNLYNASKSGGNYDMRNIFNGTVVQRHPSHAVTFVDNHDSQPEEALESFVEEWFKPLAYALTLTREQGYPSVFYGDYYGIPTHGVPAMRSKIDPILEARQKYAYGKQNDYLDHHNIIGWTREGNTAHPNSGLATIMSDGAGGSKWMFVGRNKAGQVWSDITGNRTGTVTINADGWGNFSVNGGSVSIWVNK

SEQ ID NO: 22742 - protein, 485 aa, Bacillus sp. 707
HHNGTNGTMMQYFEWYLPNDGNHWNRLNSDASNLKSKGITAVWIPPAWKGASQNDVGYGAYDLYDLGEFNQKGTVRTKYGTRSQLQAAVTSLKNNGIQVYGDVVMNHKGGADATEMVRAVEVNPNNRNQEVTGEYTIEAWTRFDFPGRGNTHSSFKWRWLHFDGVDWDQSRRLNNRIYKFRGHGKAWDWEVDTENGNYDYLMYADIDMDHPEVVNELRNWGVWYTNTLGLDGFRIDAVKHIKYSFTRDWINHVRSATGKNMFAVAEFWKNDLGAIENYLQKTNWNHSVFDVPLHYNLYNASKSGGNYDMRNIFNGTVVQRHPSHAVTFVDNHDSQPEEALESFVEEWFKPLAYALTLTREQGYPSVFYGDYYGIPTHGVPAMRSKIDPILEARQKYAYGKQNDYLDHHNIIGWTREGNTAHPNSGLATIMSDGAGGSKWMFVGRNKAGQVWSDITGNRTGTVTINADGWGNFSVNGGSVSIWVNK

SEQ ID NO: 22743 - protein, 485 aa, Bacillus sp. 707
HHNGTNGTMMQYFEWYLPNDGNHWNRLNSDASNLKSKGITAVWIPPAWKGASQNDVGYGAYDLYDLGEFNQKGTVRTKYGTRSQLQAAVTSLKNNGIQVYGDVVMNHKGGADATEMVRAVEVNPNNRNQEVTGEYTIEAWTRFDFPGRGNTHSSFKWRWYHFDGVDWDQSRRLNNRIYKFRGHGKAWDWEVDTENGNYDYLMYADIDMDHPEVVNELRNWGVWYTNTLGLDGFRIDAVKHIKYSFTRDWINHVRSATGKNMFAVAEFWKNDLGAIENYLQKTNWNHSVFDVPLHYNLYNASKSGGNYDMRNIFNGTVVQRHPSHAVTFVDNHDSQPEEALESFVEEWFKPLAYALTLTREQGYPSVFYGDYYGIPTHGVPAMRSKIDPILEARQKYAYGKQNDYLDHHNIIGWTREGNTAMPNSGLATIMSDGAGGSKWMFVGRNKAGQVWSDITGNRTGTVTINADGWGNFSVNGGSVSIWVNK

SEQ ID NO: 22744 - protein, 485 aa, Bacillus sp.
HHNGTNGTMMQYFEWYLPNDGNHWNRLRSDASNLKDKGISAVWIPPAWKGASQNDVGYGAYDLYDLGEFNQKGTIRTKYGTRNQLQAAVNALKSNGIQVYGDVVMNHKGGADATEMVRAVEVNPNNRNQEVSGEYTIEAWTKFDFPGRGNTHSNFKWRWYHFDGVDWDQSRKLNNRIYKFRGDGKGWDWEVDTENGNYDYLIYADIDMDHPEVVNELRNWGVWYTNTLGLDGFRIDAVKHIKYSFTRDWINHVRSATGKNMFAVAEFWKNDLGAIENYLNKTNWNHSVFDVPLHYNLYNASKSGGNYDMRQIFNGTVVQRHPTHAVTFVDNHDSQPEEALESFVEEWFKPLAYALTLTREQGYPSVFYGDYYGIPTHGVPAMKSKIDPILEARQKYAYGRQNDYLDHHNIIGWTREGNTAHPNSGLATIISDGAGGNKWMFVGRNKAGQVWTDITGNRAGTVTINADGWGNFSVNGGSVSIWVNK

SEQ ID NO: 22745 - protein, 485 aa, Bacillus sp. 707
HHNGTNGTMMQYFEWYLPNDGNHWNRLNSDASNLKSKGITAVWIPPAWKGASQNDVGYGAYDLYDLGEFNQKGTVRTKYGTRSQLQAAVTSLKNNGIQVYGDVVMNHKGGADATEMVRAVEVNPNNRNQEVTGEYTIEAWTRFDFPGRGNTHSSFKWRWYHFDGVDWDQSRRLNNRIYKFRGHGKAWDWEVDTENGNYDYLMYADIDMDHPEVVNELRNWGVWYTNTLGLDGFRIDAVKHIKYSFTRDWINHVRSATGKNMFAVAEFWKNDLGAIENYLQKTNWNHSVFDVPLHYNLYNASKSGGNYDMRNIFNGTVVQRHPSHAVTFVDNHDSQPEEALESFVEEWFKPLAYALTLTREQGYPSVFYGDYYGIYTHGVPAMRSKIDPILEARQKYAYGKQNDYLDHHNIIGWTREGNTAHPNSGLATIMSDGAGGSKWMFVGRNKAGQVWSDITGNRTGTVTINADGWGNFSVNGGSVSIWVNK

SEQ ID NO: 22746 - protein, 485 aa, Bacillus sp. 707
HHNGTNGTMMQYFEWYLPNDGNHWNRLNSDASNLKSKGITAVWIPPAWKGASQNDVGYGAYDLYDLGEFNQKGTVRTKYGTRSQLQAAVTSLKNNGIQVYGDVVMNHKGGADATEMVRAVEVNPNNRNQEVTGEYTIEAWTRFDFPGRGNTHSSFKWRWYHFDGVDWDQSRRLNNRIYKFRGHGKAWDWEVDTENGNYDYLMYADIDMDHPEVVNELRNWGVWYTNTLGLDGFRIDAVKHIKYSFTRDWINHVRSATGKNMFAVAEFWKNDLGAIENYLQKTNWNHSVFDVPLHYNLYNASKSGGNYDMRNIFNGTVVQRHPSHAVTFVDNHDSQPEEALESFVEEWFKPLAYALTLTREQGYPSVFYGDYYGIPTHGVPAMRSKIDPILEARQKYAYGKQNDYLDHHNIIGWTRWGNTAHPNSGLATIMSDGAGGSKWMFVGRNKAGQVWSDITGNRTGTVTINADGWGNFSVNGGSVSIWVNK

SEQ ID NO: 22747 - protein, 485 aa, Bacillus sp. 707
HHLGTNGTMMQYFEWYLPNDGNHWNRLNSDASNLKSKGITAVWIPPAWKGASQNDVGYGAYDLYDLGEFNQKGTVRTKYGTRSQLQAAVTSLKNNGIQVYGDVVMNHKGGADATEMVRAVEVNPNNRNQEVTGEYTIEAWTRFDFPGRGNTHSSFKWRWYHFDGVDWDQSRRLNNRIYKFRGHGKAWDWEVDTENGNYDYLMYADIDMDHPEVVNELRNWGVWYTNTLGLDGFRIDAVKHIKYSFTRDWINHVRSATGKNMFAVAEFWKNDLGAIENYLQKTNWNHSVFDVPLHYNLYNASKSGGNYDMRNIFNGTVVQRHPSHAVTFVDNHDSQPEEALESFVEEWFKPLAYALTLTREQGYPSVFYGDYYGIPTHGVPAMRSKIDPILEARQKYAYGKQNDYLDHHNIIGWTREGNTAHPNSGLATIMSDGAGGSKWMFVGRNKAGQVWSDITGNRTGTVTINADGWGNFSVNGGSVSIWVNK

SEQ ID NO: 22748 - protein, 485 aa, Bacillus sp.
HHNGTNGTMMQYFEWYLPNDGNHWNRLRSDASNLKDKGISAVWIPPAWKGASQNDVGYGAYDLYDLGEFNQKGTIRTKYGTRNQLQAAVNALKSNGIQVYGDVVMNHKGGADATEMVRAVEVNPNNRNQEVSGEYTIEAWTKFDFPGRGNTHSNFKWRWYHFDGVDWDQSRKLNNRIYKFRGDGKGWDWEVDTENGNYDYLVYADIDMDHPEVVNELRNWGVWYTNTLGLDGFRIDAVKHIKYSFTRDWINHVRSATGKNMFAVAEFWKNDLGAIENYLNKTDWNHSVFDVPLHYNLYNASKSGGNYDMRQIFNGTVVQRHPMHAVTFVDNHDSQPEEALESFVEEWFKPLAYALTLTREEGYPSVFYGDYYGIPTHGVPAMKSKIDPILEARQKYAYGRQNDYLDHHNIIGWTREGNTAHPNSGLATIMSDGAGGNKWMFVGRNKAGQVWTDITGNRAGTVTINADGWGNFSVNGGSVSIWVNK

SEQ ID NO: 22749 - protein, 485 aa, Bacillus sp. 707
HHNGTNGTMMQYFEWYLPNDGNHWNRLNSDASNLKSKGITAVWIPPAWKGASQNDVGYGAYDLYDLGEFNQKGTVRTKYGTRSQLQAAVTSLKNNGIQVYGDVVMNHKGGADATEMVRAVEVNPNNRNQEVTGEYTIEAWTRFDFPGRGNTHSSFKWRWYHFDGVDWDQSRRLNNRIYKFRGHGKAWDWEVDTENGNYDYLMYADIDMDHPEVVNELRNWGVWYTNTLGLDGFRIDAVKHIKYSFTRDWINHVRSATGKNMFAVAEFWKNDLGAIENYLQKTNWNHSVFDVPLHYNLYNASKSGGNYDMRNIFNGTVVQRHPSHAVTFVDNHDSQPEEALESFVEEWFKPLAYALTLTREQGYPSVFYGDYYGIPTHGVPAMRSKIDPILEARHKYAYGKQNDYLDHHNIIGWTREGNTAHPNSGLATIMSDGAGGSKWMFVGRNKAGQVWSDITGNRTGTVTINADGWGNFSVNGGSVSIWVNK

SEQ ID NO: 22750 - protein, 485 aa, Bacillus sp.
HHNGTNGTMMQYFEWYLPNDGNHWNRLNSDASNLKSKGITAVWIPPAWKGASQNDVGYGAYDLYDLGEFNQKGTVRTKYGTRSQLQAAVTSLKNNGIQVYGDVVMNHKGGADATEMVRAVEVNPNNRNQEVTGEYTIEAWTRFDFPGRGNTHSSFKWRWYHFDGVDWDQSRRLNNRIYKFRGHGKAWDWEVDTEFGNYDYLMYADHDMDHPEVVNELRNWGVWYTNTLGLDGFRIDAVKHIKYSFTRDWINHVRSATGKNMFAVAEFWKNDLGAIENYLQKTNWNHSVFDVPLHYNLYNASKSGGNYDMRNIFNGTVVQRHPSHAVTFVDNHDSQPEEALESFVEEWFKPLAYALTLTREQGYPSVFYGDYYGIPTHGVPAMRSKIDPILEARQKYAYGKQNDYLDHHNIIGWTREGNTAHPNSGLATIMSDGAGGSKWMFVGRNKAGQVWSDITGNRTGTVTINADGWGNFSVNGGSVSIWVNK

SEQ ID NO: 22751 - protein, 485 aa, Bacillus sp. 707
HHNGTNGTMMQYFEWYLPNDGNHWNRLNSDASNLKSKGITAVWIPPAWKGASQNDVGYGAYDLYDLGEFNQKGTVRTKYGTRSQLQAAVTSLKNNGIQVYGDVVMNHKGGADATEMVRAVEVNPNNRNQEVTGEYTIEAWTRFDFPGRGNTHSSFKWRWYHFDGVDWDQSRRLNNRIYKFAGHGKAWDWEVDTENGNYDYLMYADIDMDHPEVVNELRNWGVWYTNTLGLDGFRIDAVKHIKYSFTRDWINHVRSATGKNMFAVAEFWKNDLGAIENYLQKTNWNHSVFDVPLHYNLYNASKSGGNYDMRNIFNGTVVQRHPSHAVTFVDNHDSQPEEALESFVEEWFKPLAYALTLTREQGYPSVFYGDYYGIPTHGVPAMRSKIDPILEARQKYAYGKQNDYLDHHNIIGWTREGNTAHPNSGLATIMSDGAGGSKWMFVGRNKAGQVWSDITGNRTGTVTINADGWGNFSVNGGSVSIWVNK

SEQ ID NO: 22752 - protein, 485 aa, Bacillus sp. 707
HHNGTNGTMMQYFEWYLPNDGNHWNRLNSDASNLKSKGITAVWIPPAWKGASQNDVGYGAYDLYDLGEFNQKGTVRTKYGTRSQLQAAVTSLKNNGIQVYGDVVMNHKGGADATEMVRAVEVNPNNRNQEVTGEYTIEAWTRFDFPGRGNTHSSFKWRWYHFDGVDWDQSRRLNNRIYKFRGHGKAWDWEVDTENGNYDYLMYADIDMDHPEVVNELRNWGVWYTNTLGLDGFRIDAVKHIKYSFTRDWINHVRSATGKNMFAVAEFWKNDLGAIENYLQKTNWNHSVFDVPLHYNLYNASKSGGNYDMRNIFNGTVVQRHPSHAVTFVDNHDSQPEEALESFVEEWFKPLAYALTLTREQGYPSVFYGDYYGIPTHGVPAMRSKIDPILEARCKYAYGKQNDYLDHHNIIGWTREGNTAHPNSGLATIMSDGAGGSKWMFVGRNKAGQVWSDITGNRTGTVTINADGWGNFSVNGGSVSIWVNK

SEQ ID NO: 22753 - protein, 485 aa, Bacillus sp. 707
HHNGTNGTMMQYFEWYLPNDGNHWNRLNSDASNLKSKGITAVWIPPAWKGASQNDVGYGAYDLYDLGEFNQKGTVRTKYGTRSQLQAAVTSLKFNGIQVYGDVVMNHKGGADATEMVRAVEVNPNNRNQEVTGEYTIEAWTRFDFPGRGNTHSSFKWRWYHFDGVDWDQSRRLNNRIYKFRGHGKAWDWEVDTENGNYDYLMYADIDMDHPEVVNELRNWGVWYTNTLGLDGFRIDAVKHIKYSFTRDWINHVRSATGKNMFAVAEFWKNDLGAIENYLQKTNWNHSVFDVPLHYNLYNASKSGGNYDMRNIFNGTVVQRHPSHAVTFVDNHDSQPEEALESFVEEWFKPLAYALTLTREQGYPSVFYGDYYGIPTHGVPAMRSKIDPILEARQKYAYGKQNDYLDHHNIIGWTREGNTAHPNSGLATIMSDGAGGSKWMFVGRNKAGQVWSDITGNRTGTVTINADGWGNFSVNGGSVSIWVNK

SEQ ID NO: 22754 - protein, 485 aa, Bacillus sp.
HHNGTNGTMMQYFEWYLPNDGNHWNRLNSDASNLKSKGITAVWIPPAWKGASQNDVGYGAYDLYDLGEFNQKGTVRTKYGTRSQLQAAVTSLKNNGIQVYGDVVMNHKGGADATEMVRAVEVNPNNRNQEVTGEYTIEAWTRFDFPGRGNTHSSFKWRWYHFDGVDWDQSRRLNNRIYKFRGHGKAWDWEVDTENGNYDYLMYADFDMDHPEVVNELRNWGVWYTNTLGLDGFRIDAVKHIKYSFVRDWINHVRSATGKNMFAVAEFWKNDLGAIENYLQKTNWNHSVFDVPLHYNLYNASKSGGNYDMRNIFNGTVVQRHPSHAVTFVDNHDSQPEEALESFVEEWFKPLAYALTLTREQGYPSVFYGDYYGIPTHGVPAMRSKIDPILEARQKYAYGKQNDYLDHHNIIGWTREGNTAHPNSGLATIMSDGAGGSKWMFVGRNKAGQVWSDITGNRTGTVTINADGWGNFSVNGGSVSIWVNK

SEQ ID NO: 22755 - protein, 485 aa, Bacillus sp. 707
HHNGTNGTMMQYFEWYLPNDGNHWNRLNSDASNLKSKGITAVWIPPAWKGASQNDVGYGAYDLYDLGEFNQKGTVRTKYGTRSQLQAAVTSLKNNGIQVYGDVVMNHKGGADATEMVRAVEVNPNNRNQEVTGEYTIEAWTRFDFPGRGNTHSSFKWRWYHFDGVDWDQSRRLNNRIYKFRGHGKAWDWEVDTENGNYDYLMYADIDMDHPEVVNELRNWGVWYTNTLGLDGFRIDAVKHIKYSFTRDWINHVRSATGKNMFAVAEFWKNDLGAIENYLQKTNWNHSVFDVPLHYNLYNASKSGGNYDMRNIFNGTVVQRHPSHAVTFVDNHDSQPEEALESFVEEWFKPLAYALTLTREQGYPSVFYGDYYGIPTHGVPAMRSKIDPILEARQKYAYGKQNDYLDHHNIIGWTREGNTAHPNSGLATIMSDGAGGSKWMFVGRNKAGQVWSDSTGNRTGTVTINADGWGNFSVNGGSVSIWVNK

SEQ ID NO: 22756 - protein, 485 aa, Bacillus sp. 707
HHNGTNGTMMQYFEWYLPNDGNHWNRLNSDASNLKSKGITAVWIPPAWKGASQNDVGYGAYDLYDLGEFNQKGTVRTKYGTRSQLQAAVTSLKNNGIQVYGDVVMNHKGGADATEMVRAVEVNPNNRNQEVTGEYTIEAWTRFDFPGRGNTHSSFKWRWYHFDGVDWDQSRRLNNRIYKFRGHGKAWDWEVDTENGNYDYLMYADIDMDHPEVVNELRNWGVWYTNTLGLDGFRIDAVKHIKYSFTRDWINHVRSATGKNMFAVAEFWKNDLLAIENYLQKTNWNHSVFDVPLHYNLYNASKSGGNYDMRNIFNGTVVQRHPSHAVTFVDNHDSQPEEALESFVEEWFKPLAYALTLTREQGYPSVFYGDYYGIPTHGVPAMRSKIDPILEARQKYAYGKQNDYLDHHNIIGWTREGNTAHPNSGLATIMSDGAGGSKWMFVGRNKAGQVWSDITGNRTGTVTINADGWGNFSVNGGSVSIWVNK

SEQ ID NO: 22757 - protein, 485 aa, Bacillus sp. 707
HHNGTNGTMMQYFEWYLPNDGNHWNRLNSDASNLKSKGITAVWIPPAWKGASQNDVGYGAYDLYDLGEFNQKGTVRTKYGTRSQLQAAVTSLKNNGIQVYGDVVMNHKGGADATEMVRAVEVNPNNRNQEVTGEYTIEAWTRFDFPGRGNTHSSFKWRWYHFDGVDWDKSRRLNNRIYKFRGHGKAWDWEVDTENGNYDYLMYADIDMDHPEVVNELRNWGVWYTNTLGLDGFRIDAVKHIKYSFTRDWINHVRSATGKNMFAVAEFWKNDLGAIENYLQKTNWNHSVFDVPLHYNLYNASKSGGNYDMRNIFNGTVVQRHPSHAVTFVDNHDSQPEEALESFVEEWFKPLAYALTLTREQGYPSVFYGDYYGIPTHGVPAMRSKIDPILEARQKYAYGKQNDYLDHHNIIGWTREGNTAHPNSGLATIMSDGAGGSKWMFVGRNKAGQVWSDITGNRTGTVTINADGWGNFSVNGGSVSIWVNK

SEQ ID NO: 22758 - protein, 485 aa, Bacillus sp. 707
HHNGTNGTMMQYFEWYLPNDGNHWNRLNSDASNLKSKGITAVWIPPAWKGASQNDVGYGAYDLYDLGEFNQKGTVRTKYGTRSQLQAAVTSLKNNGIQVYGDVVMNHKGGADATEMVRAVEVNPNNRNQEVTGEYTIEAWTRFDFPGRGNTHSSFKWRWYHFDGVDWDQSRRLNNRIYKFRGHGKAWDWEVDTENGNYDYLMYADIDMDHPEVVNELRNWGVWYTNTLGLDGFRIDAVKHIKYSFTRDWINHVRSATGKNMFAVAEFWKNDLGAIENYLQKTNWNHSVFDVPLHYNLYNASKSGGNYDMRNIFNGTVVQRHPSHAATFVDNHDSQPEEALESFVEEWFKPLAYALTLTREQGYPSVFYGDYYGIPTHGVPAMRSKIDPILEARQKYAYGKQNDYLDHHNIIGWTREGNTAHPNSGLATIMSDGAGGSKWMFVGRNKAGQVWSDITGNRTGTVTINADGWGNFSVNGGSVSIWVNK

SEQ ID NO: 22759 - protein, 485 aa, Bacillus sp. 707
HHNGTNGTMMQYFEWYLPNDGNHWNRLNSDASNLKSKGITAVWIPPAWKGASQNDVGYGAYDLYDLGEFNQKGTVRTKYGTRSQLQAAVTSLKNNGIQVYGDVVMNHKGGADATEMVRAVEVNPNNRNQEVTGEYTIEAWTRFDFPGRGNTHSSFKWRWYHFDGVDWDQSRRLNNRIYKFRGHGKAWDWEVDTENGNYDYLMYADIDMDHPEVVNELRNWGVWYTNTLGLDGFRIDAVKHIKYSFTRDWINHVRSATGKNMFAVAEFWKNDLGAIENYLQKTNWNHSVFDVPLHYNLYNASKSGGNYDMRNIFNGTVVQRHPSHAVTFVDNHDSQPEEALESFVEEWFKPLAYALTLTREQGYPSVFYGDYYGIPTHGLPAMRSKIDPILEARQKYAYGKQNDYLDHHNIIGWTREGNTAHPNSGLATIMSDGAGGSKWMFVGRNKAGQVWSDITGNRTGTVTINADGWGNFSVNGGSVSIWVNK

SEQ ID NO: 22760 - protein, 483 aa, Bacillus sp. SP70
HHNGTNGTMMQYFEWYLPNDGNHWNRLNSDASNLKSKGITAVWIPPAWKGASQNDVGYGAYDLYDLGEFNQKGTVRTKYGTRSQLQAAVTSLKNNGIQVYGDVVMNHKGGADATEMVRAVEVNPNNRNQEVTGEYTIEAWTRFDFPGRGNTHSSFKWRWYHFDGVDWDQSRRLNNRIYKFRGKAWDWEVDTENGNYDYLMYADIDMDHPEVVNELRNWGVWYTNTLGLDGFRIDAVKHIKYSFTRDWINHVRSATGKPMFAVAEFWKNDLGAIENYLQKTNWNHSVFDVPLHYNLYNASKSGGNYDMRNIFNGTVVQRHPSHAVTFVDNHDSQPEEALESFVEEWFKPLAYALTLTREQGYPSVFYGDYYGIPTHGVPAMRSKIDPILEARQKYAYGKQNDYLDHHNIIGWTREGNTAHPNSGLATIMSDGAGGSKWMFVGRNKAGQVWSDITGNRTGTVTINADGWGNFSVNGESVSIWVNK

SEQ ID NO: 22761 - protein, 485 aa, Bacillus sp. 707
HHNGTNGTMMQYFEWYLPNDGNHWNRLNSDASNLKSKGITAVWIPPAWKGASQNDVGYGAYDLYDLGEFNQKGTVRTKYGTRSQLQAAVTSLKNNGIQVYGDVVMNHKGGADATEMVRAVEVNPNNRNQEVTGEYTIEAWTRFDFPGRGNTHSSFKWRWYHFDGVDWDQSRRLNNRIYKFRGHGKAWDWEVDTENGNYDYLMYADIDMDHPEVVNELRNWGVWYTNTLGLDGFRIDAVKHIKYSFTRDWINHVRSATGCNMFAVAEFWKNDLGAIENYLQKTNWNHSVFDVPLHYNLYNASKSGGNYDMRNIFNGTVVQRHPSHAVTFVDNHDSQPEEALESFVEEWFKPLAYALTLTREQGYPSVFYGDYYGIPTHGVPAMRSKIDPILEARQKYAYGKQNDYLDHHNIIGWTREGNTAHPNSGLATIMSDGAGGSKWMFVGRNKAGQVWSDITGNRTGTVTINADGWGNFSVNGGSVSIWVNK

SEQ ID NO: 22762 - protein, 485 aa, Bacillus sp. 707
HHNGTNGTMMQYFEWYLPNDGNHWNRLNSDASNLKSKGITAVWIPPAWKGASQNDVGYGAYDLYDLGEFNQKGTVRTKYGTRSQLQAAVTSLKNNGIQVYGDVVMNHKGGADATEMVRAVEVNPNNRNQEVTGEYTIEAWTRFDFPGRGNTHSSFKWRWYHFDGVDWDQSRRLNNRIYKFRGHGKAWDWEVDTENGNYDYLMYADIDMDHPEVVNELRNWGVWYTNTLGLDGFRIDAVKHIKYSFTRDWINHVRSATGKNMFAVAEFWKNDLGAIENYLQKTNWNHSVFDVPLHYNLYNASKSGGNYDMRNIFNGTVVQRHPSHAVTFVDNHDSQPEEALESFVEEWFKPLAYALTLTREWGYPSVFYGDYYGIPTHGVPAMRSKIDPILEARQKYAYGKQNDYLDHHNIIGWTREGNTAHPNSGLATIMSDGAGGSKWMFVGRNKAGQVWSDITGNRTGTVTINADGWGNFSVNGGSVSIWVNK

SEQ ID NO: 22763 - protein, 485 aa, Bacillus sp. 707
HHNGTNGTMMQYFEWYLPNDGNHWNRLNSDASNLKSKGITAVWIPPAWKGASQNDVGYGAYDLYDLGEFNQKGTVRTKYGTRSQLQAAVTSLKNNGIQVYGDVVMNHKGGADATEMVRAVEVNPNNRNQEVTGEYTIEAWTRFDFPGRGNTHSSFKWRWYHFDGVDWDQSRRLNNRIYKFRGHGKAWDWEVDTENGNYDYLMYADIDMDHPEVVNELRNWGVWYTNTLGLDGFRIDAVKHIKYSFTRDWINHVRSATGKNMFAVAEFWKNDLGAIENYLQKTNWNHSVFDVPLHYNLYNASKSGGNYDMRNIFNGTVVQRHPSHAVTFVDNHDSQPEEALESFVEEWFKPLAYALTLTREQGYPSVFYGDYYGIPTHGQPAMRSKIDPILEARQKYAYGKQNDYLDHHNIIGWTREGNTAHPNSGLATIMSDGAGGSKWMFVGRNKAGQVWSDITGNRTGTVTINADGWGNFSVNGGSVSIWVNK

SEQ ID NO: 22764 - protein, 485 aa, Bacillus sp. 707
HHNGTNGTMMQYFEWYLPNDGNHWNRLNSDASNLKSKGITAVWIPPAWKGASQNDVGYGAYDLYDLGEFNQKGTVRTKYGTRSQLQAAVTSLKNNGIQVYGDVVMNHKGGADATEMVRAVEVNPNNRNQEVTGEYTIEAWTRFDFPGRGNTHSSFKWRWYHFDGVDWDQSRRLNNRIYKFRGHGKAWDWEVDTENGNYDYLMYADIDMDHPEVVNELRNWGVWYTNTLGLDGFRIDAVKHIKYSFTRDWINHVRSATGKNMFAVAEFWKNDLGAIENYLQKTNWNMSVFDVPLHYNLYNASKSGGNYDMRNIFNGTVVQRHPSHAVTFVDNHDSQPEEALESFVEEWFKPLAYALTLTREQGYPSVFYGDYYGIPTHGVPAMRSKIDPILEARQKYAYGKQNDYLDHHNIIGWTREGNTAHPNSGLATIMSDGAGGSKWMFVGRNKAGQVWSDITGNRTGTVTINADGWGNFSVNGGSVSIWVNK

SEQ ID NO: 22765 - protein, 485 aa, Bacillus sp.
HHNGTNGTLMQYFEWYLPNDGNHWNRLRSDASNLKDKGISAVWIPPAWKGASQNDVGYGAYDLYDLGEFNQKGTIRTKYGTRNQLQAAVNALKSNGIQVYGDVVMNHKGGADATEMVKAVEVNPNNRNQEVSGEYTIEAWTKFDFPGRANTHSNFKWRWYHFDGVDWDQSRKLNNRIYKFRGDTKDWDWEVDTENGNYDYLMYADIDMDHPEVVNELRNWGVWYTNTLGLDGFRIDAVKHIKYSFTRDWINHVRSAIGKNMFAVAEFWKNDLGAIENYLNKTNWNHSVFDVPLHFNLYYASKSGGNYDMRQIFNGTVVQKHPTHAVTFVDNHDSQPEESLESFVREWFKPLAYALTLTREQGYPSVFYGDYYGIPTHGVPAMKSKIDPILEARQKYAYGRQNDYLDHHNIIGWTREGNTAHPNSGLATIMSDGAGGNKWMFVGRNKAGQVWTDITGNKAGTVTINADGWGNFSVNGGSVSIWVNK

SEQ ID NO: 22766 - protein, 485 aa, Bacillus sp. 707
HHNGTNGTMMQYFEWYLPNDGNHWNRLNSDASNLKSKGITAVWIPPAWKGASQNDVGYGAYDLYDLGEFNQKGTVRTKYGTRSQLQAAVTSLKNNGIQVYGDVVMNHKGGADATEMVRAVEVNPNNRNQEVTGEYTIEAWTRFDFPGRGNEHSSFKWRWYHFDGVDWDQSRRLNNRIYKFRGHGKAWDWEVDTENGNYDYLMYADIDMDHPEVVNELRNWGVWYTNTLGLDGFRIDAVKHIKYSFTRDWINHVRSATGKNMFAVAEFWKNDLGAIENYLQKTNWNHSVFDVPLHYNLYNASKSGGNYDMRNIFNGTVVQRHPSHAVTFVDNHDSQPEEALESFVEEWFKPLAYALTLTREQGYPSVFYGDYYGIPTHGVPAMRSKIDPILEARQKYAYGKQNDYLDHHNIIGWTREGNTAHPNSGLATIMSDGAGGSKWMFVGRNKAGQVWSDITGNRTGTVTINADGWGNFSVNGGSVSIWVNK

SEQ ID NO: 22767 - protein, 485 aa, Bacillus sp. 707
HHNGTNGTMMQYFEWYLPNDGNHWNRLNSDASNLKSKGITAVWIPPAWKGASQNDVGYGAYDLYDLGEFNQKGTVRTKYGTRSQLQAAVTSLKNNGIQVYGDVVMNHKGGADATEMVRAVEVNPNNRNQEVTGEYTIEAWTRFDFPGRGNTHSSFKWRWYHFDGVDWDQSRRLNNRIYKFRGHGKAWDWEVDTENGNYDYLMYADIDMDHPEVVNELRNWGVWYTNTLGLDGFRIDAVKHIKYSFTRDWINHVRSATGKNMFAVAEFWKNDLGAIENYLQKTNWNHSVFDVPLHYNLYNASKSGGNYDMRNIFNGTVVQRHPSHAVTFVDNHDSQPEEALESFVEEWFKPLAYALTLTREQGYPSVFYGDYYGIPTHGVPAMRSKIDPILEARQKYAYGKQNDYLDHHNIIGWTREGNTAHPNSGLATIMSDGAGGSKWMFVGRAKAGQVWSDITGNRTGTVTINADGWGNFSVNGGSVSIWVNK

SEQ ID NO: 22768 - protein, 485 aa, Bacillus sp. 707
HHNGTNGTMMQYFEWYLPNDGNHWNRLNSDASNLKSKGITAVWIPPAWKGASQNDVGYGAYDLYDLGEFNQKGTVRTKYGTRSQLQAAVTSLKNNGIQVYGDVVMNHKGGADATEMVRAVEVNPNNRNQEVTGEYTIEAWTRFDFPGRGNTHSSFKWRWYHFDGVDWDQSRRLNNRIYKFRGHGKAWDWEVDTENGNYDYLMYADIDMDHPEVVNELRNWGVWYTNTLGLDGFRIDAVKHIKYSFTRDWINHVRSATGKNMFAVAEFWKNDLGAIENYLQKTNWNHSVFDVPLHYNLYNASKSGGNYDMRNIFNGTVVQRHPSHAVTFVDNHDSQPEEALESFVEEWFKPLAYALTLTREQGYPSVFYGDYYGIPTHGVPAMRSKIDPILEARQKYAYGKQNDYLDHHNIIGWTREGNTALPNSGLATIMSDGAGGSKWMFVGRNKAGQVWSDITGNRTGTVTINADGWGNFSVNGGSVSIWVNK

SEQ ID NO: 22769 - protein, 485 aa, Bacillus sp. 707
HHNGTNGTMMQYFEWYLPNDGNHWNRLNSDASNLKSKGITAVWIPPAWKGASQNDVGYGAYDLYDLGEFNQKGTVRTKYGTRSQLQAAVTSLKNNGIQVYGDVVMNHKGGADATEMVRAVEVNPNNRNQEVTGEYTIEAWTRFDFPGRGNTHSSFKWRWYHFDGVDWDQSRRLNNRIYKFRGHGKAWDWEVDTENGNYDYLMYADIDMDHPEVVNELKNWGVWYTNTLGLDGFRIDAVKHIKYSFTRDWINHVRSATGKNMFAVAEFWKNDLGAIENYLQKTNWNHSVFDVPLHYNLYNASKSGGNYDMRNIFNGTVVQRHPSHAVTFVDNHDSQPEEALESFVEEWFKPLAYALTLTREQGYPSVFYGDYYGIPTHGVPAMRSKIDPILEARQKYAYGKQNDYLDHHNIIGWTREGNTAHPNSGLATIMSDGAGGSKWMFVGRNKAGQVWSDITGNRTGTVTINADGWGNFSVNGGSVSIWVNK

SEQ ID NO: 22770 - protein, 485 aa, Bacillus sp. 707
HMNGTNGTMMQYFEWYLPNDGNHWNRLNSDASNLKSKGITAVWIPPAWKGASQNDVGYGAYDLYDLGEFNQKGTVRTKYGTRSQLQAAVTSLKNNGIQVYGDVVMNHKGGADATEMVRAVEVNPNNRNQEVTGEYTIEAWTRFDFPGRGNTHSSFKWRWYHFDGVDWDQSRRLNNRIYKFRGHGKAWDWEVDTENGNYDYLMYADIDMDHPEVVNELRNWGVWYTNTLGLDGFRIDAVKHIKYSFTRDWINHVRSATGKNMFAVAEFWKNDLGAIENYLQKTNWNHSVFDVPLHYNLYNASKSGGNYDMRNIFNGTVVQRHPSHAVTFVDNHDSQPEEALESFVEEWFKPLAYALTLTREQGYPSVFYGDYYGIPTHGVPAMRSKIDPILEARQKYAYGKQNDYLDHHNIIGWTREGNTAHPNSGLATIMSDGAGGSKWMFVGRNKAGQVWSDITGNRTGTVTINADGWGNFSVNGGSVSIWVNK

SEQ ID NO: 22771 - protein, 485 aa, Bacillus sp. 707
HHNGTNGTMMQYFEWYLPNDGNHWNRLNSDASNLKSKGITAVWIPPAWKGASQNDVGYGAYDLYDLGEFNQKGTVRTKYGTRSQLQAAVTSLKNNGIQVYGDVVMNHKGGADATEMVRAVEVNPNNRNQEVTGEYTIEAWTRFDFPGRGNTHSSFKWRWYHFDGVDWDQSRRLNNRIYKFRGHGKAWDWEVDTENGNYDYLMYADIDMDHPEVVNELRNWGVWYTNTLGLDGFRIDAVKHIKYSFTRDWINHVRSATGKNMFAVAEFWKNDLGAIENYLQKTNWNHSVFDVPLHYNLYNASKSGGNYDMRNIFNGTVVQRHPSHAVTFVDNHDSQPEEALESFVEEWFKPLAYALTLTREQGYPSVFYGDYYGIPTHGVPAMRSKIDPILEARQKYAYGKQNDYLDHHNIIGWTREGNTAHPNSGLATIMSDGACGSKWMFVGRNKAGQVWSDITGNRTGTVTINADGWGNFSVNGGSVSIWVNK

SEQ ID NO: 22772 - protein, 485 aa, Bacillus sp.
HHNGTNGTMMQYFEWYLPNDGNHWNRLNSDASNLKSKGITAVWIPPAWKGASQNDVGYGAYDLYDLGEFNQKGTVRTKYGTRSQLQAAVTSLKNNGIQVYGDVVMNHKGGADATEMVRAVEVNPNNRNQEVTGEYTIEAWTRFDFPGRGNTHSSFKWRWYHFDGVDWDQSRRLNNRIYKFRGHGKAWDWEVDTENGNYDYLMYADYDMDHPEVVNELRNWGVWYTNTLGLDGFRIDAVKHIKYSFVRDWINHVRSATGKNMFAVAEFWKNDLGAIENYLQKTNWNHSVFDVPLHYNLYNASKSGGNYDMRNIFNGTVVQRHPSHAVTFVDNHDSQPEEALESFVEEWFKPLAYALTLTREQGYPSVFYGDYYGIPTHGVPAMRSKIDPILEARQKYAYGKQNDYLDHHNIIGWTREGNTAHPNSGLATIMSDGAGGSKWMFVGRNKAGQVWSDITGNRTGTVTINADGWGNFSVNGGSVSIWVNK

SEQ ID NO: 22773 - protein, 485 aa, Bacillus sp. 707
HHKGTNGTMMQYFEWYLPNDGNHWNRLNSDASNLKSKGITAVWIPPAWKGASQNDVGYGAYDLYDLGEFNQKGTVRTKYGTRSQLQAAVTSLKNNGIQVYGDVVMNHKGGADATEMVRAVEVNPNNRNQEVTGEYTIEAWTRFDFPGRGNTHSSFKWRWYHFDGVDWDQSRRLNNRIYKFRGHGKAWDWEVDTENGNYDYLMYADIDMDHPEVVNELRNWGVWYTNTLGLDGFRIDAVKHIKYSFTRDWINHVRSATGKNMFAVAEFWKNDLGAIENYLQKTNWNHSVFDVPLHYNLYNASKSGGNYDMRNIFNGTVVQRHPSHAVTFVDNHDSQPEEALESFVEEWFKPLAYALTLTREQGYPSVFYGDYYGIPTHGVPAMRSKIDPILEARQKYAYGKQNDYLDHHNIIGWTREGNTAHPNSGLATIMSDGAGGSKWMFVGRNKAGQVWSDITGNRTGTVTINADGWGNFSVNGGSVSIWVNK

SEQ ID NO: 22774 - protein, 485 aa, Bacillus sp. 707
HHNGTNGTMMQYFEWYLPNDGNHWNRLNSDASNLKSKGITAVWIPPAWKGASQNDVGYGAYDLYDLGEFNQKGTVRTKYGTRSQLQAAVTSLKNNGIQVYGDVVMNHKGGADATEMVRAVEVNPNNRNQEVTGEYTIEAWTRFDFPGRGNTHSSFKWRWYHFDGVDWDQSRRLNNRIYKFRGHGKAWDWEVDTENGNYDYLMYADIDMDHPEVVNELRNWGVWYTNTLGLDGFRIDAVKHIKYSFTRDWINHVRSATGKNMFAVAEFWKNDLGAIENYLQKTNWNHSVFDVPLHYNLYNASKSGGNYDMRNIFNGTVVQRHPSHAHTFVDNHDSQPEEALESFVEEWFKPLAYALTLTREQGYPSVFYGDYYGIPTHGVPAMRSKIDPILEARQKYAYGKQNDYLDHHNIIGWTREGNTAHPNSGLATIMSDGAGGSKWMFVGRNKAGQVWSDITGNRTGTVTINADGWGNFSVNGGSVSIWVNK

SEQ ID NO: 22775 - protein, 485 aa, Bacillus sp. 707
HHNGTNGTMMQYFEWYLPNDGNHWNRLNSDASNLKSKGITAVWIPPAWKGASQNDVGYGAYDLYDLGEFNQKGTVRTKYGTRSQLQAAVTSLKNNGIQVYGDVVMNHKGGADATEMVRAVEVNPNNRNQEVTGEYTIEAWTRFDFPGRGNTHSSFKWRWYHFDGVDWDQSRRLNNRIYKFRGHGKAWDWEVDTENGNYDYLMYADIDMDHPEVVNELRNWGVWYTNTLGLDGFRIDAVKHIKYSFTRDWINHVRSATGKNMFAVAEFWKNDLGAIENYLQKTNWNHSVFDVPLHYNLYNASKSGGNYDMRNIFNGTVVQRHPSHAVTFVDNHDSQPEEALESFVEEWFKPLAYALTLTREQGYPSVFYGDYYGIMTHGVPAMRSKIDPILEARQKYAYGKQNDYLDHHNIIGWTREGNTAHPNSGLATIMSDGAGGSKWMFVGRNKAGQVWSDITGNRTGTVTINADGWGNFSVNGGSVSIWVNK

SEQ ID NO: 22776 - protein, 485 aa, Bacillus sp. 707
HHNGTNGTMMQYFEWYLPNDGNHWNRLNSDASNLKSKGITDVWIPPAWKGASQNDVGYGAYDLYDLGEFNQKGTVRTKYGTRSQLQAAVTSLKNNGIQVYGDVVMNHKGGADATEMVRAVEVNPNNRNQEVTGEYTIEAWTRFDFPGRGNTHSSFKWRWYHFDGVDWDQSRRLNNRIYKFRGHGKAWDWEVDTENGNYDYLMYADIDMDHPEVVNELRNWGVWYTNTLGLDGFRIDAVKHIKYSFTRDWINHVRSATGKNMFAVAEFWKNDLGAIENYLQKTNWNHSVFDVPLHYNLYNASKSGGNYDMRNIFNGTVVQRHPSHAVTFVDNHDSQPEEALESFVEEWFKPLAYALTLTREQGYPSVFYGDYYGIPTHGVPAMRSKIDPILEARQKYAYGKQNDYLDHHNIIGWTREGNTAHPNSGLATIMSDGAGGSKWMFVGRNKAGQVWSDITGNRTGTVTINADGWGNFSVNGGSVSIWVNK

SEQ ID NO: 22777 - protein, 485 aa, Bacillus sp. 707
HHNGTNGTMMQYFEWYLPNDGNHWNRLNSDASNLKSKGITAVWIPPAWKGASQNDVGYGAYDLYDLGEFNQKGTVRTKYGTRSQLQAAVTSLKNNGIQVYGDVVMNHKGGADATEMVRAVEVNPNNRNQEVTGEYTIEAWTRFDFPGRGNTHSSFKWRWYHFDGVDWDQSRRLNNRIYKFRGHGKAWDWEVDTENGNYDYLMYADIDMDHPEVVNELRNWGVWYTNTLGLDGFRIDAVKHIKYSFTRDWINHVRSATGKNMFAVAEFWKNDLGAIENYLQKTNWNHSVFDVPLHYNLYNASKSGGNYDMRNIFNGTVVQRHPSHAVTFVDNHDSQPEEALESFVEEWFKPLAYALTLTREQGYPSVFYGDYYGIPTHGVPAMRSKIDPILEARQKYAYGKQNDYLDHHNIIGWTREGNEAHPNSGLATIMSDGAGGSKWMFVGRNKAGQVWSDITGNRTGTVTINADGWGNFSVNGGSVSIWVNK

SEQ ID NO: 22778 - protein, 485 aa, Bacillus sp. 707
HHNGTNGTMMQYFEWYLPNDGNHWNRLNSDASNLKSKGITAVWIPPAWKGASQNDVGYGAYDLYDLGEFNQKGTVRTKYGTRSQLQAAVTSLKNNGIQVYGDVVMNHKGGADATEMVRAVEVNPNNRNQEVTGEYTIEAWTRFDFPGRGNTHSSFKWRWYHFDGVDWDQSRRLNNRIYKFRGHGKAWDWEVDTENGNYDYLMYADIDMDHPEVVNELRNWGVWYTNTLGLDGFRIDAVKHIKYSFTRDWINHVRSATGQNMFAVAEFWKNDLGAIENYLQKTNWNHSVFDVPLHYNLYNASKSGGNYDMRNIFNGTVVQRHPSHAVTFVDNHDSQPEEALESFVEEWFKPLAYALTLTREQGYPSVFYGDYYGIPTHGVPAMRSKIDPILEARQKYAYGKQNDYLDHHNIIGWTREGNTAHPNSGLATIMSDGAGGSKWMFVGRNKAGQVWSDITGNRTGTVTINADGWGNFSVNGGSVSIWVNK

SEQ ID NO: 22779 - protein, 483 aa, Bacillus sp. SP70
HHNGTNGTMMQYFEWYLPNDGNHWNRLNSDASNLKSKGITAVWIPPAWKGASQNDVGYGAYDLYDLGEFNQKGTVRTKYGTRSQLQAAVTSLKNNGIQVYGDVVMNHKGGADATEMVRAVEVNPNNRNQEVTGEYTIEAYTRFDFPGRGNTHSSFKWRWYHFDGVDWDQSRRLNNRIYKFRGKAWDWEVDTENGNYDYLMYADIDMDHPEVVNELRNWGVWYTNTLGLDGFRIDAVKHIKYSFTRDWINHVRSATGKPMFAVAEFWKNDLGAIENYLQKTNWNHSVFDVPLHYNLYNASKSGGNYDMRNIFNGTVVQRHPSHAVTFVDNHDSQPEEALESFVEEWFKPLAYALTLTREQGYPSVFYGDYYGIPTHGVPAMRSKIDPILEARQKYAYGKQNDYLDHHNIIGWTREGNTAHPNSGLATIMSDGAGGSKWMFVGRNKAGQVWSDITGNRTGTVTINADGWGNFSVNGGSVSIWVNK

SEQ ID NO: 22780 - protein, 485 aa, Bacillus sp. 707
HHNGTNGTMMQYFEWYLPNDGNHWNRLNSDASNLKSKGITAVWIPPAWKGASQNDVGYGAYDLYDLGEFNQKGTVRTKYGTRSQLQAAVTSLKNNGIQVYGDVVMNHKGGADATEMVRAVEVNPNNRNQEVTGEYTIEAWTRFDFPGRGNTHSSFKWRWYHFDGVDWDQSRRLNNRIYKFRGHGKAWDWEVDTENGNYDYLMYADIDMDHPEVVNELRNWGVWYTNTLGLDGFRIDAVKHIKYSFTRDWINHVRSATGKNMFAVAEFWKNDLGAIENYLQKTNWNHSVFDVPLHYNLYNASKSGGNYDMRNIFNGTVVQRHPSHAVTFVDNHDSQPEEALESFVEEWFKPLAYALTLTREQGYPSVFYGDYYGIPTHGAPAMRSKIDPILEARQKYAYGKQNDYLDHHNIIGWTREGNTAHPNSGLATIMSDGAGGSKWMFVGRNKAGQVWSDITGNRTGTVTINADGWGNFSVNGGSVSIWVNK

SEQ ID NO: 22781 - protein, 485 aa, Bacillus sp. 707
HHNGHNGTMMQYFEWYLPNDGNHWNRLNSDASNLKSKGITAVWIPPAWKGASQNDVGYGAYDLYDLGEFNQKGTVRTKYGTRSQLQAAVTSLKNNGIQVYGDVVMNHKGGADATEMVRAVEVNPNNRNQEVTGEYTIEAWTRFDFPGRGNTHSSFKWRWYHFDGVDWDQSRRLNNRIYKFRGHGKAWDWEVDTENGNYDYLMYADIDMDHPEVVNELRNWGVWYTNTLGLDGFRIDAVKHIKYSFTRDWINHVRSATGKNMFAVAEFWKNDLGAIENYLQKTNWNHSVFDVPLHYNLYNASKSGGNYDMRNIFNGTVVQRHPSHAVTFVDNHDSQPEEALESFVEEWFKPLAYALTLTREQGYPSVFYGDYYGIPTHGVPAMRSKIDPILEARQKYAYGKQNDYLDHHNIIGWTREGNTAHPNSGLATIMSDGAGGSKWMFVGRNKAGQVWSDITGNRTGTVTINADGWGNFSVNGGSVSIWVNK

SEQ ID NO: 22782 - protein, 483 aa, Bacillus sp. SP70
HHNGTNGTMMQYFEWYLPNDGNHWNRLNSDASNLKSKGITAVWIPPAWKGASQNDVGYGAYDLYDLGEFNQKGTVRTKYGTRSQLQAAVTSLKNNGIQVYGDVVMNHKGGADATEMVRAVEVNPNNRNQEVTGEYTIEAWTRFDFPGRGNTHSSFKWRWYHFDGVDWDQSRRLNNRIYKFRGKAWDWEVDTENGNYDYLMYADIDMDHPEVVNELRNWGVWYTNTLGLDGFRIDAVKHIKYSFTRDWINHVRSATGKNMFAVAEFWKNDLGAIENYLQKTNWNHSVFDVPLHYNLYNASKSGGNYDMRNIFNGTVVQRHPSHAVTFVDNHDSQPEEALESFVEEWFKPLAYALTLTREQGHPSVFYGDYYGIPTHGVPAMRSKIDPILEARQKYAYGKQNDYLDHHNIIGWTREGNTAHPNSGLATIMSDGAGGSKWMFVGRNKAGQVWSDITGNRTGTVTINADGWGNFSVNGGSVSIWVNK

SEQ ID NO: 22783 - protein, 485 aa, Bacillus sp. 707
HHNGTNGTMMQYFEWYLPNDGNHWNRLNSDASNLKSKGITAVWIPPAWKGASQNDVGYGAYDLYDLGEFNQKGTVRTKYGTRSQLQAAVTSLKNNGIQVYGDVVMNHKGGADATEMVRAVEVNPNNRNQEVTGEYTIEAWTRFDFPGRGNTHSSFKWRWYHFDGVDWDQSRRLNNRIYKFRGHGKAWDWEVDTENGNYDYLMYADIDMDHPEVVNELRNWGVWYTNTLGLDGFRIDAVKHIKYSFTRDWINHVRSATGKNMFAVAEFWKNDLGAIENYLQKTNWNHSVFDVPLHYNLYNASKSGGNYDMRNIFNGTVVQRHPSHAVTFVDNHDSQPEEALESFVEEWFKPLAYALTLTREQGYPSVFYGDYYGIPTHGVPAMRSKIDPILEARQKYAYGKQNDYLDHHNIIGWTREGNTAHLNSGLATIMSDGAGGSKWMFVGRNKAGQVWSDITGNRTGTVTINADGWGNFSVNGGSVSIWVNK

SEQ ID NO: 22784 - protein, 485 aa, Bacillus sp. 707
HHNGTNGTMMQYFEWYLPNDGNHWNRLNSDASNLKSKGITAVWIPPAWKGASQNDVGYGAYDLYDLGEFNQKGTVRTKYGTRSQLQAAVTSLKNNGIQVYGDVVMNHKGGADATEMVRAVEVNPNNRNQEVTGEYTIEAWTRFDFPGRGNTHSSFKWRWYHFDGVDWDQSRRLNNRIYKFRGHGKAWDWEVDTENGNYDYLMYADIDMDHPEVVNELRNWGVWYTNTLGLDGFRIDAVKHIKYSFTRDWINHVRSATGKNMFAVAEFWKNDLGAIENYLQKTNWNHSVFDVPLHYNLYNASKSGGNYDMRNIFNGTVVQRHPSHAVTFVDNHDSQPEEALESFVEEWFKPLAYALTLTREQGYPSVFYGDYYGIPTHGVPAMRSKIDPILEARQKYAYGKQNDYLDHHNIIGWTREGNTAHPNSGLATIMSDGAGGSKWMFVGRNKAGQVWSDITGNRTKTVTINADGWGNFSVNGGSVSIWVNK

SEQ ID NO: 22785 - protein, 485 aa, Bacillus sp. 707
HHNGTNGTMMQYFEWYLPNDGNHWNRLNSDASNLKSKGITAVWIPPAWKGASQNDVGYGAYDLYDLGEFNQKGTVRTKYGTRSQLQAAVTSLKNNGIQVYGDVVMNHKGGADATEMVRAVEVNPNNRNQEVTGEYTIEAWTRFDFPGRGNTHSSFKWRWYHFDGVDWDQSRRLNNRIYKFRGHGKAWDWEVDTENGNYDYLMYADIDMDHPEVVNELRNWGVWYTNTLGLDGFRIDAVKHIKYSFTRDWINHVRSATDKNMFAVAEFWKNDLGAIENYLQKTNWNHSVFDVPLHYNLYNASKSGGNYDMRNIFNGTVVQRHPSHAVTFVDNHDSQPEEALESFVEEWFKPLAYALTLTREQGYPSVFYGDYYGIPTHGVPAMRSKIDPILEARQKYAYGKQNDYLDHHNIIGWTREGNTAHPNSGLATIMSDGAGGSKWMFVGRNKAGQVWSDITGNRTGTVTINADGWGNFSVNGGSVSIWVNK

SEQ ID NO: 22786 - protein, 485 aa, Bacillus sp. 707
HHNGTNGTMMQYFEWYLPNDGNHWNRLNSDASNLKSKGITAVWIPPAWKGASQNDVGYGAYDLYDLGEFVQKGTVRTKYGTRSQLQAAVTSLKNNGIQVYGDVVMNHKGGADATEMVRAVEVNPNNRNQEVTGEYTIEAWTRFDFPGRGNTHSSFKWRWYHFDGVDWDQSRRLNNRIYKFRGHGKAWDWEVDTENGNYDYLMYADIDMDHPEVVNELRNWGVWYTNTLGLDGFRIDAVKHIKYSFTRDWINHVRSATGKNMFAVAEFWKNDLGAIENYLQKTNWNHSVFDVPLHYNLYNASKSGGNYDMRNIFNGTVVQRHPSHAVTFVDNHDSQPEEALESFVEEWFKPLAYALTLTREQGYPSVFYGDYYGIPTHGVPAMRSKIDPILEARQKYAYGKQNDYLDHHNIIGWTREGNTAHPNSGLATIMSDGAGGSKWMFVGRNKAGQVWSDITGNRTGTVTINADGWGNFSVNGGSVSIWVNK

SEQ ID NO: 22787 - protein, 485 aa, Bacillus sp. 707
HHNGTNGTMMQYFEWYLPNDGNHWNRLNSDASNLKSKGITAVWIPPAWKGASQNDVGYGAYDLYDLGEFNQKGTVRTKYGTRSQLQAAVTSLKNNGIQVYGDVVMNHKGGADATEMVRAVEVNPNNRNQEVTGEYTIEAWTRFDFPGRGNTHSSFKWRWYHFDGVDWDQSRRLNNRIYKFRGHGKAWDWEVDTENGNYDYLMYADIDMDHPEVVNELRNWGVWYTNTLGLDGFRIDAVKHIKYSFTRDWINHVRSATGKNMFAVAEFWKNDLGAIENYLQKTNWNHSVFDVPLHYNLYNASKSGGNYDMRNIFNGTVVQRHPSHAVTFVDNHDSQPEEALESFVEEWFKPLAYALTLTREQGYPSVFYGDYYGIPTHGVPAMRSKIDPILEARQKYAYGKQNDYLDHHNIIGWTREGNTAHPNSGLATIMSDEAGGSKWMFVGRNKAGQVWSDITGNRTGTVTINADGWGNFSVNGGSVSIWVNK

SEQ ID NO: 22788 - protein, 485 aa, Bacillus sp. 707
HHNGTNGTMMQYFEWYLPNDGNHWNRLNSDASNLKSKGITAVWIPPAWKGASQNDVGYGAYDLYDLGEFNQKGTVRTKYGTRSQLQAAVTSLKNNGIQVYGDVVMNHKGGADATEMVRAVEVNPNNRNQEVTGEYTIEAWTRFDFPGRGNTHSSFKWRWYHFDGVDWDQSRRLNNRIYKFRGHGKAWDWEVDTENGNYDYLMYADIDMDHPEVVNELRNWGVWYTNTLGLDGFRIDAVKHIKYSFTRDWINHVRSATGKNMFAVAEFWKNDLGAIENYLQKTNWNHSVFDVPLHYNLYNASKSGGNYDMRNIFNGTVVQRHPSHAVTFVDNHDSQPEEALESFVEEWFKPLAYALTLTREQGYPSVFYGDYYGIPTHGVPAMRSKIDPILEARQKYAYGKQNDYLDHHNIIGWTREGNTAHPNSGLATIMSDGAGGSKWMFVGRQKAGQVWSDITGNRTGTVTINADGWGNFSVNGGSVSIWVNK

SEQ ID NO: 22789 - protein, 485 aa, Bacillus sp. 707
HHNGTNGTMMQYFEWYLPNDGNHWNRLNSDASNLKSKGITAVWIPPAWKGASQNDVGYGAYDLYDLGEFNQKGTVRTKYGTRSQLQAAVTSLKNNGIQVYGDVVMNHKGGADATEMVRAVEVNPNNRNQEVTGEYTIEAWTRFDFPGRGNTHSSFKWRWYHFDGVDWDQSRRLNNRIYKFRGHGKAWDWEVDTENGNYDYLMYADIDMDHPEVVNELRNWGVWYTNTLGLDGFRIDAVKHIKYSFTRDWINHVRSATGKNMFAVAEFWKNDLGAIENYLQKTNWNHSVFDVPLHYNLYNASKSGGNYDMRNIFNGTVVQRHPSHAVTFVDNHDSQPEEALESFVEEWFKPLAYALTLTREQGYPSVFYGDYYGIPTHGVPAMRSKIDPILEARQKYAYGKQNDYLDHHNIIGWTREGNRAHPNSGLATIMSDGAGGSKWMFVGRNKAGQVWSDITGNRTGTVTINADGWGNFSVNGGSVSIWVNK

SEQ ID NO: 22790 - protein, 485 aa, Bacillus sp. 707
HHNGTNGTMMQYFEWYLPNDGNHWNRLNSDASNLKSKGITAVWIPPAWKGASQNDVGYGAYDLYDLGEFNQKGTVRTKYGTRSQLQAAVTSLKNNGIQVYGDVVMNHKGGADATEMVRAVEVNPNNRNQEVTGEYTIEAWTRFDFPGRGNTHSSFKWRWYHFDGVDWDQSRRLNNRIYKFRGHGKAWDWEVDTENGNYDYLMYADIDMDHPEVVNELRNWGVWYTNTLGLDGFRIDAVKHIKYSFTRDWINHVRSATGKNMFAVAEFWKNDLGAIENYLQKTNWNHSVFDVPLHYNLYNASKSGGNYDMRNIFNGTVVQRHPSHAVTFVDNHDSQPEEALESFVEEWFKPLAYALTLTRQQGYPSVFYGDYYGIPTHGVPAMRSKIDPILEARQKYAYGKQNDYLDHHNIIGWTREGNTAHPNSGLATIMSDGAGGSKWMFVGRNKAGQVWSDITGNRTGTVTINADGWGNFSVNGGSVSIWVNK

SEQ ID NO: 22791 - protein, 485 aa, Bacillus sp. 707
HHNGTNGTMMQYFEWYLPNDGWHWNRLNSDASNLKSKGITAVWIPPAWKGASQNDVGYGAYDLYDLGEFNQKGTVRTKYGTRSQLQAAVTSLKNNGIQVYGDVVMNHKGGADATEMVRAVEVNPNNRNQEVTGEYTIEAWTRFDFPGRGNTHSSFKWRWYHFDGVDWDQSRRLNNRIYKFRGHGKAWDWEVDTENGNYDYLMYADIDMDHPEVVNELRNWGVWYTNTLGLDGFRIDAVKHIKYSFTRDWINHVRSATGKNMFAVAEFWKNDLGAIENYLQKTNWNHSVFDVPLHYNLYNASKSGGNYDMRNIFNGTVVQRHPSHAVTFVDNHDSQPEEALESFVEEWFKPLAYALTLTREQGYPSVFYGDYYGIPTHGVPAMRSKIDPILEARQKYAYGKQNDYLDHHNIIGWTREGNTAHPNSGLATIMSDGAGGSKWMFVGRNKAGQVWSDITGNRTGTVTINADGWGNFSVNGGSVSIWVNK

SEQ ID NO: 22792 - protein, 485 aa, Bacillus sp. 707
HHNGTNGTMMQYFEWYLPNDGNHWNRLNSDASNLKSKGITAVWIPPAWKGASQNDVGYGAYDLYDLGEFNQKGTVRTKYGTRSQLQAAVTSLKNNGIQVYGDVVMNHKGGADATEMVRAVEVNPNNRNQEVTGEYTIEAWTRFDFPGRGNTHSSFKWRWDHFDGVDWDQSRRLNNRIYKFRGHGKAWDWEVDTENGNYDYLMYADIDMDHPEVVNELRNWGVWYTNTLGLDGFRIDAVKHIKYSFTRDWINHVRSATGKNMFAVAEFWKNDLGAIENYLQKTNWNHSVFDVPLHYNLYNASKSGGNYDMRNIFNGTVVQRHPSHAVTFVDNHDSQPEEALESFVEEWFKPLAYALTLTREQGYPSVFYGDYYGIPTHGVPAMRSKIDPILEARQKYAYGKQNDYLDHHNIIGWTREGNTAHPNSGLATIMSDGAGGSKWMFVGRNKAGQVWSDITGNRTGTVTINADGWGNFSVNGGSVSIWVNK

SEQ ID NO: 22793 - protein, 485 aa, Bacillus sp. 707
HHNGTNGTMMQYFEWYLPNDGNHWNRLNSDASNLKSKGITAVWIPPAWKGASQNDVGYGAYDLYDLGEFNQKGTVRTKYGTRSQLQAAVTSLKNNGIQVYGDVVMNHKGGADATEMVRAVEVNPNNRNQEVTGEYTIEAWTRFDFPGRHNTHSSFKWRWYHFDGVDWDQSRRLNNRIYKFRGHGKAWDWEVDTENGNYDYLMYADIDMDHPEVVNELRNWGVWYTNTLGLDGFRIDAVKHIKYSFTRDWINHVRSATGKNMFAVAEFWKNDLGAIENYLQKTNWNHSVFDVPLHYNLYNASKSGGNYDMRNIFNGTVVQRHPSHAVTFVDNHDSQPEEALESFVEEWFKPLAYALTLTREQGYPSVFYGDYYGIPTHGVPAMRSKIDPILEARQKYAYGKQNDYLDHHNIIGWTREGNTAHPNSGLATIMSDGAGGSKWMFVGRNKAGQVWSDITGNRTGTVTINADGWGNFSVNGGSVSIWVNK

SEQ ID NO: 22794 - protein, 485 aa, Bacillus sp. 707
HHNGTNGTMMQYFEWYLPNDGNHWNRLNSDASNLKSKGITAVWIPPAWKGASQNDVGYGAYDLYDLGEFNQKGTVRTKYGTRSQLQAAVTSLKNNGIQVYGDVVMNHKGGADATEMVRAVEVNPNNRNQEVTGEYTIEAWTRFDFPGRGNTHSSFKWRWYHFDGVDWDQSRRLNNRIYKFRGHGKAWDWEVDTENGNYDYLMYADIDMDHPEVVNELRNWGVWYTNTLGLDGFRIDAVKHIKYSFTRDWINHVRSATGKNMCAVAEFWKNDLGAIENYLQKTNWNHSVFDVPLHYNLYNASKSGGNYDMRNIFNGTVVQRHPSHAVTFVDNHDSQPEEALESFVEEWFKPLAYALTLTREQGYPSVFYGDYYGIPTHGVPAMRSKIDPILEARQKYAYGKQNDYLDHHNIIGWTREGNTAHPNSGLATIMSDGAGGSKWMFVGRNKAGQVWSDITGNRTGTVTINADGWGNFSVNGGSVSIWVNK

SEQ ID NO: 22795 - protein, 485 aa, Bacillus sp. 707
HHNGTNGTMMQYFEWYLPNDGNHWNRLNSDASNLKSKGITAVWIPPAWKGASQNDVGYGAYDLYDLGEFNQKGTVRTKYGTRSQLQAAVTSLKNNGIQVYGDVVMNHKGGADATEMVRAVEVNPNNRNQEVTGEYTIEAWTRFDFPGRGNTHSSFKWRWYHFDGVDWDQSRRLNNRIYKFRGHGKAWDWEVDTENGNYDYLMYADIDMDHPEVVNELRNWGVWYTNTLGLDGFRIDAVKHIKYSFTRDWINHVRSATGKNMFAVAEFWKNDLGAIENYLQKTNWNHSVFDVPLHYNLYNASKSGGNYDMRNIFNGTVVQRHPSHAVTFVDNHDSQPEEALESFVEEWFKPLAYALTLTREQGYPSVFYGDYYGIRTHGVPAMRSKIDPILEARQKYAYGKQNDYLDHHNIIGWTREGNTAHPNSGLATIMSDGAGGSKWMFVGRNKAGQVWSDITGNRTGTVTINADGWGNFSVNGGSVSIWVNK

SEQ ID NO: 22796 - protein, 485 aa, Bacillus sp. 707
HHNGTNGTMMQYFEWYLPNDGNHWNRLNSDASNLKSKGITAVWIPPAWKGASQNDVGYGAYDLYDLGEFNQKYTVRTKYGTRSQLQAAVTSLKNNGIQVYGDVVMNHKGGADATEMVRAVEVNPNNRNQEVTGEYTIEAWTRFDFPGRGNTHSSFKWRWYHFDGVDWDQSRRLNNRIYKFRGHGKAWDWEVDTENGNYDYLMYADIDMDHPEVVNELRNWGVWYTNTLGLDGFRIDAVKHIKYSFTRDWINHVRSATGKNMFAVAEFWKNDLGAIENYLQKTNWNHSVFDVPLHYNLYNASKSGGNYDMRNIFNGTVVQRHPSHAVTFVDNHDSQPEEALESFVEEWFKPLAYALTLTREQGYPSVFYGDYYGIPTHGVPAMRSKIDPILEARQKYAYGKQNDYLDHHNIIGWTREGNTAHPNSGLATIMSDGAGGSKWMFVGRNKAGQVWSDITGNRTGTVTINADGWGNFSVNGGSVSIWVNK

SEQ ID NO: 22797 - protein, 485 aa, Bacillus sp. 707
HHNGTNGTMMQYFEWYLPNDGNHWNRLNSDASNLKSKGITAVWIPPAWKGASQNDVGYGAYDLYDLGEFNQKGTVRTKYGTRSQLQAAVTSLKNNGIQVYGDVVMNHKGGADATEMVRAVEVNPNNRNQEVTGEYTIEAWTRFDFPGRGNTHSSFKWRWYHFDGVDWDQSRRLNNRIYKFRGHGKAWDWEVDTENGNYDYLMYADIDMDHPEVVNELRNWGVWYTNTLGLDGFRIDAVKHIKYSFTRDWINHVRSATGKNMFAVAEFWKNDLGAIENYLQKTNWNHSVFDVPLHYNLYNASKSGGNYDMRNIFNGTVVQRHPSHAVTFVDNHDSQPEEALESFVEEWFKPLAYALTLTREQGYPSVFYGDYYGIPTHGVPAMRSKIDPILEARQKYAYGKQNDYLDHHNIIGWTREGNTAHPNSGLATIMSDGAGGSKWMFVGRNKAGQVWSDITGNRTGYVTINADGWGNFSVNGGSVSIWVNK

SEQ ID NO: 22798 - protein, 485 aa, Bacillus sp. 707
HHNGTNGTMMQYFEWYLPNDGNHWNRLNSDASNLKSKGITAVWIPPAWKGASQNDVGYGAYDLYDLGEFNQKGTVRTKYGTRSQLQAAVTSLKNNGIQVYGDVVMNHKGGADATEMVRAVEVNPNNRNQEVTGEYTIEAWTRFDFPGRVNTHSSFKWRWYHFDGVDWDQSRRLNNRIYKFRGHGKAWDWEVDTENGNYDYLMYADIDMDHPEVVNELRNWGVWYTNTLGLDGFRIDAVKHIKYSFTRDWINHVRSATGKNMFAVAEFWKNDLGAIENYLQKTNWNHSVFDVPLHYNLYNASKSGGNYDMRNIFNGTVVQRHPSHAVTFVDNHDSQPEEALESFVEEWFKPLAYALTLTREQGYPSVFYGDYYGIPTHGVPAMRSKIDPILEARQKYAYGKQNDYLDHHNIIGWTREGNTAHPNSGLATIMSDGAGGSKWMFVGRNKAGQVWSDITGNRTGTVTINADGWGNFSVNGGSVSIWVNK

SEQ ID NO: 22799 - protein, 485 aa, Bacillus sp. 707
HHNGTNGTMMQYFEWYLPNDGNHWNRLNSDASNLKSKGITAVWIPPAWKGASQNDVGYGAYDLYDLGEFNQKGTVRTKYGTRSQLQAAVTSLKNNGIQVYGDVVMNHKGGADATEMVRAVEVNPNNRNQEVTGEYTIEAWTRFDFPGRGNTHSSFKWRWYHFDGVDWDQSRRLNNRIYKFRGHGKAWDWEVDTENGNYDYLMYADIDMDHPEVVNELRNWGVWYTNTLGLDGFRIDAVKHIKYSFTRDWINHVRSATGKNMQAVAEFWKNDLGAIENYLQKTNWNHSVFDVPLHYNLYNASKSGGNYDMRNIFNGTVVQRHPSHAVTFVDNHDSQPEEALESFVEEWFKPLAYALTLTREQGYPSVFYGDYYGIPTHGVPAMRSKIDPILEARQKYAYGKQNDYLDHHNIIGWTREGNTAHPNSGLATIMSDGAGGSKWMFVGRNKAGQVWSDITGNRTGTVTINADGWGNFSVNGGSVSIWVNK

SEQ ID NO: 22800 - protein, 485 aa, Bacillus sp. 707
HHNGTNGTMMQYFEWYLPNDGNHWNRLNSDASNLKSKGITAVWIPPAWKGASQNDVGYGAYDLYDLGEFNQKGTVRTKYGTRSQLQAAVTSLKNNGIQVYGDVVMNHKGGADATEMVRAVEVNPNNRNQEVTGEYTIEAWTRFDFPGRGNTHSSFKWRWYHFDGVDWDQSRRLNNRIYKFRGHGKAWDWEVDTENGNYDYLMYADIDMDCPEVVNELRNWGVWYTNTLGLDGFRIDAVKHIKYSFTRDWINHVRSATGKNMFAVAEFWKNDLGAIENYLQKTNWNHSVFDVPLHYNLYNASKSGGNYDMRNIFNGTVVQRHPSHAVTFVDNHDSQPEEALESFVEEWFKPLAYALTLTREQGYPSVFYGDYYGIPTHGVPAMRSKIDPILEARQKYAYGKQNDYLDHHNIIGWTREGNTAHPNSGLATIMSDGAGGSKWMFVGRNKAGQVWSDITGNRTGTVTINADGWGNFSVNGGSVSIWVNK

SEQ ID NO: 22801 - protein, 485 aa, Bacillus sp. 707
HHNETNGTMMQYFEWYLPNDGNHWNRLNSDASNLKSKGITAVWIPPAWKGASQNDVGYGAYDLYDLGEFNQKGTVRTKYGTRSQLQAAVTSLKNNGIQVYGDVVMNHKGGADATEMVRAVEVNPNNRNQEVTGEYTIEAWTRFDFPGRGNTHSSFKWRWYHFDGVDWDQSRRLNNRIYKFRGHGKAWDWEVDTENGNYDYLMYADIDMDHPEVVNELRNWGVWYTNTLGLDGFRIDAVKHIKYSFTRDWINHVRSATGKNMFAVAEFWKNDLGAIENYLQKTNWNHSVFDVPLHYNLYNASKSGGNYDMRNIFNGTVVQRHPSHAVTFVDNHDSQPEEALESFVEEWFKPLAYALTLTREQGYPSVFYGDYYGIPTHGVPAMRSKIDPILEARQKYAYGKQNDYLDHHNIIGWTREGNTAHPNSGLATIMSDGAGGSKWMFVGRNKAGQVWSDITGNRTGTVTINADGWGNFSVNGGSVSIWVNK

SEQ ID NO: 22802 - protein, 485 aa, Bacillus sp. 707
HHNGTNGTMMQYFEWYLPNDGNHWNRLNSDASNLKSKGITAVWIPPAWKGASQNDVGYGAYDLYDLGEFNQKGTVRTKYGTRSQLQAAVTSLKNNGIQVYGDVVMNHKGGADATEMVRAVEVNPNNRNQEVTGEYTIEAWTRFDFPGRGNTHSSFKWRWYHFDGVDWDQSRRLNNRIYKFRGHGKAWDWEVDTENGNYDYLMYADIDMDHPEVVNELRNWGVWYTNTLGLDGFRIDAVKHIKYSFTRDWINHVRSATGKNMYAVAEFWKNDLGAIENYLQKTNWNHSVFDVPLHYNLYNASKSGGNYDMRNIFNGTVVQRHPSHAVTFVDNHDSQPEEALESFVEEWFKPLAYALTLTREQGYPSVFYGDYYGIPTHGVPAMRSKIDPILEARQKYAYGKQNDYLDHHNIIGWTREGNTAHPNSGLATIMSDGAGGSKWMFVGRNKAGQVWSDITGNRTGTVTINADGWGNFSVNGGSVSIWVNK

SEQ ID NO: 22803 - protein, 485 aa, Bacillus sp. 707
HHNGTNGTMMQYFEWYLPNDGNHWNRLNSDASNLKSKGITAVWIPPAWKGASQNDVGYGAYDLYDLGEFNQKGTVRTKYGTRSQLQAAVTSLKNNGIQVYGDVVMNHKGGADATEMVRAVEVNPNNRNQEVTGEYTIEAWTRFDFPGRGNTHSSFKWRWYHFDGVDWDQSRRLNNRIYKFRGHGKAWDWEVDTENGNYDYLMYADIDMDHPEVVNELRNWGVWYTNTLGLDGFRIDAVKHIKYSFTRDWINHVRSATGKNMFAVAEFWKNDLGAIENYLQKTNWNHSVFDVPLHYNLYGASKSGGNYDMRNIFNGTVVQRHPSHAVTFVDNHDSQPEEALESFVEEWFKPLAYALTLTREQGYPSVFYGDYYGIPTHGVPAMRSKIDPILEARQKYAYGKQNDYLDHHNIIGWTREGNTAHPNSGLATIMSDGAGGSKWMFVGRNKAGQVWSDITGNRTGTVTINADGWGNFSVNGGSVSIWVNK

SEQ ID NO: 22804 - protein, 485 aa, Bacillus sp. 707
HHNGTNGTMMQYFEWYLPNDGNHWNRLNSDASNLKSKGITAVWIPPAWKGASQNDVGYGAYDLYDLGEFNQKGTVRTKYGTRSQLQAAVTSLKNNGIQVYGDVVMNHKGGADATEMVRAVEVNPNNRNQEVTGEYTIEAWTRFDFPGRGNTHSSFKWRWYHFDGVDWDQSRRLNNRIYKFRGHGKAWDWEVDTENGNYDYLMYADIDMDHPEVVNELRNWGVWYTNTLGLDGFRIDAVKHIKYSFTRDWINHVRSATGKNMFAVAEFWKNDLGAIENYLQKTNWNHSVFDVPLHYNLYNASKSGGNYDMRNIFNGTVVQRHPSHAVTFVDNHDSQPEEALESFVEEWFKPLAYALTLTRTQGYPSVFYGDYYGIPTHGVPAMRSKIDPILEARQKYAYGKQNDYLDHHNIIGWTREGNTAHPNSGLATIMSDGAGGSKWMFVGRNKAGQVWSDITGNRTGTVTINADGWGNFSVNGGSVSIWVNK

SEQ ID NO: 22805 - protein, 485 aa, Bacillus sp. 707
HHNGTNGTMMQYFEWYLPNDGNHWNRLNSDASNLKSKGITAVWIPPAWKGASQNDVGYGAYDLYDLGEFNQKGTVRTKYGTRSQLQAAVTSLKNNGIQVYGDVVMNHKGGADATEMVRAVEVNPNNRNQEVTGEYTIEAWTRFDFPGRGNTHSSFKWRWYHFDGVDWDQSRRLNNRIYKFRGHGKAWDWEVDTENGNYDYLMYADIDMDHPEVVNELRNWGVWYTNTLGLDGFRIDAVKHIKYSFTRDWINHVRSATGKNMFAVAEFWKNDLGAIENYLQKTNWNHSVFDVPLHYNLYNASKSGGNYDMRNIFNGTVVQRHPSHAVTFVDNHDSQPEEALESFVEEWFKPLAYALTLTREQGYPSVFYGDYYGIPTHGVPAMRSKIDPILEARQKYAYGKQNDYLDHHNIIGWTREGNTAWPNSGLATIMSDGAGGSKWMFVGRNKAGQVWSDITGNRTGTVTINADGWGNFSVNGGSVSIWVNK

SEQ ID NO: 22806 - protein, 485 aa, Bacillus sp. 707
HHNGTNGTMMQYFEWYLPNDGNHWNRLNSDASNLKSKGITAVWIPPAWKGASQNDVGYGAYDLYDLGEFNQKGTVRTKYGTRSQLQAAVTSLKNNGIQVYGDVVMNHKGGADATEMVRAVEVNPNNRNQEVTGEYTIEAWTRFDFPGRGNTHSSFKWRWYHFDGVDWDQSRRLNNRIYKFRGHGKAWDWEVDTENGNYDYLMYADIDMDHPEVVNENRNWGVWYTNTLGLDGFRIDAVKHIKYSFTRDWINHVRSATGKNMFAVAEFWKNDLGAIENYLQKTNWNHSVFDVPLHYNLYNASKSGGNYDMRNIFNGTVVQRHPSHAVTFVDNHDSQPEEALESFVEEWFKPLAYALTLTREQGYPSVFYGDYYGIPTHGVPAMRSKIDPILEARQKYAYGKQNDYLDHHNIIGWTREGNTAHPNSGLATIMSDGAGGSKWMFVGRNKAGQVWSDITGNRTGTVTINADGWGNFSVNGGSVSIWVNK

SEQ ID NO: 22807 - protein, 483 aa, Bacillus sp. SP70
HHNGTNGTMMQYFEWYLPNDGNHWNRLNSDASNLKSKGITAVWIPPAWKGASQNDVGYGAYDLYDLGEFNQKGTVRTKYGTRSQLQAAVTSLKNNGIQVYGDVVMNHKGGADATEMVRAVEVNPNNRNQEVTGEYTIEAFTRFDFPGRGNTHSSFKWRWYHFDGVDWDQSRRLNNRIYKFRGKAWDWEVDTENGNYDYLMYADIDMDHPEVVNELRNWGVWYTNTLGLDGFRIDAVKHIKYSFTRDWINHVRSATGKNMFAVAEFWKNDLGAIENYLQKTNWNHSVFDVPLHYNLYNASKSGGNYDMRNIFNGTVVQRHPSHAVTFVDNHDSQPEEALESFVEEWFKPLAYALTLTREQGYPSVFYGDYYGIPTHGVPAMRSKIDPILEARQKYAYGKQNDYLDHHNIIGWTREGNTAHPNSGLATIMSDGAGGSKWMFVGRNKAGQVWSDITGNRTGTVTINADGWGNFSVNGGSVSIWVNK

SEQ ID NO: 22808 - protein, 485 aa, Bacillus sp. 707
HHNGTNLTMMQYFEWYLPNDGNHWNRLNSDASNLKSKGITAVWIPPAWKGASQNDVGYGAYDLYDLGEFNQKGTVRTKYGTRSQLQAAVTSLKNNGIQVYGDVVMNHKGGADATEMVRAVEVNPNNRNQEVTGEYTIEAWTRFDFPGRGNTHSSFKWRWYHFDGVDWDQSRRLNNRIYKFRGHGKAWDWEVDTENGNYDYLMYADIDMDHPEVVNELRNWGVWYTNTLGLDGFRIDAVKHIKYSFTRDWINHVRSATGKNMFAVAEFWKNDLGAIENYLQKTNWNHSVFDVPLHYNLYNASKSGGNYDMRNIFNGTVVQRHPSHAVTFVDNHDSQPEEALESFVEEWFKPLAYALTLTREQGYPSVFYGDYYGIPTHGVPAMRSKIDPILEARQKYAYGKQNDYLDHHNIIGWTREGNTAHPNSGLATIMSDGAGGSKWMFVGRNKAGQVWSDITGNRTGTVTINADGWGNFSVNGGSVSIWVNK

SEQ ID NO: 22809 - protein, 485 aa, Bacillus sp. 707
HHNGTNGTMMQYFEWYLPNDGNHWNRLNSDASNLKSKGITAVWIPPAWKGASQNDVGYGAYDLYDLGEFNQKGTVRTKYGTRSQLQAAVTSLKNNGIQVYGDVVMNHKGGADATEMVRAVEVNPNNRNQEVTGEYTIEAWTRFDFEGRGNTHSSFKWRWYHFDGVDWDQSRRLNNRIYKFRGHGKAWDWEVDTENGNYDYLMYADIDMDHPEVVNELRNWGVWYTNTLGLDGFRIDAVKHIKYSFTRDWINHVRSATGKNMFAVAEFWKNDLGAIENYLQKTNWNHSVFDVPLHYNLYNASKSGGNYDMRNIFNGTVVQRHPSHAVTFVDNHDSQPEEALESFVEEWFKPLAYALTLTREQGYPSVFYGDYYGIPTHGVPAMRSKIDPILEARQKYAYGKQNDYLDHHNIIGWTREGNTAHPNSGLATIMSDGAGGSKWMFVGRNKAGQVWSDITGNRTGTVTINADGWGNFSVNGGSVSIWVNK

SEQ ID NO: 22810 - protein, 485 aa, Bacillus sp. 707
HHNGTNGTMMQYFEWYLPNDGNHWNRLNSDASNLKSKGITAVWIPPAWKGASQNDVGYGAYDLYDLGEFNQKGTVRTKYGTRSQLQAAVTSLKNNGIQVYGDVVMNHKGGADATEMVRAVEVNPNNRNQEVTGEYTIEAWTRFDFPGRGNTHSSFKWRWYHFDGVDWDWSRRLNNRIYKFRGHGKAWDWEVDTENGNYDYLMYADIDMDHPEVVNELRNWGVWYTNTLGLDGFRIDAVKHIKYSFTRDWINHVRSATGKNMFAVAEFWKNDLGAIENYLQKTNWNHSVFDVPLHYNLYNASKSGGNYDMRNIFNGTVVQRHPSHAVTFVDNHDSQPEEALESFVEEWFKPLAYALTLTREQGYPSVFYGDYYGIPTHGVPAMRSKIDPILEARQKYAYGKQNDYLDHHNIIGWTREGNTAHPNSGLATIMSDGAGGSKWMFVGRNKAGQVWSDITGNRTGTVTINADGWGNFSVNGGSVSIWVNK

SEQ ID NO: 22811 - protein, 485 aa, Bacillus sp. 707
HHNGTNGTMMQYFEWYLPNDGNHWNRLNSDASNLKSKGITAVWIPPAWKGASQNDVGYGAYDLYDLGEFNQKGTVRTKYGTRSQLQAAVTSLKNNGIQVYGDVVMNHKGGADATEMVRAVEVNPNNRNQEVTGEYTIEAWTRFDFPGRGNTHSSFKWRWYHFDGVDWDQSRRLNNRIYKFRGHGKAWDWEVDTENGNYDYLMYADIDMDHPEVVNELRNWGVWYTNTLGLDGFRIDAVKHIKYSFTRDWINHVRSATGKNMFAVAEFWKNDLGAIENYLQKTNWNHSVFDVPLHYNLYNASKSGGNYDMRNIFNGTVVQRHPSHAVTFVDNHDSQPEEALESFVEEWFKPLAYALTLTREQGYPSVFYGDYYGIPTHGVPAMRSKIDPILEARQKYAYGKQNDYLDHHNIIGWTREGNTAHPNSGLATIMSDGAGGSKWMFVGRNKAGQVWSDITGNRTGNVTINADGWGNFSVNGGSVSIWVNK

SEQ ID NO: 22812 - protein, 485 aa, Bacillus sp. 707
HHNGTNGTMMQYFEWYLPNDGNHWNRLNSDASNLKSKGITAVWIPPAWKGASQNDVGYGAYDLYDLGEFNQKGTVRTKYGTRSQLQAAVTSLKNNGIDVYGDVVMNHKGGADATEMVRAVEVNPNNRNQEVTGEYTIEAWTRFDFPGRGNTHSSFKWRWYHFDGVDWDQSRRLNNRIYKFRGHGKAWDWEVDTENGNYDYLMYADIDMDHPEVVNELRNWGVWYTNTLGLDGFRIDAVKHIKYSFTRDWINHVRSATGKNMFAVAEFWKNDLGAIENYLQKTNWNHSVFDVPLHYNLYNASKSGGNYDMRNIFNGTVVQRHPSHAVTFVDNHDSQPEEALESFVEEWFKPLAYALTLTREQGYPSVFYGDYYGIPTHGVPAMRSKIDPILEARQKYAYGKQNDYLDHHNIIGWTREGNTAHPNSGLATIMSDGAGGSKWMFVGRNKAGQVWSDITGNRTGTVTINADGWGNFSVNGGSVSIWVNK

SEQ ID NO: 22813 - protein, 485 aa, Bacillus sp. 707
HQNGTNGTMMQYFEWYLPNDGNHWNRLNSDASNLKSKGITAVWIPPAWKGASQNDVGYGAYDLYDLGEFNQKGTVRTKYGTRSQLQAAVTSLKNNGIQVYGDVVMNHKGGADATEMVRAVEVNPNNRNQEVTGEYTIEAWTRFDFPGRGNTHSSFKWRWYHFDGVDWDQSRRLNNRIYKFRGHGKAWDWEVDTENGNYDYLMYADIDMDHPEVVNELRNWGVWYTNTLGLDGFRIDAVKHIKYSFTRDWINHVRSATGKNMFAVAEFWKNDLGAIENYLQKTNWNHSVFDVPLHYNLYNASKSGGNYDMRNIFNGTVVQRHPSHAVTFVDNHDSQPEEALESFVEEWFKPLAYALTLTREQGYPSVFYGDYYGIPTHGVPAMRSKIDPILEARQKYAYGKQNDYLDHHNIIGWTREGNTAHPNSGLATIMSDGAGGSKWMFVGRNKAGQVWSDITGNRTGTVTINADGWGNFSVNGGSVSIWVNK

SEQ ID NO: 22814 - protein, 485 aa, Bacillus sp.
HHNGTNGTMMQYFEWYLPNDGNHWNRLNSDASNLKSKGITAVWIPPAWKGASQNDVGYGAYDLYDLGEFNQKGTVRTKYGTRSQLQAAVTSLKNNGIQVYGDVVMNHKGGADATEMVRAVEVNPNNRNQEVTGEYTIEAWTRFDFPGRGNTHSSFKWRWYHFDGVDWDQSRRLNNRIYKFRGHGKAWDWEVDTENGNYDYLMYADYDMDHPESVNELRNWGVWYTNTLGLDGFRIDAVKHIKYSFTRDWINHVRSATGKNMFAVAEFWKNDLGAIENYLQKTNWNHSVFDVPLHYNLYNASKSGGNYDMRNIFNGTVVQRHPSHAVTFVDNHDSQPEEALESFVEEWFKPLAYALTLTREQGYPSVFYGDYYGIPTHGVPAMRSKIDPILEARQKYAYGKQNDYLDHHNIIGWTREGNTAHPNSGLATIMSDGAGGSKWMFVGRNKAGQVWSDITGNRTGTVTINADGWGNFSVNGGSVSIWVNK

SEQ ID NO: 22815 - protein, 485 aa, Bacillus sp. 707
HHNGTNGTMMQYFEWYLPNDGNHWNRLNSDASNLKSKGITAVWIPPAWKGASQNDVGYGAYDLYDLGEFNQKGTVRTKYGIRSQLQAAVTSLKNNGIQVYGDVVMNHKGGADATEMVRAVEVNPNNRNQEVTGEYTIEAWTRFDFPGRGNTHSSFKWRWYHFDGVDWDQSRRLNNRIYKFRGHGKAWDWEVDTENGNYDYLMYADIDMDHPEVVNELRNWGVWYTNTLGLDGFRIDAVKHIKYSFTRDWINHVRSATGKNMFAVAEFWKNDLGAIENYLQKTNWNHSVFDVPLHYNLYNASKSGGNYDMRNIFNGTVVQRHPSHAVTFVDNHDSQPEEALESFVEEWFKPLAYALTLTREQGYPSVFYGDYYGIPTHGVPAMRSKIDPILEARQKYAYGKQNDYLDHHNIIGWTREGNTAHPNSGLATIMSDGAGGSKWMFVGRNKAGQVWSDITGNRTGTVTINADGWGNFSVNGGSVSIWVNK

SEQ ID NO: 22816 - protein, 485 aa, Bacillus sp. 707
HPNGTNGTMMQYFEWYLPNDGNHWNRLNSDASNLKSKGITAVWIPPAWKGASQNDVGYGAYDLYDLGEFNQKGTVRTKYGTRSQLQAAVTSLKNNGIQVYGDVVMNHKGGADATEMVRAVEVNPNNRNQEVTGEYTIEAWTRFDFPGRGNTHSSFKWRWYHFDGVDWDQSRRLNNRIYKFRGHGKAWDWEVDTENGNYDYLMYADIDMDHPEVVNELRNWGVWYTNTLGLDGFRIDAVKHIKYSFTRDWINHVRSATGKNMFAVAEFWKNDLGAIENYLQKTNWNHSVFDVPLHYNLYNASKSGGNYDMRNIFNGTVVQRHPSHAVTFVDNHDSQPEEALESFVEEWFKPLAYALTLTREQGYPSVFYGDYYGIPTHGVPAMRSKIDPILEARQKYAYGKQNDYLDHHNIIGWTREGNTAHPNSGLATIMSDGAGGSKWMFVGRNKAGQVWSDITGNRTGTVTINADGWGNFSVNGGSVSIWVNK

SEQ ID NO: 22817 - protein, 485 aa, Bacillus sp. 707
HHNGTNGTMMQYFEWYLPNDGNHWNRLNSDASNLKSKGITAVWIPPAWKGASQNDVGYGAYDLYDLGEFNQKGTVRTKYGTRSQLQAAVTSLKNNGIQVYGDVVMNHKGGADATEMVRAVEVNPNNRNQEVTGEYTIEAWTRFDFPGRGNTHSSFKWRWYHFDGVDWDQSRRLNNRIYKFRGHGKAWDWEVDTENGNYDYLMYADIDMDHPEVVNELRNWGVWYTNTLGLDGFRIDAVKHIKYSFTRDWINHVRSATGKNMFAVAEFWKNDLGAIENYLQKTNWNHSVFDVPLHYNLYNASKSGGNYDMRNIFNGTVVQRHPSHAVTFVDNHDSQPEEALESFVEEWFKPLAYALTLTREQGIPSVFYGDYYGIPTHGVPAMRSKIDPILEARQKYAYGKQNDYLDHHNIIGWTREGNTAHPNSGLATIMSDGAGGSKWMFVGRNKAGQVWSDITGNRTGTVTINADGWGNFSVNGGSVSIWVNK

SEQ ID NO: 22818 - protein, 485 aa, Bacillus sp. 707
HHNGTNGTMMQYFEWYLPNDGNHWNRLNSDASNLKSKGITAVWIPPAWKGASQNDVGYGAYDLYDLGEFNQKGTVRTKYGTRSQLQAAVTSLKNNGIQVYGDVVMNHKGGADATEMVRAVEVNPNNRNQEVTGEYTIEAWTRFDFPGRGNTHSSFKWRWYHFDGVDWDQSRRLNNRIYKFRGHGKAWDWEVDTENGNYDYLMYADIDMDHPEVVNELRNWGVWYTNTLGLDGFRIDAVKHIKYSFTRDWINHVRSATGKNMFAVAEFWKNDLGAIENYLQKTNWNHSVFDVPLHYNLYNASKSGGNYDMRNIFNGTVVQRHPSHAVTFVDNHDSQPEEALESFVEEWFKPLAYALTLTREQGYPSVFYGDYYGIPTHGVPAMRSKIDKILEARQKYAYGKQNDYLDHHNIIGWTREGNTAHPNSGLATIMSDGAGGSKWMFVGRNKAGQVWSDITGNRTGTVTINADGWGNFSVNGGSVSIWVNK

SEQ ID NO: 22819 - protein, 483 aa, Bacillus sp.
HHNGTNGTLMQYFEWYLPNDGNHWNRLRSDASNLKDKGISAVWIPPAWKGTSQNDVGYGAYDLYDLGEFNQKGTIRTKYGTRNQLQAAVNALKSNGIQVYGDVVMNHKGGADATEMVKAVEVNPNNRNQEVSGEYTIEAWTKFDFPGRANTHSNFKWRWYHFDGVDWDQSRKLQNRIYKFRTKAWDWEVDTEFGNYDYLMYADIDMDHPEVVNELRNWGVWYTNTLGLDGFRIDAVKHIKYSFTRDWINHVRSAIGKNMFAVAEFWKGDLGAIENYLNKTNWNHSVFDVPLHFNLYYASKSGGNYDMRQIFNGTVVQKHPTHAVTFVDNHDSQPEESLESFVREWFKPLAYALTLTREQGYPSVFYGDYYGIPTHGVPAMKSKIDPILEARQKYAYGRQNDYLDHHNIIGWTREGNTAHPNSGLATIMSDGAGGNKWMFVGRNKAGQVWTDITGNKAGTVTINADGWGNFSVNGGSVSIWVNK

SEQ ID NO: 22820 - protein, 485 aa, Bacillus sp. 707
HHSGTNGTMMQYFEWYLPNDGNHWNRLNSDASNLKSKGITAVWIPPAWKGASQNDVGYGAYDLYDLGEFNQKGTVRTKYGTRSQLQAAVTSLKNNGIQVYGDVVMNHKGGADATEMVRAVEVNPNNRNQEVTGEYTIEAWTRFDFPGRGNTHSSFKWRWYHFDGVDWDQSRRLNNRIYKFRGHGKAWDWEVDTENGNYDYLMYADIDMDHPEVVNELRNWGVWYTNTLGLDGFRIDAVKHIKYSFTRDWINHVRSATGKNMFAVAEFWKNDLGAIENYLQKTNWNHSVFDVPLHYNLYNASKSGGNYDMRNIFNGTVVQRHPSHAVTFVDNHDSQPEEALESFVEEWFKPLAYALTLTREQGYPSVFYGDYYGIPTHGVPAMRSKIDPILEARQKYAYGKQNDYLDHHNIIGWTREGNTAHPNSGLATIMSDGAGGSKWMFVGRNKAGQVWSDITGNRTGTVTINADGWGNFSVNGGSVSIWVNK

SEQ ID NO: 22821 - protein, 485 aa, Bacillus sp. 707
HHNGTNGTMMQYFEWYLPNDGNHWNRLNSDAINLKSKGITAVWIPPAWKGASQNDVGYGAYDLYDLGEFNQKGTVRTKYGTRSQLQAAVTSLKNNGIQVYGDVVMNHKGGADATEMVRAVEVNPNNRNQEVTGEYTIEAWTRFDFPGRGNTHSSFKWRWYHFDGVDWDQSRRLNNRIYKFRGHGKAWDWEVDTENGNYDYLMYADIDMDHPEVVNELRNWGVWYTNTLGLDGFRIDAVKHIKYSFTRDWINHVRSATGKNMFAVAEFWKNDLGAIENYLQKTNWNHSVFDVPLHYNLYNASKSGGNYDMRNIFNGTVVQRHPSHAVTFVDNHDSQPEEALESFVEEWFKPLAYALTLTREQGYPSVFYGDYYGIPTHGVPAMRSKIDPILEARQKYAYGKQNDYLDHHNIIGWTREGNTAHPNSGLATIMSDGAGGSKWMFVGRNKAGQVWSDITGNRTGTVTINADGWGNFSVNGGSVSIWVNK

SEQ ID NO: 22822 - protein, 485 aa, Bacillus sp. 707
HHNGTNGTMMQYFEWYLPNDGNHWNRLNSDASNLKSKGITAVWIPPAWKGASQNDVGYGAYDLYDLGEFNQKGTVRTKYGTRSQLQAAVTSLKNNGIQVYGDVVMNHKGGADATEMVRAVEVNPNNRNQEVTGEYTIEAWTRFDFPGRGNTHSSFKWRWYHFDGVDWDQSRRLNNRIYKFRGHGKAWDWEVDTENGNYDYLMYADIDMDHPEVVNELRNWGVWYTNTLGLDGFRIDAVKHIKYSFTRDWINHVRSATGKNMMAVAEFWKNDLGAIENYLQKTNWNHSVFDVPLHYNLYNASKSGGNYDMRNIFNGTVVQRHPSHAVTFVDNHDSQPEEALESFVEEWFKPLAYALTLTREQGYPSVFYGDYYGIPTHGVPAMRSKIDPILEARQKYAYGKQNDYLDHHNIIGWTREGNTAHPNSGLATIMSDGAGGSKWMFVGRNKAGQVWSDITGNRTGTVTINADGWGNFSVNGGSVSIWVNK

SEQ ID NO: 22823 - protein, 485 aa, Bacillus sp. 707
HHNGTNGTMMQYFEWYLPNDGNHWNRLNSDASNLKSKGITAVWIPPAWKGASQNDVGYGAYDLYDLGEFNQKGTVRTKYGTRSQLQAAVTSLKNNGIQVYGDVVMNHKGGADKTEMVRAVEVNPNNRNQEVTGEYTIEAWTRFDFPGRGNTHSSFKWRWYHFDGVDWDQSRRLNNRIYKFRGHGKAWDWEVDTENGNYDYLMYADIDMDHPEVVNELRNWGVWYTNTLGLDGFRIDAVKHIKYSFTRDWINHVRSATGKNMFAVAEFWKNDLGAIENYLQKTNWNHSVFDVPLHYNLYNASKSGGNYDMRNIFNGTVVQRHPSHAVTFVDNHDSQPEEALESFVEEWFKPLAYALTLTREQGYPSVFYGDYYGIPTHGVPAMRSKIDPILEARQKYAYGKQNDYLDHHNIIGWTREGNTAHPNSGLATIMSDGAGGSKWMFVGRNKAGQVWSDITGNRTGTVTINADGWGNFSVNGGSVSIWVNK

SEQ ID NO: 22824 - protein, 485 aa, Bacillus sp. 707
HHNGTNGTMMQYFEWYLPNDGNHWNRLNSDASNLKSKGITAVWIPPAWKGASQNDVGYGAYDLYDLGEFNQKGTVRTKYGTRSQLQAAVTSLKNNGIQVYGDVVMNHKGGADATEMVRAVEVNPNNRNQEVTGEYTIEAWTRFDFPGRGNTHSSFKWRWYHFDGVDWDQSRRLNNRIYKFRGHGKAWDWEVDTENGNYDYLMYADIDMDHPEVVNELRNWGVWYTNTLGLDGFRIDAVKHIKYSFTRDWINHVRSATGKNMFAVAEFWKNDLGAIENYLQKTNWNHSVFDVPLHYNLYNASKSGGNYDMRNIFNGTVVQRHPSHAVTFVDNHDSQPEEALESFVEEWFKPLAYALTLTREQGYPSVFYGDYYGIPTHGVPAMRSKIDPILEARQKYAYGKQNDYLDHGNIIGWTREGNTAHPNSGLATIMSDGAGGSKWMFVGRNKAGQVWSDITGNRTGTVTINADGWGNFSVNGGSVSIWVNK

SEQ ID NO: 22825 - protein, 485 aa, Bacillus sp. 707
HHNGTNGTMMQYFEWYLPNDGNHWNRLNSDASDLKSKGITAVWIPPAWKGASQNDVGYGAYDLYDLGEFNQKGTVRTKYGTRSQLQAAVTSLKNNGIQVYGDVVMNHKGGADATEMVRAVEVNPNNRNQEVTGEYTIEAWTRFDFPGRGNTHSSFKWRWYHFDGVDWDQSRRLNNRIYKFRGHGKAWDWEVDTENGNYDYLMYADIDMDHPEVVNELRNWGVWYTNTLGLDGFRIDAVKHIKYSFTRDWINHVRSATGKNMFAVAEFWKNDLGAIENYLQKTNWNHSVFDVPLHYNLYNASKSGGNYDMRNIFNGTVVQRHPSHAVTFVDNHDSQPEEALESFVEEWFKPLAYALTLTREQGYPSVFYGDYYGIPTHGVPAMRSKIDPILEARQKYAYGKQNDYLDHHNIIGWTREGNTAHPNSGLATIMSDGAGGSKWMFVGRNKAGQVWSDITGNRTGTVTINADGWGNFSVNGGSVSIWVNK

SEQ ID NO: 22826 - protein, 485 aa, Bacillus sp. 707
HHNGTNGTMMQYFEWYLPNDGNHWNRLNSDASNLKSKGITAVWIPPAWKGASQNDVGYGAYDLYDLGEFNQKGTVRTKYGTRSQLQAAVTSLKNNGIQVYGDVVMNHKGGADATEMVRAVEVNPNNRNQEVTGEYTIEAWTRFDFPGRGNTHSSFKWRWYHFDGVDWDQSRRLNNRIYKFRGHGKAWDWEVDTENGNYDYLMYADIDMDHPEVVNELRNWGVWYTNTLGLDGFRIDAVKHIKYSFTRDWINHVRSATGKNMFAVAEFWKNDLGAIENYLQKTNWNHSVFDVPLHYNLYNASKSGGNYDMRNIFNGTVVQRHPSHAVTFVDNHDSQPEEALESFVEEWFKPLAYALTLTREQGYPSVFYGDYYGIQTHGVPAMRSKIDPILEARQKYAYGKQNDYLDHHNIIGWTREGNTAHPNSGLATIMSDGAGGSKWMFVGRNKAGQVWSDITGNRTGTVTINADGWGNFSVNGGSVSIWVNK

SEQ ID NO: 22827 - protein, 485 aa, Bacillus sp. 707
HHNGDNGTMMQYFEWYLPNDGNHWNRLNSDASNLKSKGITAVWIPPAWKGASQNDVGYGAYDLYDLGEFNQKGTVRTKYGTRSQLQAAVTSLKNNGIQVYGDVVMNHKGGADATEMVRAVEVNPNNRNQEVTGEYTIEAWTRFDFPGRGNTHSSFKWRWYHFDGVDWDQSRRLNNRIYKFRGHGKAWDWEVDTENGNYDYLMYADIDMDHPEVVNELRNWGVWYTNTLGLDGFRIDAVKHIKYSFTRDWINHVRSATGKNMFAVAEFWKNDLGAIENYLQKTNWNHSVFDVPLHYNLYNASKSGGNYDMRNIFNGTVVQRHPSHAVTFVDNHDSQPEEALESFVEEWFKPLAYALTLTREQGYPSVFYGDYYGIPTHGVPAMRSKIDPILEARQKYAYGKQNDYLDHHNIIGWTREGNTAHPNSGLATIMSDGAGGSKWMFVGRNKAGQVWSDITGNRTGTVTINADGWGNFSVNGGSVSIWVNK

SEQ ID NO: 22828 - protein, 485 aa, Bacillus sp. 707
HHNGTNGTMMQYFEWYLPNDGNHWNRLNSDASNLKSKGITAVWIPPAWKGASQNDVGYGAYDLYDLGEFNQKGTVRTKYGTRSQLQAAVTSLKNNGIQVYGDVVMNHKGGADATEMVRAVEVNPNNRNQEVTGEYTIEAWTRFDFPGRGNTHSSFKWRWYHFDGVDWDQSRRLNNRIYKFRGHGKAWDWEVDTENGNYDYLMYADIDMDHPEVVNELRNWGVWYTNTLGLDGFRIDAVKHIKYSFTRDWINHVRSATGKNMFAVAEFWKNDLGAIENYLQKTNWNHSVFDVPLHYNLYNASKSGGNYDMRNIFNGTVVQRHPSHAVTFVDNHDSQPEEALESFVEEWFKPLAYALTLTREQGYPSVFYGDYYGIPTHGVPAMRSKIDPILEARQKYAYGKQNDYLDHHNIIGWTREGNTAHTNSGLATIMSDGAGGSKWMFVGRNKAGQVWSDITGNRTGTVTINADGWGNFSVNGGSVSIWVNK

SEQ ID NO: 22829 - protein, 485 aa, Bacillus sp. 707
HHNGTNGTMMQYFEWYVPNDGNHWNRLNSDASNLKSKGITAVWIPPAWKGASQNDVGYGAYDLYDLGEFNQKGTVRTKYGTRSQLQAAVTSLKNNGIQVYGDVVMNHKGGADATEMVRAVEVNPNNRNQEVTGEYTIEAWTRFDFPGRGNTHSSFKWRWYHFDGVDWDQSRRLNNRIYKFRGHGKAWDWEVDTENGNYDYLMYADIDMDHPEVVNELRNWGVWYTNTLGLDGFRIDAVKHIKYSFTRDWINHVRSATGKNMFAVAEFWKNDLGAIENYLQKTNWNHSVFDVPLHYNLYNASKSGGNYDMRNIFNGTVVQRHPSHAVTFVDNHDSQPEEALESFVEEWFKPLAYALTLTREQGYPSVFYGDYYGIPTHGVPAMRSKIDPILEARQKYAYGKQNDYLDHHNIIGWTREGNTAHPNSGLATIMSDGAGGSKWMFVGRNKAGQVWSDITGNRTGTVTINADGWGNFSVNGGSVSIWVNK

SEQ ID NO: 22830 - protein, 485 aa, Bacillus sp. 707
HHNGTNGTMMQYFEWYLPNDGNHWNRLNSDASNLKSKGITAVWIPPAWKGASQNDVGYGAYDLYDLGEFNQKGTVRTKYGTRSQLQAAVTSLKNNGIQVYGDVVMNHKGGADATEMVRAVEVNPNNRNQEVTAEYTIEAWTRFDFPGRGNTHSSFKWRWYHFDGVDWDQSRRLNNRIYKFRGHGKAWDWEVDTENGNYDYLMYADIDMDHPEVVNELRNWGVWYTNTLGLDGFRIDAVKHIKYSFTRDWINHVRSATGKNMFAVAEFWKNDLGAIENYLQKTNWNHSVFDVPLHYNLYNASKSGGNYDMRNIFNGTVVQRHPSHAVTFVDNHDSQPEEALESFVEEWFKPLAYALTLTREQGYPSVFYGDYYGIPTHGVPAMRSKIDPILEARQKYAYGKQNDYLDHHNIIGWTREGNTAHPNSGLATIMSDGAGGSKWMFVGRNKAGQVWSDITGNRTGTVTINADGWGNFSVNGGSVSIWVNK

SEQ ID NO: 22831 - protein, 485 aa, Bacillus sp. 707
HHNGTNGTMMQYFEWYLPNDGNHWNRLNSDASNLKSKGITAVWIPPAWKGASQNDVGYGAYDLYDLGEFNQKGTVRTKYGTRSQLQAAVTSLKNNGIQVYGDVVMNHKGGADATEMVRAVEVNPNNRNQEVTGEYTIEAWTRFDFPGRRNTHSSFKWRWYHFDGVDWDQSRRLNNRIYKFRGHGKAWDWEVDTENGNYDYLMYADIDMDHPEVVNELRNWGVWYTNTLGLDGFRIDAVKHIKYSFTRDWINHVRSATGKNMFAVAEFWKNDLGAIENYLQKTNWNHSVFDVPLHYNLYNASKSGGNYDMRNIFNGTVVQRHPSHAVTFVDNHDSQPEEALESFVEEWFKPLAYALTLTREQGYPSVFYGDYYGIPTHGVPAMRSKIDPILEARQKYAYGKQNDYLDHHNIIGWTREGNTAHPNSGLATIMSDGAGGSKWMFVGRNKAGQVWSDITGNRTGTVTINADGWGNFSVNGGSVSIWVNK

SEQ ID NO: 22832 - protein, 485 aa, Bacillus sp. 707
HHNGTNGTMMQYFEWYLPNDGNHWNRLNSDASNLKSKGITAVWIPPAWKGASQNDVGYGAYDLYDLGEFNQKGTVRTKYGTRSQLQAAVTSLKNNGIQVYGDVVMNHKGGADATEMVRAVEVNPNNRNQEVTGEYTIEAWTRFDFPGRGNTHSSFKWRWYHFDGVDWDQSRRLNNRIYKFRGHGKAWDWEVDTENGNYDYLMYADIDMDHPEVVNELRNWGVWYTNTLGLDGFRIDAVKHIKYSFTRDWINHVRSATGKNMFAVAEFWKNDLGAIENYLQKTNWNHSVFDVPLHYNLYNASKSGGNYDMRNIFNGTVVQRHPSHAVTFVDNHDSQPEEALESFVEEWFKPLAYALTLTREQGYPSVFYGDYYGIPTHGVPAMRSKIDPILEARQKYAYGKQNDYLDHHNIIGWTREGNTAHPNSGLATIMSDGAGGSKWMFVGRNQAGQVWSDITGNRTGTVTINADGWGNFSVNGGSVSIWVNK

SEQ ID NO: 22833 - protein, 485 aa, Bacillus sp. 707
HHNGTNGTMMQYFEWYLPNDGNHWNRLNSDASNLKSKGITAVWIPPAWKGASQNDVGYGAYDLYDLGEFNQKGTVRTKYGTRSQLQAAVTSLKNNGIQVYGDVVMNHKGGADATEMVRAVEVNPNNRNQEVTGEYTIEAWTRFDFPGRGNTHSSFKWRWYHFDGVDWDQSRRLNNRIYKFRGHGKAWDWEVDTENGNYDYLMYADIDMDHPEVVNEMRNWGVWYTNTLGLDGFRIDAVKHIKYSFTRDWINHVRSATGKNMFAVAEFWKNDLGAIENYLQKTNWNHSVFDVPLHYNLYNASKSGGNYDMRNIFNGTVVQRHPSHAVTFVDNHDSQPEEALESFVEEWFKPLAYALTLTREQGYPSVFYGDYYGIPTHGVPAMRSKIDPILEARQKYAYGKQNDYLDHHNIIGWTREGNTAHPNSGLATIMSDGAGGSKWMFVGRNKAGQVWSDITGNRTGTVTINADGWGNFSVNGGSVSIWVNK

SEQ ID NO: 22834 - protein, 485 aa, Bacillus sp. 707
HHNGTNGTMMQYFEWYLPNDGNHWNRLNSDASNLKSKGITAVWIPPAWKGASQNDVGYGAYDLYDLGEFNQKGTVRTKYGTRSQLQAAVTSLKNIGIQVYGDVVMNHKGGADATEMVRAVEVNPNNRNQEVTGEYTIEAWTRFDFPGRGNTHSSFKWRWYHFDGVDWDQSRRLNNRIYKFRGHGKAWDWEVDTENGNYDYLMYADIDMDHPEVVNELRNWGVWYTNTLGLDGFRIDAVKHIKYSFTRDWINHVRSATGKNMFAVAEFWKNDLGAIENYLQKTNWNHSVFDVPLHYNLYNASKSGGNYDMRNIFNGTVVQRHPSHAVTFVDNHDSQPEEALESFVEEWFKPLAYALTLTREQGYPSVFYGDYYGIPTHGVPAMRSKIDPILEARQKYAYGKQNDYLDHHNIIGWTREGNTAHPNSGLATIMSDGAGGSKWMFVGRNKAGQVWSDITGNRTGTVTINADGWGNFSVNGGSVSIWVNK

SEQ ID NO: 22835 - protein, 485 aa, Bacillus sp. 707
HHNGTNGTMMQYFEWYLPNDGNHWNRLNSDASNLKSKGITAVWIPPAWKGASQNDVGYGAYDLYDLGEFNQKGTVRTKYGTRSQLQAAVTSLKNNGIQVYGDVVMNHKGGADATEMVRAVEVNPNNRNQEVTGEYTIEAWTRFDFPGRGNTHSSFKWRWYHFDGVDWDQSRRLNNRIYKFRGHGKAWDWEVDTENGNYDYLMYADIDMDHPEVVNELRNWGVWYTNTLGLDGFRIDAVKHIKYSFTRDWINHVRSATGKNMFAVAEFWKNDLGAIENYLQKTNWNHSVFDVPLHYNLYNASKSGGNYDMRNIFNGTVVQRHPSHAVTFVDNHDSQPEEALESFVEEWFKPLAYALTLTREQGYPSVFYGDYYGIPTHGVPAMRSKIDPILEARQKYAYGKQNDYLDHHNIIGWTREGNTAHPNSGLATIMSDAAGGSKWMFVGRNKAGQVWSDITGNRTGTVTINADGWGNFSVNGGSVSIWVNK

SEQ ID NO: 22836 - protein, 485 aa, Bacillus sp. 707
HHNGTNGTMMQYFEWYLPNDGNHWNRLNSDASNLKSKGITAVWIPPAWKGASQNDVGYGAYDLYDLGEFNQKGTVRTKYGTRSQLQAAVTSLKNNGIQVYGDVVMNHKGGADATEMVRAVEVNPNNRNQEVTGEYTIEAWTRFDFPGRGNTHSSFKWRWYHFDGVDWDQSRRLNNRIYKFRGHGKAWDWEVDTENGNYDYLMYADIDMDHPEVVNELRNWGVWYTNTLGLDGFRIDAVKHIKYSFTRDWINHVRSATGKNMFAVAEFWKNDLGAIENYLQKTNWNHSVFDVPLHYNLYNASKSGGNYDMRNIFNGTVVQRHPSHAVTFVDNHDSQPEEALESFVEEWFKPLAYALTLTREQGYPSVFYGDYYGIPTHGVPAMRSKIDPILEARQKYAYGKQNDYLDHHNIIGWTREGNTANPNSGLATIMSDGAGGSKWMFVGRNKAGQVWSDITGNRTGTVTINADGWGNFSVNGGSVSIWVNK

SEQ ID NO: 22837 - protein, 485 aa, Bacillus sp. 707
HHNGTNGTMMQYFEWYLPNDGNHWNRLNSDASNLKSKGITAVWIPPAWKGASQNDVGYGAYDLYDLGEFNQKGTVRTKYGTRSQLQAAVTSLKNNGIQVYGDVVMNHKGGADATEMVRAVEVNPNNRNQEVTGEYFIEAWTRFDFPGRGNTHSSFKWRWYHFDGVDWDQSRRLNNRIYKFRGHGKAWDWEVDTENGNYDYLMYADIDMDHPEVVNELRNWGVWYTNTLGLDGFRIDAVKHIKYSFTRDWINHVRSATGKNMFAVAEFWKNDLGAIENYLQKTNWNHSVFDVPLHYNLYNASKSGGNYDMRNIFNGTVVQRHPSHAVTFVDNHDSQPEEALESFVEEWFKPLAYALTLTREQGYPSVFYGDYYGIPTHGVPAMRSKIDPILEARQKYAYGKQNDYLDHHNIIGWTREGNTAHPNSGLATIMSDGAGGSKWMFVGRNKAGQVWSDITGNRTGTVTINADGWGNFSVNGGSVSIWVNK

SEQ ID NO: 22838 - protein, 485 aa, Bacillus sp. 707
HHNGTNGTMMQYFEWYLPNDGNHWNRLNSDASNLKSKGITAVWIPPAWKGASQNDVGYGAYDLYDLGEFNQKGTVRTKYGTRSQLQAAVTSLKNNGIQVYGDVVMNHKGGADATEMVRAVEVNPNNRNQEVTGEYTIEAWTRFDFPGRGNTHSSFKWRWYHFDGVDWDQSRRLNNRIYKFRGHGKAWDWEVDTENGNYDYLMYADIDMDHPEVVNELRNWGVWYTNTLGLDGFRIDAVKHIKYSFTRDWINHVRSATGKNMFAVAEFWKNDLHAIENYLQKTNWNHSVFDVPLHYNLYNASKSGGNYDMRNIFNGTVVQRHPSHAVTFVDNHDSQPEEALESFVEEWFKPLAYALTLTREQGYPSVFYGDYYGIPTHGVPAMRSKIDPILEARQKYAYGKQNDYLDHHNIIGWTREGNTAHPNSGLATIMSDGAGGSKWMFVGRNKAGQVWSDITGNRTGTVTINADGWGNFSVNGGSVSIWVNK

SEQ ID NO: 22839 - protein, 485 aa, Bacillus sp. 707
HHNGTNGTMMQYFEWYLPNDGNHWNRLNSDASNLKSKGITAVWIPPAWKGASQNDVGYGAYDLYDLGEFNQKGTVRTKYGTRSQLQAAVTSLKNNGIQVYGDVVMNHKGGADATEMVRAVEVNPNNRNQEVTGEYTIEAWTRFDFPGRGNTHSSFKWRWYHFDGVDWDQSRRLNNRIYKFRGHGKAWDWEVDTENGNYDYLMYADIDMDHPEVVNELRNWGVWYTNTLGLDGFRIDAVKHIKYSFTRDWINHVRSATGKNMFAVAEFWKNDLGAIENYLQKTNWNHSVFDVPLHYNLYNASKSGGNYDMRNIFNGTVVQRHPSHAVTFVDNHDSQPEEALESFVEEWFKPLAYALTLTREQGYPSVFYGDYYGIPTHGVPAMRSKIDPILEARQKYAYGKQNDYLDHHNIIGWTREGNTAHPNIGLATIMSDGAGGSKWMFVGRNKAGQVWSDITGNRTGTVTINADGWGNFSVNGGSVSIWVNK

SEQ ID NO: 22840 - protein, 485 aa, Bacillus sp. 707
HHNGTNGTMMQYFEWYLPNDGNHWNRLNSDASNLKSKGITAVWIPPAWKGASQNDVGYGAYDLYDLGEFNQKGTVRTKYGTRSQLQAAVTSLKNNGIQVYGDVVMNHKGGADATEMVRAVEVNPNNRNQEVTGEYTIEAWTRFDFPGRGNTHSSFKWRWYHFDGVDWDQSRRLNNRIYKFRGHGKAWDWEVDTENGNYDYLMYADIDMDHPEVVNECRNWGVWYTNTLGLDGFRIDAVKHIKYSFTRDWINHVRSATGKNMFAVAEFWKNDLGAIENYLQKTNWNHSVFDVPLHYNLYNASKSGGNYDMRNIFNGTVVQRHPSHAVTFVDNHDSQPEEALESFVEEWFKPLAYALTLTREQGYPSVFYGDYYGIPTHGVPAMRSKIDPILEARQKYAYGKQNDYLDHHNIIGWTREGNTAHPNSGLATIMSDGAGGSKWMFVGRNKAGQVWSDITGNRTGTVTINADGWGNFSVNGGSVSIWVNK

SEQ ID NO: 22841 - protein, 485 aa, Bacillus sp.
HHNGTNGTMMQYFEWYLPNDGNHWNRLRSDASNLKDKGISAVWIPPAWKGASQNDVGYGAYDLYDLGEFNQKGTIRTKYGTRNQLQAAVNALKSNGIQVYGDVVMNHKGGADATEMVRAVEVNPNNRNQEVSGEYTIEAWTKFDFPGRGNTHSNFKWRWYHFDGVDWDQSRKLNNRIYKFRGDGKGWDWEVDTENGNYDYLTYADIDMDHPEVVNELRNWGVWYTNTLGLDGFRIDAVKHIKYSFTRDWINHVRSATGKNMFAVAEFWKNDLGAIENYLNKTDWNHSVFDVPLHYNLYNASKSGGNYDMRQIFNGTVVQRHPMHAVTFVDNHDSQPEEALESFVEEWFKPLAYALTLTREEGYPSVFYGDYYGIPTHGVPAMKSKIDPILEARQKYAYGRQNDYLDHHNIIGWTREGNTAHPNSGLATIMSDGAGGNKWMFVGRNKAGQVWTDITGNRAGTVTINADGWGNFSVNGGSVSIWVNK

SEQ ID NO: 22842 - protein, 485 aa, Bacillus sp. 707
HHNGTNGTMMQYFEWYLPNDGIHWNRLNSDASNLKSKGITAVWIPPAWKGASQNDVGYGAYDLYDLGEFNQKGTVRTKYGTRSQLQAAVTSLKNNGIQVYGDVVMNHKGGADATEMVRAVEVNPNNRNQEVTGEYTIEAWTRFDFPGRGNTHSSFKWRWYHFDGVDWDQSRRLNNRIYKFRGHGKAWDWEVDTENGNYDYLMYADIDMDHPEVVNELRNWGVWYTNTLGLDGFRIDAVKHIKYSFTRDWINHVRSATGKNMFAVAEFWKNDLGAIENYLQKTNWNHSVFDVPLHYNLYNASKSGGNYDMRNIFNGTVVQRHPSHAVTFVDNHDSQPEEALESFVEEWFKPLAYALTLTREQGYPSVFYGDYYGIPTHGVPAMRSKIDPILEARQKYAYGKQNDYLDHHNIIGWTREGNTAHPNSGLATIMSDGAGGSKWMFVGRNKAGQVWSDITGNRTGTVTINADGWGNFSVNGGSVSIWVNK

SEQ ID NO: 22843 - protein, 485 aa, Bacillus sp. 707
HHNGTNGTMMQYFEWYLPNDGNHWNRLNSDASRLKSKGITAVWIPPAWKGASQNDVGYGAYDLYDLGEFNQKGTVRTKYGTRSQLQAAVTSLKNNGIQVYGDVVMNHKGGADATEMVRAVEVNPNNRNQEVTGEYTIEAWTRFDFPGRGNTHSSFKWRWYHFDGVDWDQSRRLNNRIYKFRGHGKAWDWEVDTENGNYDYLMYADIDMDHPEVVNELRNWGVWYTNTLGLDGFRIDAVKHIKYSFTRDWINHVRSATGKNMFAVAEFWKNDLGAIENYLQKTNWNHSVFDVPLHYNLYNASKSGGNYDMRNIFNGTVVQRHPSHAVTFVDNHDSQPEEALESFVEEWFKPLAYALTLTREQGYPSVFYGDYYGIPTHGVPAMRSKIDPILEARQKYAYGKQNDYLDHHNIIGWTREGNTAHPNSGLATIMSDGAGGSKWMFVGRNKAGQVWSDITGNRTGTVTINADGWGNFSVNGGSVSIWVNK

SEQ ID NO: 22844 - protein, 485 aa, Bacillus sp. 707
HHNGTNGTMMQYFEWYLPNDGNHWNRLNSDASNLKSKGITAVWIPPAWKGASQNDVGYGAYDLYDLGEFNQKGTVRTKYGTRSQLQAAVTSLKNNGIQVYGDVVMNHKGGADATEMVRAVEVNPNNRNQEVTGEYTIEAWTRFDFPGRGNTHSSFKWRWYHFDGVDWDASRRLNNRIYKFRGHGKAWDWEVDTENGNYDYLMYADIDMDHPEVVNELRNWGVWYTNTLGLDGFRIDAVKHIKYSFTRDWINHVRSATGKNMFAVAEFWKNDLGAIENYLQKTNWNHSVFDVPLHYNLYNASKSGGNYDMRNIFNGTVVQRHPSHAVTFVDNHDSQPEEALESFVEEWFKPLAYALTLTREQGYPSVFYGDYYGIPTHGVPAMRSKIDPILEARQKYAYGKQNDYLDHHNIIGWTREGNTAHPNSGLATIMSDGAGGSKWMFVGRNKAGQVWSDITGNRTGTVTINADGWGNFSVNGGSVSIWVNK

SEQ ID NO: 22845 - protein, 485 aa, Bacillus sp.
HHNGTNGTMMQYFEWYLPNDGNHWNRLNSDASNLKSKGITAVWIPPAWKGASQNDVGYGAYDVYDLGEFNQKGTVRTKYGTRSQLQAAVTSLKNNGIQVYGDVVMNHKGGADATEMVRAVEVNPNNRNQEVTGEYTIEAWTRFDFPGRGNTHSSFKWRWYHFDGVDWDQSRRLNNRIYKFRGHGKAWDWEVDTENGNYDYLMYADYDMDHPEVVNELRNWGVWYTNTLGLDGFRIDAVKHIKYSFTRDWINHVRSATGKNMFAVAEFWKNDLGAIENYLQKTNWNHSVFDVPLHYNLYNASKSGGNYDMRNIFNGTVVQRHPSHAVTFVDNHDSQPEEALESFVEEWFKPLAYALTLTREQGYPSVFYGDYYGIPTHGVPAMRSKIDPILEARQKYAYGKQNDYLDHHNIIGWTREGNTAHPNSGLATIMSDGAGGSKWMFVGRNKAGQVWSDITGNRTGTVTINADGWGNFSVNGGSVSIWVNK

SEQ ID NO: 22846 - protein, 485 aa, Bacillus sp. 707
HHNGTNGTMMQYFEWYLPNDGNHWNRLNSDASNLKSKGITAVWIPPAWKGASQNDVGYGAYDLYDLGEFNQKGTVRTKYGTRSQLQAAVTSLKHNGIQVYGDVVMNHKGGADATEMVRAVEVNPNNRNQEVTGEYTIEAWTRFDFPGRGNTHSSFKWRWYHFDGVDWDQSRRLNNRIYKFRGHGKAWDWEVDTENGNYDYLMYADIDMDHPEVVNELRNWGVWYTNTLGLDGFRIDAVKHIKYSFTRDWINHVRSATGKNMFAVAEFWKNDLGAIENYLQKTNWNHSVFDVPLHYNLYNASKSGGNYDMRNIFNGTVVQRHPSHAVTFVDNHDSQPEEALESFVEEWFKPLAYALTLTREQGYPSVFYGDYYGIPTHGVPAMRSKIDPILEARQKYAYGKQNDYLDHHNIIGWTREGNTAHPNSGLATIMSDGAGGSKWMFVGRNKAGQVWSDITGNRTGTVTINADGWGNFSVNGGSVSIWVNK

SEQ ID NO: 22847 - protein, 485 aa, Bacillus sp. 707
HHNGTNGTMMQYFEWYLPNDGNHWNRLNSDASNLKSKGITAVWIPPAWKGASQNDVGYGAYDLYDLGEFFQKGTVRTKYGTRSQLQAAVTSLKNNGIQVYGDVVMNHKGGADATEMVRAVEVNPNNRNQEVTGEYTIEAWTRFDFPGRGNTHSSFKWRWYHFDGVDWDQSRRLNNRIYKFRGHGKAWDWEVDTENGNYDYLMYADIDMDHPEVVNELRNWGVWYTNTLGLDGFRIDAVKHIKYSFTRDWINHVRSATGKNMFAVAEFWKNDLGAIENYLQKTNWNHSVFDVPLHYNLYNASKSGGNYDMRNIFNGTVVQRHPSHAVTFVDNHDSQPEEALESFVEEWFKPLAYALTLTREQGYPSVFYGDYYGIPTHGVPAMRSKIDPILEARQKYAYGKQNDYLDHHNIIGWTREGNTAHPNSGLATIMSDGAGGSKWMFVGRNKAGQVWSDITGNRTGTVTINADGWGNFSVNGGSVSIWVNK

SEQ ID NO: 22848 - protein, 485 aa, Bacillus sp. 707
HHNGTNGTMMQYFEWYLPNDGNHWNRLNSDASNLKSKGITAVWIPPAWKGASQNDVGYGAYDLYDLGEFNQKGTVRTKYGTRSQLQAAVTSLKNNGIQVYGDVVMNHKGGADATEMVRAVEVNPNNRNQEVTGEYTIEAWTRFDFPGRGNTHSSFKWRWYHFDGVDWDQSRRLNNRIYKFRGHGKAWDWEVDTENGNYDYLMYADIDMDHPEVVNELRNWGVWYTNTLGLDGFRIDAVKHIKYSFTRDWINHVRSATGKNMFAVAEFWKNDLGAIENYLQKTNWNHSVFDVPLHYNLYNASKSGGNYDMRNIFNGTVVQRHPSHAVTFVDNHDSQPEEALESFVEEWFKPLAYALTLTREQGYPSVFYGDYYGIPTHGVPAMRSKIDAILEARQKYAYGKQNDYLDHHNIIGWTREGNTAHPNSGLATIMSDGAGGSKWMFVGRNKAGQVWSDITGNRTGTVTINADGWGNFSVNGGSVSIWVNK

SEQ ID NO: 22849 - protein, 485 aa, Bacillus sp. 707
HHNGTNGTMMQYFEWYLPNDGNHWNRLNSDASNLKSKGITAVWIPPAWKGASQNDVGYGAYDLYDLGEFNQKGTVRTKYGTRSQLQAAVTSLKNNGIQVYGDVVMNHKGGADATEMVRAVEVNPNNRNQEVTGEYTIEAWTRFDFPGRGNTHSSFKWRWYHFDGVDWDQSRRLNNRIYKFRGHGKAWDWEVDTENGNYDYLMYADIDMDHPEVVNELRNWGVWYTNTLGLDGFRIDAVKHIKYSFTRDWINHVRSATGKNMFAVAEFWKNDLGAIENYLQKTNWNHSVFDVPLHYNLYNASKSGGNYDMRNIFNGTVVQRHPSHAVTFVDNHDSQPEEALESFVEEWFKPLAYALTLTREQGYPSVFYGDYYGIPTHGVPAMRSKIDPILEARQKYAYGKQNDYLDHHNIIGWTREGNTAHPNSGLATIMSDGAGGSKWMFVGRNKAGQVWSDITGNRTGKVTINADGWGNFSVNGGSVSIWVNK

SEQ ID NO: 22850 - protein, 485 aa, Bacillus sp. 707
HHNGTNGTMMQYFEWYLPNDGNHWNRLNSDASNLKSKGITAVWIPPAWKGASQNDVGYGAYDLYDLGEFNQKGTVRTKYGTASQLQAAVTSLKNNGIQVYGDVVMNHKGGADATEMVRAVEVNPNNRNQEVTGEYTIEAWTRFDFPGRGNTHSSFKWRWYHFDGVDWDQSRRLNNRIYKFRGHGKAWDWEVDTENGNYDYLMYADIDMDHPEVVNELRNWGVWYTNTLGLDGFRIDAVKHIKYSFTRDWINHVRSATGKNMFAVAEFWKNDLGAIENYLQKTNWNHSVFDVPLHYNLYNASKSGGNYDMRNIFNGTVVQRHPSHAVTFVDNHDSQPEEALESFVEEWFKPLAYALTLTREQGYPSVFYGDYYGIPTHGVPAMRSKIDPILEARQKYAYGKQNDYLDHHNIIGWTREGNTAHPNSGLATIMSDGAGGSKWMFVGRNKAGQVWSDITGNRTGTVTINADGWGNFSVNGGSVSIWVNK

SEQ ID NO: 22851 - protein, 485 aa, Bacillus sp. 707
HHNGTNGTMMQYFEWYLPNDGNHWNRLNSDASNLKSKGITAVWIPPAWKGASQNDVGYGAYDLYDLGEFNQKGTVRTKYGTRSQLQAAVTSLKNNGIQVYGDVVMNHKGGADATEMVRAVEVNPNNRNQEVTGEYTIEAWTRFDFPGRGNTHSSFKWRWYHFDGVDWDQSRRLNNRIYKFRGHGKAWDWEVDTENGNYDYLMYADIDMDHPEVVNELRNWGVWYTNTLGLDGFRIDAVKHIKYSFTRDWINHVRSATGKNMFAVAEFWKNDLGAIENYLQKTNWNHSVFDVPLHYNLYNASKSGGNYDMRNIFNGTVVQRHPSHAVTFVDNHDSQPEEALESFVEEWFKPLAYALTLTREQGYPSVFYGDYYGIPTHGVPAMRSKIDPILAARQKYAYGKQNDYLDHHNIIGWTREGNTAHPNSGLATIMSDGAGGSKWMFVGRNKAGQVWSDITGNRTGTVTINADGWGNFSVNGGSVSIWVNK

SEQ ID NO: 22852 - protein, 485 aa, Bacillus sp.
HHNGTNGTMMQYFEWYLPNDGNHWNRLNSDASNLKSKGITAVWIPPAWKGASQNDVGYGAYDLYDLGEFNQKGTVRTKYGTRSQLQAAVTSLKNNGIQVYGDVVMNHKGGADATEMVRAVEVNPNNRNQEVTGEYTIEAWTRFDFPGRGNTHSSFKWRWYHFDGVDWDQSRRLNNRIYKFRGHGKAWDWEVDTENGNYDYLMYADLDMDHPEVVNEVRNWGVWYTNTLGLDGFRIDAVKHIKYSFTRDWINHVRSATGKNMFAVAEFWKNDLGAIENYLQKTNWNHSVFDVPLHYNLYNASKSGGNYDMRNIFNGTVVQRHPSHAVTFVDNHDSQPEEALESFVEEWFKPLAYALTLTREQGYPSVFYGDYYGIPTHGVPAMRSKIDPILEARQKYAYGKQNDYLDHHNIIGWTREGNTAHPNSGLATIMSDGAGGSKWMFVGRNKAGQVWSDITGNRTGTVTINADGWGNFSVNGGSVSIWVNK

SEQ ID NO: 22853 - protein, 485 aa, Bacillus sp. 707
HHNGTNGTMMQYFEWYLPNDGNHWNRLNSDASNLKSKGITAVWIPPAWKGASQNDVGYGAYDLYDLGEFNQKGTVRTKYGTRSQLQAAVTSLKNNGIQVYGDVVMNHKGGADATEMVRAVEVNPNNRNQEVTGEYTIEAWTRFSFPGRGNTHSSFKWRWYHFDGVDWDQSRRLNNRIYKFRGHGKAWDWEVDTENGNYDYLMYADIDMDHPEVVNELRNWGVWYTNTLGLDGFRIDAVKHIKYSFTRDWINHVRSATGKNMFAVAEFWKNDLGAIENYLQKTNWNHSVFDVPLHYNLYNASKSGGNYDMRNIFNGTVVQRHPSHAVTFVDNHDSQPEEALESFVEEWFKPLAYALTLTREQGYPSVFYGDYYGIPTHGVPAMRSKIDPILEARQKYAYGKQNDYLDHHNIIGWTREGNTAHPNSGLATIMSDGAGGSKWMFVGRNKAGQVWSDITGNRTGTVTINADGWGNFSVNGGSVSIWVNK

SEQ ID NO: 22854 - protein, 483 aa, Bacillus sp. 707
HHNGTNGTMMQYFEWYLPNDGNHWNRLNSDASNLKSKGITAVWIPPAWKGASQNDVGYGAYDLYDLGEFNQKGTVRTKYGTRSQLQAAVTSLKNNGIQVYGDVVMNHKGGADATEMVRAVEVNPNNRNQEVTGEYTIEAWTRFDFPGRGNTHSSFKWRWYHFDGVDWDQSRRLNNRIYKFHGKAWDWEVDTENGNYDYLMYADIDMDHPEVVNELRNWGVWYTNTLGLDGFRIDAVKHIKYSFTRDWINHVRSATGKNMFAVAEFWKNDLGAIENYLQKTNWNHSVFDVPLHYNLYNASKSGGNYDMRNIFNGTVVQRHPSHAVTFVDNHDSQPEEALESFVEEWFKPLAYALTLTREQGYPSVFYGDYYGIPTHGVPAMRSKIDPILEARQKYAYGKQNDYLDHHNIIGWTREGNTAHPNSGLATIMSDGAGGSKWMFVGRNKAGQVWSDITGNRTGTVTINADGWGNFSVNGGSVSIWVNK

SEQ ID NO: 22855 - protein, 485 aa, Bacillus sp. 707
HHNGTNGTMMQYFEWYLPNDGNHWNRLNSDASNLKSKGITAVWIPPAWKGASQNDVGYGAYDLYDLGEFNQKGTVRTKYGTRSQLQAAVTSLKNNGIQVYGDVVMNHKGGADATEMVRAVEVNPNNRNQEVTGEYTIEAWTRFDFPGRGNTHSSFKWRWYHFDGVDWDQSRRLNNRIYKFRGHGKAWDWEVDTENGNYDYLMYADIDMDHPEVVNELRNWGVWYTNTLGLDGFRIDAVKHIKYSFTRDWINHVRSATGKNMFAVAEFWKNDLGAIENYLQKTNWNHSVFDVPLHYNLYNASKSGGNYDMRNIFNGTVVQRHPSHAVTFVDNHDSQPEEALESFVEEWFKPLAYALTLTREQGYPSVFYGDYYGIPTHGVPAMRSKIDPILEARQKYAYGKQNDYLDHHNIIGWTREGNSAHPNSGLATIMSDGAGGSKWMFVGRNKAGQVWSDITGNRTGTVTINADGWGNFSVNGGSVSIWVNK

SEQ ID NO: 22856 - protein, 485 aa, Bacillus sp. 707
HHNGTNGTMMQYFEWYLPNDGNHWNRLNSDASNLKSKGITAVWIPPAWKGASQNDVGYGAYDLYDLGEFNQKGTVRTKYGTRSQLQAAVTSLKNNGIQVYGDVVMNHKGGADATEMVRAVEVNPNNRNQEVTGEYTIEAWTRFDFPGRGNTHSSFKWRWYHFDGVDWDQSRRLNNRIYKFRGHGKAWDWEVDTENGNYDYLMYADIDMDHPEVVNELRNWGVWYTNTLGLDGFRIDAVKHIKYSFTRDWINHVRSATGKNMFAVAEFWKNDLGAIENYLQKTNWNHSVFDVPLHYNLYNASKSGGNYDMRNIFNGTVVQRHPSHAVTFVDNHDSQPEEALESFVEEWFKPLAYALTLTREQGYPSVFYGDYYGIPTHGVPAMRSKIDPILEARQKYAYGKQNDYLDHHNIIGWTREGNTAHPNSGLATIMSDGAGGSKWMFVGRNKAGQVWSDITGNRTGVVTINADGWGNFSVNGGSVSIWVNK

SEQ ID NO: 22857 - protein, 485 aa, Bacillus sp. 707
HHNGTNGTMMQYFEWYLPNDGMHWNRLNSDASNLKSKGITAVWIPPAWKGASQNDVGYGAYDLYDLGEFNQKGTVRTKYGTRSQLQAAVTSLKNNGIQVYGDVVMNHKGGADATEMVRAVEVNPNNRNQEVTGEYTIEAWTRFDFPGRGNTHSSFKWRWYHFDGVDWDQSRRLNNRIYKFRGHGKAWDWEVDTENGNYDYLMYADIDMDHPEVVNELRNWGVWYTNTLGLDGFRIDAVKHIKYSFTRDWINHVRSATGKNMFAVAEFWKNDLGAIENYLQKTNWNHSVFDVPLHYNLYNASKSGGNYDMRNIFNGTVVQRHPSHAVTFVDNHDSQPEEALESFVEEWFKPLAYALTLTREQGYPSVFYGDYYGIPTHGVPAMRSKIDPILEARQKYAYGKQNDYLDHHNIIGWTREGNTAHPNSGLATIMSDGAGGSKWMFVGRNKAGQVWSDITGNRTGTVTINADGWGNFSVNGGSVSIWVNK

SEQ ID NO: 22858 - protein, 485 aa, Bacillus sp. 707
HHNGTNGTMMQYFEWYLPNDGNHWNRLNSDASNLKSKGITAVWIPPAWKGASQADVGYGAYDLYDLGEFNQKGTVRTKYGTRSQLQAAVTSLKNNGIQVYGDVVMNHKGGADATEMVRAVEVNPNNRNQEVTGEYTIEAWTRFDFPGRGNTHSSFKWRWYHFDGVDWDQSRRLNNRIYKFRGHGKAWDWEVDTENGNYDYLMYADIDMDHPEVVNELRNWGVWYTNTLGLDGFRIDAVKHIKYSFTRDWINHVRSATGKNMFAVAEFWKNDLGAIENYLQKTNWNHSVFDVPLHYNLYNASKSGGNYDMRNIFNGTVVQRHPSHAVTFVDNHDSQPEEALESFVEEWFKPLAYALTLTREQGYPSVFYGDYYGIPTHGVPAMRSKIDPILEARQKYAYGKQNDYLDHHNIIGWTREGNTAHPNSGLATIMSDGAGGSKWMFVGRNKAGQVWSDITGNRTGTVTINADGWGNFSVNGGSVSIWVNK

SEQ ID NO: 22859 - protein, 485 aa, Bacillus sp. 707
HHNGTNGTMMQYFEWYLPNDGNHWNRLNSDASNLKSKGITAVWIPPAWKGASQNDVGYGAYDLYDLGEFNQKGTVRTKYGTRSQLQAAVTSLKNNGIQVYGDVVMNHKGGADATEMVRAVEVNPNNRNQEVTGEYTIEAWTRFDFPGRGNTHSSFKWRWYHFDGVDWDQSRRLNNRIYKFRGHGKAWDWEVDTENGNYDYLMYADIDMDHPEVVNELRNWGVWYTNTLGLDGFRIDAVKHIKYSFTRDWINHVRSATGKNMFAVAEFWKNDLGAIENYLQKTNWNHSVFDVPLHYNLYNASKSGGNYDMRNIFNGTVVQRHPSHAVTFVDNHDSQPEEALESFVEEWFKPLAYALTLTREQGYPSVFYGDYYGIPTHGVPAMRSKIDPGLEARQKYAYGKQNDYLDHHNIIGWTREGNTAHPNSGLATIMSDGAGGSKWMFVGRNKAGQVWSDITGNRTGTVTINADGWGNFSVNGGSVSIWVNK

SEQ ID NO: 22860 - protein, 485 aa, Bacillus sp. 707
HHNGTNGTMMQYFEWYLPNDGNHWNRLNSDASNLKSKGITAVWIPPAWKGASQNDVGYGAYDLYDLGEFNQKGTVRTKYGTRSQLQAAVTSLKNNGIQVYGDVVMNHKGGADATEMVRAVEVNPNNRNQEVTGEYTIEAWTRFDFPGRGNTHSSFKWRWYHFDGVDWDQSRRLNNRIYKFRGHGKAWDWEVDTENGNYDYLMYADIDMDHPEVVNELRNWGVWYTNTLGLDGFRIDAVKHIKYSFTRDWINHVRSATGKNMFAVAEFWKNDLGAIENYLQKTNWNHSVFDVPLHYNLYNASKSGGNYDMRNIFNGTVVQRHPSHAVTFVDNHDSQPEEALESFVEEWFKPLAYALTLTREQGYPSVFYGDYYGIPTHGVPAMRSKIDPILRARQKYAYGKQNDYLDHHNIIGWTREGNTAHPNSGLATIMSDGAGGSKWMFVGRNKAGQVWSDITGNRTGTVTINADGWGNFSVNGGSVSIWVNK

SEQ ID NO: 22861 - protein, 485 aa, Bacillus sp. 707
HHNGTNGTMMQYFEWYLPNDGNHWNRLNSDASNLKSKGITAVWIPPAWKGASQNDVGYGAYDLYDLGEFNQKGTVRTKYGTRSQLQAAVTSLKNNGIQVYGDVVMNHKGGADATEMVRAVEVNPNNRNQEVTGEYTIEAWTRFDFPGRGNTHSSFKWRWYHFDGVDWDQSRRLNNRIYKFRGHGKAWDWEVDTENGNYDYLMYADIDMDHPEVVNELRNWGVWYTNTLGLDGFRIDAVKHIKYSFTRDWINHVRSATGKNMFAVAEFWKNDLGAIENYLQKTNWNHSVFDVPLHYNLYNASKSGGNYDMRNIFNGTVVQRHPSHAVTFVDNHDSQPEEALESFVESWFKPLAYALTLTREQGYPSVFYGDYYGIPTHGVPAMRSKIDPILEARQKYAYGKQNDYLDHHNIIGWTREGNTAHPNSGLATIMSDGAGGSKWMFVGRNKAGQVWSDITGNRTGTVTINADGWGNFSVNGGSVSIWVNK

SEQ ID NO: 22862 - protein, 485 aa, Bacillus sp. 707
HHNGTNGTMMQYFEWYSPNDGNHWNRLNSDASNLKSKGITAVWIPPAWKGASQNDVGYGAYDLYDLGEFNQKGTVRTKYGTRSQLQAAVTSLKNNGIQVYGDVVMNHKGGADATEMVRAVEVNPNNRNQEVTGEYTIEAWTRFDFPGRGNTHSSFKWRWYHFDGVDWDQSRRLNNRIYKFRGHGKAWDWEVDTENGNYDYLMYADIDMDHPEVVNELRNWGVWYTNTLGLDGFRIDAVKHIKYSFTRDWINHVRSATGKNMFAVAEFWKNDLGAIENYLQKTNWNHSVFDVPLHYNLYNASKSGGNYDMRNIFNGTVVQRHPSHAVTFVDNHDSQPEEALESFVEEWFKPLAYALTLTREQGYPSVFYGDYYGIPTHGVPAMRSKIDPILEARQKYAYGKQNDYLDHHNIIGWTREGNTAHPNSGLATIMSDGAGGSKWMFVGRNKAGQVWSDITGNRTGTVTINADGWGNFSVNGGSVSIWVNK

SEQ ID NO: 22863 - protein, 485 aa, Bacillus sp.
HHNGTNGTMMQYFEWYLPNDGNHWNRLRSDASNLKDKGISAVWIPPAWKGASQNDVGYGAYDLYDLGEFNQKGTIRTKYGTRNQLQAAVNALKSNGIQVYGDVVMNHKGGADATEMVRAVEVNPNNRNQEVSEEYTIEAWTKFDFPGRGNTHSNFKWRWYHFDGVDWDQSRKLNNRIYKFRGDGKGWDWEVDTENGNYDYLVYADIDMDHPEVVNELRNWGVWYTNTLGLDGFRIDAVKHIKYSFTRDWINHVRSATGKNMFAVAEFWKNDLGAIENYLNKTNWNHSVFDVPLHYNLYNASKSGGNYDMRQIFNGTVVQRHPMHAVTFVDNHDSQPEEALESFVEEWFKPLAYALTLTREEGYPSVFYGDYYGIPTHGVPAMKSKIDPILEARQKYAYGRQNDYLDHHNIIGWTREGNTAHPNSGLATIMSDGAGGNKWMFVGRNKAGQVWTDITGNRAGTVTINADGWGNFSVNGGSVSIWVNK

SEQ ID NO: 22864 - protein, 483 aa, Bacillus sp. SP70
HHNGTNGTMMQYFEWYLPNDGNHWNRLNSDASNLKSKGITAVWIPPAWKGISQNDVGYGAYDLYDLGEFNQKGTVRTKYGTRSQLQAAVTSLKNNGIQVYGDVVMNHKGGADATEMVRAVEVNPNNRNQEVTGEYTIEAYTRFDFPGRGNTHSSFKWRWYHFDGVDWDQSRRLNNRIYKFRGKAWDWEVDTENGNYDYLMYADIDMDHPEVVNELRNWGVWYTNTLGLDGFRIDAVKHIKYSFTRDWINHVRSATGKNMFAVAEFWKNDLGAIENYLQKTNWNHSVFDVPLHYNLYNASKSGGNYDMRNIFNGTVVQRHPSHAVTFVDNHDSQPEEALESFVEEWFKPLAYALTLTREQGYPSVFYGDYYGIPTHGVPAMRSKIDPILEARQKYAYGKQNDYLDHHNIIGWTREGNTAHPNSGLATIMSDGAGGSKWMFVGRNKAGQVWSDITGNRTGTVTINADGWGNFSVNGGSVSIWVNK

SEQ ID NO: 22865 - protein, 485 aa, Bacillus sp. 707
HHTGTNGTMMQYFEWYLPNDGNHWNRLNSDASNLKSKGITAVWIPPAWKGASQNDVGYGAYDLYDLGEFNQKGTVRTKYGTRSQLQAAVTSLKNNGIQVYGDVVMNHKGGADATEMVRAVEVNPNNRNQEVTGEYTIEAWTRFDFPGRGNTHSSFKWRWYHFDGVDWDQSRRLNNRIYKFRGHGKAWDWEVDTENGNYDYLMYADIDMDHPEVVNELRNWGVWYTNTLGLDGFRIDAVKHIKYSFTRDWINHVRSATGKNMFAVAEFWKNDLGAIENYLQKTNWNHSVFDVPLHYNLYNASKSGGNYDMRNIFNGTVVQRHPSHAVTFVDNHDSQPEEALESFVEEWFKPLAYALTLTREQGYPSVFYGDYYGIPTHGVPAMRSKIDPILEARQKYAYGKQNDYLDHHNIIGWTREGNTAHPNSGLATIMSDGAGGSKWMFVGRNKAGQVWSDITGNRTGTVTINADGWGNFSVNGGSVSIWVNK

SEQ ID NO: 22866 - protein, 485 aa, Bacillus sp. 707
HHNGTNGTMMQYFEWYLPNDGNHWNRLNSDASNLKSKGITAVWIPPAWKGASQNDVGYGAYDLYDLGEFHQKGTVRTKYGTRSQLQAAVTSLKNNGIQVYGDVVMNHKGGADATEMVRAVEVNPNNRNQEVTGEYTIEAWTRFDFPGRGNTHSSFKWRWYHFDGVDWDQSRRLNNRIYKFRGHGKAWDWEVDTENGNYDYLMYADIDMDHPEVVNELRNWGVWYTNTLGLDGFRIDAVKHIKYSFTRDWINHVRSATGKNMFAVAEFWKNDLGAIENYLQKTNWNHSVFDVPLHYNLYNASKSGGNYDMRNIFNGTVVQRHPSHAVTFVDNHDSQPEEALESFVEEWFKPLAYALTLTREQGYPSVFYGDYYGIPTHGVPAMRSKIDPILEARQKYAYGKQNDYLDHHNIIGWTREGNTAHPNSGLATIMSDGAGGSKWMFVGRNKAGQVWSDITGNRTGTVTINADGWGNFSVNGGSVSIWVNK

SEQ ID NO: 22867 - protein, 485 aa, Bacillus sp. 707
HHNWTNGTMMQYFEWYLPNDGNHWNRLNSDASNLKSKGITAVWIPPAWKGASQNDVGYGAYDLYDLGEFNQKGTVRTKYGTRSQLQAAVTSLKNNGIQVYGDVVMNHKGGADATEMVRAVEVNPNNRNQEVTGEYTIEAWTRFDFPGRGNTHSSFKWRWYHFDGVDWDQSRRLNNRIYKFRGHGKAWDWEVDTENGNYDYLMYADIDMDHPEVVNELRNWGVWYTNTLGLDGFRIDAVKHIKYSFTRDWINHVRSATGKNMFAVAEFWKNDLGAIENYLQKTNWNHSVFDVPLHYNLYNASKSGGNYDMRNIFNGTVVQRHPSHAVTFVDNHDSQPEEALESFVEEWFKPLAYALTLTREQGYPSVFYGDYYGIPTHGVPAMRSKIDPILEARQKYAYGKQNDYLDHHNIIGWTREGNTAHPNSGLATIMSDGAGGSKWMFVGRNKAGQVWSDITGNRTGTVTINADGWGNFSVNGGSVSIWVNK

SEQ ID NO: 22868 - protein, 485 aa, Bacillus sp. 707
HHNGTNGTMMQYFEWYLPNDGNHWNRLNSDASNLKSKGITAVWIPPAWKGASQNDVGYGAYDLYDLGEFNQKGTVRTKYGTRSQLQAAVTSLKNNGIQVYGDVVMNHKGGADATEMVRAVEVNPNNRNQEVTGEYTIEAWTRFDFPGRGNTHSSFKWRWYHFDGVDWDQSRRLNNRIYKFRGHGKAWDWEVDTENGNYDYLMYADIDMDHPEVVNELRNWGVWYTNTLGLDGFRIDAVKHIKYSFTRDWINHVRSATGKNMFAVAEFWKNDLGAIENYLQKTNWNHSVFDVPLHYNLYNASKSGGNYDMRNIFNGTVVQRHPSHAVTFVDNHDSQPEEALESFVEEWFKPLAYALTLTREQGYPSVFYGDYRGIPTHGVPAMRSKIDPILEARQKYAYGKQNDYLDHHNIIGWTREGNTAHPNSGLATIMSDGAGGSKWMFVGRNKAGQVWSDITGNRTGTVTINADGWGNFSVNGGSVSIWVNK

SEQ ID NO: 22869 - protein, 483 aa, Bacillus sp.
HHNGTNGTLMQYFEWYLPNDGNHWNRLRSDASNLKDVGISAVWIPPAWKGTSQNDVGYGAYDLYDLGEFNQKGTIRTKYGTRNQLQAAVNALKSNGIQVYGDVVMNHKGGADATEMVKAVEVNPNNRNQEVSGEYTIEAWTKFDFPGRANTHSNFKWRWYHFDGVDWDQSRKLNNRIYKFRTKAWDWEVDTEFGNYDYLMYADIDMDHPEVVNELRNWGVWYTNTLGLDGFRIDAVKHIKYSFTRDWINHVRSAIGKNMFAVAEFWKNDLGAIENYLNKTNWNHSVFDVPLHFNLYYASKSGGNYDMRQIFNGTVVQKHPTHAVTFVDNHDSQPEESLESFVREWFKPLAYALTLTREQGYPSVFYGDYYGIPTHGVPAMKSKIDPILEARQKYAYGRQNDYLDHHNIIGWTREGNTAHPNSGLATIMSDGAGGNKWMFVGRNKAGQVWTDITGNKAGTVTINADGWGNFSVNGGSVSIWVNK

SEQ ID NO: 22870 - protein, 485 aa, Bacillus sp. 707
HHNGTNGTMMQYFEWYLPNDGNHWNRLNSDASNLKSKGITAVWIPPAWKGASQNDVGYGAYDLYDLGEFNQKGTVRTKYGTRSQLQAAVTSLKNNGIQVYGDVVMNHKGGADATEMVRAVEVNPNNRNQEVTGEYPIEAWTRFDFPGRGNTHSSFKWRWYHFDGVDWDQSRRLNNRIYKFRGHGKAWDWEVDTENGNYDYLMYADIDMDHPEVVNELRNWGVWYTNTLGLDGFRIDAVKHIKYSFTRDWINHVRSATGKNMFAVAEFWKNDLGAIENYLQKTNWNHSVFDVPLHYNLYNASKSGGNYDMRNIFNGTVVQRHPSHAVTFVDNHDSQPEEALESFVEEWFKPLAYALTLTREQGYPSVFYGDYYGIPTHGVPAMRSKIDPILEARQKYAYGKQNDYLDHHNIIGWTREGNTAHPNSGLATIMSDGAGGSKWMFVGRNKAGQVWSDITGNRTGTVTINADGWGNFSVNGGSVSIWVNK

SEQ ID NO: 22871 - protein, 485 aa, Bacillus sp. 707
HHNGTNGTMMQYFEWYLPNDGNHWNRLNSDASNLKSKGITAVWIPPAWKGASQNDVGYGAYDLYDLGEFNQKGTVRTKYGTRSQLQAAVTSLKNNGIQVYGDVVMNHKGGADATEMVRAVEVNPNNRNQEVTGEYTIEAWTRFDFPGRGNTHSSFKWRWMHFDGVDWDQSRRLNNRIYKFRGHGKAWDWEVDTENGNYDYLMYADIDMDHPEVVNELRNWGVWYTNTLGLDGFRIDAVKHIKYSFTRDWINHVRSATGKNMFAVAEFWKNDLGAIENYLQKTNWNHSVFDVPLHYNLYNASKSGGNYDMRNIFNGTVVQRHPSHAVTFVDNHDSQPEEALESFVEEWFKPLAYALTLTREQGYPSVFYGDYYGIPTHGVPAMRSKIDPILEARQKYAYGKQNDYLDHHNIIGWTREGNTAHPNSGLATIMSDGAGGSKWMFVGRNKAGQVWSDITGNRTGTVTINADGWGNFSVNGGSVSIWVNK

SEQ ID NO: 22872 - protein, 485 aa, Bacillus sp. 707
HHNGTNGTMMQYFEWYLPNDGNHWNRLNSDASNLKSKGITAVWIPPAWKGASQNDVGYGAYDLYDLGEFNQKGTVRTKYGTRSQLQAAVTSLKNNGIQVYGDVVMNHKGGADATEMVRAVEVNPNNRNQEVTGEYTIEAWTRFDFPGRGNTHSSFKWRWYHFDGVDWDQSRRLNNRIYKFRGHGKAWDWEVDTENGNYDYLMYADIDMDHPEVVNELRNWGVWYTNTLGLDGFRIDAVKHIKYSFTRDWINHVRSATGKNMFAVAEFWKNDLGAIENYLQKTNWNHSVFDVPLHYNLYNASKSGGNYDMRNIFNGTVVQRHPSHAVTFVDNHDSQPEEALESFVEEWFKPLAYALTLTREQGYPSVFYGDYYGIPTHGVPAMRSKIDPILEARQKYAYGKQNDYLDHHNIIGWTREGMTAHPNSGLATIMSDGAGGSKWMFVGRNKAGQVWSDITGNRTGTVTINADGWGNFSVNGGSVSIWVNK

SEQ ID NO: 22873 - protein, 485 aa, Bacillus sp. 707
HHNGTNGTMMQYFEWYLPNDGNHWNRLNSDASNLKSKGITIVWIPPAWKGASQNDVGYGAYDLYDLGEFNQKGTVRTKYGTRSQLQAAVTSLKNNGIQVYGDVVMNHKGGADATEMVRAVEVNPNNRNQEVTGEYTIEAWTRFDFPGRGNTHSSFKWRWYHFDGVDWDQSRRLNNRIYKFRGHGKAWDWEVDTENGNYDYLMYADIDMDHPEVVNELRNWGVWYTNTLGLDGFRIDAVKHIKYSFTRDWINHVRSATGKNMFAVAEFWKNDLGAIENYLQKTNWNHSVFDVPLHYNLYNASKSGGNYDMRNIFNGTVVQRHPSHAVTFVDNHDSQPEEALESFVEEWFKPLAYALTLTREQGYPSVFYGDYYGIPTHGVPAMRSKIDPILEARQKYAYGKQNDYLDHHNIIGWTREGNTAHPNSGLATIMSDGAGGSKWMFVGRNKAGQVWSDITGNRTGTVTINADGWGNFSVNGGSVSIWVNK

SEQ ID NO: 22874 - protein, 485 aa, Bacillus sp. 707
HHNGTNGTMMQYFEWYLPNDGNHWNRLNSDASNLKSKGITAVWIPPAWKGASQNDVGYGAYDLYDLGEFNQKGTVRTKYGTRSQLQAAVTSLKNNGIQVYGDVVMNHKGGADATEMVRAVEVNPNNRNQEVTGEYTIEAWTRFDFPGRGNTHSSFKWRWYHFDGVDWDQSRRLNNRIYKFRGHGKAWDWEVDTENGNYDYLMYADIDMDHPEVVNELRNWGVWYTNTLGLDGFRIDAVKHIKYSFTRDWINHVRSATGKNMFAVAEFWKNDLGAIENYLQKTNWNHSVFDVPLHYNLYNASKSGGNYDMRNIFNGTVVQRHPSHAVTFVDNHDSQPEEALESFVEEWFKPLAYALTLTREQGYPSVFYGDYYGIPTHGVPAMRSKIDNILEARQKYAYGKQNDYLDHHNIIGWTREGNTAHPNSGLATIMSDGAGGSKWMFVGRNKAGQVWSDITGNRTGTVTINADGWGNFSVNGGSVSIWVNK

SEQ ID NO: 22875 - protein, 485 aa, Bacillus sp. 707
HHNGTNGTMMQYFEWYLPNDGNHWNRLNSDASNLKSKGITAVWIPPAWKGASQNDVGYGAYDLYDLGEFNQKGTVRTKYGNRSQLQAAVTSLKNNGIQVYGDVVMNHKGGADATEMVRAVEVNPNNRNQEVTGEYTIEAWTRFDFPGRGNTHSSFKWRWYHFDGVDWDQSRRLNNRIYKFRGHGKAWDWEVDTENGNYDYLMYADIDMDHPEVVNELRNWGVWYTNTLGLDGFRIDAVKHIKYSFTRDWINHVRSATGKNMFAVAEFWKNDLGAIENYLQKTNWNHSVFDVPLHYNLYNASKSGGNYDMRNIFNGTVVQRHPSHAVTFVDNHDSQPEEALESFVEEWFKPLAYALTLTREQGYPSVFYGDYYGIPTHGVPAMRSKIDPILEARQKYAYGKQNDYLDHHNIIGWTREGNTAHPNSGLATIMSDGAGGSKWMFVGRNKAGQVWSDITGNRTGTVTINADGWGNFSVNGGSVSIWVNK

SEQ ID NO: 22876 - protein, 485 aa, Bacillus sp. 707
HHNGTNGTMMQYFEWYLPNDGNHWNRLNSDASNLKSKGITAVWIPPAWKGASQNDVGYGAYDLYDLGEFNQKGTVRTKYGTRSQLQAAVTSLKNNGIQVYGDVVMNHKGGADATEMVRAVEVNPNNRNQEVTGEYTIEAWTRFDFPGRGNTHSSFKWRWRHFDGVDWDQSRRLNNRIYKFRGHGKAWDWEVDTENGNYDYLMYADIDMDHPEVVNELRNWGVWYTNTLGLDGFRIDAVKHIKYSFTRDWINHVRSATGKNMFAVAEFWKNDLGAIENYLQKTNWNHSVFDVPLHYNLYNASKSGGNYDMRNIFNGTVVQRHPSHAVTFVDNHDSQPEEALESFVEEWFKPLAYALTLTREQGYPSVFYGDYYGIPTHGVPAMRSKIDPILEARQKYAYGKQNDYLDHHNIIGWTREGNTAHPNSGLATIMSDGAGGSKWMFVGRNKAGQVWSDITGNRTGTVTINADGWGNFSVNGGSVSIWVNK

SEQ ID NO: 22877 - protein, 485 aa, Bacillus sp. 707
HHNGTNGTMMQYFEWYLPNDGNHWNRLNSDASNLKSKGITAVWIPPAWKGASQNDVGYGAYDLYDLGEFNQKGTVRTKYGTRSQLQAAVTSLKNNGIQVYGDVVMNHKGGADATEMVRAVEVNPNNRNQEVTGEYTIEAWTRFDFPGRGNTHSSFKWRWYHFDGVDWDQSRRLNNRIYKFRGHGKAWDWEVDTENGNYDYLMYADIDMDHPEVVNELRNWGVWYTNTLGLDGFRIDAVKHIKYSFTRDWINHVRSATGKNMFAVAEFWKNDLGAIENYLQKTNWNHSVFDVPLHYNLYNASKSGGNYDMRNIFNGTVVQRHPSHAVTFVDNHDSQPEEALESFVEEWFKPLAYALTLTREQGYPSVFYGDYYGIPTHGVPAMRSKIDPILEARQKYAYGKQNDYLDHHNIIGWTREGNTAHPNSGLATIMSDGAGGSKWMFVGRNKAGQVWSDITGNRTGTVTINSDGWGNFSVNGGSVSIWVNK

SEQ ID NO: 22878 - protein, 485 aa, Bacillus sp.
HHNGTNGTMMQYFEWYLPNDGNHWNRLRSDASNLKDKGISAVWIPPAWKGASQNDVGYGAYDLYDLGEFNQKGTIRTKYGTRNQLQAAVNALKSNGIQVYGDVVMNHKGGADATEMVRAVEVNPNNRNQEVSGEYTIEAWTKFDFPGRGNTHSNFKWRWYHFDGVDWDQSRKLNNRIYKFRGDGKGWDWEVDTENGNYDYLVYADIDMDHPEVVNELRNWGVWYTNTLGLDGFRIDAVKHIKYSFTRDWINHVRSATGKNMFAVAEFWKNDLGAIENYLNKTNWNHSVFDVPLHYNLYNASKSGGNYDMRQIFNGTVVQRHPMHAVTFVDNHDSQPEEALESFVEEWFKPLAYALTLTREQGYPSVFYGDYYGIPTHGVPAYRSKIDPILEARQKYAYGRQNDYLDHHNIIGWTREGNTAHPNSGLATIMSDGAGGNKWMFVGRNKAGQVWTDITGNRAGTVTINADGWGNFSVNGGSVSIWVNK

SEQ ID NO: 22879 - protein, 485 aa, Bacillus sp. 707
HHNGTNGTMMQYFEWYLPNDGNHWNRLNSDASNLKSKGITAVWIPPAWKGASQNDVGYGAYDLYDLGEFNQKGTVRTKYGTRSQLQAAVTSLKNNGIQVYGDVVMNHKGGADATEMVRAVEVNPNNRNQEVTGEYTIEAWTRFDFPGRGNTHSSFKWRWYHFDGVDWDQSRRLNNRIYKFRGHGKAWDWEVDTENGNYDYLMYADIDMDHAEVVNELRNWGVWYTNTLGLDGFRIDAVKHIKYSFTRDWINHVRSATGKNMFAVAEFWKNDLGAIENYLQKTNWNHSVFDVPLHYNLYNASKSGGNYDMRNIFNGTVVQRHPSHAVTFVDNHDSQPEEALESFVEEWFKPLAYALTLTREQGYPSVFYGDYYGIPTHGVPAMRSKIDPILEARQKYAYGKQNDYLDHHNIIGWTREGNTAHPNSGLATIMSDGAGGSKWMFVGRNKAGQVWSDITGNRTGTVTINADGWGNFSVNGGSVSIWVNK

SEQ ID NO: 22880 - protein, 485 aa, Bacillus sp. 707
HHNGTNGTMMQYFEWYLPNDGNHWNRLNSDASNLKSKGITAVWIPPAWKGASQNDVGYGAYDLYDLGEFNQKGTVRTKYGTRSQLQAAVTSLKNNGIQVYGDVVMNHKGGADATEMPRAVEVNPNNRNQEVTGEYTIEAWTRFDFPGRGNTHSSFKWRWYHFDGVDWDQSRRLNNRIYKFRGHGKAWDWEVDTENGNYDYLMYADIDMDHPEVVNELRNWGVWYTNTLGLDGFRIDAVKHIKYSFTRDWINHVRSATGKNMFAVAEFWKNDLGAIENYLQKTNWNHSVFDVPLHYNLYNASKSGGNYDMRNIFNGTVVQRHPSHAVTFVDNHDSQPEEALESFVEEWFKPLAYALTLTREQGYPSVFYGDYYGIPTHGVPAMRSKIDPILEARQKYAYGKQNDYLDHHNIIGWTREGNTAHPNSGLATIMSDGAGGSKWMFVGRNKAGQVWSDITGNRTGTVTINADGWGNFSVNGGSVSIWVNK

SEQ ID NO: 22881 - protein, 485 aa, Bacillus sp. 707
HHNGTNGTMMQYFEWYLPNDGNHWNRLNSDASNLKSKGITAVWIPPAWKGASQNDVGYGAYDLYDLGEFNQKGTVRTKYGTRSQLQAAVTSLKNNGIQVYGDVVMNHKGGADATEMVRAVEVNPNNRNQEVTGEYTIEAWTRFDFPGRGNTHSSFKWRWYHFDGVDWDQSRRLNNRIYKFRGHGKAWDWEVDTENGNYDYLMYADIDMDHPEVVFELRNWGVWYTNTLGLDGFRIDAVKHIKYSFTRDWINHVRSATGKNMFAVAEFWKNDLGAIENYLQKTNWNHSVFDVPLHYNLYNASKSGGNYDMRNIFNGTVVQRHPSHAVTFVDNHDSQPEEALESFVEEWFKPLAYALTLTREQGYPSVFYGDYYGIPTHGVPAMRSKIDPILEARQKYAYGKQNDYLDHHNIIGWTREGNTAHPNSGLATIMSDGAGGSKWMFVGRNKAGQVWSDITGNRTGTVTINADGWGNFSVNGGSVSIWVNK

SEQ ID NO: 22882 - protein, 485 aa, Bacillus sp. 707
HHNGTNGTMMQYFEWYLPNHGNHWNRLNSDASNLKSKGITAVWIPPAWKGASQNDVGYGAYDLYDLGEFNQKGTVRTKYGTRSQLQAAVTSLKNNGIQVYGDVVMNHKGGADATEMVRAVEVNPNNRNQEVTGEYTIEAWTRFDFPGRGNTHSSFKWRWYHFDGVDWDQSRRLNNRIYKFRGHGKAWDWEVDTENGNYDYLMYADIDMDHPEVVNELRNWGVWYTNTLGLDGFRIDAVKHIKYSFTRDWINHVRSATGKNMFAVAEFWKNDLGAIENYLQKTNWNHSVFDVPLHYNLYNASKSGGNYDMRNIFNGTVVQRHPSHAVTFVDNHDSQPEEALESFVEEWFKPLAYALTLTREQGYPSVFYGDYYGIPTHGVPAMRSKIDPILEARQKYAYGKQNDYLDHHNIIGWTREGNTAHPNSGLATIMSDGAGGSKWMFVGRNKAGQVWSDITGNRTGTVTINADGWGNFSVNGGSVSIWVNK

SEQ ID NO: 22883 - protein, 485 aa, Bacillus sp.
HHNGTNGTMMQYFEWYLPNDGNHWNRLRSDASNLKDKGISAVWIPPAWKGASQNDVGYGAYDLYDLGEFNQKGTIRTKYGTRNQLQAAVNALKSNGIQVYGDVVFNHKGGADATEMVRAVEVNPNNRNQEVSGEYTIEAWTKFDFPGRGNTHSNFKWRWYHFDGVDWDQSRKLNNRIYKFRGDGKGWDWEVDTENGNYDYLLYADIDFDHPEVVNELRNWGVWYTNTLGLDGFRIDAVKHIKYSFTRDWINHVRSATGKNMFAVAEFWKNDLGAIENYLNKTNWNHSVFDVPLHYNLYNASKSGGNYDMRQIFNGTVVQRHPMHAVTFVDNHDSQPEEALESFVEEWFKPLAYALTLTREQGYPSVFYGDYYGIPTHGVPAMKSKIDPILEARQKYAYGRQNDYLDHHNIIGWTREGNTAHPNSGLATIMSDGAGGNKWMFVGRNKAGQVWTDITGNRAGTVTINADGWGNFSVNGGSVSIWVNK

SEQ ID NO: 22884 - protein, 485 aa, Bacillus sp. 707
HHNGTNGTMMQYFEWYLPNDGNHWNRLNSDASNLKSKGITAVWIPPAWKGASQNDVGYGAYDLYDLGEFNQKGTVRTKYGTRSQLQAAVTSLKNNGIQVYGDVVMNHKGGADATEMVRAVEVNPNNRNQEVTGEYTIEAWTRFDFPGRGNTHSSFKWRWYHFDGVDWDQSRRLNNRIYKFRGHGKAWDWEVDTENGNYDYLMYADIDMDHPEVVNELRNWGVWYTNTLGLDGFRIDAVKHIKYSFTRDWINHVRSATGKNMFAVAEFWKNDLGAIENYLQKTNWNHSVFDVPLHYNLYNASKSGGNYDMRNIFNGTVVQRHPSHAVTFVDNHDSQPEEALESFVERWFKPLAYALTLTREQGYPSVFYGDYYGIPTHGVPAMRSKIDPILEARQKYAYGKQNDYLDHHNIIGWTREGNTAHPNSGLATIMSDGAGGSKWMFVGRNKAGQVWSDITGNRTGTVTINADGWGNFSVNGGSVSIWVNK

SEQ ID NO: 22885 - protein, 483 aa, Bacillus sp. SP70
HHNGTNGTMMQYFEWYLPNDGNHWNRLNSDASNLKSKGITAVWIPPAWKGASQNDVGYGAYDLYDLGEFNQKGTVRTKYGTRSQLQAAVTSLKNNGIQVYGDVVMNHKGGADATEMVRAVEVNPNNRNQEVTGEYTIEAWTRFDFPGRGNTHSSFKWRWYHFDGVDWDQSRRLNNRIYKFRGKAWDWEVDTDNGNYDYLMYADIDMDHPEVVNELRNWGVWYTNTLGLDGFRIDAVKHIKYSFTRDWINHVRSATGKNMFAVAEFWKNDLGAIENYLQKTNWNHSVFDVPLHYNLYNASKSGGNYDMRNIFNGTVVQRHPSHAVTFVDNHDSQPEEALESFVEEWFKPLAYALTLTREQGYPSVFYGDYYGIPTHGVPAMRSKIDPILEARQKYAYGKQNDYLDHHNIIGWTREGNTAHPNSGLATIMSDGAGGSKWMFVGRNKAGQVWSDITGNRTGTVTINADGWGNFSVNGGSVSIWVNK

SEQ ID NO: 22886 - protein, 485 aa, Bacillus sp. 707
HHNGTNGTMMQYFEWYLPNDGNHWNRLNSDASNLKSKGITAVWIPPAWKGASQNDVGYGAYDLYDLGEFNQKGTVRTKYGTRSQLQAAVTSLKNNGIQVYGDVVMNHKGGADATEMVRAVEVNPNNRNQEVTGEYTIEAWTRFDFPGRGNTHSSFKWRWYHFDGVDWDQSRRLNNRIYKFRGHGKAWDWEVDTENGNYDYLMYADIDMDHPEVVNELRNWGVWYTNTLGLDGFRIDAVKHIKYSFTRDWINHVRSATGKNMFAVAEFWKNDLGAIENYLQKTNWNHSVFDVPLHYNLYNASKSGGNYDMRNIFNGTVVQRHPSHAVTFVDNHDSQPEEALESFVEHWFKPLAYALTLTREQGYPSVFYGDYYGIPTHGVPAMRSKIDPILEARQKYAYGKQNDYLDHHNIIGWTREGNTAHPNSGLATIMSDGAGGSKWMFVGRNKAGQVWSDITGNRTGTVTINADGWGNFSVNGGSVSIWVNK

SEQ ID NO: 22887 - protein, 485 aa, Bacillus sp. 707
HHNGTNGTMMQYFEWYLPNDGNHWNRLNSDASNLKSKGITAVWIPPAWKGASQNDVGYGAYDLYDLGEFSQKGTVRTKYGTRSQLQAAVTSLKNNGIQVYGDVVMNHKGGADATEMVRAVEVNPNNRNQEVTGEYTIEAWTRFDFPGRGNTHSSFKWRWYHFDGVDWDQSRRLNNRIYKFRGHGKAWDWEVDTENGNYDYLMYADIDMDHPEVVNELRNWGVWYTNTLGLDGFRIDAVKHIKYSFTRDWINHVRSATGKNMFAVAEFWKNDLGAIENYLQKTNWNHSVFDVPLHYNLYNASKSGGNYDMRNIFNGTVVQRHPSHAVTFVDNHDSQPEEALESFVEEWFKPLAYALTLTREQGYPSVFYGDYYGIPTHGVPAMRSKIDPILEARQKYAYGKQNDYLDHHNIIGWTREGNTAHPNSGLATIMSDGAGGSKWMFVGRNKAGQVWSDITGNRTGTVTINADGWGNFSVNGGSVSIWVNK

SEQ ID NO: 22888 - protein, 485 aa, Bacillus sp. 707
HHNGTNGTMMQYFEWYLPNDGNHWNRLNSDASNLKSKGITAVWIPPAWKGASQNDVGYGAYDLYDLGEFNQKGTVRTKYGTRSQLQAAVTSLKNNGIQVYGDVVMNHKGGADATEMVRAVEVNPNNRNQEVTGEYTIEAWTRFDFPGRGNTHSSFKWRWYHFDGVDWDQSRRLNNRIYKFRGHGKAWDWEVDTENGNYDYLMYADIDMDHPEVVNELRNWGVWYTNTLGLDGFRIDAVKHIKYSFTRDWINHVRSATGKNTFAVAEFWKNDLGAIENYLQKTNWNHSVFDVPLHYNLYNASKSGGNYDMRNIFNGTVVQRHPSHAVTFVDNHDSQPEEALESFVEEWFKPLAYALTLTREQGYPSVFYGDYYGIPTHGVPAMRSKIDPILEARQKYAYGKQNDYLDHHNIIGWTREGNTAHPNSGLATIMSDGAGGSKWMFVGRNKAGQVWSDITGNRTGTVTINADGWGNFSVNGGSVSIWVNK

SEQ ID NO: 22889 - protein, 485 aa, Bacillus sp. 707
HHNGTNGTMMQYFEWYLPNDGNHWNRLNSDASNLKSKGITAVWIPPAWKGASQNDVGYGAYDLYDLGEFNQKGTVRTKYGTRSQLQAAVTSLKNNGIQVYGDVVMNHKGGADATEMVRAVEVNPNNRNQEVTGEYTIEAWTRFDFPGRGNTHSSFKWRWYHFDGVDWDQSRRLNNRIYKFRGHGKAWDWEVDTENGNYDYLMYADIDMDHPEVVNELRNWGVWYTNTLGLDGFRIDAVKHIKYSFTRDWINHVRSATGKNMKAVAEFWKNDLGAIENYLQKTNWNHSVFDVPLHYNLYNASKSGGNYDMRNIFNGTVVQRHPSHAVTFVDNHDSQPEEALESFVEEWFKPLAYALTLTREQGYPSVFYGDYYGIPTHGVPAMRSKIDPILEARQKYAYGKQNDYLDHHNIIGWTREGNTAHPNSGLATIMSDGAGGSKWMFVGRNKAGQVWSDITGNRTGTVTINADGWGNFSVNGGSVSIWVNK

SEQ ID NO: 22890 - protein, 485 aa, Bacillus sp. 707
HHNGTNGTMMQYFEWYLPNDGNHWNRLNSDASNLKSKGITAVWIPPAWKGASQNDVGYGAYDLYDLGEFNQKGTVRTKYGTRSQLQAAVTSLKNNGIQVYGDVVMNHKGGADATEMVRAVEVNPNNRNQEVTGEYTIEAWTRFDFPGRGNTHSSFKWRWYHFDGVDWDQSRRLNNRIYKFRGHGKAWDWEVDTENGNYDYLMYADIDMDHPEVVNELRNWGVWYTNTLGLDGFRIDAVKHIKYSFTRDWINHVRSATGKNMFAVAEFWKNDLGAIENYLQKTNWNHSVFDVPLHYNLYNASKSGGNYDMRNIFNGTVVQRHPSHAVTFVDNHDSQPEEALESFVEEWFKPLAYALTLTREQGYPSVFYGDYYGIPTHGVPAMRSKIDPILEARQKYAYGKQNDYLDHHNIIGWTREGNTAHPNSGLATIMSDGANGSKWMFVGRNKAGQVWSDITGNRTGTVTINADGWGNFSVNGGSVSIWVNK

SEQ ID NO: 22891 - protein, 485 aa, Bacillus sp. 707
HHNGTNGTMMQYFEWYLPNDGNHWNRLNSDASNLKSKGITAVWIPPAWKGASQNDVGYGAYDLYDLGEFNQKGTVRTKYGTRSQLQAAVTSLKNNGIQVYGDVVMNHKGGADATEMVRAVEVNPNNRNQEVTGEYTIEAWTRFDFPGRGNTHSSFKWRWYHFDGVDWDQSRRLNNRIYKFRGHGKAWDWEVDTENGNYDYLMYADIDMDHPEVVNELRNWGVWYTNTLGLDGFRIDAVKHIKYSFTRDWINHVRSATGKNMFAVAEFWKNDLGAIENYLQKTNWNHSVFDVPLHYNLYNASKSGGNYDMRNIFNGTVVQRHPSHAVTFVDNHDSQPEEALESFVEEWFKPLAYALTLTREQGYPSVFYGDYYGIPTHGVPAMRSKIDPILEARQKYAYGKQNDYLDHHNIIGWTREGNTAHPNTGLATIMSDGAGGSKWMFVGRNKAGQVWSDITGNRTGTVTINADGWGNFSVNGGSVSIWVNK

SEQ ID NO: 22892 - protein, 483 aa, Bacillus sp. SP70
HHNGTNGTMMQYFEWYLPNDGNHWNRLNSDASNLKSKGITAVWIPPAWKGASQNDVGYGAYDLYDLGEFNQKGTVRTKYGTRSQLQAAVTSLKNNGIQVYGDVVMNHKGGADATEMVRAVEVNPNNRNQEVTGEYTIEAWTRFDFPGRGNTHSSFKWRWYHFDGVDWDQSRRLNNRIYKFRGKAWDWEVDTENGNYDYLMYADIDMDHPEVVNELRNWGVWYTNTLGLDGFRIDAVKHIKYSFTRDWINHVRSATGKNMFAVAEFWKNDLGAIENYLQKTNWNHSVFDVPLHYNLYNASKSGGNYDMRNIFNGTVVQRHPSHAVTFVDNHDSQPEEALESFVEEWFKPLAYALTLTREQGYPSVFYGDYYGIPTHGVPAMRSKIDPILEARQKYAYGKQNDYLDHHNIIGWTREGNTAHPNSGLATIMSDGAGGSKWMFVGRNKAGQVWSDITGNRTGTVTINADGWGNFSVNEGSVSIWVNK

SEQ ID NO: 22893 - protein, 485 aa, Bacillus sp. 707
HHNGTNGTMMQYFEWYLPNDGNHWNRLNSDASNLKSKGITAVWIPPAWKGASQNDVGYGAYDLYDLGEFNQKGTVRTKYGTRSQLQAAVTSLKNNGIQVYGDVVMNHKGGADATEMVRAVEVNPNNRNQEVTGEYTIEAWTRFDFPGRGNTHSSFKWRWYHFDGVDWDQSRRLNNRIYKFRGHGKAWDWEVDTENGNYDYLMYADIDMDHPEVVNELRNWGVWYTNTLGLDGFRIDAVKHIKYSFTRDWINHVRSATGKNMFAVAEFWKNDLGAIENYLQKTNWNHSVFDVPLHYNLYNASKSGGNYDMRNIFNGTVVQRHPSHAVTFVDNHDSQPEEALESFVETWFKPLAYALTLTREQGYPSVFYGDYYGIPTHGVPAMRSKIDPILEARQKYAYGKQNDYLDHHNIIGWTREGNTAHPNSGLATIMSDGAGGSKWMFVGRNKAGQVWSDITGNRTGTVTINADGWGNFSVNGGSVSIWVNK

SEQ ID NO: 22894 - protein, 485 aa, Bacillus sp. 707
HHNGTNGTMMQYFEWYLPNDGNHWNRLNSDASNLKSKGITAVWIPPAWKGASQNDVGYGAYDLYDLGEFNQKGTVRTKYGTRSQLQAAVTSLKNNGIQVYGDVVMNHKGGADATEMVRAVEVNPNNRNQEVTGEYTIEAWTRFDFPGRGNTHSSFKWRWYHFDGVDWDQSRRLNNRIYKFRGHGKAWDWEVDTENGNYDYLMYADIDMDHPEVVNELRNWGVWYTNTLGLDGFRIDAVKHIKYSFTRDWINHVRSATGKNMFAVAEFWKNDLGAIENYLQKTNWNHSVFDVPLHYNLYNASKSGGNYDMRNIFNGTVVQRHPSHAVTFVDNHDSQPEEALESFVEEWFKPLAYALTLTREQGYPSVFYGDYYGIPTHGVPAMRSKIDPILEARQKYAYGKQNDYLDHHNIIGWTREGNTAHPNSGLATIMSDGAGGSKWMFVGRGKAGQVWSDITGNRTGTVTINADGWGNFSVNGGSVSIWVNK

SEQ ID NO: 22895 - protein, 485 aa, Bacillus sp. 707
HHNGTNGTMMQYFEWYLPNDGNHWNRLNSDASNLKSKGITAVWIPPAWKGASQNDVGYGAYDLYDLGEFNQKGTVRTKYGTRSQLQAAVTSLKNNGIQVYGDVVMNHKGGADATEMVRAVEVNPNNRNQEVTGEYTIEAWTRFDFPGRGNTHSSFKWRWYHFDGVDWDQSRRLNNRIYKFRGHGKAWDWEVDTENGNYDYLMYADIDMDHPEVVNELMNWGVWYTNTLGLDGFRIDAVKHIKYSFTRDWINHVRSATGKNMFAVAEFWKNDLGAIENYLQKTNWNHSVFDVPLHYNLYNASKSGGNYDMRNIFNGTVVQRHPSHAVTFVDNHDSQPEEALESFVEEWFKPLAYALTLTREQGYPSVFYGDYYGIPTHGVPAMRSKIDPILEARQKYAYGKQNDYLDHHNIIGWTREGNTAHPNSGLATIMSDGAGGSKWMFVGRNKAGQVWSDITGNRTGTVTINADGWGNFSVNGGSVSIWVNK

SEQ ID NO: 22896 - protein, 485 aa, Bacillus sp. 707
HHNGTNGTMMQYFEWYLPNDGNHWNRLNSDASNLKSKGITAVWIPPAWKGASQNDVGYGAYDLYDLGEFNQKGTVRTKYGTRSQLQAAVTSLKNNGIQVYGDVVMNHKGGADATEMVRAVEVNPNNRNQEVTGEYTIEAWTRFDFPGRGNTHSSFKWRWYHFDGVDWDQSRRLNNRIYKFRGHGKAWDWEVDTENGNYDYLMYADIDMDHPEVVNELRNWGVWYTNTLGLDGFRIDAVKHIKYSFTRDWINHVRSATGKNMFAVAEFWKNDLGAIENYLQKTNWNHSVFDVPLHYNLYNASKSGGNYDMRNIFNGTVVQRHPSHAVTFVDNHDSQPEEALESFVEEWFKPLAYALTLTREQGYPSVFYGDYYGIPTHGVPAMRSKIDPILEARQKYAYGKQNDYLDHHNIIGWTREGNTAHPNSGLATIMSDGAGGSKWMFVGRNKAGQVWSDITGNRTGRVTINADGWGNFSVNGGSVSIWVNK

SEQ ID NO: 22897 - protein, 485 aa, Bacillus sp. 707
HHNGTNGTMMQYFEWYLPNDGNHWNRLNSDASNLKSKGITAVWIPPAWKGASQNDVGYGAYDLYDLGEFNQKGTVRTKYGTRSQLQAAVTSLKNNGIQVYGDVVMNHKGGADATEMVRAVEVNPNNRNQEVTGEYTIEAWTRFDFPGRGNTHSSFKWRWYHFDGVDWDQSRRLNNRIYKFRGHGKAWDWEVDTENGNYDYLMYADIDMDHPEVVNELRNWGVWYTNTLGLDGFRIDAVKHIKYSFTRDWINHVRSATGKNMFAVAEFWKNDLGAIENYLQKTNWNHSVFDVPLHYNLYNASKSGGNYDMRNIFNGTVVQRHPSHAVTFVDNHDSQPEEALESFVEEWFKPLAYALTLTREQGVPSVFYGDYYGIPTHGVPAMRSKIDPILEARQKYAYGKQNDYLDHHNIIGWTREGNTAHPNSGLATIMSDGAGGSKWMFVGRNKAGQVWSDITGNRTGTVTINADGWGNFSVNGGSVSIWVNK

SEQ ID NO: 22898 - protein, 485 aa, Bacillus sp. 707
HHNGTNGTMMQYFEWYLPNDGNHWNRLNSDASNLKSKGITAVWIPPAWKGASQNDVGYGAYDLYDLGEFNQKGTVRTKYGTRSQLQAAVTSLKNNGIQVYGDVVMNHKGGADATEMVRAVEVNPNNRNQEVTGEYTIEAWTRFDFPGRGNTHSSFKWRWYHFDGVDWDQSRRLNNRIYKFRGHGKAWDWEVDTENGNYDYLMYADIDMDHPEVVNELRNWGVWYTNTLGLDGFRIDAVKHIKYSFTRDWINHVRSATGKNMFAVAEFWKNDLGAIENYLQKTNWNHSVFDVPLHYNLYNASKSGGNYDMRNIFNGTVVQRHPSHAVTFVDNHDSQPEEALESFVEEWFKPLAYALTLTREQGYPSVFYGDYYGIPTHGVPAMRSKIDPILEARQKYAYGKQNDYLDHHNIIGWTREGNTAHPNSGLATIMSDGAGGSKWMFVGRNKAGQVWSDITGNRTQTVTINADGWGNFSVNGGSVSIWVNK

SEQ ID NO: 22899 - protein, 485 aa, Bacillus sp. 707
HHNGTNGTMMQYFEWYLPNDGNHWNRLNSDASNLKSKGITAVWIPPAWKGASQNDVGYGAYDLYDLGEFNQKGTVRTKYGTRSQLQAAVTSLKNNGIQVYGDVVMNHKGGADATEMVRAVEVNPNNRNQEVTGEYTIEAWTRFDFPGRGNTHSSFKWRWYHFDGVDWDQSRRLNNRIYKFRGHGKAWDWEVDTENGNYDYLMYADIDMDHPEVVNELRNWGVWYTNTLGLDGFRIDAVKHIKYSFTRDWINHVRSATGKNMFAVAEFWKNDLGAIENYLQKTNWNHSVFDVPLHYNLYNASKSGGNYDMRNIFNGTVVQRHPSHAVTFVDNHDSQPEEALESFVEEWFKPLAYALTLTREQGYPSVFYGDYYGIPTHGVPAMRSKIDPILEARQKYAYGKQNDYLDHHNIIGWTREGNTAHPNNGLATIMSDGAGGSKWMFVGRNKAGQVWSDITGNRTGTVTINADGWGNFSVNGGSVSIWVNK

SEQ ID NO: 22900 - protein, 485 aa, Bacillus sp. 707
HHNGTNGTMMQYFEWYLPNDGNHWNRLNSDALNLKSKGITAVWIPPAWKGASQNDVGYGAYDLYDLGEFNQKGTVRTKYGTRSQLQAAVTSLKNNGIQVYGDVVMNHKGGADATEMVRAVEVNPNNRNQEVTGEYTIEAWTRFDFPGRGNTHSSFKWRWYHFDGVDWDQSRRLNNRIYKFRGHGKAWDWEVDTENGNYDYLMYADIDMDHPEVVNELRNWGVWYTNTLGLDGFRIDAVKHIKYSFTRDWINHVRSATGKNMFAVAEFWKNDLGAIENYLQKTNWNHSVFDVPLHYNLYNASKSGGNYDMRNIFNGTVVQRHPSHAVTFVDNHDSQPEEALESFVEEWFKPLAYALTLTREQGYPSVFYGDYYGIPTHGVPAMRSKIDPILEARQKYAYGKQNDYLDHHNIIGWTREGNTAHPNSGLATIMSDGAGGSKWMFVGRNKAGQVWSDITGNRTGTVTINADGWGNFSVNGGSVSIWVNK

SEQ ID NO: 22901 - protein, 485 aa, Bacillus sp. 707
HHNGTNGTMMQYFEWYLPNDGNHWNRLNSDASNLKSKGITAVWIPPAWKGASQNDVGYGAYDLYDLGEFNQKGTVRTKYGTRSQLQAAVTSLKNNGIQVYGDVVMNHKGGADATEMVRAVEVNPNNRNQEVTGEYTIEAWTRFDFPGRGNTHSSFKWRWYHFDGVDWDQSRRLNNRIYKFRGHGKAWDWEVDTENGNYDYLMYADIDMDHPEVVNELRNWGVWYTNTLGLDGFRIDAVKHIKYSFTRDWINHVRSATGKNMFAVAEFWKNDLGAIENYLQKTNWNHSVFDVPLHYNLYNASKSGGNYDMRNIFNGTVVQRHPSHAVTFVDNHDSQPEEALESFVEEWFKPLAYALTLTREQGYPSVFYGDYYGIPTHGVPAMRSKIDPILEARQKYAYGKQNDYLDHHNIIGWTREGDTAHPNSGLATIMSDGAGGSKWMFVGRNKAGQVWSDITGNRTGTVTINADGWGNFSVNGGSVSIWVNK

SEQ ID NO: 22902 - protein, 485 aa, Bacillus sp. 707
HHNGTNGTMMQYFEWYAPNDGNHWNRLNSDASNLKSKGITAVWIPPAWKGASQNDVGYGAYDLYDLGEFNQKGTVRTKYGTRSQLQAAVTSLKNNGIQVYGDVVMNHKGGADATEMVRAVEVNPNNRNQEVTGEYTIEAWTRFDFPGRGNTHSSFKWRWYHFDGVDWDQSRRLNNRIYKFRGHGKAWDWEVDTENGNYDYLMYADIDMDHPEVVNELRNWGVWYTNTLGLDGFRIDAVKHIKYSFTRDWINHVRSATGKNMFAVAEFWKNDLGAIENYLQKTNWNHSVFDVPLHYNLYNASKSGGNYDMRNIFNGTVVQRHPSHAVTFVDNHDSQPEEALESFVEEWFKPLAYALTLTREQGYPSVFYGDYYGIPTHGVPAMRSKIDPILEARQKYAYGKQNDYLDHHNIIGWTREGNTAHPNSGLATIMSDGAGGSKWMFVGRNKAGQVWSDITGNRTGTVTINADGWGNFSVNGGSVSIWVNK

SEQ ID NO: 22903 - protein, 485 aa, Bacillus sp. 707
HHNGTNGTMMQYFEWYLPNDGNHWNRLNSDASNLKSKGITAVWIPPAWKGASQNDVGYGAYDLYDLGEFNQKGTVRTKYGTRSQLQAAVTSLKNNGIQVYGDVVMNHKGGADATEMVRAVEVNPNNRNQEVTGEYTIEAWTRFDFPGRGNTHSSFKWRWYHFDGVDWDQSRRLNNRIYKFRGHGKAWDWEVDTENGNYDYLMYADIDMDHPEVVNELRNWGVWYTNTLGLDGFRIDAVKHIKYSFTRDWINHVRSATGKNMFAVAEFWKNDLGAIENYLQKTNWNHSVFDVPLHYNLYNASKSGGNYDMRNIFNGTVVQRHPSHAVTFVDNHDSQPEEALESFVEEWFKPLAYALTLTREQGYPSVFYGDYYGIPTHGVPAMRSKIDPLLEARQKYAYGKQNDYLDHHNIIGWTREGNTAHPNSGLATIMSDGAGGSKWMFVGRNKAGQVWSDITGNRTGTVTINADGWGNFSVNGGSVSIWVNK

SEQ ID NO: 22904 - protein, 485 aa, Bacillus sp. 707
HHNGTNGTMMQYFEWYLPNDGNHWNRLNSDASNLKSKGITAVWIPPAWKGASQNDVGYGAYDLYDLGEFNQKGTVRTKYGTRSQLQAAVTSLKNNGIQVYGDVVMNHKGGADATEMVRAVEVNPNNRNQEVTGEYTIEAWTRFDFPGRGNTHSSFKWRWYHFDGVDWDQSRRLNNRIYKFRGHGKAWDWEVDTENGNYDYLMYADIDMDHPEVVNELRNWGVWYTNTLGLDGFRIDAVKHIKYSFTRDWINHVRSATGKNMFAVAEFWKNDLGAIENYLQKTNWNHSVFDVPLHYNLYNASKSGGNYDMRNIFNGTVVQRHPSHAVTFVDNHDSQPEEALESFVEEWFKPLAYALTLTREQGYPSVFYGDYYGIPTHGVPAMRSKIDPILEARQKYAYGKQNDYLDHHNIIGWTREGNTARPNSGLATIMSDGAGGSKWMFVGRNKAGQVWSDITGNRTGTVTINADGWGNFSVNGGSVSIWVNK

SEQ ID NO: 22905 - protein, 485 aa, Bacillus sp. 707
HHNGTNGTMMQYFEWYLPNDGNHWNRLNSDASNLKSKGITAVWIPPAWKGASQNDVGYGAYDLYDLGEFNQKGTVRTKYGTRSQLQAAVTSLKNNGIQVYGDVVMNHKGGADATEMVRAVEVNPNNRNQEVTGEYTIEAWTRFDFPGRGNTHSSFKWRWYHFDGVDWDQSRRLNNRIYKFRGHGKAWDWEVDTENGNYDYLMYADIDMDNPEVVNELRNWGVWYTNTLGLDGFRIDAVKHIKYSFTRDWINHVRSATGKNMFAVAEFWKNDLGAIENYLQKTNWNHSVFDVPLHYNLYNASKSGGNYDMRNIFNGTVVQRHPSHAVTFVDNHDSQPEEALESFVEEWFKPLAYALTLTREQGYPSVFYGDYYGIPTHGVPAMRSKIDPILEARQKYAYGKQNDYLDHHNIIGWTREGNTAHPNSGLATIMSDGAGGSKWMFVGRNKAGQVWSDITGNRTGTVTINADGWGNFSVNGGSVSIWVNK

SEQ ID NO: 22906 - protein, 485 aa, Bacillus sp. 707
HHNGTNGTMMQYFEWYLPNDGNHWNRLNSDASNLKSKGITAVWIPPAWKGASQNDVGYGAYDLYDLGEFNQKGTVRTKYGTRSQLQAAVTSLKNNGIQVYGDVVMNHKGGADATEMVRAVEVNPNNRNQEVTGEYTIEAWTRFDFPGRGNTHSSFKWRWYHFDGVDWDQSRRLNNRIYKFRGHGKAWDWEVDTENGNYDYLMYADIDMDHPEVVNELRNWGVWYTNTLGLDGFRIDAVKHIKYSFTRDWINHVRSATGKNMFAVAEFWKNDLGAIENYLQKTNWNHSVFDVPLHYNLYNASKRGGNYDMRNIFNGTVVQRHPSHAVTFVDNHDSQPEEALESFVEEWFKPLAYALTLTREQGYPSVFYGDYYGIPTHGVPAMRSKIDPILEARQKYAYGKQNDYLDHHNIIGWTREGNTAHPNSGLATIMSDGAGGSKWMFVGRNKAGQVWSDITGNRTGTVTINADGWGNFSVNGGSVSIWVNK

SEQ ID NO: 22907 - protein, 483 aa, Bacillus sp.
HHNGTNGTLMQYFEWYLPNDGNHWNRLRSDASNLKDHGISAVWIPPAWKGTSQNDVGYGAYDLYDLGEFNQKGTIRTKYGTRNQLQAAVNALKSNGIQVYGDVVMNHKGGADATEMVKAVEVNPNNRNQEVSGEYTIEAWTKFDFPGRANTHSNFKWRWYHFDGVDWDQSRKLNNRIYKFRTKAWDWEVDTEFGNYDYLMYADIDMDHPEVVNELRNWGVWYTNTLGLDGFRIDAVKHIKYSFTRDWINHVRSAIGKNMFAVAEFWKNDLGAIENYLNKTNWNHSVFDVPLHFNLYYASKSGGNYDMRQIFNGTVVQKHPTHAVTFVDNHDSQPEESLESFVREWFKPLAYALTLTREQGYPSVFYGDYYGIPTHGVPAMKSKIDPILEARQKYAYGRQNDYLDHHNIIGWTREGNTAHPNSGLATIMSDGAGGNKWMFVGRNKAGQVWTDITGNKAGTVTINADGWGNFSVNGGSVSIWVNK

SEQ ID NO: 22908 - protein, 485 aa, Bacillus sp. 707
HHNGTNATMMQYFEWYLPNDGNHWNRLNSDASNLKSKGITAVWIPPAWKGASQNDVGYGAYDLYDLGEFNQKGTVRTKYGTRSQLQAAVTSLKNNGIQVYGDVVMNHKGGADATEMVRAVEVNPNNRNQEVTGEYTIEAWTRFDFPGRGNTHSSFKWRWYHFDGVDWDQSRRLNNRIYKFRGHGKAWDWEVDTENGNYDYLMYADIDMDHPEVVNELRNWGVWYTNTLGLDGFRIDAVKHIKYSFTRDWINHVRSATGKNMFAVAEFWKNDLGAIENYLQKTNWNHSVFDVPLHYNLYNASKSGGNYDMRNIFNGTVVQRHPSHAVTFVDNHDSQPEEALESFVEEWFKPLAYALTLTREQGYPSVFYGDYYGIPTHGVPAMRSKIDPILEARQKYAYGKQNDYLDHHNIIGWTREGNTAHPNSGLATIMSDGAGGSKWMFVGRNKAGQVWSDITGNRTGTVTINADGWGNFSVNGGSVSIWVNK

SEQ ID NO: 22909 - protein, 485 aa, Bacillus sp. 707
HHNGTNGTMMQYFEWYLPNDGNHWNRLNSDASNLKSKGITAVWIPPAWKGASQNDVGYGAYDLYDLGEFNQKGTVRTKYGTRSQLQAAVTSLKNNGIQVYGDVVMNHKGGADATEMVRAVEVNPNNRNQEVTGEYTIEAWTRFDFPGRGNTHSSFKWRWYHFDGVDWDQSRRLNNRIYKFRGHGKAWDWEVDTENGNYDYLMYADIDMDHPEVVNELRNWGVWYTNTLGLDGFRIDAVKHIKYSFTRDWINHVRSATGKNMFAVAEFWKNDLGAIENYLQKTNWNHSVFDVPLHYNLYNASKSGGNYDMRNIFNGTVVQRHPSHAVTFVDNHDSQPEEALESFVEQWFKPLAYALTLTREQGYPSVFYGDYYGIPTHGVPAMRSKIDPILEARQKYAYGKQNDYLDHHNIIGWTREGNTAHPNSGLATIMSDGAGGSKWMFVGRNKAGQVWSDITGNRTGTVTINADGWGNFSVNGGSVSIWVNK

SEQ ID NO: 22910 - protein, 485 aa, Bacillus sp. 707
HHNGTNGTMMQYFEWYLPNDGNHWNRLNSDASNLKSKGITAVWIPPAWKGASQNDVGYGAYDLYDLGEFNQKGTVRTKYGTRSQLQAAVTSLKNNGIQVYGDVVMNHKGGADATEMVRAVEVNPNNRNQEVTGEYTIEAWTRFDFPGRGNTHSSFKWRWYHFDGVDWDQSRRLNNRIYKFRGHGKAWDWEVDTENGNYDYLMYADIDMDHPEVVNELRNWGVWYTNTLGLDGFRIDAVKHIKYSFTRDWINHVRSATGKNMFAVAEFWKNDLGAIENYLQKTNWNHSVFDVPLHYNLYNASKSGGNYDMRNIFNGTVVQRHPSHAVTFVDNHDSQPEEALESFVEEWFKPLAYALTLTREQGYPSVFYGDYYGIPTHGVPAMRSKIDPILEARQKYAYGKQNDYLDHQNIIGWTREGNTAHPNSGLATIMSDGAGGSKWMFVGRNKAGQVWSDITGNRTGTVTINADGWGNFSVNGGSVSIWVNK

SEQ ID NO: 22911 - protein, 485 aa, Bacillus sp. 707
HHNGTNGTMMQYFEWYLPNDGNHWNRLNSDASNLKSKGITAVWIPPAWKGASQNDVGYGAYDLYDLGEFCQKGTVRTKYGTRSQLQAAVTSLKNNGIQVYGDVVMNHKGGADATEMVRAVEVNPNNRNQEVTGEYTIEAWTRFDFPGRGNTHSSFKWRWYHFDGVDWDQSRRLNNRIYKFRGHGKAWDWEVDTENGNYDYLMYADIDMDHPEVVNELRNWGVWYTNTLGLDGFRIDAVKHIKYSFTRDWINHVRSATGKNMFAVAEFWKNDLGAIENYLQKTNWNHSVFDVPLHYNLYNASKSGGNYDMRNIFNGTVVQRHPSHAVTFVDNHDSQPEEALESFVEEWFKPLAYALTLTREQGYPSVFYGDYYGIPTHGVPAMRSKIDPILEARQKYAYGKQNDYLDHHNIIGWTREGNTAHPNSGLATIMSDGAGGSKWMFVGRNKAGQVWSDITGNRTGTVTINADGWGNFSVNGGSVSIWVNK

SEQ ID NO: 22912 - protein, 485 aa, Bacillus sp. 707
HHNGTNGTMMQYFEWYLPNDGNHWNRLNSDASNLKSKGITAVWIPPAWKGASQNDVGYGAYDLYDLGEFNQKGTVRTKYGTRSQLQAAVTSLKNNGIQVYGDVVMNHKGGADATEMVRAVEVNPNNRNQEVTGEYTIEAWTRFDFPGRGNTHSSFKWRWYHFDGVDWDQSRRLNNRIYKFRGHGKAWDWEVDTENGNYDYLMYADIDMDHPEVVNELRNWGVWYTNTLGLDGFRIDAVKHIKYSFTRDWINHVRSATGKNMGAVAEFWKNDLGAIENYLQKTNWNHSVFDVPLHYNLYNASKSGGNYDMRNIFNGTVVQRHPSHAVTFVDNHDSQPEEALESFVEEWFKPLAYALTLTREQGYPSVFYGDYYGIPTHGVPAMRSKIDPILEARQKYAYGKQNDYLDHHNIIGWTREGNTAHPNSGLATIMSDGAGGSKWMFVGRNKAGQVWSDITGNRTGTVTINADGWGNFSVNGGSVSIWVNK

SEQ ID NO: 22913 - protein, 485 aa, Bacillus sp. 707
HHNGTNGTMMQYFEWYLPNDGNHWNRLNSDASNLKSKGITAVWIPPAWKGASQNDVGYGAYDLYDLGEFNQKGTVRTKYGTRSQLQAAVTSLKNAGIQVYGDVVMNHKGGADATEMVRAVEVNPNNRNQEVTGEYTIEAWTRFDFPGRGNTHSSFKWRWYHFDGVDWDQSRRLNNRIYKFRGHGKAWDWEVDTENGNYDYLMYADIDMDHPEVVNELRNWGVWYTNTLGLDGFRIDAVKHIKYSFTRDWINHVRSATGKNMFAVAEFWKNDLGAIENYLQKTNWNHSVFDVPLHYNLYNASKSGGNYDMRNIFNGTVVQRHPSHAVTFVDNHDSQPEEALESFVEEWFKPLAYALTLTREQGYPSVFYGDYYGIPTHGVPAMRSKIDPILEARQKYAYGKQNDYLDHHNIIGWTREGNTAHPNSGLATIMSDGAGGSKWMFVGRNKAGQVWSDITGNRTGTVTINADGWGNFSVNGGSVSIWVNK

SEQ ID NO: 22914 - protein, 485 aa, Bacillus sp. 707
HHNGTNGTMMQYFEWYLPNDGNHWNRLNSDASNLKSKGITAVWIPPAWKGASQNDVGYGAYDLYDLGEFNQKGTVRTKYGTRSQLQAAVTSLKNNGIQVYGDVVMNHKGGADATEMVRAVEVNPNNRNQEVTGEYTIEAWTRFDFPGRGNTHSSFKWRWYHFDGVDWDSSRRLNNRIYKFRGHGKAWDWEVDTENGNYDYLMYADIDMDHPEVVNELRNWGVWYTNTLGLDGFRIDAVKHIKYSFTRDWINHVRSATGKNMFAVAEFWKNDLGAIENYLQKTNWNHSVFDVPLHYNLYNASKSGGNYDMRNIFNGTVVQRHPSHAVTFVDNHDSQPEEALESFVEEWFKPLAYALTLTREQGYPSVFYGDYYGIPTHGVPAMRSKIDPILEARQKYAYGKQNDYLDHHNIIGWTREGNTAHPNSGLATIMSDGAGGSKWMFVGRNKAGQVWSDITGNRTGTVTINADGWGNFSVNGGSVSIWVNK

SEQ ID NO: 22915 - protein, 485 aa, Bacillus sp. 707
HHNGTNGTMMQYFEWYLPNDGNHWNRLNSDASYLKSKGITAVWIPPAWKGASQNDVGYGAYDLYDLGEFNQKGTVRTKYGTRSQLQAAVTSLKNNGIQVYGDVVMNHKGGADATEMVRAVEVNPNNRNQEVTGEYTIEAWTRFDFPGRGNTHSSFKWRWYHFDGVDWDQSRRLNNRIYKFRGHGKAWDWEVDTENGNYDYLMYADIDMDHPEVVNELRNWGVWYTNTLGLDGFRIDAVKHIKYSFTRDWINHVRSATGKNMFAVAEFWKNDLGAIENYLQKTNWNHSVFDVPLHYNLYNASKSGGNYDMRNIFNGTVVQRHPSHAVTFVDNHDSQPEEALESFVEEWFKPLAYALTLTREQGYPSVFYGDYYGIPTHGVPAMRSKIDPILEARQKYAYGKQNDYLDHHNIIGWTREGNTAHPNSGLATIMSDGAGGSKWMFVGRNKAGQVWSDITGNRTGTVTINADGWGNFSVNGGSVSIWVNK

SEQ ID NO: 22916 - protein, 485 aa, Bacillus sp. 707
HHNGTNGTMMQYFEWYLPNDGNHWNRLNSDASNLKSKGITAVWIPPAWKGASQNDVGYGAYDLYDLGEFNQKGTVRTKYGTRSQLQAAVTSLKNNGIQVYGDVVMNHKGGADATEMVRAVEVNPNNRNQEVTGEYTIEAWTRFDFPGRGNTHSSFKWRWYHFDGVDWDQSRRLNNRIYKFRGHGKAWDWEVDTENGNYDYLMYADIDMDHPEVVNELRNWGVWYTNTLGLDGFRIDAVKHIKYSFTRDWINHVRSATGKNMFAVAEFWKNDLGAIENYLQKTNWNHSVFDVPLHYNLYNASKSGGNYDMRNIFNGTVVQRHPSHAVTFVDNHDSQPEEALESFVEEWFKPLAYALTLTREQGYPSVFYGDYYGIPTHGVPAMRSKIDPILEARQKYAYGKQNDYLDHHNIIGWTREGNTAHPNWGLATIMSDGAGGSKWMFVGRNKAGQVWSDITGNRTGTVTINADGWGNFSVNGGSVSIWVNK

SEQ ID NO: 22917 - protein, 485 aa, Bacillus sp. 707
HHNGTNGTMMQYFEWYLPNDGNHWNRLNSDASNLKSKGITAVWIPPAWKGASQNDVGYGAYDLYDLGEFNQKGTVRTKYGTRSQLQAAVTSLKNNGIQVYGDVVMNHKGGADATEMVRAVEVNPNNRNQEVTGEYTIEAWTRFDFPGRGNTHSSFKWRWYHFDGVDWDQSRRLNNRIYKFRGHGKAWDWEVDTENGNYDYLMYADIDMDHPEVVNELCNWGVWYTNTLGLDGFRIDAVKHIKYSFTRDWINHVRSATGKNMFAVAEFWKNDLGAIENYLQKTNWNHSVFDVPLHYNLYNASKSGGNYDMRNIFNGTVVQRHPSHAVTFVDNHDSQPEEALESFVEEWFKPLAYALTLTREQGYPSVFYGDYYGIPTHGVPAMRSKIDPILEARQKYAYGKQNDYLDHHNIIGWTREGNTAHPNSGLATIMSDGAGGSKWMFVGRNKAGQVWSDITGNRTGTVTINADGWGNFSVNGGSVSIWVNK

SEQ ID NO: 22918 - protein, 485 aa, Bacillus sp. 707
HHNGTNGTMMQYFEWYLPNDGNHWNRLNSDASNLKSKGITAVWIPPAWKGASQNDVGYGAYDLYDLGEFNQKGTVRTKYGTRSQLQAAVTSLKNNGIQVYGDVVMNHKGGADATEMVRAVEVNPNNRNQEVTGEYTIEAWTRFDFPGRGNTHSSFKWRWYHFDGVDWDQSRRLNNRIYKFRGHGKAWDWEVDTENGNYDYLMYADIDMDHPEVVNELRNWGVWYTNTLGLDGFRIDAVKHIKYSFTRDWINHVRSATGKNMFAVAEFWKNDLGAIENYLQKTNWNHSVFDVPLHYNLYNASKSGGNYDMRNIFNGTVVQRHPSHAVTFVDNHDSQPEEALESFVEEWFKPLAYALTLTREQGYPSVFYGDYYGIPTHGVPAMRSKIDPILEARQKYAYGKQNDYLDHHNIIGWTRDGNTAHPNSGLATIMSDGAGGSKWMFVGRNKAGQVWSDITGNRTGTVTINADGWGNFSVNGGSVSIWVNK

SEQ ID NO: 22919 - protein, 485 aa, Bacillus sp. 707
HHNGTNGTMMQYFEWYLPNDGNHWNRLNSDASNLKSKGITAVWIPPAWKGASQNDVGYGAYDLYDLGEFNQKGTVRTKYGTRSQLQAAVTSLKNNGIQVYGDVVMNHKGGADATEMVRAVEVNPNNRNQEVTGEYTIEAWTRFDFPGRGNTHSSFKWRWYHFDGVDWDQSRRLNNRIYKFRGHGKAWDWEVDTENGNYDYLMYADIDMDHPEVVNELRNWGVWYTNTLGLDGFRIDAVKHIKYSFTRDWINHVRSATGKNMFAVAEFWKNDLGAIENYLQKTNWNHSVFDVPLHYNLYNASKSGGNYDMRNIFNGTVVQRHPSHAVTFVDNHDSQPEEALESFVEEWFKPLAYALTLTREQGYPSVFYGDYVGIPTHGVPAMRSKIDPILEARQKYAYGKQNDYLDHHNIIGWTREGNTAHPNSGLATIMSDGAGGSKWMFVGRNKAGQVWSDITGNRTGTVTINADGWGNFSVNGGSVSIWVNK

SEQ ID NO: 22920 - protein, 485 aa, Bacillus sp. 707
HHNGTNGTMMQYFEWYLPNDGNHWNRLNSDASNLKSKGITAVWIPPAWKGASQCDVGYGAYDLYDLGEFNQKGTVRTKYGTRSQLQAAVTSLKNNGIQVYGDVVMNHKGGADATEMVRAVEVNPNNRNQEVTGEYTIEAWTRFDFPGRGNTHSSFKWRWYHFDGVDWDQSRRLNNRIYKFRGHGKAWDWEVDTENGNYDYLMYADIDMDHPEVVNELRNWGVWYTNTLGLDGFRIDAVKHIKYSFTRDWINHVRSATGKNMFAVAEFWKNDLGAIENYLQKTNWNHSVFDVPLHYNLYNASKSGGNYDMRNIFNGTVVQRHPSHAVTFVDNHDSQPEEALESFVEEWFKPLAYALTLTREQGYPSVFYGDYYGIPTHGVPAMRSKIDPILEARQKYAYGKQNDYLDHHNIIGWTREGNTAHPNSGLATIMSDGAGGSKWMFVGRNKAGQVWSDITGNRTGTVTINADGWGNFSVNGGSVSIWVNK

SEQ ID NO: 22921 - protein, 485 aa, Bacillus sp. 707
HHNGNNGTMMQYFEWYLPNDGNHWNRLNSDASNLKSKGITAVWIPPAWKGASQNDVGYGAYDLYDLGEFNQKGTVRTKYGTRSQLQAAVTSLKNNGIQVYGDVVMNHKGGADATEMVRAVEVNPNNRNQEVTGEYTIEAWTRFDFPGRGNTHSSFKWRWYHFDGVDWDQSRRLNNRIYKFRGHGKAWDWEVDTENGNYDYLMYADIDMDHPEVVNELRNWGVWYTNTLGLDGFRIDAVKHIKYSFTRDWINHVRSATGKNMFAVAEFWKNDLGAIENYLQKTNWNHSVFDVPLHYNLYNASKSGGNYDMRNIFNGTVVQRHPSHAVTFVDNHDSQPEEALESFVEEWFKPLAYALTLTREQGYPSVFYGDYYGIPTHGVPAMRSKIDPILEARQKYAYGKQNDYLDHHNIIGWTREGNTAHPNSGLATIMSDGAGGSKWMFVGRNKAGQVWSDITGNRTGTVTINADGWGNFSVNGGSVSIWVNK

SEQ ID NO: 22922 - protein, 485 aa, Bacillus sp. 707
HHNGTNGTMMQYFEWYLPNDGNHWNRLNSDASQLKSKGITAVWIPPAWKGASQNDVGYGAYDLYDLGEFNQKGTVRTKYGTRSQLQAAVTSLKNNGIQVYGDVVMNHKGGADATEMVRAVEVNPNNRNQEVTGEYTIEAWTRFDFPGRGNTHSSFKWRWYHFDGVDWDQSRRLNNRIYKFRGHGKAWDWEVDTENGNYDYLMYADIDMDHPEVVNELRNWGVWYTNTLGLDGFRIDAVKHIKYSFTRDWINHVRSATGKNMFAVAEFWKNDLGAIENYLQKTNWNHSVFDVPLHYNLYNASKSGGNYDMRNIFNGTVVQRHPSHAVTFVDNHDSQPEEALESFVEEWFKPLAYALTLTREQGYPSVFYGDYYGIPTHGVPAMRSKIDPILEARQKYAYGKQNDYLDHHNIIGWTREGNTAHPNSGLATIMSDGAGGSKWMFVGRNKAGQVWSDITGNRTGTVTINADGWGNFSVNGGSVSIWVNK

SEQ ID NO: 22923 - protein, 485 aa, Bacillus sp. 707
HHNGTNGTMMQYFEWYLPNDGNHWNRLNSDASNLKSKGITAVWIPPAWKGASQNDVGYGAYDLYDLGEFNQKGTVRTKYGTRSQLQAAVTSLKNNGIQVYGDVVMNHKGGADATEMVRAVEVNPNNRNQEVTGEYTIEAWTRFDFPGRGNTHSSFKWRWYHFDGVDWDQSRRLNNRIYKFRGHGKAWDWEVDTENGNYDYLMYADIDMDHPEVVNELRNWGVWYTNTLGLDGFRIDAVKHIKYSFTRDWINHVRSATGKNMFAVAEFWKNDLGAIENYLQKTNWNHSVFDVPLHYNLYNASKSGGNYDMRNIFNGTVVQRHPSHAVTFVDNHDSQPEEALESFVEEWFKPLAYALTLTREQGYPSVFYGDYYGIPTHGVPAMRSKIDPILEARQKYAYGKQNDYLDHHNIIGWTREGNTAHPNSGLATIMSDGAGGSKWMFVGRNKAGQIWSDITGNRTGTVTINADGWGNFSVNGGSVSIWVNK

SEQ ID NO: 22924 - protein, 485 aa, Bacillus sp. 707
HHNGTNGTMMQYFEWYLPNDGNHWNRLNSDASNLKSKGITAVWIPPAWKGASQNDVGYGAYDLYDLGEFNQKGTVRTKYGTRSQLQAAVTSLKNNGIQVYGDVVMNHKGGADATEMVRAVEVNPNNRNQEVTGEYTIEAWTRFDFPGRLNTHSSFKWRWYHFDGVDWDQSRRLNNRIYKFRGHGKAWDWEVDTENGNYDYLMYADIDMDHPEVVNELRNWGVWYTNTLGLDGFRIDAVKHIKYSFTRDWINHVRSATGKNMFAVAEFWKNDLGAIENYLQKTNWNHSVFDVPLHYNLYNASKSGGNYDMRNIFNGTVVQRHPSHAVTFVDNHDSQPEEALESFVEEWFKPLAYALTLTREQGYPSVFYGDYYGIPTHGVPAMRSKIDPILEARQKYAYGKQNDYLDHHNIIGWTREGNTAHPNSGLATIMSDGAGGSKWMFVGRNKAGQVWSDITGNRTGTVTINADGWGNFSVNGGSVSIWVNK

SEQ ID NO: 22925 - protein, 485 aa, Bacillus sp. 707
HHNGTNGTMMQYFEWYLPNDGNHWNRLNSDASNLKSKGITAVWIPPAWKGASQNDVGYGAYDLYDLGEFNQKTTVRTKYGTRSQLQAAVTSLKNNGIQVYGDVVMNHKGGADATEMVRAVEVNPNNRNQEVTGEYTIEAWTRFDFPGRGNTHSSFKWRWYHFDGVDWDQSRRLNNRIYKFRGHGKAWDWEVDTENGNYDYLMYADIDMDHPEVVNELRNWGVWYTNTLGLDGFRIDAVKHIKYSFTRDWINHVRSATGKNMFAVAEFWKNDLGAIENYLQKTNWNHSVFDVPLHYNLYNASKSGGNYDMRNIFNGTVVQRHPSHAVTFVDNHDSQPEEALESFVEEWFKPLAYALTLTREQGYPSVFYGDYYGIPTHGVPAMRSKIDPILEARQKYAYGKQNDYLDHHNIIGWTREGNTAHPNSGLATIMSDGAGGSKWMFVGRNKAGQVWSDITGNRTGTVTINADGWGNFSVNGGSVSIWVNK

SEQ ID NO: 22926 - protein, 485 aa, Bacillus sp.
HHNGTNGTMMQYFEWYLPNDGNHWNRLRSDASNLKDKGISAVWIPPAWKGASQNDVGYGAYDLYDLGEFNQKGTIRTKYGTRNQLQAAVNALKSNGIQVYGDVVMNHKGGADATEMVRAVEVNPNNRNQEVSGEYTIEAWTKFDFPGRGNTHSNFKWRWYHFDGVDWDQSRKLNNRIYKFRGDGKGWDWEVDTENGNYDYLIYADIDMDHPEVVNELRNWGVWYTNTLGLDGFRIDAVKHIKYSFTRDWINHVRSATGKNMFAVAEFWKNDLGAIENYLNKTNWNHSVFDVPLHYNLYNASKSGGNYDMRQIFNGTVVQRHPMHAVTFVDNHDSQPEEALESFVEEWFKPLAYALTLTREQGYPSVFYGDYYGIPTHGVPAYRSKIDPILEARQKYAYGRQNDYLDHHNIIGWTREGNTAHPNSGLATIMSDGAGGNKWMFVGRNKAGQVWTDITGNRAGTVTINADGWGNFSVNGGSVSIWVNK

SEQ ID NO: 22927 - protein, 485 aa, Bacillus sp. 707
HHNGTNGTMMQYFEWYLPNDGNHWNRLNSDASNLKSKGITAVWIPPAWKGASQNDVGYGAYDLYDLGEFNQKGTVRTKYGTMSQLQAAVTSLKNNGIQVYGDVVMNHKGGADATEMVRAVEVNPNNRNQEVTGEYTIEAWTRFDFPGRGNTHSSFKWRWYHFDGVDWDQSRRLNNRIYKFRGHGKAWDWEVDTENGNYDYLMYADIDMDHPEVVNELRNWGVWYTNTLGLDGFRIDAVKHIKYSFTRDWINHVRSATGKNMFAVAEFWKNDLGAIENYLQKTNWNHSVFDVPLHYNLYNASKSGGNYDMRNIFNGTVVQRHPSHAVTFVDNHDSQPEEALESFVEEWFKPLAYALTLTREQGYPSVFYGDYYGIPTHGVPAMRSKIDPILEARQKYAYGKQNDYLDHHNIIGWTREGNTAHPNSGLATIMSDGAGGSKWMFVGRNKAGQVWSDITGNRTGTVTINADGWGNFSVNGGSVSIWVNK

SEQ ID NO: 22928 - protein, 485 aa, Bacillus sp. 707
HHNGTNGTMMQYFEWYLPNDGNHWNRLNSDASNLKSKGITAVWIPPAWKGASQNDVGYGAYDLYDLGEFNQKGTVRTKYGTRSQLQAAVTSLKNNGIQVYGDVVMNHKGGADATEMVRAVEVNPNNRNQEVTGEYTIEAWTRFDFPGRGNTHSSFKWRWYHFDGVDWDQSRRLNNRIYKFRGHGKAWDWEVDTENGNYDYLMYADIDMDHPEVVNELRNWGVWYTNTLGLDGFRIDAVKHIKYSFTRDWINHVRSATGKNMFAVAEFWKNDLGAIENYLQKTNWNHSVFDVPLHYNLYNASKSGGNYDMRNIFNGTVVQRHPSHAVTFVDNHDSQPEEALESFVEEWFKPLAYALTLTREQGYPSVFYGDYYGIPTHGVPAMRSKIDPILEARQKYAYGKQNDYLDHHNIIGWTREGNTAHPNAGLATIMSDGAGGSKWMFVGRNKAGQVWSDITGNRTGTVTINADGWGNFSVNGGSVSIWVNK

SEQ ID NO: 22929 - protein, 485 aa, Bacillus sp. 707
HHNGTNGTMMQYFEWYLPNDGTHWNRLNSDASNLKSKGITAVWIPPAWKGASQNDVGYGAYDLYDLGEFNQKGTVRTKYGTRSQLQAAVTSLKNNGIQVYGDVVMNHKGGADATEMVRAVEVNPNNRNQEVTGEYTIEAWTRFDFPGRGNTHSSFKWRWYHFDGVDWDQSRRLNNRIYKFRGHGKAWDWEVDTENGNYDYLMYADIDMDHPEVVNELRNWGVWYTNTLGLDGFRIDAVKHIKYSFTRDWINHVRSATGKNMFAVAEFWKNDLGAIENYLQKTNWNHSVFDVPLHYNLYNASKSGGNYDMRNIFNGTVVQRHPSHAVTFVDNHDSQPEEALESFVEEWFKPLAYALTLTREQGYPSVFYGDYYGIPTHGVPAMRSKIDPILEARQKYAYGKQNDYLDHHNIIGWTREGNTAHPNSGLATIMSDGAGGSKWMFVGRNKAGQVWSDITGNRTGTVTINADGWGNFSVNGGSVSIWVNK

SEQ ID NO: 22930 - protein, 485 aa, Bacillus sp. 707
HHNGTNGTMMQYFEWYLPNDGNHWNRLNSDASNLKSKGITAVWIPPAWKGASQNDVGYGAYDLYDLGEFNQKGTVRTKYGTRSQLQAAVTSLKNNGIQVYGDVVMNHKGGADETEMVRAVEVNPNNRNQEVTGEYTIEAWTRFDFPGRGNTHSSFKWRWYHFDGVDWDQSRRLNNRIYKFRGHGKAWDWEVDTENGNYDYLMYADIDMDHPEVVNELRNWGVWYTNTLGLDGFRIDAVKHIKYSFTRDWINHVRSATGKNMFAVAEFWKNDLGAIENYLQKTNWNHSVFDVPLHYNLYNASKSGGNYDMRNIFNGTVVQRHPSHAVTFVDNHDSQPEEALESFVEEWFKPLAYALTLTREQGYPSVFYGDYYGIPTHGVPAMRSKIDPILEARQKYAYGKQNDYLDHHNIIGWTREGNTAHPNSGLATIMSDGAGGSKWMFVGRNKAGQVWSDITGNRTGTVTINADGWGNFSVNGGSVSIWVNK

SEQ ID NO: 22931 - protein, 485 aa, Bacillus sp. 707
HHNGTNGTMMQYFEWYLPNDGNHWNRLNSDASNLKSKGITAVWIPPAWKGASQNDVGYGAYDLYDLGEFNQKGTVRTKYGTRSQLQAAVTSLKNNGIQVYGDVVMNHKGGADATEMVRAVEVNPNNRNQEVTGEYTIEAWTRFDFYGRGNTHSSFKWRWYHFDGVDWDQSRRLNNRIYKFRGHGKAWDWEVDTENGNYDYLMYADIDMDHPEVVNELRNWGVWYTNTLGLDGFRIDAVKHIKYSFTRDWINHVRSATGKNMFAVAEFWKNDLGAIENYLQKTNWNHSVFDVPLHYNLYNASKSGGNYDMRNIFNGTVVQRHPSHAVTFVDNHDSQPEEALESFVEEWFKPLAYALTLTREQGYPSVFYGDYYGIPTHGVPAMRSKIDPILEARQKYAYGKQNDYLDHHNIIGWTREGNTAHPNSGLATIMSDGAGGSKWMFVGRNKAGQVWSDITGNRTGTVTINADGWGNFSVNGGSVSIWVNK

SEQ ID NO: 22932 - protein, 485 aa, Bacillus sp. 707
HHNGTNTTMMQYFEWYLPNDGNHWNRLNSDASNLKSKGITAVWIPPAWKGASQNDVGYGAYDLYDLGEFNQKGTVRTKYGTRSQLQAAVTSLKNNGIQVYGDVVMNHKGGADATEMVRAVEVNPNNRNQEVTGEYTIEAWTRFDFPGRGNTHSSFKWRWYHFDGVDWDQSRRLNNRIYKFRGHGKAWDWEVDTENGNYDYLMYADIDMDHPEVVNELRNWGVWYTNTLGLDGFRIDAVKHIKYSFTRDWINHVRSATGKNMFAVAEFWKNDLGAIENYLQKTNWNHSVFDVPLHYNLYNASKSGGNYDMRNIFNGTVVQRHPSHAVTFVDNHDSQPEEALESFVEEWFKPLAYALTLTREQGYPSVFYGDYYGIPTHGVPAMRSKIDPILEARQKYAYGKQNDYLDHHNIIGWTREGNTAHPNSGLATIMSDGAGGSKWMFVGRNKAGQVWSDITGNRTGTVTINADGWGNFSVNGGSVSIWVNK

SEQ ID NO: 22933 - protein, 485 aa, Bacillus sp. 707
HHNGTNGTMMQYFEWYLPNDGNHWNRLNSDASNLKSKGITAVWIPPAWKGASQNDVGYGAYDLYDLGEFNQKGTVRTKYGTRSQLQAAVTSLKNNGIQVYGDVVMNHKGGADATEMVRAVEVNPNNRNQEVTGEYTIEAWTRFDFPGRGNTHSSFKWRWYHFDGVDWDQSRRLNNRIYKFRGHGKAWDWEVDTENGNYDYLMYADIDMDHPEVVNELRNWGVWYTNTLGLDGFRIDAVKHIKYSFTRDWINHVRSATGKNMFAVAEFWKNDLGAIENYLQKTNWNHSVFDVPLHYNLYNASKSGGNYDMRNIFNGTVVQRHPSHAVTFVDNHDSQPEEALESFVEEWFKPLAYALTLTREQGYPSVFYGDYYGIETHGVPAMRSKIDPILEARQKYAYGKQNDYLDHHNIIGWTREGNTAHPNSGLATIMSDGAGGSKWMFVGRNKAGQVWSDITGNRTGTVTINADGWGNFSVNGGSVSIWVNK

SEQ ID NO: 22934 - protein, 483 aa, Bacillus sp.
HHNGTNGTLMQYFEWYLPNDGNHWNRLRSDASNLKDKGISAVWIPPAWKGTSQNDVGYGAYDLYDLGEFNQKGTIRTKYGTRNQLQAAVNALKSNGIQVYGDVVMNHKGGADATEMVKAVEVNPNNRNQEVSGEYTIEAWTKFDFPGRANTHSNFKWRWYHFDGVDWDQSRKLNNRIYKFRTKAWDWEVDTEFGNYDYLMYADIDMDHPEVVNELRNWGVWYTNTLGLDGFRIDAVKHIKYSFTRDWINHVRSAIGKNMFAVAEFWKNDLGAIENYLNKTNWNHSVFDVPLHFNLYYASKSGGNYDMRRIFNGTVVQKHPTHAVTFVDNHDSQPEESLESFVREWFKPLAYALTLTREQGYPSVFYGDYYGIPTHGVPAMKSKIDPILEARQKYAYGRQNDYLDHHNIIGWTREGNTAHPNSGLATIMSDGAGGNKWMFVGRNKAGQVWTDITGNKAGTVTINADGWGNFSVNGGSVSIWVNK

SEQ ID NO: 22935 - protein, 485 aa, Bacillus sp. 707
HHNGTNGTMMQYFEWYLPNDGNHWNRLNSDASNLKSKGITAVWIPPAWKGASQNDVGYGAYDLYDLGEFNQKGTVRTKYGTRSMLQAAVTSLKNNGIQVYGDVVMNHKGGADATEMVRAVEVNPNNRNQEVTGEYTIEAWTRFDFPGRGNTHSSFKWRWYHFDGVDWDQSRRLNNRIYKFRGHGKAWDWEVDTENGNYDYLMYADIDMDHPEVVNELRNWGVWYTNTLGLDGFRIDAVKHIKYSFTRDWINHVRSATGKNMFAVAEFWKNDLGAIENYLQKTNWNHSVFDVPLHYNLYNASKSGGNYDMRNIFNGTVVQRHPSHAVTFVDNHDSQPEEALESFVEEWFKPLAYALTLTREQGYPSVFYGDYYGIPTHGVPAMRSKIDPILEARQKYAYGKQNDYLDHHNIIGWTREGNTAHPNSGLATIMSDGAGGSKWMFVGRNKAGQVWSDITGNRTGTVTINADGWGNFSVNGGSVSIWVNK

SEQ ID NO: 22936 - protein, 485 aa, Bacillus sp. 707
HHNGTNGTMMQYFEWYLPNDGNHWNRLNSDASNLKSKGITAVWIPPAWKGASQNDVGYGAYDLYDLGEFNQKGTVRTKYGTCSQLQAAVTSLKNNGIQVYGDVVMNHKGGADATEMVRAVEVNPNNRNQEVTGEYTIEAWTRFDFPGRGNTHSSFKWRWYHFDGVDWDQSRRLNNRIYKFRGHGKAWDWEVDTENGNYDYLMYADIDMDHPEVVNELRNWGVWYTNTLGLDGFRIDAVKHIKYSFTRDWINHVRSATGKNMFAVAEFWKNDLGAIENYLQKTNWNHSVFDVPLHYNLYNASKSGGNYDMRNIFNGTVVQRHPSHAVTFVDNHDSQPEEALESFVEEWFKPLAYALTLTREQGYPSVFYGDYYGIPTHGVPAMRSKIDPILEARQKYAYGKQNDYLDHHNIIGWTREGNTAHPNSGLATIMSDGAGGSKWMFVGRNKAGQVWSDITGNRTGTVTINADGWGNFSVNGGSVSIWVNK

SEQ ID NO: 22937 - protein, 485 aa, Bacillus sp. 707
HHNGTNGTMMQYFEWYLPNDGNHWNRLNSDASNLKSKGITAVWIPPAWKGASQNDVGYGAYDLYDLGEFNQKGTVRTKYGTRSQLQAAVTSLKNNGIQVYGDVVMNHKGGADATEMVRAVEVNPNNRNQEVTGEYTIEAWTRFDFWGRGNTHSSFKWRWYHFDGVDWDQSRRLNNRIYKFRGHGKAWDWEVDTENGNYDYLMYADIDMDHPEVVNELRNWGVWYTNTLGLDGFRIDAVKHIKYSFTRDWINHVRSATGKNMFAVAEFWKNDLGAIENYLQKTNWNHSVFDVPLHYNLYNASKSGGNYDMRNIFNGTVVQRHPSHAVTFVDNHDSQPEEALESFVEEWFKPLAYALTLTREQGYPSVFYGDYYGIPTHGVPAMRSKIDPILEARQKYAYGKQNDYLDHHNIIGWTREGNTAHPNSGLATIMSDGAGGSKWMFVGRNKAGQVWSDITGNRTGTVTINADGWGNFSVNGGSVSIWVNK

SEQ ID NO: 22938 - protein, 485 aa, Bacillus sp. 707
HHNGTNGTMMQYFEWYLPNDGNHWNRLNSDASNLKSKGITAVWIPPAWKGASQNDVGYGAYDLYDLGEFNQKGTVRTKYGTRSQLQAAVTSLKNNGIQVYGDVVMNHKGGADATEMVRAVEVNPNNRNQEVTGEYTIEAWTRFDFPGRGNTHSSFKWRWYHFDGVDWDQSRRLNNRIYKFRGHGKAWDWEVDTENGNYDYLMYADIDMDHPEVVNELRNWGVWYTNTLGLDGFRIDAVKHIKYSFTRDWINHVRSATGKNMFAVAEFWKNDLGAIENYLQKTNWNHSVFDVPLHYNLYNASKSGGNYDMRNIFNGTVVQRHPSHAVTFVDNHDSQPEEALESFVEEWFKPLAYALTLTREQGYPSVFYGDYYGIPTHGVPAMRSKIDPILEARQKYAYGKQNDYLDHHNIIGWTREGNTAVPNSGLATIMSDGAGGSKWMFVGRNKAGQVWSDITGNRTGTVTINADGWGNFSVNGGSVSIWVNK

SEQ ID NO: 22939 - protein, 485 aa, Bacillus sp. 707
HHNGTNGTMMQYFEWYLPNDGNHWNRLNSDASNLKSKGITAVWIPPAWKGASQNDVGYGAYDLYDLGEFNQKGTVRTKYGFRSQLQAAVTSLKNNGIQVYGDVVMNHKGGADATEMVRAVEVNPNNRNQEVTGEYTIEAWTRFDFPGRGNTHSSFKWRWYHFDGVDWDQSRRLNNRIYKFRGHGKAWDWEVDTENGNYDYLMYADIDMDHPEVVNELRNWGVWYTNTLGLDGFRIDAVKHIKYSFTRDWINHVRSATGKNMFAVAEFWKNDLGAIENYLQKTNWNHSVFDVPLHYNLYNASKSGGNYDMRNIFNGTVVQRHPSHAVTFVDNHDSQPEEALESFVEEWFKPLAYALTLTREQGYPSVFYGDYYGIPTHGVPAMRSKIDPILEARQKYAYGKQNDYLDHHNIIGWTREGNTAHPNSGLATIMSDGAGGSKWMFVGRNKAGQVWSDITGNRTGTVTINADGWGNFSVNGGSVSIWVNK

SEQ ID NO: 22940 - protein, 485 aa, Bacillus sp. 707
HHNGTNGTMMQYFEWYLPNDGNHWNRLNSDASNLKSKGITAVWIPPAWKGASQNDVGYGAYDLYDLGEFNQKGTVRTKYGTRSQLQAAVTSLKNNGIQVYGDVVMNHKGGADATEMVRAVEVNPNNRNQEVTGEYTIEAWTRFDFPGRGNTHSSFKWRWIHFDGVDWDQSRRLNNRIYKFRGHGKAWDWEVDTENGNYDYLMYADIDMDHPEVVNELRNWGVWYTNTLGLDGFRIDAVKHIKYSFTRDWINHVRSATGKNMFAVAEFWKNDLGAIENYLQKTNWNHSVFDVPLHYNLYNASKSGGNYDMRNIFNGTVVQRHPSHAVTFVDNHDSQPEEALESFVEEWFKPLAYALTLTREQGYPSVFYGDYYGIPTHGVPAMRSKIDPILEARQKYAYGKQNDYLDHHNIIGWTREGNTAHPNSGLATIMSDGAGGSKWMFVGRNKAGQVWSDITGNRTGTVTINADGWGNFSVNGGSVSIWVNK

SEQ ID NO: 22941 - protein, 485 aa, Bacillus sp. 707
HHNGTNGTMMQYFEWYLPNDGNHWNRLNSDASNLKSKGITAVWIPPAWKGASQNDVGYGAYDLYDLGEFNQKGTVRTKYGTRSQLQAAVTSLKNNGIQVYGDVVMNHKGGADATEMVRAVEVNPNNRNQEVTGEYTIEAWTRFDFGGRGNTHSSFKWRWYHFDGVDWDQSRRLNNRIYKFRGHGKAWDWEVDTENGNYDYLMYADIDMDHPEVVNELRNWGVWYTNTLGLDGFRIDAVKHIKYSFTRDWINHVRSATGKNMFAVAEFWKNDLGAIENYLQKTNWNHSVFDVPLHYNLYNASKSGGNYDMRNIFNGTVVQRHPSHAVTFVDNHDSQPEEALESFVEEWFKPLAYALTLTREQGYPSVFYGDYYGIPTHGVPAMRSKIDPILEARQKYAYGKQNDYLDHHNIIGWTREGNTAHPNSGLATIMSDGAGGSKWMFVGRNKAGQVWSDITGNRTGTVTINADGWGNFSVNGGSVSIWVNK

SEQ ID NO: 22942 - protein, 485 aa, Bacillus sp. 707
HHNGTNGTMMQYFEWYLPNDGNHWNRLNSDASNLKSKGITAVWIPPAWKGASQNDVGYGAYDLYDLGEFNQKGTVRTKYGTRSQLQAAVTSLKNNGIQVYGDVVMNHKGGADATEMVRAVEVNPNNRNQEVTGEYTIEAWTRFDFPGRGNTHSSFKWRWYHFDGVDWDQSRRLNNRIYKFRGHGKAWDWEVDTENGNYDYLMYADIDMDHPEVVNELRNWGVWYTNTLGLDGFRIDAVKHIKYSFTRDWINHVRSATGKNMFAVAEFWKNDLGAIENYLQKTNWNHSVFDVPLHYNLYNASKSGGNYDMRNIFLGTVVQRHPSHAVTFVDNHDSQPEEALESFVEEWFKPLAYALTLTREQGYPSVFYGDYYGIPTHGVPAMRSKIDPILEARQKYAYGKQNDYLDHHNIIGWTREGNTAHPNSGLATIMSDGAGGSKWMFVGRNKAGQVWSDITGNRTGTVTINADGWGNFSVNGGSVSIWVNK

SEQ ID NO: 22943 - protein, 485 aa, Bacillus sp. 707
HHNGTNGTMMQYFEWYLPNDGNHWNRLNSDASNLKSKGITAVWIPPAWKGASQNDVGYGAYDLYDLGEFNQKGTVRTKYGTRSQLQAAVTSLKNNGIQVYGDVVMNHKGGADATEMVRAVEVNPNNRNQEVTGEYTIEAWTRFDFPGRGNTHSSFKWRWYHFDGVDWDQSRRLNNRIYKFRGHGKAWDWEVDTENGNYDYLMYADIDMDHPEVVNELRNWGVWYTNTLGLDGFRIDAVKHIKYSFTRDWINHVRSATGKNMFAVAEFWKNDLPAIENYLQKTNWNHSVFDVPLHYNLYNASKSGGNYDMRNIFNGTVVQRHPSHAVTFVDNHDSQPEEALESFVEEWFKPLAYALTLTREQGYPSVFYGDYYGIPTHGVPAMRSKIDPILEARQKYAYGKQNDYLDHHNIIGWTREGNTAHPNSGLATIMSDGAGGSKWMFVGRNKAGQVWSDITGNRTGTVTINADGWGNFSVNGGSVSIWVNK

SEQ ID NO: 22944 - protein, 485 aa, Bacillus sp. 707
HHNGTNGTMMQYFEWYTPNDGNHWNRLNSDASNLKSKGITAVWIPPAWKGASQNDVGYGAYDLYDLGEFNQKGTVRTKYGTRSQLQAAVTSLKNNGIQVYGDVVMNHKGGADATEMVRAVEVNPNNRNQEVTGEYTIEAWTRFDFPGRGNTHSSFKWRWYHFDGVDWDQSRRLNNRIYKFRGHGKAWDWEVDTENGNYDYLMYADIDMDHPEVVNELRNWGVWYTNTLGLDGFRIDAVKHIKYSFTRDWINHVRSATGKNMFAVAEFWKNDLGAIENYLQKTNWNHSVFDVPLHYNLYNASKSGGNYDMRNIFNGTVVQRHPSHAVTFVDNHDSQPEEALESFVEEWFKPLAYALTLTREQGYPSVFYGDYYGIPTHGVPAMRSKIDPILEARQKYAYGKQNDYLDHHNIIGWTREGNTAHPNSGLATIMSDGAGGSKWMFVGRNKAGQVWSDITGNRTGTVTINADGWGNFSVNGGSVSIWVNK

SEQ ID NO: 22945 - protein, 485 aa, Bacillus sp. 707
HHNGTNGTMMQYFEWYLPNDGNHWNRLNSDASNLKSKGITAVWIPPAWKGASQNDVGYGAYDLYDLGEFNQKGTVRTKYGTRSQLQAAVTSLKNNGIQVYGDVVMNHKGGADATEMVRAVEVNPNNRNQEVTGEYTIEAWTRFDFPGRGNTHSSFKWRWYHFDGVDWDQSRRLNNRIYKFRGHGKAWDWEVDTENGNYDYLMYADIDMDHNEVVNELRNWGVWYTNTLGLDGFRIDAVKHIKYSFTRDWINHVRSATGKNMFAVAEFWKNDLGAIENYLQKTNWNHSVFDVPLHYNLYNASKSGGNYDMRNIFNGTVVQRHPSHAVTFVDNHDSQPEEALESFVEEWFKPLAYALTLTREQGYPSVFYGDYYGIPTHGVPAMRSKIDPILEARQKYAYGKQNDYLDHHNIIGWTREGNTAHPNSGLATIMSDGAGGSKWMFVGRNKAGQVWSDITGNRTGTVTINADGWGNFSVNGGSVSIWVNK

SEQ ID NO: 22946 - protein, 485 aa, Bacillus sp. 707
HHNGTNGTMMQYFEWYLPNDGNHWNRLNSDASNLKSKGITAVWIPPAWKGASQNDVGYGAYDLYDLGEFNQKGTVRTKYGTRSQLQAAVTSLKNNGIQVYGDVVMNHKGGADATEMVRAVEVNPNNRNQEVTGEYTIEAWTRFDFPGRGNTHSSFKWRWYHFDGVDWDQSRRLNNRIYKFRGHGKAWDWEVDTENGNYDYLMYADIDMDHPEVVNELRNWGVWYTNTLGLDGFRIDAVKHIKYSFTRDWINHVRSATGKNMFAVAEFWKNDLGAIENYLQKTNWNHSVFDVPLHYNLYNASKSGGNYDMRNIFNGTVVQRHPSHAVTFVDNHDSQPEEALESFVEEWFKPLAYALTLTREQGYPSVFYGDYYGIPTHGVPAMRSKIDPILEARQKYAYGKQNDYLDHHNIIGWTREGNTAHPNGGLATIMSDGAGGSKWMFVGRNKAGQVWSDITGNRTGTVTINADGWGNFSVNGGSVSIWVNK

SEQ ID NO: 22947 - protein, 485 aa, Bacillus sp. 707
HHNGTNGTMMQYFEWYLPNDGNHWNRLNSDASNLKSKGITAVWIPPAWKGASQNDVGYGAYDLYDLGEFNQKGTVRTKYGTRSQLQAAVTSLKNNGIQVYGDVVMNHKGGADATEMVRAVEVNPNNRNQEVTGEYTIEAWTRFDFPGRGNTHSSFKWRWYHFDGVDWDQSRRLNNRIYKFRGHGKAWDWEVDTENGNYDYLMYADIDMDHPEVVNELRNWGVWYTNTLGLDGFRIDAVKHIKYSFTRDWINHVRSATGKNMFAVAEFWKNDLGAIENYLQKTNWNHSVFDVPLHYNLYNASKSGGNYDMRNIFNGTVVQRHPSHAVTFVDNHDSQPEEALESFVEEWFKPLAYALTLTREQGYPSVFYGDYYGIPTHGVPAMRSKIDPILHARQKYAYGKQNDYLDHHNIIGWTREGNTAHPNSGLATIMSDGAGGSKWMFVGRNKAGQVWSDITGNRTGTVTINADGWGNFSVNGGSVSIWVNK

SEQ ID NO: 22948 - protein, 485 aa, Bacillus sp. 707
HHNGTNGTMMQYFEWYLPNDGNHWNRLNSDAWNLKSKGITAVWIPPAWKGASQNDVGYGAYDLYDLGEFNQKGTVRTKYGTRSQLQAAVTSLKNNGIQVYGDVVMNHKGGADATEMVRAVEVNPNNRNQEVTGEYTIEAWTRFDFPGRGNTHSSFKWRWYHFDGVDWDQSRRLNNRIYKFRGHGKAWDWEVDTENGNYDYLMYADIDMDHPEVVNELRNWGVWYTNTLGLDGFRIDAVKHIKYSFTRDWINHVRSATGKNMFAVAEFWKNDLGAIENYLQKTNWNHSVFDVPLHYNLYNASKSGGNYDMRNIFNGTVVQRHPSHAVTFVDNHDSQPEEALESFVEEWFKPLAYALTLTREQGYPSVFYGDYYGIPTHGVPAMRSKIDPILEARQKYAYGKQNDYLDHHNIIGWTREGNTAHPNSGLATIMSDGAGGSKWMFVGRNKAGQVWSDITGNRTGTVTINADGWGNFSVNGGSVSIWVNK

SEQ ID NO: 22949 - protein, 485 aa, Bacillus sp. 707
HHNGTNGTMMQYFEWYLPNDGNHWNRLNSDASNLKSKGITAVWIPPAWKGASQNDVGYGAYDLYDLGEFNQKGTVRTKYGTRSQLQAAVTSLKNNGIQVYGDVVMNHKGGADATEMVRAVEVNPNNRNQEVTGEYTIEAWTRFDFPGRGNTHSSFKWRWYHFDGVDWDQSRRLNNRIYKFRGHGKAWDWEVDTENGNYDYLMYADIDMDHPEVVNELRNWGVWYTNTLGLDGFRIDAVKHIKYSFTRDWINHVRSATGKNMFAVAEFWKNDLGAIENYLQKTNWNHSVFDVPLHYNLYNASKSGGNYDMRNIFNGTVVQRHPSHAVTFVDNHDSQPEEALESFVEEWFKPLAYALTLTREQGYPSVFYGDYYGIPTHGVPAMRSKIDPILEARQKYAYGKQNDYLDHHNIIGWTREGNTAHPNSGLATIMSDGATGSKWMFVGRNKAGQVWSDITGNRTGTVTINADGWGNFSVNGGSVSIWVNK

SEQ ID NO: 22950 - protein, 485 aa, Bacillus sp. 707
HHNGTNGTMMQYFEWYLPNDGNHWNRLNSDASNLKSKGITAVWIPPAWKGASQNDVGYGAYDLYDLGEFNQKGTVRTKYGTRSQLQAAVTSLKNNGIQVYGDVVMNHKGGADHTEMVRAVEVNPNNRNQEVTGEYTIEAWTRFDFPGRGNTHSSFKWRWYHFDGVDWDQSRRLNNRIYKFRGHGKAWDWEVDTENGNYDYLMYADIDMDHPEVVNELRNWGVWYTNTLGLDGFRIDAVKHIKYSFTRDWINHVRSATGKNMFAVAEFWKNDLGAIENYLQKTNWNHSVFDVPLHYNLYNASKSGGNYDMRNIFNGTVVQRHPSHAVTFVDNHDSQPEEALESFVEEWFKPLAYALTLTREQGYPSVFYGDYYGIPTHGVPAMRSKIDPILEARQKYAYGKQNDYLDHHNIIGWTREGNTAHPNSGLATIMSDGAGGSKWMFVGRNKAGQVWSDITGNRTGTVTINADGWGNFSVNGGSVSIWVNK

SEQ ID NO: 22951 - protein, 485 aa, Bacillus sp. 707
HHNGTNGTMMQYFEWYLPNDGNHWNRLNSDASNLKSKGITAVWIPPAWKGASQNDVGYGAYDLYDLGEFNQKQTVRTKYGTRSQLQAAVTSLKNNGIQVYGDVVMNHKGGADATEMVRAVEVNPNNRNQEVTGEYTIEAWTRFDFPGRGNTHSSFKWRWYHFDGVDWDQSRRLNNRIYKFRGHGKAWDWEVDTENGNYDYLMYADIDMDHPEVVNELRNWGVWYTNTLGLDGFRIDAVKHIKYSFTRDWINHVRSATGKNMFAVAEFWKNDLGAIENYLQKTNWNHSVFDVPLHYNLYNASKSGGNYDMRNIFNGTVVQRHPSHAVTFVDNHDSQPEEALESFVEEWFKPLAYALTLTREQGYPSVFYGDYYGIPTHGVPAMRSKIDPILEARQKYAYGKQNDYLDHHNIIGWTREGNTAHPNSGLATIMSDGAGGSKWMFVGRNKAGQVWSDITGNRTGTVTINADGWGNFSVNGGSVSIWVNK

SEQ ID NO: 22952 - protein, 485 aa, Bacillus sp.
HHNGTNGTMMQYFEWYLPNDGNHWNRLNSDASNLKSKGITAVWIPPAWKGASQNDVGYGAYDLYDLGEFNQKGTVRTKYGTRSQLQAAVTSLKNNGIQVYGDVVMNHKGGADATEMVRAVEVNPNNRNQEVTGEYTIEAWTRFDFPGRGNTHSSFKWRWYHFDGVDWDQSRRLNNRIYKFRGHGKAWDWEVDAEFGNYDYLMYADIDMDHPEVVNELRNWGVWYTNTLGLDGFRIDAVKHIKYSFTRDWINHVRSATGKNMFAVAEFWKNDLGAIENYLQKTNWNHSVFDVPLHYNLYNASKSGGNYDMRNIFNGTVVQRHPSHAVTFVDNHDSQPEEALESFVEEWFKPLAYALTLTREQGYPSVFYGDYYGIPTHGVPAMRSKIDPILEARQKYAYGKQNDYLDHHNIIGWTREGNTAHPNSGLATIMSDGAGGSKWMFVGRNKAGQVWSDITGNRTGTVTINADGWGNFSVNGGSVSIWVNK

SEQ ID NO: 22953 - protein, 485 aa, Bacillus sp. 707
HHNGTNGTMMQYFEWYLPNDGNHWNRLNSDASNLKSKGITAVWIPPAWKGASQNDVGYGAYDLYDLGEFNQKGTVRTKYGTVSQLQAAVTSLKNNGIQVYGDVVMNHKGGADATEMVRAVEVNPNNRNQEVTGEYTIEAWTRFDFPGRGNTHSSFKWRWYHFDGVDWDQSRRLNNRIYKFRGHGKAWDWEVDTENGNYDYLMYADIDMDHPEVVNELRNWGVWYTNTLGLDGFRIDAVKHIKYSFTRDWINHVRSATGKNMFAVAEFWKNDLGAIENYLQKTNWNHSVFDVPLHYNLYNASKSGGNYDMRNIFNGTVVQRHPSHAVTFVDNHDSQPEEALESFVEEWFKPLAYALTLTREQGYPSVFYGDYYGIPTHGVPAMRSKIDPILEARQKYAYGKQNDYLDHHNIIGWTREGNTAHPNSGLATIMSDGAGGSKWMFVGRNKAGQVWSDITGNRTGTVTINADGWGNFSVNGGSVSIWVNK

SEQ ID NO: 22954 - protein, 485 aa, Bacillus sp. 707
HHNGTNGTMMQYFEWYLPNDGNHWNRLNSDASNLKSKGITAVWIPPAWKGASQNDVGYGAYDLYDLGEFNQKGTVRTKYGTRSQLQAAVTSLKNNGIQVYGDVVMNHKGGADATEMVRAVEVNPNNRNQEVTGEYTIEAWTRFDFPGRGNTHSSFKWRWYHFDGVDWDQSRRLNNRIYKFRGHGKAWDWEVDTENGNYDYLMYADIDMDHPEVVNELRNWGVWYTNTLGLDGFRIDAVKHIKYSFTRDWINHVRSATGKNMFAVAEFWKNDLGAIENYLQKTNWNHSVFDVPLHYNLYNASKSGGNYDMRNIFNGTVVQRHPSHAVTFVDNHDSQPEEALESFVEEWFKPLAYALTLTREQGYPSVFYGDYYGIPTHGVPAMRSKIDPILEARQKYAYGKQNDYLDHHNIIGWTREGNTAHPNSGLATIMSDGAGGSKWMFVGRNKAGQVWSDITGNRTGTVTINADGWGNFSVNGGSVSIWCNK

SEQ ID NO: 22955 - protein, 485 aa, Bacillus sp. 707
HHNGTNGTMMQYFEWYLPNDGNHWNRLNSDASNLKSKGITAVWIPPAWKGASQNDVGYGAYDLYDLGEFNQKGTVRTKYGTRSQLQAAVTSLKNNGIQVYGDVVMNHKGGADATEMVRAVEVNPNNRNQEVTDEYTIEAWTRFDFPGRGNTHSSFKWRWYHFDGVDWDQSRRLNNRIYKFRGHGKAWDWEVDTENGNYDYLMYADIDMDHPEVVNELRNWGVWYTNTLGLDGFRIDAVKHIKYSFTRDWINHVRSATGKNMFAVAEFWKNDLGAIENYLQKTNWNHSVFDVPLHYNLYNASKSGGNYDMRNIFNGTVVQRHPSHAVTFVDNHDSQPEEALESFVEEWFKPLAYALTLTREQGYPSVFYGDYYGIPTHGVPAMRSKIDPILEARQKYAYGKQNDYLDHHNIIGWTREGNTAHPNSGLATIMSDGAGGSKWMFVGRNKAGQVWSDITGNRTGTVTINADGWGNFSVNGGSVSIWVNK

SEQ ID NO: 22956 - protein, 485 aa, Bacillus sp. 707
HHAGTNGTMMQYFEWYLPNDGNHWNRLNSDASNLKSKGITAVWIPPAWKGASQNDVGYGAYDLYDLGEFNQKGTVRTKYGTRSQLQAAVTSLKNNGIQVYGDVVMNHKGGADATEMVRAVEVNPNNRNQEVTGEYTIEAWTRFDFPGRGNTHSSFKWRWYHFDGVDWDQSRRLNNRIYKFRGHGKAWDWEVDTENGNYDYLMYADIDMDHPEVVNELRNWGVWYTNTLGLDGFRIDAVKHIKYSFTRDWINHVRSATGKNMFAVAEFWKNDLGAIENYLQKTNWNHSVFDVPLHYNLYNASKSGGNYDMRNIFNGTVVQRHPSHAVTFVDNHDSQPEEALESFVEEWFKPLAYALTLTREQGYPSVFYGDYYGIPTHGVPAMRSKIDPILEARQKYAYGKQNDYLDHHNIIGWTREGNTAHPNSGLATIMSDGAGGSKWMFVGRNKAGQVWSDITGNRTGTVTINADGWGNFSVNGGSVSIWVNK

SEQ ID NO: 22957 - protein, 485 aa, Bacillus sp. 707
HHNGTNGTMMQYFEWYLPNDGNHWNRLNSDASNLKSKGITAVWIPPAWKGASQNDVGYGAYDLYDLGEFNQKGTVRTKYGTRSQLQAAVTSLKNNGIQVYGDVVMNHKGGADATEMVRAVEVNPNNRNQEVTGEYTIEAWTRFDFPGRGNTHSSFKWRWYHFDGVDWDQSRRLNNRIYKFRGHGKAWDWEVDTENGNYDYLMYADIDMDHPEVVNELRNWGVWYTNTLGLDGFRIDAVKHIKYSFTRDWINHVRSATGKNMFAVAEFWKNDLGAIENYLQKTNWNHSVFDVPLHYNLYNASKSGGNYDMRNIFNGTVVQRHPSHAVTFVDNHDSQPEEALESFVEEWFKPLAYALTLTREQGYPSVFYGDYYGITTHGVPAMRSKIDPILEARQKYAYGKQNDYLDHHNIIGWTREGNTAHPNSGLATIMSDGAGGSKWMFVGRNKAGQVWSDITGNRTGTVTINADGWGNFSVNGGSVSIWVNK

SEQ ID NO: 22958 - protein, 485 aa, Bacillus sp.
HHNGTNGTMMQYFEWYLPNDGNHWNRLNSDASNLKSKGITAVWIPPAWKGASQNDVGYGAYDLYDLGEFNQKGTVRTKYGTRSQLQAAVTSLKNNGIQVYGDVVMNHKGGADATEMVRAVEVNPNNRNQEVTGEYTIEAWTRFDFPGRGNTHSSFKWRWYHFDGVDWDQSRRLNNRIYKFRPHGKEWDWEVDTENGNYDYLMYADIDMDHPEVVNELRNWGVWYTNTLGLDGFRIDAVKHIKYSFTRDWINHVRSATGKNMFAVAEFWKNDLGAIENYLQKTNWNHSVFDVPLHYNLYNASKSGGNYDMRNIFNGTVVQRHPSHAVTFVDNHDSQPEEALESFVEEWFKPLAYALTLTREQGYPSVFYGDYYGIPTHGVPAMRSKIDPILEARQKYAYGKQNDYLDHHNIIGWTREGNTAHPNSGLATIMSDGAGGSKWMFVGRNKAGQVWSDITGNRTGTVTINADGWGNFSVNGGSVSIWVNK

SEQ ID NO: 22959 - protein, 485 aa, Bacillus sp. 707
HHNGTNGTMMQYFEWYLPNDGNHWNRLNSDASNLKSKGITAVWIPPAWKGASQNDVGYGAYDLYDLGEFNQKGTVRTKYGTRSQLQAAVTSLKNNGIQVYGDVVMNHKGGADATEMVRAVEVNPNNRNQEVTGEYKIEAWTRFDFPGRGNTHSSFKWRWYHFDGVDWDQSRRLNNRIYKFRGHGKAWDWEVDTENGNYDYLMYADIDMDHPEVVNELRNWGVWYTNTLGLDGFRIDAVKHIKYSFTRDWINHVRSATGKNMFAVAEFWKNDLGAIENYLQKTNWNHSVFDVPLHYNLYNASKSGGNYDMRNIFNGTVVQRHPSHAVTFVDNHDSQPEEALESFVEEWFKPLAYALTLTREQGYPSVFYGDYYGIPTHGVPAMRSKIDPILEARQKYAYGKQNDYLDHHNIIGWTREGNTAHPNSGLATIMSDGAGGSKWMFVGRNKAGQVWSDITGNRTGTVTINADGWGNFSVNGGSVSIWVNK

SEQ ID NO: 22960 - protein, 485 aa, Bacillus sp. 707
HHNGTNGTMMQYFEWYLPNDGNHWNRLNSDASNLKSKGITAVWIPPAWKGASQNDVGYGAYDLYDLGEFNQKGTVRTKYGTRSQLQAAVTSLKNNGIQVYGDVVMNHKGGADATEMVRAVEVNPSNRNQEVTGEYTIEAWTRFDFPGRGNTHSSFKWRWYHFDGVDWDQSRRLNNRIYKFRGHGKAWDWEVDTENGNYDYLMYADIDMDHPEVVNELRNWGVWYTNTLGLDGFRIDAVKHIKYSFTRDWINHVRSATGKNMFAVAEFWKNDLGAIENYLQKTNWNHSVFDVPLHYNLYNASKSGGNYDMRNIFNGTVVQRHPSHAVTFVDNHDSQPEEALESFVEEWFKPLAYALTLTREQGYPSVFYGDYYGIPTHGVPAMRSKIDPILEARQKYAYGKQNDYLDHHNIIGWTREGNTAHPNSGLATIMSDGAGGSKWMFVGRNKAGQVWSDITGNRTGTVTINADGWGNFSVNGGSVSIWVNK

SEQ ID NO: 22961 - protein, 485 aa, Bacillus sp. 707
HHNGTNGTMMQYFEWYLPNDGNHWNRLNSDASNLKSKGITAVWIPPAWKGASQNDVGYGAYDLYDLGEFNQKGTVRTKYGTRSQLQAAVTSLKNNGIQVYGDVVMNHKGGADATEMVRAVEVNPNNRNQEVTGEYTIEAWTRFDFSGRGNTHSSFKWRWYHFDGVDWDQSRRLNNRIYKFRGHGKAWDWEVDTENGNYDYLMYADIDMDHPEVVNELRNWGVWYTNTLGLDGFRIDAVKHIKYSFTRDWINHVRSATGKNMFAVAEFWKNDLGAIENYLQKTNWNHSVFDVPLHYNLYNASKSGGNYDMRNIFNGTVVQRHPSHAVTFVDNHDSQPEEALESFVEEWFKPLAYALTLTREQGYPSVFYGDYYGIPTHGVPAMRSKIDPILEARQKYAYGKQNDYLDHHNIIGWTREGNTAHPNSGLATIMSDGAGGSKWMFVGRNKAGQVWSDITGNRTGTVTINADGWGNFSVNGGSVSIWVNK

SEQ ID NO: 22962 - protein, 485 aa, Bacillus sp. 707
HHNGTNGTMMQYFEWYLPNDGNHWNRLNSDASNLKSKGITAVWIPPAWKGASQNDVGYGAYDLYDLGEFNQKGTVRTKYGTRSQLQAAVTSLKNNGIQVYGDVVMNHKGGADATEMVRAVEVNPNNRNQEVTGEYTIEAWTRFDFPGRGNTHSSFKWRWYHFDGVDWDQSRRLNNRIYKFRGHGKAWDWEVDTENGNYDYLMYADIDMDHPEVVNELRNWGVWYTNTLGLDGFRIDAVKHIKYSFTRDWINHVRSATVKNMFAVAEFWKNDLGAIENYLQKTNWNHSVFDVPLHYNLYNASKSGGNYDMRNIFNGTVVQRHPSHAVTFVDNHDSQPEEALESFVEEWFKPLAYALTLTREQGYPSVFYGDYYGIPTHGVPAMRSKIDPILEARQKYAYGKQNDYLDHHNIIGWTREGNTAHPNSGLATIMSDGAGGSKWMFVGRNKAGQVWSDITGNRTGTVTINADGWGNFSVNGGSVSIWVNK

SEQ ID NO: 22963 - protein, 485 aa, Bacillus sp. 707
HHNGTNGTMMQYFEWYLPNDGNHWNRLNSDASNLKSKGITAVWIPPAWKGASQNDVGYGAYDLYDLGEFNQKGTVRTKYGTRSQLQAAVTSLKNNGIQVYGDVVMNHKGGADATEMVRAVEVNPNNRNQEVTGEYTIEAWTRFDFPGRGNTHSSFKWRWYHFDGVDWDQSRRLNNRIYKFRGHGKAWDWEVDTENGNYDYLMYADIDMDHPEVVNELRNWGVWYTNTLGLDGFRIDAVKHIKYSFTRDWINHVRSATGKNMFAVAEFWKNDLGAIENYLQKTNWNHSVFDVPLHYNLYNASKSGGNYDMRNIFNGTVVQRHPSHAVTFVDNHDSQPEEALESFVEEWFKPLAYALTLTREQGYPSVFYGDYYGIPTHGVPAMRSKIDPILEARQKYAYGKQNDYLDHHNIIGWTREGNTAHPNSGLATIMSDGAGGSKWMFVGRNKAGQVWSDITGNRTGTVTINADGWGNFSVNGGSVSIWTNK

SEQ ID NO: 22964 - protein, 485 aa, Bacillus sp. 707
HHNGTNGTMMQYFEWYLPNDGNHWNRLNSDASNLKSKGITAVWIPPAWKGASQNDVGYGAYDLYDLGEFNQKGTVRTKYGTRSQLQAAVTSLKNNGIQVYGDVVMNHKGGADATEMVRAVEVNPNNRNQEVTGEYTIEAWTRFDFPGRGNTHSSFKWRWYHFDGVDWDQSRRLNNRIYKFRGHGKAWDWEVDTENGNYDYLMYADIDMDHPEVVNELRNWGVWYTNTLGLDGFRIDAVKHIKYSFTRDWINHVRSATGKNGFAVAEFWKNDLGAIENYLQKTNWNHSVFDVPLHYNLYNASKSGGNYDMRNIFNGTVVQRHPSHAVTFVDNHDSQPEEALESFVEEWFKPLAYALTLTREQGYPSVFYGDYYGIPTHGVPAMRSKIDPILEARQKYAYGKQNDYLDHHNIIGWTREGNTAHPNSGLATIMSDGAGGSKWMFVGRNKAGQVWSDITGNRTGTVTINADGWGNFSVNGGSVSIWVNK

SEQ ID NO: 22965 - protein, 485 aa, Bacillus sp. 707
HHNGTNGTMMQYFEWYLPNDGNHWNRLNSDASNLKSKGITAVWIPPAWKGASQNDVGYGAYDLYDLGEFNQKGTVRTKYGTRSQLQAAVTSLKNNGIQVYGDVVMNHKGGADATEMVRAVEVNPNNRNQEVTGEYTIEAWTRFDFPGRGNTHSSFKWRWYHFDGVDWDQSRRLNNRIYKFRGHGKAWDWEVDTENGNYDYLMYADIDMDHPEVVNELRNWGVWYTNTLGLDGFRIDAVKHIKYSFTRDWINHVRSATGKNMFAVAEFWKNDLGAIENYLQKTNWNHSVFDVPLHYNLYNASKSGGNYDMRNIFNGTVVQRHPSHAVTFVDNHDSQPEEALESFVEEWFKPLAYALTLTREQGYPSVFYGDYYGIPTHGVPAMRSKIDPILEARQKYAYGKQNDYLDHTNIIGWTREGNTAHPNSGLATIMSDGAGGSKWMFVGRNKAGQVWSDITGNRTGTVTINADGWGNFSVNGGSVSIWVNK

SEQ ID NO: 22966 - protein, 485 aa, Bacillus sp. 707
HHNGTNGTMMQYFEWYLPNDGNHWNRLNSDASNLKSKGITAVWIPPAWKGASQNDVGYGAYDLYDLGEFNQKGTVRTKYGTRSQLQAAVTSLKNNGIQVYGDVVMNHKGGADATEMVRAVEVNPNNRNQEVTGEYTIEAWTRFDFPGRGNTHSSFKWRWYHFDGVDWDQSRRLNNRIYKFRGHGKAWDWEVDTENGNYDYLMYADIDMDHPEVVNELRNWGVWYTNTLGLDGFRIDAVKHIKYSFTRDWINHVRSATGKNMFAVAEFWKNDLGAIENYLQKTNWNHSVFDVPLHYNLYNASKSGGNYDMRNIFNGTVVHRHPSHAVTFVDNHDSQPEEALESFVEEWFKPLAYALTLTREQGYPSVFYGDYYGIPTHGVPAMRSKIDPILEARQKYAYGKQNDYLDHHNIIGWTREGNTAHPNSGLATIMSDGAGGSKWMFVGRNKAGQVWSDITGNRTGTVTINADGWGNFSVNGGSVSIWVNK

SEQ ID NO: 22967 - protein, 485 aa, Bacillus sp. 707
HHNGTNGTMMQYFEWYLPNDGNHWNRLNSDASNLKSKGITAVWIPPAWKGASQNDVGYGAYDLYDLGEFNQKGTVRTKYGTRSQLQAAVTSLKNNGIQVYGDVVMNHKGGADATEMVRAVEVNPNNRNQEVTGEYTIEAWTRFDFPGRGNTHSSFKWRWYHFDGVDWDQSRRLNNRIYKFRGHGKAWDWEVDTENGNYDYLMYADIDMDHPEVVNELRNWGVWYTNTLGLDGFRIDAVKHIKYSFTRDWINHVRSATGKNMFAVAEFWKNDLGAIENYLQKTNWNHSVFDVPLHYNLYNASKSGGNYDMRNIFNGTVVQRHPSHAVTFVDNHDSQPEEALESFVEEWFKPLAYALTLTREQGYPSVFYGDYYGIPTHGVPAMRSKIDPILEARQKYAYGKQNDYLDHHNIIGWTREGNTAHPNSGLATIMSDGAGGSKWMFVGRNKAGQVWSDITGNRTGTVTINDDGWGNFSVNGGSVSIWVNK

SEQ ID NO: 22968 - protein, 485 aa, Bacillus sp. 707
HHNGTNGTMMQYFEWYLPNDGNHWNRLNSDASNLKSKGITAVWIPPAWKGASQNDVGYGAYDLYDLGEFNQKGTVRTKYGTRSCLQAAVTSLKNNGIQVYGDVVMNHKGGADATEMVRAVEVNPNNRNQEVTGEYTIEAWTRFDFPGRGNTHSSFKWRWYHFDGVDWDQSRRLNNRIYKFRGHGKAWDWEVDTENGNYDYLMYADIDMDHPEVVNELRNWGVWYTNTLGLDGFRIDAVKHIKYSFTRDWINHVRSATGKNMFAVAEFWKNDLGAIENYLQKTNWNHSVFDVPLHYNLYNASKSGGNYDMRNIFNGTVVQRHPSHAVTFVDNHDSQPEEALESFVEEWFKPLAYALTLTREQGYPSVFYGDYYGIPTHGVPAMRSKIDPILEARQKYAYGKQNDYLDHHNIIGWTREGNTAHPNSGLATIMSDGAGGSKWMFVGRNKAGQVWSDITGNRTGTVTINADGWGNFSVNGGSVSIWVNK

SEQ ID NO: 22969 - protein, 485 aa, Bacillus sp. 707
HHNGTNGTMMQYFEWYLPNDGNHWNRLNSDASNLKSKGITAVWIPPAWKGASQNDVGYGAYDLYDLGEFNQKGTVRTKYGTRSQLQAAVTSLKNNGIQVYGDVVMNHKGGADGTEMVRAVEVNPNNRNQEVTGEYTIEAWTRFDFPGRGNTHSSFKWRWYHFDGVDWDQSRRLNNRIYKFRGHGKAWDWEVDTENGNYDYLMYADIDMDHPEVVNELRNWGVWYTNTLGLDGFRIDAVKHIKYSFTRDWINHVRSATGKNMFAVAEFWKNDLGAIENYLQKTNWNHSVFDVPLHYNLYNASKSGGNYDMRNIFNGTVVQRHPSHAVTFVDNHDSQPEEALESFVEEWFKPLAYALTLTREQGYPSVFYGDYYGIPTHGVPAMRSKIDPILEARQKYAYGKQNDYLDHHNIIGWTREGNTAHPNSGLATIMSDGAGGSKWMFVGRNKAGQVWSDITGNRTGTVTINADGWGNFSVNGGSVSIWVNK

SEQ ID NO: 22970 - protein, 485 aa, Bacillus sp. 707
HHNGTNGTMMQYFEWYLPNDGNHWNRLNSDAGNLKSKGITAVWIPPAWKGASQNDVGYGAYDLYDLGEFNQKGTVRTKYGTRSQLQAAVTSLKNNGIQVYGDVVMNHKGGADATEMVRAVEVNPNNRNQEVTGEYTIEAWTRFDFPGRGNTHSSFKWRWYHFDGVDWDQSRRLNNRIYKFRGHGKAWDWEVDTENGNYDYLMYADIDMDHPEVVNELRNWGVWYTNTLGLDGFRIDAVKHIKYSFTRDWINHVRSATGKNMFAVAEFWKNDLGAIENYLQKTNWNHSVFDVPLHYNLYNASKSGGNYDMRNIFNGTVVQRHPSHAVTFVDNHDSQPEEALESFVEEWFKPLAYALTLTREQGYPSVFYGDYYGIPTHGVPAMRSKIDPILEARQKYAYGKQNDYLDHHNIIGWTREGNTAHPNSGLATIMSDGAGGSKWMFVGRNKAGQVWSDITGNRTGTVTINADGWGNFSVNGGSVSIWVNK

SEQ ID NO: 22971 - protein, 485 aa, Bacillus sp. 707
HHNGTNGTMMQYFEWYLPNDGNHWNRLNSDASNLKSKGITAVWIPPAWKGASQNDVGYGAYDLYDLGEFNQKGTVRTKYGTRSQLQAAVTSLKNNGIQVYGDVVMNHKGGADATEMVRAVEVNPNNRNQEVTGEYTIEAWTRFDFPGRGNTHSSFKWRWYHFDGVDWDQSRRLNNRIYKFRGHGKAWDWEVDTENGNYDYLMYADIDMDHPEVVNELRNWGVWYTNTLGLDGFRIDAVKHIKYSFTRDWINHVRSATGKNMFAVAEFWKNDLGAIENYLQKTNWNHSVFDVPLHYNLYNASKSGGNYDMRNIFNGTVVQRHPSHAVTFVDNHDSQPEEALESFVEEWFKPLAYALTLTREQGYPSVFYGDYYGIPTHGVPAMRSKIDPILEARQKYAYGKQNDYLDHHNIIGWTREGNTAHFNSGLATIMSDGAGGSKWMFVGRNKAGQVWSDITGNRTGTVTINADGWGNFSVNGGSVSIWVNK

SEQ ID NO: 22972 - protein, 485 aa, Bacillus sp. 707
HHNGTNGTMMQYFEWYLPNDGNHWNRLNSDASNLKSKGITAVWIPPAWKGASQNDVGYGAYDLYDLGEFNQKGTVRTKYGTRSQLQAAVTSLKNNGIQVYGDVVMNHKGGADATEMVRAVEVNPNNRNQEVTGEYTIEAWTRFDFPGRGNTHSSFKWRWYHFDGVDWDQSRRLNNRIYKFRGHGKAWDWEVDTENGNYDYLMYADIDMDHPEVVNELRNWGVWYTNTLGLDGFRIDAVKHIKYSFTRDWINHVRSATGKNMFAVAEFWKNDLGAIENYLQKTNWNHSVFDVPLHYNLYNASKSGGNYDMRNIFNGTVVQRHPSHAVTFVDNHDSQPEEALESFVEEWFKPLAYALTLTREQGYPSVFYGDYYGIPTHGVPAMRSKIDPILEARQKYAYGKQNDYLDHHNIIGWTREGNTAHPNSGLATIMSDMAGGSKWMFVGRNKAGQVWSDITGNRTGTVTINADGWGNFSVNGGSVSIWVNK

SEQ ID NO: 22973 - protein, 485 aa, Bacillus sp. 707
HHNGTNGTMMQYFEWYLPNDGNHWNRLNSDASNLKSKGITAVWIPPAWKGASQNDVGYGAYDLYDLGEFNQKGTVRTKYGTRSQLQAAVTSLKNNGIQVYGDVVMNHKGGADATEMVRAVEVNPNNRNQEVTGEYTIEAWTRFDFPGRGNTHSSFKWRWYHFDGVDWDQSRRLNNRIYKFRGHGKAWDWEVDTENGNYDYLMYADIDMDHPEVVNELRNWGVWYTNTLGLDGFRIDAVKHIKYSFTRDWINHVRSATGKNMFAVAEFWKNDLDAIENYLQKTNWNHSVFDVPLHYNLYNASKSGGNYDMRNIFNGTVVQRHPSHAVTFVDNHDSQPEEALESFVEEWFKPLAYALTLTREQGYPSVFYGDYYGIPTHGVPAMRSKIDPILEARQKYAYGKQNDYLDHHNIIGWTREGNTAHPNSGLATIMSDGAGGSKWMFVGRNKAGQVWSDITGNRTGTVTINADGWGNFSVNGGSVSIWVNK

SEQ ID NO: 22974 - protein, 485 aa, Bacillus sp. 707
HHNGTNGTMMQYFEWYLPNDGNHWNRLNSDASNLKSKGITAVWIPPAWKGASQNDVGYGAYDLYDLGEFNQKGTVRTKYGTRSQLQAAVTSLKNNGIQVYGDVVMNHKGGADATEMVRAVEVNPNNRNQEVTGEYTIEAWTRFDFPGRGNTHSSFKWRWYHFDGVDWDQSRRLNNRIYKFRGHGKAWDWEVDTENGNYDYLMYADIDMDHPEVVNELRNWGVWYTNTLGLDGFRIDAVKHIKYSFTRDWINHVRSATGKNMFAVAEFWKNDLGAIENYLQKTNWNHSVFDVPLHYNLYNASKSGGNYDMRNIFNGTVVQRHPSHAVTFVDNHDSQPEEALESFVEEWFKPLAYALTLTREQGYPSVFYGDYYGIPTHGVPAMRSKIDPILEARQKYAYGKQNDYLDHHNIIGWTREGNTAHPNSGLATIMSDGAGGSKWMFVGRNKAGQQWSDITGNRTGTVTINADGWGNFSVNGGSVSIWVNK

SEQ ID NO: 22975 - protein, 485 aa, Bacillus sp. 707
HHNGTNGTMMQYFEWYLPNDGNHWNRLNSDASNLKSKGITAVWIPPAWKGASQNDVGYGAYDLYDLGEFNQKGTVRTKYGTRSQLQAAVTSLKNNGIQVYGDVVMNHKGGADATEMVRAVEVNPNNRNQEVTGEYTIEAWTRFDFPGRGNTHSSFKWRWYHFDGVDWDQSRRLNNRIYKFRGHGKAWDWEVDTENGNYDYLMYADIDMDHPEVVNELRNWGVWYTNTLGLDGFRIDAVKHIKYSFTRDWINHVRSATGKNMFAVAEFWKNDLGAIENYLQKTNWNHSVFDVPLHYNLYNASKSGGNYDMRNIFNGTVVQRHPSHAVTFVDNHDSQPEEALESFVEEWFKPLAYALTLTREQGYPSVFYGDYYGIPTHGVPAMRSKIDPILEARQKYAYGKQNDYLDHHNIIGWTREGNTAHCNSGLATIMSDGAGGSKWMFVGRNKAGQVWSDITGNRTGTVTINADGWGNFSVNGGSVSIWVNK

SEQ ID NO: 22976 - protein, 485 aa, Bacillus sp. 707
HHNTTNGTMMQYFEWYLPNDGNHWNRLNSDASNLKSKGITAVWIPPAWKGASQNDVGYGAYDLYDLGEFNQKGTVRTKYGTRSQLQAAVTSLKNNGIQVYGDVVMNHKGGADATEMVRAVEVNPNNRNQEVTGEYTIEAWTRFDFPGRGNTHSSFKWRWYHFDGVDWDQSRRLNNRIYKFRGHGKAWDWEVDTENGNYDYLMYADIDMDHPEVVNELRNWGVWYTNTLGLDGFRIDAVKHIKYSFTRDWINHVRSATGKNMFAVAEFWKNDLGAIENYLQKTNWNHSVFDVPLHYNLYNASKSGGNYDMRNIFNGTVVQRHPSHAVTFVDNHDSQPEEALESFVEEWFKPLAYALTLTREQGYPSVFYGDYYGIPTHGVPAMRSKIDPILEARQKYAYGKQNDYLDHHNIIGWTREGNTAHPNSGLATIMSDGAGGSKWMFVGRNKAGQVWSDITGNRTGTVTINADGWGNFSVNGGSVSIWVNK

SEQ ID NO: 22977 - protein, 485 aa, Bacillus sp. 707
HHFGTNGTMMQYFEWYLPNDGNHWNRLNSDASNLKSKGITAVWIPPAWKGASQNDVGYGAYDLYDLGEFNQKGTVRTKYGTRSQLQAAVTSLKNNGIQVYGDVVMNHKGGADATEMVRAVEVNPNNRNQEVTGEYTIEAWTRFDFPGRGNTHSSFKWRWYHFDGVDWDQSRRLNNRIYKFRGHGKAWDWEVDTENGNYDYLMYADIDMDHPEVVNELRNWGVWYTNTLGLDGFRIDAVKHIKYSFTRDWINHVRSATGKNMFAVAEFWKNDLGAIENYLQKTNWNHSVFDVPLHYNLYNASKSGGNYDMRNIFNGTVVQRHPSHAVTFVDNHDSQPEEALESFVEEWFKPLAYALTLTREQGYPSVFYGDYYGIPTHGVPAMRSKIDPILEARQKYAYGKQNDYLDHHNIIGWTREGNTAHPNSGLATIMSDGAGGSKWMFVGRNKAGQVWSDITGNRTGTVTINADGWGNFSVNGGSVSIWVNK

SEQ ID NO: 22978 - protein, 485 aa, Bacillus sp. 707
HHNGTNGTMMQYFEWYLPNDGNHWNRLNSDASNLKSKGITAVWIPPAWKGASQNDVGYGAYDLYDLGEFNQKGTVRTKYGTRSQLQAAVTSLKNNGIQVYGDVVMNHKGGADATEMVRAVEVNPNNRNQEVTGEYTIEAWTRFDFPGRANTHSSFKWRWYHFDGVDWDQSRRLNNRIYKFRGHGKAWDWEVDTENGNYDYLMYADIDMDHPEVVNELRNWGVWYTNTLGLDGFRIDAVKHIKYSFTRDWINHVRSATGKNMFAVAEFWKNDLGAIENYLQKTNWNHSVFDVPLHYNLYNASKSGGNYDMRNIFNGTVVQRHPSHAVTFVDNHDSQPEEALESFVEEWFKPLAYALTLTREQGYPSVFYGDYYGIPTHGVPAMRSKIDPILEARQKYAYGKQNDYLDHHNIIGWTREGNTAHPNSGLATIMSDGAGGSKWMFVGRNKAGQVWSDITGNRTGTVTINADGWGNFSVNGGSVSIWVNK

SEQ ID NO: 22979 - protein, 485 aa, Bacillus sp. 707
HHNGTNGTMMQYFEWYLPNDGNHWNRLNSDASNLKSKGITAVWIPPAWKGASQNDVGYGAYDLYDLGEFNQKGTVRTKYGTRSQLQAAVTSLKLNGIQVYGDVVMNHKGGADATEMVRAVEVNPNNRNQEVTGEYTIEAWTRFDFPGRGNTHSSFKWRWYHFDGVDWDQSRRLNNRIYKFRGHGKAWDWEVDTENGNYDYLMYADIDMDHPEVVNELRNWGVWYTNTLGLDGFRIDAVKHIKYSFTRDWINHVRSATGKNMFAVAEFWKNDLGAIENYLQKTNWNHSVFDVPLHYNLYNASKSGGNYDMRNIFNGTVVQRHPSHAVTFVDNHDSQPEEALESFVEEWFKPLAYALTLTREQGYPSVFYGDYYGIPTHGVPAMRSKIDPILEARQKYAYGKQNDYLDHHNIIGWTREGNTAHPNSGLATIMSDGAGGSKWMFVGRNKAGQVWSDITGNRTGTVTINADGWGNFSVNGGSVSIWVNK

SEQ ID NO: 22980 - protein, 485 aa, Bacillus sp.
HHNGTNGTMMQYFEWYLPNDGNHWNRLRSDASNLKDKGISAVWIPPAWKGASQNDVGYGAYDLYDLGEFNQKGTIRTKYGTRNQLQAAVNALKSNGIQVYGDVVMNHKGGADATEMVRAVEVNPNNRNQEVSGEYTIEAWTKFDFPGRGNTHSNFKWRWYHFDGVDWDQSRKLNNRIYKFRGDGKGWDWEVDTENGNYDYLLYADIDMDHPEVVNELRNWGVWYTNTLGLDGFRIDAVKHIKYSFTRDWINHVRSATGKNMFAVAEFWKNDLGAIENYLNKTNWNHSVFDVPLHYNLYNASKSGGNYDMRQIFNGTVVQRHPMHAVTFVDNHDSQPEEALESFVEEWFKPLAYALTLTREQGYPSVFYGDYYGIPTHGVPAYRSKIDPILEARQKYAYGRQNDYLDHHNIIGWTREGNTAHPNSGLATIMSDGAGGNKWMFVGRNKAGQVWTDITGNRAGTVTINADGWGNFSVNGGSVSIWVNK

SEQ ID NO: 22981 - protein, 485 aa, Bacillus sp. 707
HHNGTNGTMMQYFEWYLPNDGNHWNRLNSDASNLKSKGITAVWIPPAWKGASQNDVGYGAYDLYDLGEFNQKGTVRTKYGSRSQLQAAVTSLKNNGIQVYGDVVMNHKGGADATEMVRAVEVNPNNRNQEVTGEYTIEAWTRFDFPGRGNTHSSFKWRWYHFDGVDWDQSRRLNNRIYKFRGHGKAWDWEVDTENGNYDYLMYADIDMDHPEVVNELRNWGVWYTNTLGLDGFRIDAVKHIKYSFTRDWINHVRSATGKNMFAVAEFWKNDLGAIENYLQKTNWNHSVFDVPLHYNLYNASKSGGNYDMRNIFNGTVVQRHPSHAVTFVDNHDSQPEEALESFVEEWFKPLAYALTLTREQGYPSVFYGDYYGIPTHGVPAMRSKIDPILEARQKYAYGKQNDYLDHHNIIGWTREGNTAHPNSGLATIMSDGAGGSKWMFVGRNKAGQVWSDITGNRTGTVTINADGWGNFSVNGGSVSIWVNK

SEQ ID NO: 22982 - protein, 485 aa, Bacillus sp. 707
HHNGTNGTMMQYFEWYLPNDGNHWNRLNSDASNLKSKGITAVWIPPAWKGASQNDVGYGAYDLYDLGEFNQKGTVRTKYGTRSQLQAAVTSLKNNGIQVYGDVVMNHKGGADATEMVRAVEVNPNNRNQEVTGEYTIEAWTRFDFPGRGNTHSSFKWRWYHFDGVDWDQSRRLNNRIYKFRGHGKAWDWEVDTENGNYDYLMYADIDMDHPEVVNELRNWGVWYTNTLGLDGFRIDAVKHIKYSFTRDWINHVRSATGKNMFAVAEFWKNDLGAIENYLQKTNWNHSVFDVPLHYNLYRASKSGGNYDMRNIFNGTVVQRHPSHAVTFVDNHDSQPEEALESFVEEWFKPLAYALTLTREQGYPSVFYGDYYGIPTHGVPAMRSKIDPILEARQKYAYGKQNDYLDHHNIIGWTREGNTAHPNSGLATIMSDGAGGSKWMFVGRNKAGQVWSDITGNRTGTVTINADGWGNFSVNGGSVSIWVNK

SEQ ID NO: 22983 - protein, 485 aa, Bacillus sp. 707
HHNGTNGTMMQYFEWYLPNDGNHWNRLNSDASNLKSKGITAVWIPPAWKGASQNDVGYGAYDLYDLGEFNQKGTVRTKYGTRSQLQAAVTSLKNNGIQVYGDVVMNHKGGADATEMVRAVEVNPNNRNQEVTGEYTIEAWTRFDFPGRGNTHSSFKWRWYHFDGVDWDQSRRLNNRIYKFRGHGKAWDWEVDTENGNYDYLMYADIDMDHPEVVNELRNWGVWYTNTLGLDGFRIDAVKHIKYSFTRDWINHVRSATGKNMFAVAEFWKNDLGAIENYLQKTNWNHSVFDVPLHYNLYNASKSGGNYDMRNIFKGTVVQRHPSHAVTFVDNHDSQPEEALESFVEEWFKPLAYALTLTREQGYPSVFYGDYYGIPTHGVPAMRSKIDPILEARQKYAYGKQNDYLDHHNIIGWTREGNTAHPNSGLATIMSDGAGGSKWMFVGRNKAGQVWSDITGNRTGTVTINADGWGNFSVNGGSVSIWVNK

SEQ ID NO: 22984 - protein, 485 aa, Bacillus sp. 707
HHNGTNGTMMQYFEWYLPNDGNHWNRLNSDASNLKSKGITAVWIPPAWKGASQNDVGYGAYDLYDLGEFNQKGTVRTKYGTRSQLQAAVTSLKNNGIQVYGDVVMNHKGGADATEMVRAVEVNPNNRNQEVTGEYTIEAWTRFDFPGRGNTHSSFKWRWYHFDGVDWDQSRRLNNRIYKFRGHGKAWDWEVDTENGNYDYLMYADIDMDHPEVVNELRNWGVWYTNTLGLDGFRIDAVKHIKYSFTRDWINHVRSATGKNMFAVAEFWKNDLGAIENYLQKTNWNHSVFDVPLHYNLYNASKSGGNYDMRNIFVGTVVQRHPSHAVTFVDNHDSQPEEALESFVEEWFKPLAYALTLTREQGYPSVFYGDYYGIPTHGVPAMRSKIDPILEARQKYAYGKQNDYLDHHNIIGWTREGNTAHPNSGLATIMSDGAGGSKWMFVGRNKAGQVWSDITGNRTGTVTINADGWGNFSVNGGSVSIWVNK

SEQ ID NO: 22985 - protein, 485 aa, Bacillus sp. 707
HHNGTNGTMMQYFEWYLPNDGNHWNRLNSDASNLKSKGITAVWIPPAWKGASQNDVGYGAYDLYDLGEFNQKGTVRTKYGTRSQLQAAVTSLKNNGIQVYGDVVMNHKGGADATEMVRAVEVNPNNRNQEVTGEYTIEAWTRFDFPGRGNTHSSFKWRWYHFDGVDWDQSRRLNNRIYKFRGHGKAWDWEVDTENGNYDYLMYADIDMDHPEVVNELRNWGVWYTNTLGLDGFRIDAVKHIKYSFTRDWINHVRSATGKNMFAVAEFWKNDLGAIENYLQKTNWNHSVFDVPLHYNLYNASKSGGNYDMRNIFNGTVVQRHPSHAVTFVDNHDSQPEEALESFVEEWFKPLAYALTLTREQGYPSVFYGDYYGIPTHGVPAMRSKIDPILEARQKYAYGKQNDYLDHHNIIGWTREGNTAHPNSGLATIMSDGAGGSKWMFVGRNKAGQVWSDITGNRTNTVTINADGWGNFSVNGGSVSIWVNK

SEQ ID NO: 22986 - protein, 485 aa, Bacillus sp. 707
HHNGTNGTMMQYFEWYLPNDGNHWNRLNSDASNLKSKGITAVWIPPAWKGASQNDVGYGAYDLYDLGEFNQKGTVRTKYGTRSQLQAAVTSLKNNGIQVYGDVVMNHKGGADATEMVRAVEVNPNNRNQEVTGEYTIEAWTRFDFPGRGNTHSSFKWRWYHFDGVDWDISRRLNNRIYKFRGHGKAWDWEVDTENGNYDYLMYADIDMDHPEVVNELRNWGVWYTNTLGLDGFRIDAVKHIKYSFTRDWINHVRSATGKNMFAVAEFWKNDLGAIENYLQKTNWNHSVFDVPLHYNLYNASKSGGNYDMRNIFNGTVVQRHPSHAVTFVDNHDSQPEEALESFVEEWFKPLAYALTLTREQGYPSVFYGDYYGIPTHGVPAMRSKIDPILEARQKYAYGKQNDYLDHHNIIGWTREGNTAHPNSGLATIMSDGAGGSKWMFVGRNKAGQVWSDITGNRTGTVTINADGWGNFSVNGGSVSIWVNK

SEQ ID NO: 22987 - protein, 485 aa, Bacillus sp. 707
HHNGTNGTMMQYFEWYLPNDGNHWNRLNSDASNLKSKGITAVWIPPAWKGASQNDVGYGAYDLYDLGEFNQKGTVRTKYGTRSQLQAAVTSLKNNGIQVYGDVVMNHKGGADATEMVRAVEVNPNNRNQEVTGEYTIEAWTRFDFPGRGNTHSSFKWRWCHFDGVDWDQSRRLNNRIYKFRGHGKAWDWEVDTENGNYDYLMYADIDMDHPEVVNELRNWGVWYTNTLGLDGFRIDAVKHIKYSFTRDWINHVRSATGKNMFAVAEFWKNDLGAIENYLQKTNWNHSVFDVPLHYNLYNASKSGGNYDMRNIFNGTVVQRHPSHAVTFVDNHDSQPEEALESFVEEWFKPLAYALTLTREQGYPSVFYGDYYGIPTHGVPAMRSKIDPILEARQKYAYGKQNDYLDHHNIIGWTREGNTAHPNSGLATIMSDGAGGSKWMFVGRNKAGQVWSDITGNRTGTVTINADGWGNFSVNGGSVSIWVNK

SEQ ID NO: 22988 - protein, 483 aa, Bacillus sp. SP70
HHNGTNGTMMQYFEWYLPNDGNHWNRLNSDASNLKSKGITAVWIPPAWKGASQNDVGYGAYDLYDLGEFNQKGTVRTKYGTRSQLQAAVTSLKNNGIQVYGDVVMNHKGGADATEMVRAVEVNPNNRNQEVTGEYTIEAWTRFDFPGRGNTHSSFKWRWYHFDGVDWDQSRRLNNRIYKFRGKAWDWEVDTENGNYDYLMYADIDMDHPEVVNELRNWGVWYTNTLGLDGFRIDAVKHIKYSFTRDWINHVRSATGKNMAAVAEFWKNDLGAIENYLQKTNWNHSVFDVPLHYNLYNASKSGGNYDMRNIFNGTVVQRHPSHAVTFVDNHDSQPEEALESFVEEWFKPLAYALTLTREQGYPSVFYGDYYGIPTHGVPAMRSKIDPILEARQKYAYGKQNDYLDHHNIIGWTREGNTAHPNSGLATIMSDGAGGSKWMFVGRNKAGQVWSDITGNRTGTVTINADGWGNFSVNGGSVSIWVNK

SEQ ID NO: 22989 - protein, 485 aa, Bacillus sp. 707
HHNGTNGTMMQYFEWYLPNDGNHWVRLNSDASNLKSKGITAVWIPPAWKGASQNDVGYGAYDLYDLGEFNQKGTVRTKYGTRSQLQAAVTSLKNNGIQVYGDVVMNHKGGADATEMVRAVEVNPNNRNQEVTGEYTIEAWTRFDFPGRGNTHSSFKWRWYHFDGVDWDQSRRLNNRIYKFRGHGKAWDWEVDTENGNYDYLMYADIDMDHPEVVNELRNWGVWYTNTLGLDGFRIDAVKHIKYSFTRDWINHVRSATGKNMFAVAEFWKNDLGAIENYLQKTNWNHSVFDVPLHYNLYNASKSGGNYDMRNIFNGTVVQRHPSHAVTFVDNHDSQPEEALESFVEEWFKPLAYALTLTREQGYPSVFYGDYYGIPTHGVPAMRSKIDPILEARQKYAYGKQNDYLDHHNIIGWTREGNTAHPNSGLATIMSDGAGGSKWMFVGRNKAGQVWSDITGNRTGTVTINADGWGNFSVNGGSVSIWVNK

SEQ ID NO: 22990 - protein, 485 aa, Bacillus sp. 707
HHNGTNGTMMQYFEWYLPNDGNHWNRLNSDASNLKSKGITAVWIPPAWKGASQVDVGYGAYDLYDLGEFNQKGTVRTKYGTRSQLQAAVTSLKNNGIQVYGDVVMNHKGGADATEMVRAVEVNPNNRNQEVTGEYTIEAWTRFDFPGRGNTHSSFKWRWYHFDGVDWDQSRRLNNRIYKFRGHGKAWDWEVDTENGNYDYLMYADIDMDHPEVVNELRNWGVWYTNTLGLDGFRIDAVKHIKYSFTRDWINHVRSATGKNMFAVAEFWKNDLGAIENYLQKTNWNHSVFDVPLHYNLYNASKSGGNYDMRNIFNGTVVQRHPSHAVTFVDNHDSQPEEALESFVEEWFKPLAYALTLTREQGYPSVFYGDYYGIPTHGVPAMRSKIDPILEARQKYAYGKQNDYLDHHNIIGWTREGNTAHPNSGLATIMSDGAGGSKWMFVGRNKAGQVWSDITGNRTGTVTINADGWGNFSVNGGSVSIWVNK

SEQ ID NO: 22991 - protein, 485 aa, Bacillus sp. 707
HHNGTNGTMMQYFEWYLPNDGNHWNRLNSDASNLKSKGITAVWIPPAWKGASQNDVGYGAYDLYDLGEFNQKGTVRTKYGTRSQLQAAVTSLKNNGIQVYGDVVMNHKGGADATEMVRAVEVNPNNRNQEVTGEYTIEAWTRFDFPGRGNTHSSFKWRWYHFDGVDWDQSRRLNNRIYKFRGHGKAWDWEVDTENGNYDYLMYADIDMDHPEVVNELRNWGVWYTNTLGLDGFRIDAVKHIKYSFTRDWINHVRSATGKNMFAVAEFWKNDLGAIENYLQKTNWNHSVFDVPLHYNLYNASKSGGNYDMRNIFNGTVVQRHPSHAVTFVDNHDSQPEEALESFVEEWFKPLAYALTLTREQGYPSVFYGDYYGIPTHGVPAMRSKIDPILEARQKYAYGKQNDYLDHHNIIGWTREGNTAHPNSGLATIMSDGAGGSKWMFVGRNKAGQVWSDITGNRTGDVTINADGWGNFSVNGGSVSIWVNK

SEQ ID NO: 22992 - protein, 485 aa, Bacillus sp. 707
HHNGTNGTMMQYFEWYLPNDGNHWNRLNSDASNLKSKGITAVWIPPAWKGASQNDVGYGAYDLYDLGEFNQKGTVRTKYGTRSQLQAAVTSLKNNGIQVYGDVVMNHKGGADATEMVRAVEVNPNNRNQEVTGEYTIEAWTRFDFPGRGNTHSSFKWRWYHFDGVDWDQSRRLNNRIYKFRGHGKAWDWEVDTENGNYDYLMYADIDMDHPEVVNELRNWGVWYTNTLGLDGFRIDAVKHIKYSFTRDWINHVRSATGKNMFAVAEFWKNDLGAIENYLQKTNWNHSVFDVPLHYNLYNASKSGGNYDMRNIFNGTVVQRHPSHAVTFVDNHDSQPEEALESFVEEWFKPLAYALTLTREQGYPSVFYGDYYGIPTHGVPAMRSKIDPILEARQKYAYGKQNDYLDHHNIIGWTREGNTAHPLSGLATIMSDGAGGSKWMFVGRNKAGQVWSDITGNRTGTVTINADGWGNFSVNGGSVSIWVNK

SEQ ID NO: 22993 - protein, 485 aa, Bacillus sp. 707
HHNGTNGTMMQYFEWYLPNDGNHWNRLNSDASNLKSKGITAVWIPPAWKGASQNDVGYGAYDLYDLGEFNQKGTVRTKYGTRSQLQAAVTSLKNNGIQVYGDVVMNHKGGADATEMVRAVEVNPNNRNQEVTGEYTIEAWTRFDFPGRGNTHSSFKWRWYHFDGVDWDQSRRLNNRIYKFRGHGKAWDWEVDTENGNYDYLMYADIDMDHPEVVNELRNWGVWYTNTLGLDGFRIDAVKHIKYSFTRDWINHVRSATGKNMFAVAEFWKNDLGAIENYLQKTNWNHSVFDVPLHYNLYNASKSGGNYDMRNIFNGTVVQRHPSHAVTFVDNHDSQPEEALESFVEEWFKPLAYALTLTREQGYPSVFYGDYYGIPTHGVPAMRSKIDPILEARQKYAYGKQNDYLDHHNIIGWTREGNTAHPNSGLATIMSDGAGGSKWMFVGRNKAGQVWSDITGNRTGTVTINADGWGRFSVNGGSVSIWVNK

SEQ ID NO: 22994 - protein, 485 aa, Bacillus sp. 707
HHNGTNGTMMQYFEWYLPNDGNHWNRLNSDASNLKSKGITAVWIPPAWKGASQNDVGYGAYDLYDLGEFNQKGTVRTKYGTRSQLQAAVTSLKNNGIQVYGDVVMNHKGGADATEMVRAVEVNPNNRNQEVTGEYTIEAWTRFDFPGRGNTHSSFKWRWYHFDGVDWDQSRRLNNRIYKFRGHGKAWDWEVDTENGNYDYLMYADIDMDHPEVVNELRNWGVWYTNTLGLDGFRIDAVKHIKYSFTRDWINHVRSATGKNMFAVAEFWKNDLGAIENYLQKTNWNHSVFDVPLHYNLYNASKSGGNYDMRNIFNGTVVQRHPSHAVTFVDNHDSQPEEALESFVEEWFKPLAYALTLTREQGYPSVFYGDYYGIPTHGVPAMRSKIDPILEARQKYAYGKQNDYLDHHNIIGWTREGNTAHPNSGLATIMSDGAGGSKWMFVGRNKAGQVWSDITGNRTGTVTINADGWGQFSVNGGSVSIWVNK

SEQ ID NO: 22995 - protein, 485 aa, Bacillus sp. 707
HHNGTNGTMMQYFEWYLPNDGVHWNRLNSDASNLKSKGITAVWIPPAWKGASQNDVGYGAYDLYDLGEFNQKGTVRTKYGTRSQLQAAVTSLKNNGIQVYGDVVMNHKGGADATEMVRAVEVNPNNRNQEVTGEYTIEAWTRFDFPGRGNTHSSFKWRWYHFDGVDWDQSRRLNNRIYKFRGHGKAWDWEVDTENGNYDYLMYADIDMDHPEVVNELRNWGVWYTNTLGLDGFRIDAVKHIKYSFTRDWINHVRSATGKNMFAVAEFWKNDLGAIENYLQKTNWNHSVFDVPLHYNLYNASKSGGNYDMRNIFNGTVVQRHPSHAVTFVDNHDSQPEEALESFVEEWFKPLAYALTLTREQGYPSVFYGDYYGIPTHGVPAMRSKIDPILEARQKYAYGKQNDYLDHHNIIGWTREGNTAHPNSGLATIMSDGAGGSKWMFVGRNKAGQVWSDITGNRTGTVTINADGWGNFSVNGGSVSIWVNK

SEQ ID NO: 22996 - protein, 485 aa, Bacillus sp. 707
HHNGTNGTMMQYFEWYLPNDGNHWNRLNSDASNLKSKGITAVWIPPAWKGASQNDVGYGAYDLYDLGEFNQKGTVRTKYGTRSQLQAAVTSLKNNGIQVYGDVVMNHKGGADATEMVRAVEVNPNNRNQEVTGEYTIEAWTRFDFPGRGNTHSSFKWRWYHFDGVDWDQSRRLNNRIYKFRGHGKAWDWEVDTENGNYDYLMYADIDMDHPEVVNELRNWGVWYTNTLGLDGFRIDAVKHIKYSFTRDWINHVRSATGKNMFAVAEFWKNDLGAIENYLQKTNWNHSVFDVPLHYNLYNASKSGGNYDMRNIFYGTVVQRHPSHAVTFVDNHDSQPEEALESFVEEWFKPLAYALTLTREQGYPSVFYGDYYGIPTHGVPAMRSKIDPILEARQKYAYGKQNDYLDHHNIIGWTREGNTAHPNSGLATIMSDGAGGSKWMFVGRNKAGQVWSDITGNRTGTVTINADGWGNFSVNGGSVSIWVNK

SEQ ID NO: 22997 - protein, 485 aa, Bacillus sp. 707
HHNGTNGTMMQYFEWYLPNDGNHWNRLNSDASNLKSKGITAVWIPPAWKGASQNDVGYGAYDLYDLGEFNQKGTVRTKYGTRSQLQAAVTSLKNNGIQVYGDVVMNHKGGADATEMVRAVEVNPNNRNQEVTGEYTIEAWTRFDFPGRGNTHSSFKWRWYHFDGVDWDQSRRLNNRIYKFRGHGKAWDWEVDTENGNYDYLMYADIDMDHPEVVNELRNWGVWYTNTLGLDGFRIDAVKHIKYSFTRDWINHVRSATGKNMFAVAEFWKNDLGAIENYLQKTNWNHSVFDVPLHYNLYNASKDGGNYDMRNIFNGTVVQRHPSHAVTFVDNHDSQPEEALESFVEEWFKPLAYALTLTREQGYPSVFYGDYYGIPTHGVPAMRSKIDPILEARQKYAYGKQNDYLDHHNIIGWTREGNTAHPNSGLATIMSDGAGGSKWMFVGRNKAGQVWSDITGNRTGTVTINADGWGNFSVNGGSVSIWVNK

SEQ ID NO: 22998 - protein, 485 aa, Bacillus sp. 707
HHNGTNGTMMQYFEWYLPNDGNHWNRLNSDASNLKSKGITAVWIPPAWKGASQNDVGYGAYDLYDLGEFNQKGTVRTKYGTRSQLQAAVTSLKNNGIQVYGDVVMNHKGGADATEMVRAVEVNPNNRNQEVTGEYTIEAWTRFDFPGRGNTHSSFKWRWYHFDGVDWDQSRRLNNRIYKFRGHGKAWDWEVDTENGNYDYLMYADIDMDHPEVVNELRNWGVWYTNTLGLDGFRIDAVKHIKYSFTRDWINHVRSATGKNMFAVAEFWKNDLGAIENYLQKTNWNHSVFDVPLHYNLYNASKCGGNYDMRNIFNGTVVQRHPSHAVTFVDNHDSQPEEALESFVEEWFKPLAYALTLTREQGYPSVFYGDYYGIPTHGVPAMRSKIDPILEARQKYAYGKQNDYLDHHNIIGWTREGNTAHPNSGLATIMSDGAGGSKWMFVGRNKAGQVWSDITGNRTGTVTINADGWGNFSVNGGSVSIWVNK

SEQ ID NO: 22999 - protein, 485 aa, Bacillus sp. 707
HHNGTNGTMMQYFEWYLPNDGNHWNRLNSDASNLKSKGITAVWIPPAWKGASQNDVGYGAYDLYDLGEFNQKGTVRTKYGTRSQLQAAVTSLKNNGIQVYGDVVMNHKGGADATEMVRAVEVNPNNRNQEVTGEYTIEAWTRFMFPGRGNTHSSFKWRWYHFDGVDWDQSRRLNNRIYKFRGHGKAWDWEVDTENGNYDYLMYADIDMDHPEVVNELRNWGVWYTNTLGLDGFRIDAVKHIKYSFTRDWINHVRSATGKNMFAVAEFWKNDLGAIENYLQKTNWNHSVFDVPLHYNLYNASKSGGNYDMRNIFNGTVVQRHPSHAVTFVDNHDSQPEEALESFVEEWFKPLAYALTLTREQGYPSVFYGDYYGIPTHGVPAMRSKIDPILEARQKYAYGKQNDYLDHHNIIGWTREGNTAHPNSGLATIMSDGAGGSKWMFVGRNKAGQVWSDITGNRTGTVTINADGWGNFSVNGGSVSIWVNK

SEQ ID NO: 23000 - protein, 485 aa, Bacillus sp. 707
HHNGTNGTMMQYFEWYLPNDGNHWNRLNSDASNLKSKGITAVWIPPAWKGASQNDVGYGAYDLYDLGEFNQKGTVRTKYGTRSQLQAAVTSLKNNGIQVYGDVVMNHKGGADATEMVRAVEVNPNNRNQEVTGEYTIEAWTRFDFPGRGNTHSSFKWRWYHFDGVDWDQSRRLNNRIYKFRGHGKAWDWEVDTENGNYDYLMYADIDMDHPEVVNELRNWGVWYTNTLGLDGFRIDAVKHIKYSFTRDWINHVRSATGKNMFAVAEFWKNDLVAIENYLQKTNWNHSVFDVPLHYNLYNASKSGGNYDMRNIFNGTVVQRHPSHAVTFVDNHDSQPEEALESFVEEWFKPLAYALTLTREQGYPSVFYGDYYGIPTHGVPAMRSKIDPILEARQKYAYGKQNDYLDHHNIIGWTREGNTAHPNSGLATIMSDGAGGSKWMFVGRNKAGQVWSDITGNRTGTVTINADGWGNFSVNGGSVSIWVNK

SEQ ID NO: 23001 - protein, 485 aa, Bacillus sp. 707
HHNGTNGTMMQYFEWYLPNDGNHWNRLNSDASNLKSKGITAVWIPPAWKGASQNDVGYGAYDLYDLGEFNQKGTVRTKYGTRSQLQAAVTSLKNNGIQVYGDVVMNHKGGADATEMVRAVEVNPNNRNQEVTGEYTIEAWTRFDFPGRGNTHSSFKWRWYHFDGVDWDQSRRLNDRIYKFRGHGKAWDWEVDTENGNYDYLMYADIDMDHPEVVNELRNWGVWYTNTLGLDGFRIDAVKHIKYSFTRDWINHVRSATGKNMFAVAEFWKNDLGAIENYLQKTNWNHSVFDVPLHYNLYNASKSGGNYDMRNIFNGTVVQRHPSHAVTFVDNHDSQPEEALESFVEEWFKPLAYALTLTREQGYPSVFYGDYYGIPTHGVPAMRSKIDPILEARQKYAYGKQNDYLDHHNIIGWTREGNTAHPNSGLATIMSDGAGGSKWMFVGRNKAGQVWSDITGNRTGTVTINADGWGNFSVNGGSVSIWVNK

SEQ ID NO: 23002 - protein, 485 aa, Bacillus sp. 707
HHNGTNGTMMQYFEWYLPNDGNHWNRLNSDASNLKSKGITAVWIPPAWKGASQNDVGYGAYDLYDLGEFNQKGTVRTKYGTRSQLQAAVTSLKNNGIQVYGDVVMNHKGGADATEMVRAVEVNPNNRNQEVTGEYTIEAWTRFDFPGRGNTHSSFKWRWYHFDGVDWDQSRRLNNRIYKFRGHGKAWDWEVDTENGNYDYLMYADIDMDHPEVVNELRNWGVWYTNTLGLDGFRIDAVKHIKYSFTRDWINHVRSATGKNMFAVAEFWKNDLGAIENYLQKTNWNHSVFDVPLHYNLYNASKSGGNYDMRNIFNGTVVQRHPSHAVTFVDNHDSQPEEALESFVEEWFKPLAYALTLTREQGYPSVFYGDYYGIPTHGVPAMRSKIDPILEARQKYAYGKQNDYLDHHNIIGWTRVGNTAHPNSGLATIMSDGAGGSKWMFVGRNKAGQVWSDITGNRTGTVTINADGWGNFSVNGGSVSIWVNK

SEQ ID NO: 23003 - protein, 485 aa, Bacillus sp. 707
HHNGTNGTMMQYFEWYLPNDGNHWNRLNSDASNLKSKGITAVWIPPAWKGASQNDVGYGAYDLYDLGEFNQKGTVRTKYGTRSQLQAAVTSLKNNGIQVYGDVVMNHKGGADATEMVRAVEVNPNNRNQEVTGEYTIEAWTRFDFPGRGNTHSSFKWRWYHFDGVDWDQSRRLNNRIYKFRGHGKAWDWEVDTENGNYDYLMYADIDMDHPEVVNELRNWGVWYTNTLGLDGFRIDAVKHIKYSFTRDWINHVRSATGKNMFAVAEFWKNDLGAIENYLQKTNWNHSVFDVPLHYNLYNASKSGGNYDMRNIFNGTVVQRHPSHAVTFVDNHDSQPEEALESFVEEWFKPLAYALTLTREQGYPSVFYGDYYGIPTHGVPAMRSKIDPILEARQKYAYGKQNDYLDHHNIIGWTREGNHAHPNSGLATIMSDGAGGSKWMFVGRNKAGQVWSDITGNRTGTVTINADGWGNFSVNGGSVSIWVNK

SEQ ID NO: 23004 - protein, 485 aa, Bacillus sp. 707
HHNGTNGTMMQYFEWYLPNDGNHWNRLNSDASNLKSKGITAVWIPPAWKGASQNDVGYGAYDLYDLGEFNQKGTVRTKYGTRSQLQAAVTSLKNNGIQVYGDVVMNHKGGADATEMVRAVEVNPNNRNQEVTGEYTIEAWTRFDFPGRGNTHSSFKWRWYHFDGVDWDQSRRLNNRIYKFRGHGKAWDWEVDTENGNYDYLMYADIDMDHPEVVNELRNWGVWYTNTLGLDGFRIDAVKHIKYSFTRDWINHVRSATGKNMFAVAEFWKNDLTAIENYLQKTNWNHSVFDVPLHYNLYNASKSGGNYDMRNIFNGTVVQRHPSHAVTFVDNHDSQPEEALESFVEEWFKPLAYALTLTREQGYPSVFYGDYYGIPTHGVPAMRSKIDPILEARQKYAYGKQNDYLDHHNIIGWTREGNTAHPNSGLATIMSDGAGGSKWMFVGRNKAGQVWSDITGNRTGTVTINADGWGNFSVNGGSVSIWVNK

SEQ ID NO: 23005 - protein, 485 aa, Bacillus sp. 707
HHNGTNGTMMQYFEWYLPNDGNHWNRLNSDASILKSKGITAVWIPPAWKGASQNDVGYGAYDLYDLGEFNQKGTVRTKYGTRSQLQAAVTSLKNNGIQVYGDVVMNHKGGADATEMVRAVEVNPNNRNQEVTGEYTIEAWTRFDFPGRGNTHSSFKWRWYHFDGVDWDQSRRLNNRIYKFRGHGKAWDWEVDTENGNYDYLMYADIDMDHPEVVNELRNWGVWYTNTLGLDGFRIDAVKHIKYSFTRDWINHVRSATGKNMFAVAEFWKNDLGAIENYLQKTNWNHSVFDVPLHYNLYNASKSGGNYDMRNIFNGTVVQRHPSHAVTFVDNHDSQPEEALESFVEEWFKPLAYALTLTREQGYPSVFYGDYYGIPTHGVPAMRSKIDPILEARQKYAYGKQNDYLDHHNIIGWTREGNTAHPNSGLATIMSDGAGGSKWMFVGRNKAGQVWSDITGNRTGTVTINADGWGNFSVNGGSVSIWVNK

SEQ ID NO: 23006 - protein, 485 aa, Bacillus sp. 707
HHNLTNGTMMQYFEWYLPNDGNHWNRLNSDASNLKSKGITAVWIPPAWKGASQNDVGYGAYDLYDLGEFNQKGTVRTKYGTRSQLQAAVTSLKNNGIQVYGDVVMNHKGGADATEMVRAVEVNPNNRNQEVTGEYTIEAWTRFDFPGRGNTHSSFKWRWYHFDGVDWDQSRRLNNRIYKFRGHGKAWDWEVDTENGNYDYLMYADIDMDHPEVVNELRNWGVWYTNTLGLDGFRIDAVKHIKYSFTRDWINHVRSATGKNMFAVAEFWKNDLGAIENYLQKTNWNHSVFDVPLHYNLYNASKSGGNYDMRNIFNGTVVQRHPSHAVTFVDNHDSQPEEALESFVEEWFKPLAYALTLTREQGYPSVFYGDYYGIPTHGVPAMRSKIDPILEARQKYAYGKQNDYLDHHNIIGWTREGNTAHPNSGLATIMSDGAGGSKWMFVGRNKAGQVWSDITGNRTGTVTINADGWGNFSVNGGSVSIWVNK

SEQ ID NO: 23007 - protein, 485 aa, Bacillus sp. 707
HHNGTNGTMMQYFEWYLPNDGNHWNRLNSDASNLKSKGITAVWIPPAWKGASQNDVGYGAYDLYDLGEFNQKGTVRTKYGTRSQLQAAVTSLKNNGIQVYGDVVMNHKGGADATEMVRAVEVNPNNRNQEVTGEYTIEAWTRFDFPGRGNTHSSFKWRWYHFDGVDWDQSRRLNNRIYKFRGHGKAWDWEVDTENGNYDYLMYADIDMDHPEVVNELRNWGVWYTNTLGLDGFRIDAVKHIKYSFTRDWINHVRSATGKNMFAVAEFWKNDLGAIENYLQKTNWNHSVFDVPLHYNLYNASKSGGNYDMRNIFNGTVVQRHPSHAVTFVDNHDSQPEEALESFVEEWFKPLAYALTLTREQGYPSVFYGDYYGIPTHGVPAMRSKIDPILEARQKYAYGKQNDYLDHHNIIGWTREGNTAHPNSGLATIMSDGAPGSKWMFVGRNKAGQVWSDITGNRTGTVTINADGWGNFSVNGGSVSIWVNK

SEQ ID NO: 23008 - protein, 485 aa, Bacillus sp.
HHNGTNGTMMQYFEWYLPNDGNHWNRLRSDASNLKDKGISAVWIPPAWKGASQNDVGYGAYDLYDLGEFNQKGTIRTKYGTRNQLQAAVNALKSNGIQVYGDVVMNHKGGADATEMVRAVEVNPNNRNQEVSGEYTIEAWTKFDFPGRGNTHSNFKWRWYHFDGVDWDQSRKLNNRIYKFRGDGKGWDWEVDTENGNYDYLIYADIDMDHPEVVNELRNWGVWYTNTLGLDGFRIDAVKHIKYSFTRDWINHVRSATGKNMFAVAEFWKNDLGAIENYLNKTDWNHSVFDVPLHYNLYNASKSGGNYDMRQIFNGTVVQRHPMHAVTFVDNHDSQPEEALESFVEEWFKPLAYALTLTREEGYPSVFYGDYYGIPTHGVPAMKSKIDPILEARQKYAYGRQNDYLDHHNIIGWTREGNTAHPNSGLATIMSDGAGGNKWMFVGRNKAGQVWTDITGNRAGTVTINADGWGNFSVNGGSVSIWVNK

SEQ ID NO: 23009 - protein, 485 aa, Bacillus sp. 707
HHNGTNGTMMQYFEWYLPNDGNHWNRLNSDASNLKSKGITAVWIPPAWKGASQNDVGYGAYDLYDLGEFNQKGTVRTKYGTRSQLQAAVTSLKNNGIQVYGDVVMNHKGGADATEMVRAVEVNPNNRNQEVTGEYTIEAWTRFDFPGRGNTHSSFKWRWYHFDGVDWDQSRRLNNRIYKFRGHGKAWDWEVDTENGNYDYLMYADIDMDHPEVVNELRNWGVWYTNTLGLDGFRIDAVKHIKYSFTRDWINHVRSATRKNMFAVAEFWKNDLGAIENYLQKTNWNHSVFDVPLHYNLYNASKSGGNYDMRNIFNGTVVQRHPSHAVTFVDNHDSQPEEALESFVEEWFKPLAYALTLTREQGYPSVFYGDYYGIPTHGVPAMRSKIDPILEARQKYAYGKQNDYLDHHNIIGWTREGNTAHPNSGLATIMSDGAGGSKWMFVGRNKAGQVWSDITGNRTGTVTINADGWGNFSVNGGSVSIWVNK

SEQ ID NO: 23010 - protein, 485 aa, Bacillus sp. 707
HHNGTNGTMMQYFEWYLPNDGNHWNRLNSDASNLKSKGITAVWIPPAWKGASQNDVGYGAYDLYDLGEFNQKGTVRTKYGTRSQLQAAVTSLKNNGIQVYGDVVMNHKGGADATEMVRAVEVNPNNRNQEVTGEYTIEAWTRFDFPGRGNTHSSFKWRWYHFDGVDWDQSRRLNNRIYKFRGHGKAWDWEVDTENGNYDYLMYADIDMDHPEVVNELRNWGVWYTNTLGLDGFRIDAVKHIKYSFTRDWINHVRSATGKNMFAVAEFWKNDLGAIENYLQKTNWNHSVFDVPLHYNLYNASKSGGNYDMRNIFNGTVVQRHPSHAVTFVDNHDSQPEEALESFVEEWFKPLAYALTLTREQGYPSVFYGDYYGIPTHGVPAMRSKIDPILEARQKYAYGKQNDYLDHHNIIGWTREGNTAHPNSGLATIMSDGAGGSKWMFVGRNFAGQVWSDITGNRTGTVTINADGWGNFSVNGGSVSIWVNK

SEQ ID NO: 23011 - protein, 485 aa, Bacillus sp. 707
HHNGTNGTMMQYFEWYLPNDGNHWNRLNSDASNLKSKGITAVWIPPAWKGASQNDVGYGAYDLYDLGEFNQKGTVRTKYGTRSQLQAAVTSLKNNGIQVYGDVVMNHKGGADATEMVRAVEVNPNNRNQEVTGEYTIEAWTRFDFPGRGNTHSSFKWRWYHFDGVDWDQSRRLNNRIYKFRGHGKAWDWEVDTENGNYDYLMYADIDMDHPEVVNELRNWGVWYTNTLGLDGFRIDAVKHIKYSFTRDWINHVRSATGKNMFAVAEFWKNDLGAIENYLQKTNWNHSVFDVPLHYNLYNASKSGGNYDMRNIFNGTVVQRHPSHAVTFVDNHDSQPEEALESFVEEWFKPLAYALTLTREQGYPSVFYGDYYGIPTHGVPAMRSKIDPILEARQKYAYGKQNDYLDHHNIIGWTREGNTAHPNSGLATIMSDGAGGSKWMFVGRNMAGQVWSDITGNRTGTVTINADGWGNFSVNGGSVSIWVNK

SEQ ID NO: 23012 - protein, 483 aa, Bacillus sp.
HHNGTNGTLMQYFEWYLPNDGNHWNRLRSDASNLKDKGISAVWIPPAWKGTSQNDVGYGAYDLYDLGEFNQKGTIRTKYGTRNQLQAAVNALKSNGIQVYGDVVMNHKGGADATEMVKAVEVNPNNRNQEVSGEYTIEAWTKFDFPGRANTHSNFKWRWYHFDGVDWDQSRKLNNRIYKFRTKAWDWEVDTEFGNYDYLMYADIDMDHPEVVNELRNWGVWYTNTLGLDGFRIDAVKHIKYSFTRDWINHVRSAIGKNMFAVAEFWKNDLGAIENYLNKTNWNHSVFDVPLHFNLYYASKSGGNYDMRTIFNGTVVQKHPTHAVTFVDNHDSQPEESLESFVREWFKPLAYALTLTREQGYPSVFYGDYYGIPTHGVPAMKSKIDPILEARQKYAYGRQNDYLDHHNIIGWTREGNTAHPNSGLATIMSDGAGGNKWMFVGRNKAGQVWTDITGNKAGTVTINADGWGNFSVNGGSVSIWVNK

SEQ ID NO: 23013 - protein, 485 aa, Bacillus sp. 707
HHNGTGGTMMQYFEWYLPNDGNHWNRLNSDASNLKSKGITAVWIPPAWKGASQNDVGYGAYDLYDLGEFNQKGTVRTKYGTRSQLQAAVTSLKNNGIQVYGDVVMNHKGGADATEMVRAVEVNPNNRNQEVTGEYTIEAWTRFDFPGRGNTHSSFKWRWYHFDGVDWDQSRRLNNRIYKFRGHGKAWDWEVDTENGNYDYLMYADIDMDHPEVVNELRNWGVWYTNTLGLDGFRIDAVKHIKYSFTRDWINHVRSATGKNMFAVAEFWKNDLGAIENYLQKTNWNHSVFDVPLHYNLYNASKSGGNYDMRNIFNGTVVQRHPSHAVTFVDNHDSQPEEALESFVEEWFKPLAYALTLTREQGYPSVFYGDYYGIPTHGVPAMRSKIDPILEARQKYAYGKQNDYLDHHNIIGWTREGNTAHPNSGLATIMSDGAGGSKWMFVGRNKAGQVWSDITGNRTGTVTINADGWGNFSVNGGSVSIWVNK

SEQ ID NO: 23014 - protein, 485 aa, Bacillus sp. 707
HHNGTNGTMMQYFEWYLPNDGNHWNRLNSDASNLKSKGITAVWIPPAWKGASQNDVGYGAYDLYDLGEFNQKGTVRTKYGTRSQLQAAVTSLKNNGIQVYGDVVMNHKGGADATEMVRAVEVNPNNRNQEVTGEYTIEAWTRFDFPGRGNTHSSFKWRWYHFDGVDWDQSRRLNNRIYKFRGHGKAWDWEVDTENGNYDYLMYADIDMDHPEVVNELRNWGVWYTNTLGLDGFRIDAVKHIKYSFTRDWINHVRSATGKNMFAVAEFWKNDLGAIENYLQKTNWNHSVFDVPLHYNLYNASKSGGNYDMRNIFNGTVVQRHPSHAVTFVDNHDSQPEEALESFVEEWFKPLAYALTLTREQGYPSVFYGDYYGIPTHGVPAMRSKIDPILEARQKYAYGKQNDYLDHHNIIGWTREGNTAHPNSGLATIMSDGAGGSKWMFVGRNKAGQVWSDITGNRTGTVTINADGWGNFSVNGRSVSIWVNK

SEQ ID NO: 23015 - protein, 485 aa, Bacillus sp. 707
HHNGTNGTMMQYFEWYLPNDGNHWNRLNSDASNLKSKGITAVWIPPAWKGASQNDVGYGAYDLYDLGEFNQKGTVRTKYGTRSQLQAAVTSLKNNGIQVYGDVVMNHKGGADATEMVRAVEVNPNNRNQEVTGEYTIEAWTRFDFPGRGNTHSSFKWRWYHFDGVDWDQSRRLNNRIYKFRGHGKAWDWEVDTENGNYDYLMYADIDMDHPEVVNELRNWGVWYTNTLGLDGFRIDAVKHIKYSFTRDWINHVRSATGKNMFAVAEFWKNDLGAIENYLQKTNWNHSVFDVPLHYNLYNASKSGGNYDMRNIFNGTVVQRHPSHAVTFVDNHDSQPEEALESFVEEWFKPLAYALTLTREQGYPSVFYGDYYGIPTHGVPAMRSKIDPILEARQKYAYGKQNDYLDHHNIIGWTRAGNTAHPNSGLATIMSDGAGGSKWMFVGRNKAGQVWSDITGNRTGTVTINADGWGNFSVNGGSVSIWVNK

SEQ ID NO: 23016 - protein, 485 aa, Bacillus sp. 707
HHNGTNGTMMQYFEWYLPNDGNHWNRLNSDASNLKSKGITAVWIPPAWKGASQNDVGYGAYDLYDLGEFNQKGTVRTKYGTRSQLQAAVTSLKNNGIQVYGDVVMNHKGGADATEMVRAVEVNPNNRNQEVTGEYTIEAWTRFDFPGRGNTHSSFKWRWYHFDGVDWDQSRRLNNRIYKFRGHGKAWDWEVDTENGNYDYLMYADIDMDHPEVVNELRNWGVWYTNTLGLDGFRIDAVKHIKYSFTRDWINHVRSATGKNMFAVAEFWKNDLGAIENYLQKTNWNHSVFDVPLHYNLYNASKSGGNYDMRNIFNGTVVQRHPSHAVTFVDNHDSQPEEALESFVEEWFKPLAYALTLTREQGYPSVFYGDYYGIPTHGVPAMRSKIDPILEARQKYAYGKQNDYLDHHNIIGWTREGNTAHPNSGLATIMSDGAGGSKWMFVGRNKAGQVWSDATGNRTGTVTINADGWGNFSVNGGSVSIWVNK

SEQ ID NO: 23017 - protein, 485 aa, Bacillus sp. 707
HHNGTNGTMMQYFEWYLPNDGNHWNRLNSDASNLKSKGITAVWIPPAWKGASQNDVGYGAYDLYDLGEFNQKGTVRTKYGTRSQLQAAVTSLKNNGIQVYGDVVMNHKGGADATEMVRAVEVNPNNRNQEVTGEYTIEAWTRFDFPGRGNTHSSFKWRWYHFDGVDWDQSRRLNNRIYKFRGHGKAWDWEVDTENGNYDYLMYADIDMDHPEVVNELRNWGVWYTNTLGLDGFRIDAVKHIKYSFTRDWINHVRSATGKNMFAVAEFWKNDLGAIENYLQKTNWNHSVFDVPLHYNLYNASKSGGNYDMRNIFNGTVVQRHPSHAVTFVDNHDSQPEEALESFVEEWFKPLAYALTLTREQGYPSVFYGDYYGIPTHGVPAMRSKIDPILEARQKYAYGKQNDYLDHHNIIGWTREGNTAHPNSGLATIMSDGAGGSKWMFVGRNKAGQVWSDITGNRTGTVTINADGWGDFSVNGGSVSIWVNK

SEQ ID NO: 23018 - protein, 485 aa, Bacillus sp. 707
HHNGTNGTMMQYFEWYLPNDGNHWNRLNSDASNLKSKGITAVWIPPAWKGASQNDVGYGAYDLYDLGEFNQKGTVRTKYGTRSQLQAAVTSLKNNGIQVYGDVVMNHKGGADATEMVRAVEVNPNNRNQEVTGEYTIEAWTRFDFPGRGNTHSSFKWRWYHFDGVDWDQSRRLNNRIYKFRGHGKAWDWEVDTENGNYDYLMYADIDMDHPEVVNELRNWGVWYTNTLGLDGFRIDAVKHIKYSFTRDWINHVRSATGKNMFAVAEFWKNDLGAIENYLQKTNWNHSVFDVPLHYNLYHASKSGGNYDMRNIFNGTVVQRHPSHAVTFVDNHDSQPEEALESFVEEWFKPLAYALTLTREQGYPSVFYGDYYGIPTHGVPAMRSKIDPILEARQKYAYGKQNDYLDHHNIIGWTREGNTAHPNSGLATIMSDGAGGSKWMFVGRNKAGQVWSDITGNRTGTVTINADGWGNFSVNGGSVSIWVNK

SEQ ID NO: 23019 - protein, 485 aa, Bacillus sp. 707
HHNGTNGTMMQYFEWYLPNDGNHWNRLNSDASNLKSKGITAVWIPPAWKGASQNDVGYGAYDLYDLGEFNQKGTVRTKYGTRSQLQAAVTSLKNNGIQVYGDVVMNHKGGADATEMVRAVEVNPNNRNQEVTGEYTIEAWTRFDFPGRGNTHSSFKWRWYHFDGVDWDQSRRLNNRIYKFRGHGKAWDWEVDTENGNYDYLMYADIDMDHPEVVNELRNWGVWYTNTLGLDGFRIDAVKHIKYSFTRDWINHVRSATGKNMFAVAEFWKNDLGAIENYLQKTNWNHSVFDVPLHYNLYNASKSGGNYDMRNIFNGTVVQRHPSHAVTFVDNHDSQPEEALESFVEEWFKPLAYALTLTREQGYPSVFYGDYYGIPTHGVPAMRSKIDPILEARRKYAYGKQNDYLDHHNIIGWTREGNTAHPNSGLATIMSDGAGGSKWMFVGRNKAGQVWSDITGNRTGTVTINADGWGNFSVNGGSVSIWVNK

SEQ ID NO: 23020 - protein, 485 aa, Bacillus sp.
HHNGTNGTMMQYFEWYLPNDGNHWNRLRSDASNLKDKGISAVWIPPAWKGASQNDVGYGAYDLYDLGEFNQKGTIRTKYGTRNQLQAAVNALKSNGIQVYGDVVMNHKGGADATEMVRAVEVNPNNRNQEVSGEYTIEAWTKFDFPGRGNTHSNFKWRWYHFDGVDWDQSRKLNNRIYKFRGDGKGWDWEVDTENGNYDYLTYADIDMDHPEVVNELRNWGVWYTNTLGLDGFRIDAVKHIKYSFTRDWINHVRSATGKNMFAVAEFWKNDLGAIENYLNKTNWNHSVFDVPLHYNLYNASKSGGNYDMRQIFNGTVVQRHPMHAVTFVDNHDSQPEEALESFVEEWFKPLAYALTLTREQGYPSVFYGDYYGIPTHGVPAYRSKIDPILEARQKYAYGRQNDYLDHHNIIGWTREGNTAHPNSGLATIMSDGAGGNKWMFVGRNKAGQVWTDITGNRAGTVTINADGWGNFSVNGGSVSIWVNK

SEQ ID NO: 23021 - protein, 485 aa, Bacillus sp. 707
HHNGTNGTMMQYFEWYLPNDGNHWNRLNSDASNLKSKGITAVWIPPAWKGASQNDVGYGAYDLYDLGEFNQKGTVRTKYGTRSQLQAAVTSLKNNGIQVYGDVVMNHKGGADATEMVRAVEVNPNNRNQEVTGEYTIEAWTRFDFPGRGNTHSSFKWRWYHFDGVDWDQSRRLNNRIYKFRGHGKAWDWEVDTENGNYDYLMYADIDMDHCEVVNELRNWGVWYTNTLGLDGFRIDAVKHIKYSFTRDWINHVRSATGKNMFAVAEFWKNDLGAIENYLQKTNWNHSVFDVPLHYNLYNASKSGGNYDMRNIFNGTVVQRHPSHAVTFVDNHDSQPEEALESFVEEWFKPLAYALTLTREQGYPSVFYGDYYGIPTHGVPAMRSKIDPILEARQKYAYGKQNDYLDHHNIIGWTREGNTAHPNSGLATIMSDGAGGSKWMFVGRNKAGQVWSDITGNRTGTVTINADGWGNFSVNGGSVSIWVNK

SEQ ID NO: 23022 - protein, 485 aa, Bacillus sp. 707
HHNGTNGTMMQYFEWYLPNDGNHWNRLNSDASNLKSKGITAVWIPPAWKGASQNDVGYGAYDLYDLGEFNQKGTVRTKYGPRSQLQAAVTSLKNNGIQVYGDVVMNHKGGADATEMVRAVEVNPNNRNQEVTGEYTIEAWTRFDFPGRGNTHSSFKWRWYHFDGVDWDQSRRLNNRIYKFRGHGKAWDWEVDTENGNYDYLMYADIDMDHPEVVNELRNWGVWYTNTLGLDGFRIDAVKHIKYSFTRDWINHVRSATGKNMFAVAEFWKNDLGAIENYLQKTNWNHSVFDVPLHYNLYNASKSGGNYDMRNIFNGTVVQRHPSHAVTFVDNHDSQPEEALESFVEEWFKPLAYALTLTREQGYPSVFYGDYYGIPTHGVPAMRSKIDPILEARQKYAYGKQNDYLDHHNIIGWTREGNTAHPNSGLATIMSDGAGGSKWMFVGRNKAGQVWSDITGNRTGTVTINADGWGNFSVNGGSVSIWVNK

SEQ ID NO: 23023 - protein, 483 aa, Bacillus sp. SP70
HHNGTNGTMMQYFEWYLPNDGNHWNRLNSDASNLKSKGITAVWIPPAWKGASQNDVGYGAYDLYDLGEFNQKGTVRTKYGTRSQLQAAVTSLKNNGIQVYGDVVMNHKGGADATEMVRAVEVNPNNRNQEVTGEYTIEAWTRFDFPGRGNTHSSFKWRWYHFDGVDWDQSRRLNNRIYKFRGKAWDWEVDTENGNYDYLMYADIDMDHPEVVNELRNWGVWYTNTLGLDGFRIDAVKHIKYSFTRDWINHVRSATGKNMFAVAEFWKNDLGAIENYLQKTNWNHSVFDVPLHYNLYNASKSGGNYDMRNIFNGTVVQRHPSHAVTFVDNHDSQPEEALESFVEEWFKPLAYALTLTREQGYPSVFYGDYYGIPTHGVPAMRSKIDPILEARQKYAYGKQNDYLDHHNIIGWTREGNTAHPNSGLATIMSDGAGGSKWMFVGRNKAGQVWSDITGNRTGTVTINADGWGNFSVNGKSVSIWVNK

SEQ ID NO: 23024 - protein, 485 aa, Bacillus sp. 707
HHNGTNGTMMQYFEWYLPNDGNHWNRLNSDASNLKSKGITAVWIPPAWKGASQNDVGYGAYDLYDLGEFNQKGTVRTKYGTRSQLQAAVTSLKNNGIQVYGDVVMNHKGGADATEMVRAVEVNPGNRNQEVTGEYTIEAWTRFDFPGRGNTHSSFKWRWYHFDGVDWDQSRRLNNRIYKFRGHGKAWDWEVDTENGNYDYLMYADIDMDHPEVVNELRNWGVWYTNTLGLDGFRIDAVKHIKYSFTRDWINHVRSATGKNMFAVAEFWKNDLGAIENYLQKTNWNHSVFDVPLHYNLYNASKSGGNYDMRNIFNGTVVQRHPSHAVTFVDNHDSQPEEALESFVEEWFKPLAYALTLTREQGYPSVFYGDYYGIPTHGVPAMRSKIDPILEARQKYAYGKQNDYLDHHNIIGWTREGNTAHPNSGLATIMSDGAGGSKWMFVGRNKAGQVWSDITGNRTGTVTINADGWGNFSVNGGSVSIWVNK

SEQ ID NO: 23025 - protein, 485 aa, Bacillus sp. 707
HHNGTNGTMMQYFEWYLPNDGNHWNRLNSDASNLKSKGITAVWIPPAWKGASQNDVGYGAYDLYDLGEFNQKGTVRTKYGTRSQLQAAVTSLKNNGIQVYGDVVMNHKGGADATEMVRAVEVNPNNRNQEVTGEYTIEAWTRFDFPGRGNTHSSFKWRWYHFDGVDWDQSRRLNMRIYKFRGHGKAWDWEVDTENGNYDYLMYADIDMDHPEVVNELRNWGVWYTNTLGLDGFRIDAVKHIKYSFTRDWINHVRSATGKNMFAVAEFWKNDLGAIENYLQKTNWNHSVFDVPLHYNLYNASKSGGNYDMRNIFNGTVVQRHPSHAVTFVDNHDSQPEEALESFVEEWFKPLAYALTLTREQGYPSVFYGDYYGIPTHGVPAMRSKIDPILEARQKYAYGKQNDYLDHHNIIGWTREGNTAHPNSGLATIMSDGAGGSKWMFVGRNKAGQVWSDITGNRTGTVTINADGWGNFSVNGGSVSIWVNK

SEQ ID NO: 23026 - protein, 485 aa, Bacillus sp. 707
HHNKTNGTMMQYFEWYLPNDGNHWNRLNSDASNLKSKGITAVWIPPAWKGASQNDVGYGAYDLYDLGEFNQKGTVRTKYGTRSQLQAAVTSLKNNGIQVYGDVVMNHKGGADATEMVRAVEVNPNNRNQEVTGEYTIEAWTRFDFPGRGNTHSSFKWRWYHFDGVDWDQSRRLNNRIYKFRGHGKAWDWEVDTENGNYDYLMYADIDMDHPEVVNELRNWGVWYTNTLGLDGFRIDAVKHIKYSFTRDWINHVRSATGKNMFAVAEFWKNDLGAIENYLQKTNWNHSVFDVPLHYNLYNASKSGGNYDMRNIFNGTVVQRHPSHAVTFVDNHDSQPEEALESFVEEWFKPLAYALTLTREQGYPSVFYGDYYGIPTHGVPAMRSKIDPILEARQKYAYGKQNDYLDHHNIIGWTREGNTAHPNSGLATIMSDGAGGSKWMFVGRNKAGQVWSDITGNRTGTVTINADGWGNFSVNGGSVSIWVNK

SEQ ID NO: 23027 - protein, 485 aa, Bacillus sp. 707
HHNGTNGTMMQYFEWYLPNDGNHWNRLNSDASNLKSKGITAVWIPPAWKGASQNDVGYGAYDLYDLGEFNQKGTVRTKYGTRSQLQAAVTSLKMNGIQVYGDVVMNHKGGADATEMVRAVEVNPNNRNQEVTGEYTIEAWTRFDFPGRGNTHSSFKWRWYHFDGVDWDQSRRLNNRIYKFRGHGKAWDWEVDTENGNYDYLMYADIDMDHPEVVNELRNWGVWYTNTLGLDGFRIDAVKHIKYSFTRDWINHVRSATGKNMFAVAEFWKNDLGAIENYLQKTNWNHSVFDVPLHYNLYNASKSGGNYDMRNIFNGTVVQRHPSHAVTFVDNHDSQPEEALESFVEEWFKPLAYALTLTREQGYPSVFYGDYYGIPTHGVPAMRSKIDPILEARQKYAYGKQNDYLDHHNIIGWTREGNTAHPNSGLATIMSDGAGGSKWMFVGRNKAGQVWSDITGNRTGTVTINADGWGNFSVNGGSVSIWVNK

SEQ ID NO: 23028 - protein, 485 aa, Bacillus sp. 707
HHNGTNHTMMQYFEWYLPNDGNHWNRLNSDASNLKSKGITAVWIPPAWKGASQNDVGYGAYDLYDLGEFNQKGTVRTKYGTRSQLQAAVTSLKNNGIQVYGDVVMNHKGGADATEMVRAVEVNPNNRNQEVTGEYTIEAWTRFDFPGRGNTHSSFKWRWYHFDGVDWDQSRRLNNRIYKFRGHGKAWDWEVDTENGNYDYLMYADIDMDHPEVVNELRNWGVWYTNTLGLDGFRIDAVKHIKYSFTRDWINHVRSATGKNMFAVAEFWKNDLGAIENYLQKTNWNHSVFDVPLHYNLYNASKSGGNYDMRNIFNGTVVQRHPSHAVTFVDNHDSQPEEALESFVEEWFKPLAYALTLTREQGYPSVFYGDYYGIPTHGVPAMRSKIDPILEARQKYAYGKQNDYLDHHNIIGWTREGNTAHPNSGLATIMSDGAGGSKWMFVGRNKAGQVWSDITGNRTGTVTINADGWGNFSVNGGSVSIWVNK

SEQ ID NO: 23029 - protein, 485 aa, Bacillus sp. 707
HHNGTNGTMMQYFEWYLPNDGNHWNRLNSDASNLKSKGITAVWIPPAWKGASQNDVGYGAYDLYDLGEFNQKGTVRTKYGTRSQLQAAVTSLKNNGIQVYGDVVMNHKGGADATEMVRAVEVNPNNRNQEVTGEYTIEAWTRFDFPGRGNTHSSFKWRWYHFDGVDWDQSRRLNNRIYKFRGHGKAWDWEVDTENGNYDYLMYADIDMDHPEVVNELRNWGVWYTNTLGLDGFRIDAVKHIKYSFTRDWINHVRSATGKNMFAVAEFWKNDLGAIENYLQKTNWNHSVFDVPLHYNLYNASKSGGNYDMRNIFNGTVVQRHPSHAVTFVDNHDSQPEEALESFVEEWFKPLAYALTLTREQGYPSVFYGDYYGIPTHGVPAMRSKIDPILEARQKYAYGKQNDYLDHHNIIGWTREGNTAHPNSGLATIMSDGAGGSKWMFVGRNKAGQRWSDITGNRTGTVTINADGWGNFSVNGGSVSIWVNK

SEQ ID NO: 23030 - protein, 485 aa, Bacillus sp. 707
HHNGTNGTMMQYFEWYLPNDGNHWNRLNSDASNLKSKGITAVWIPPAWKGASQNDVGYGAYDLYDLGEFNQKGTVRTKYGTRSQLQAAVTSLKNNGIQVYGDVVMNHKGGADATEMVRAVEVNPNNRNQEVTGEYTIEAWTRFDFPGRGNTHSSFKWRWYHFDGVDWDQSRRLNNRIYKFRGHGKAWDWEVDTENGNYDYLMYADIDMDHPEVVNELRNWGVWYTNTLGLDGFRIDAVKHIKYSFTRDWINHVRSATGKNMFAVAEFWKNDLGAIENYLQKTNWNHSVFDVPLHYNLYNASKSGGNYDMRNIFNGTVVQRHPSHAVTFVDNHDSQPEEALESFVEEWFKPLAYALTLTREQGYPSVFYGDYYGIPTHGVPAMRSKIDPILEARQKYAYGKQNDYLDHHNIIGWTREGNTAHPNSGLATIMSDGAGGSKWMFVGRNKAGQVWSDITGNRTGTVTINADGWGNFSVNGGSVSIWMNK

SEQ ID NO: 23031 - protein, 485 aa, Bacillus sp.
HHNGTNGTMMQYFEWYLPNDGNHWNRLNSDASNLKSKGITAVWIPPAWKGASQNDVGYGAYDLYDLGEFNQKGTVRTKYGTRSQLQAAVTSLKNNGIQVYGDVVMNHKGGADATEMVRAVEVNPNNRNQEVTGEYTIEAWTRFDFPGRGNTHSSFKWRWYHFDGVDWDQSRRLNNRIYKFRGHGKAWDWEVDTENGNYDYLMYADYDMDHPEVVNEVRNWGVWYTNTLGLDGFRIDAVKHIKYSFTRDWINHVRSATGKNMFAVAEFWKNDLGAIENYLQKTNWNHSVFDVPLHYNLYNASKSGGNYDMRNIFNGTVVQRHPSHAVTFVDNHDSQPEEALESFVEEWFKPLAYALTLTREQGYPSVFYGDYYGIPTHGVPAMRSKIDPILEARQKYAYGKQNDYLDHHNIIGWTREGNTAHPNSGLATIMSDGAGGSKWMFVGRNKAGQVWSDITGNRTGTVTINADGWGNFSVNGGSVSIWVNK

SEQ ID NO: 23032 - protein, 485 aa, Bacillus sp. 707
HHNGTNGTMMQYFEWYLPNDGNHWNRLNSDASNLKSKGITAVWIPPAWKGASQNDVGYGAYDLYDLGEFNQKGTVRTKYGTRSQLQAAVTSLKNNGIQVYGDVVMNHKGGADATEMVRAVEVNPNNRNQEVTGEYTIEAWTRFDFPGRGNTHSSFKWRWYHFDGVDWDQSRRLNNRIYKFRGHGKAWDWEVDTENGNYDYLMYADIDMDHPEVVNELRNWGVWYTNTLGLDGFRIDAVKHIKYSFTRDWINHVRSATGKNMFAVAEFWKNDLGAIENYLQKTNWNHSVFDVPLHYNLYNASKSGGNYDMRNIFNGTVVQRHPSHAVTFVDNHDSQPEEALESFVEEWFKPLAYALTLTREQGYPSVFYGDYYGIITHGVPAMRSKIDPILEARQKYAYGKQNDYLDHHNIIGWTREGNTAHPNSGLATIMSDGAGGSKWMFVGRNKAGQVWSDITGNRTGTVTINADGWGNFSVNGGSVSIWVNK

SEQ ID NO: 23033 - protein, 485 aa, Bacillus sp. 707
HHNGTNGTMMQYFEWYLPNDGNHWNRLNSDASNLKSKGITAVWIPPAWKGASQNDVGYGAYDLYDLGEFNQKGTVRTKYGTRSQLQAAVTSLKNNGIQVYGDVVMNHKGGADATEMVRAVEVNPNNRNQEVTGEYTIEAWTRFDFPGRGNTHSSFKWRWYHFDGVDWDQSRRLNNRIYKFRGHGKAWDWEVDTENGNYDYLMYADIDMDHPEVVNELRNWGVWYTNTLGLDGFRIDAVKHIKYSFTRDWINHVRSATGKNMFAVAEFWKNDLGAIENYLQKTNWNHSVFDVPLHYNLYNASKSGGNYDMRNIFNGTVVQRHPSHAVTFVDNHDSQPEEALESFVEEWFKPLAYALTLTRRQGYPSVFYGDYYGIPTHGVPAMRSKIDPILEARQKYAYGKQNDYLDHHNIIGWTREGNTAHPNSGLATIMSDGAGGSKWMFVGRNKAGQVWSDITGNRTGTVTINADGWGNFSVNGGSVSIWVNK

SEQ ID NO: 23034 - protein, 485 aa, Bacillus sp. 707
HHNGTNGTMMQYFEWYLPNDGNHWNRLNSDASNLKSKGITAVWIPPAWKGASQNDVGYGAYDLYDLGEFNQKGTVRTKYGTRSQLQAAVTSLKNNGIQVYGDVVMNHKGGADATEMVRAVEVNPNNRNQEVTGEYTIEAWTRFDFPGRGNTHSSFKWRWYHFDGVDWDQSRRLNNRIYKFRGHGKAWDWEVDTENGNYDYLMYADIDMDHPEVVNELRNWGVWYTNTLGLDGFRIDAVKHIKYSFTRDWINHVRSATGKNMFAVAEFWKNDLGAIENYLQKTNWNHSVFDVPLHYNLYNASKSGGNYDMRNIFNGTVVQRHPSHAVTFVDNHDSQPEEALESFVEEWFKPLAYALTLTREQGYPSVFYGDYYGIPTHGVPAMRSKIDHILEARQKYAYGKQNDYLDHHNIIGWTREGNTAHPNSGLATIMSDGAGGSKWMFVGRNKAGQVWSDITGNRTGTVTINADGWGNFSVNGGSVSIWVNK

SEQ ID NO: 23035 - protein, 485 aa, Bacillus sp. 707
HHNGTNGTMMQYFEWYLPNDGNHWNRLNSDASVLKSKGITAVWIPPAWKGASQNDVGYGAYDLYDLGEFNQKGTVRTKYGTRSQLQAAVTSLKNNGIQVYGDVVMNHKGGADATEMVRAVEVNPNNRNQEVTGEYTIEAWTRFDFPGRGNTHSSFKWRWYHFDGVDWDQSRRLNNRIYKFRGHGKAWDWEVDTENGNYDYLMYADIDMDHPEVVNELRNWGVWYTNTLGLDGFRIDAVKHIKYSFTRDWINHVRSATGKNMFAVAEFWKNDLGAIENYLQKTNWNHSVFDVPLHYNLYNASKSGGNYDMRNIFNGTVVQRHPSHAVTFVDNHDSQPEEALESFVEEWFKPLAYALTLTREQGYPSVFYGDYYGIPTHGVPAMRSKIDPILEARQKYAYGKQNDYLDHHNIIGWTREGNTAHPNSGLATIMSDGAGGSKWMFVGRNKAGQVWSDITGNRTGTVTINADGWGNFSVNGGSVSIWVNK

SEQ ID NO: 23036 - protein, 485 aa, Bacillus sp. 707
HHNGTNGTMMQYFEWYLPNDGNHWNRLNSDASNLKSKGITAVWIPPAWKGASQNDVGYGAYDLYDLGEFNQKGTVRTKYGTRSQLQAAVTSLKNNGIQVYGDVVMNHKGGADATEMVRAVEVNPNNRNQEVTGEYTIEAWTRFDFPGRGNTHSSFKWRWYHFDGVDWDGSRRLNNRIYKFRGHGKAWDWEVDTENGNYDYLMYADIDMDHPEVVNELRNWGVWYTNTLGLDGFRIDAVKHIKYSFTRDWINHVRSATGKNMFAVAEFWKNDLGAIENYLQKTNWNHSVFDVPLHYNLYNASKSGGNYDMRNIFNGTVVQRHPSHAVTFVDNHDSQPEEALESFVEEWFKPLAYALTLTREQGYPSVFYGDYYGIPTHGVPAMRSKIDPILEARQKYAYGKQNDYLDHHNIIGWTREGNTAHPNSGLATIMSDGAGGSKWMFVGRNKAGQVWSDITGNRTGTVTINADGWGNFSVNGGSVSIWVNK

SEQ ID NO: 23037 - protein, 485 aa, Bacillus sp. 707
HHNGTNGTMMQYFEWYLPNDGNHWNRLNSDASNLKSKGITAVWIPPAWKGASQNDVGYGAYDLYDLGEFNQKGTVRTKYGTRSQLQAAVTSLKNNGIQVYGDVVMNHKGGADATEMVRAVEVNPNNRNQEVTGEYTIEAWTRFDFPGRGNTHSSFKWRWYHFDGVDWDQSRRLNNRIYKFRGHGKAWDWEVDTENGNYDYLMYADIDMDHPEVVNELRNWGVWYTNTLGLDGFRIDAVKHIKYSFTRDWINHVRSATGKNMDAVAEFWKNDLGAIENYLQKTNWNHSVFDVPLHYNLYNASKSGGNYDMRNIFNGTVVQRHPSHAVTFVDNHDSQPEEALESFVEEWFKPLAYALTLTREQGYPSVFYGDYYGIPTHGVPAMRSKIDPILEARQKYAYGKQNDYLDHHNIIGWTREGNTAHPNSGLATIMSDGAGGSKWMFVGRNKAGQVWSDITGNRTGTVTINADGWGNFSVNGGSVSIWVNK

SEQ ID NO: 23038 - protein, 485 aa, Bacillus sp. 707
HHNGTNGTMMQYFEWYLPNDGNHWNRLNSDASNLKSKGITAVWIPPAWKGASQNDVGYGAYDLYDLGEFNQKGTVRTKYGTRSQLQAAVTSLKNNGIQVYGDVVMNHKGGADATEMVRAVEVNPNNRNQEVTGEYTIEAWTRFDFPGRGNTHSSFKWRWYHFDGVDWDQSRRLNNRIYKFRGHGKAWDWEVDTENGNYDYLMYADIDMDHPEVVNELRNWGVWYTNTLGLDGFRIDAVKHIKYSFTRDWINHVRSATGKNMFAVAEFWKNDLYAIENYLQKTNWNHSVFDVPLHYNLYNASKSGGNYDMRNIFNGTVVQRHPSHAVTFVDNHDSQPEEALESFVEEWFKPLAYALTLTREQGYPSVFYGDYYGIPTHGVPAMRSKIDPILEARQKYAYGKQNDYLDHHNIIGWTREGNTAHPNSGLATIMSDGAGGSKWMFVGRNKAGQVWSDITGNRTGTVTINADGWGNFSVNGGSVSIWVNK

SEQ ID NO: 23039 - protein, 485 aa, Bacillus sp. 707
HHNGTNGTMMQYFEWYLPNDGNHWNRLNSDASNLKSKGITAVWIPPAWKGASQNDVGYGAYDLYDLGEFNQKGTVRTKYGTRSQLQAAVTSLKNNGIQVYGDVVMNHKGGADATEMVRAVEVNPNNRNQEVTGEYTIEAWTRFDFPGRGNTHSSFKWRWYHFDGVDWDQSRRLNNRIYKFRGHGKAWDWEVDTENGNYDYLMYADIDMDHPEVVNELRNWGVWYTNTLGLDGFRIDAVKHIKYSFTRDWINHVRSATGKNMFAVAEFWKNDLGAIENYLQKTNWNHSVFDVPLHYNLYNASKSGGNYDMRNIFNGTVVQRHPSHAVTFVDNHDSQPEEALESFVEGWFKPLAYALTLTREQGYPSVFYGDYYGIPTHGVPAMRSKIDPILEARQKYAYGKQNDYLDHHNIIGWTREGNTAHPNSGLATIMSDGAGGSKWMFVGRNKAGQVWSDITGNRTGTVTINADGWGNFSVNGGSVSIWVNK

SEQ ID NO: 23040 - protein, 485 aa, Bacillus sp. 707
HHNGTNGTMMQYFEWYLPNDGNHWNRLNSDASNLKSKGITAVWIPPAWKGASQNDVGYGAYDLYDLGEFNQKGTVRTKYGTRSQLQAAVTSLKNNGIQVYGDVVMNHKGGADATEMVRAVEVNPNNRNQEVTGEYTIEAWTRFDFPGRGNTHSSFKWRWYHFDGVDWDQSRRLNNRIYKFRGHGKAWDWEVDTENGNYDYLMYADIDMDHPEVVNELRNWGVWYTNTLGLDGFRIDAVKHIKYSFTRDWINHVRSATGKNMFAVAEFWKNDLGAIENYLQKTNWNHSVFDVPLHYNLYNASKSGGNYDMRNIFNGTVVQRHPSHAVTFVDNHDSQPEEALESFVEEWFKPLAYALTLTREQGYPSVFYGDYYGIPTHGVPAMRSKIDPQLEARQKYAYGKQNDYLDHHNIIGWTREGNTAHPNSGLATIMSDGAGGSKWMFVGRNKAGQVWSDITGNRTGTVTINADGWGNFSVNGGSVSIWVNK

SEQ ID NO: 23041 - protein, 485 aa, Bacillus sp. 707
HHNGTNGTMMQYFEWYLPNDGNHWNRLNSDASNLKSKGITAVWIPPAWKGASQNDVGYGAYDLYDLGEFNQKGTVRTKYGTRSQLQAAVTSLKNNGIQVYGDVVMNHKGGADATEMVRAVEVNPNNRNQEVTGEYTIEAWTRFDFPGRGNTHSSFKWRWYHFDGVDWDQSRRLNNRIYKFRGHGKAWDWEVDTENGNYDYLMYADIDMDHPEVVNELRNWGVWYTNTLGLDGFRIDAVKHIKYSFTRDWINHVRSATGKNMFAVAEFWKNDLGAIENYLQKTNWNFSVFDVPLHYNLYNASKSGGNYDMRNIFNGTVVQRHPSHAVTFVDNHDSQPEEALESFVEEWFKPLAYALTLTREQGYPSVFYGDYYGIPTHGVPAMRSKIDPILEARQKYAYGKQNDYLDHHNIIGWTREGNTAHPNSGLATIMSDGAGGSKWMFVGRNKAGQVWSDITGNRTGTVTINADGWGNFSVNGGSVSIWVNK

SEQ ID NO: 23042 - protein, 485 aa, Bacillus sp. 707
HHNGTNGTMMQYFEWYLPNDGNHWNRLNSDASNLKSKGITAVWIPPAWKGASQNDVGYGAYDLYDLGEFNQKETVRTKYGTRSQLQAAVTSLKNNGIQVYGDVVMNHKGGADATEMVRAVEVNPNNRNQEVTGEYTIEAWTRFDFPGRGNTHSSFKWRWYHFDGVDWDQSRRLNNRIYKFRGHGKAWDWEVDTENGNYDYLMYADIDMDHPEVVNELRNWGVWYTNTLGLDGFRIDAVKHIKYSFTRDWINHVRSATGKNMFAVAEFWKNDLGAIENYLQKTNWNHSVFDVPLHYNLYNASKSGGNYDMRNIFNGTVVQRHPSHAVTFVDNHDSQPEEALESFVEEWFKPLAYALTLTREQGYPSVFYGDYYGIPTHGVPAMRSKIDPILEARQKYAYGKQNDYLDHHNIIGWTREGNTAHPNSGLATIMSDGAGGSKWMFVGRNKAGQVWSDITGNRTGTVTINADGWGNFSVNGGSVSIWVNK

SEQ ID NO: 23043 - protein, 485 aa, Bacillus sp. 707
HHNGTNGTMMQYFEWYLPNDGNHWNRLNSDASNLKSKGITAVWIPPAWKGASQNDVGYGAYDLYDLGEFNQKGTVRTKYGTRSQLQAAVTSLKNNGIQVYGDVVMNHKGGADATEMVRAVEVNPNNRNQEVTGEYTIEAWTRFDFPGRGNTHSSFKWRWYHFDGVDWDQSRRLNNRIYKFRGHGKAWDWEVDTENGNYDYLMYADIDMDHPEVVNELRNWGVWYTNTLGLDGFRIDAVKHIKYSFTRDWINHVRSATGKNMFAVAEFWKNDLGAIENYLQKTNWNHSVFDVPLHYNLYNASKSGGNYDMRNIFNGTVVQRHPSHAVTFVDNHDSQPEEALESFVEEWFKPLAYALTLTREQGYPSVFYGDYYGIPTHGVPAMRSKIDPILEARQKYAYGKQNDYLDHHNIIGWTREGNTAHPNSGLATIMSDGAGGSKWMFVGRNYAGQVWSDITGNRTGTVTINADGWGNFSVNGGSVSIWVNK

SEQ ID NO: 23044 - protein, 485 aa, Bacillus sp. 707
HHNGTNGTMMQYFEWYLPNDGNHWNRLNSDASNLKSKGITAVWIPPAWKGASQNDVGYGAYDLYDLGEFNQKGTVRTKYGTRSQLQAAVTSLKNNGIQVYGDVVMNHKGGADATEMVRAVEVNPNNRNQEVTGEYTIEAWTRFDFPGRGNTHSSFKWRWYHFDGVDWDQSRRLNNRIYKFRGHGKAWDWEVDTENGNYDYLMYADIDMDHPEVVNELRNWGVWYTNTLGLDGFRIDAVKHIKYSFTRDWINHVRSATGKNMFAVAEFWKNDLGAIENYLQKTNWNHSVFDVPLHYNLYNASKSGGNYDMRNIFNGTVVQRHPSHAVTFVDNHDSQPEEALESFVEEWFKPLAYALTLTREQGYPSVFYGDYYGIPTHGVPAMRSKIDPILEARQKYAYGKQNDYLDHHNIIGWTREGNNAHPNSGLATIMSDGAGGSKWMFVGRNKAGQVWSDITGNRTGTVTINADGWGNFSVNGGSVSIWVNK

SEQ ID NO: 23045 - protein, 485 aa, Bacillus sp. 707
HHNGTNGTMMQYFEWYLPNDGNHWNRLNSDASNLKSKGITAVWIPPAWKGASQNDVGYGAYDLYDLGEFNQKGTVRTKYGTRSQLQAAVTSLKNNGIQVYGDVVMNHKGGADATEMVRAVEVNPNNRNQEVTGEYTIEAWTRFDFPGRGNTHSSFKWRWYHFDGVDWDQSRRLNNRIYKFRGHGKAWDWEVDTENGNYDYLMYADIDMDHPEVVNELRNWGVWYTNTLGLDGFRIDAVKHIKYSFTRDWINHVRSATGKNMFAVAEFWKNDLGAIENYLQKTNWNHSVFDVPLHYNLYNASKSGGNYDMRNIFNGTVVQRHPSHAVTFVDNHDSQPEEALESFVEEWFKPLAYALTLTREQGYPSVFYGDYYGIPTHGVPAMRSKIDPILWARQKYAYGKQNDYLDHHNIIGWTREGNTAHPNSGLATIMSDGAGGSKWMFVGRNKAGQVWSDITGNRTGTVTINADGWGNFSVNGGSVSIWVNK

SEQ ID NO: 23046 - protein, 485 aa, Bacillus sp. 707
HHNGTNGTMMQYFEWYLPNDGNHWNRLNSDASNLKSKGITAVWIPPAWKGASQNDVGYGAYDLYDLGEFNQKGTVRTKYGTRSQLQAAVTSLKNNGIQVYGDVVMNHKGGADATEMVRAVEVNPNNRNQEVTGEYTIEAWTRFDFPGRGNTHSSFKWRWYHFDGVDWDQSRRLNNRIYKFRGHGKAWDWEVDTENGNYDYLMYADIDMDHPEVVNELRNWGVWYTNTLGLDGFRIDAVKHIKYSFTRDWINHVRSATGKNMFAVAEFWKNDLGAIENYLQKTNWNHSVFDVPLHYNLYSASKSGGNYDMRNIFNGTVVQRHPSHAVTFVDNHDSQPEEALESFVEEWFKPLAYALTLTREQGYPSVFYGDYYGIPTHGVPAMRSKIDPILEARQKYAYGKQNDYLDHHNIIGWTREGNTAHPNSGLATIMSDGAGGSKWMFVGRNKAGQVWSDITGNRTGTVTINADGWGNFSVNGGSVSIWVNK

SEQ ID NO: 23047 - protein, 485 aa, Bacillus sp. 707
HHNGTNGTMMQYFEWYLPNDGNHWNRLNSDASNLKSKGITAVWIPPAWKGASQNDVGYGAYDLYDLGEFNQKGTVRTKYGTRSQLQAAVTSLKNNGIQVYGDVVMNHKGGADATEMVRAVEVNPNNRNQEVTGEYTIEAWTRFDFPGRGNTHSSFKWRWYHFDGVDWDQSRRLNNRIYKFRGHGKAWDWEVDTENGNYDYLMYADIDMDHPEVVNELRNWGVWYTNTLGLDGFRIDAVKHIKYSFTRDWINHVRSATGKNMFAVAEFWKNDLGAIENYLQKTNWNHSVFDVPLHYNLYNASKSGGNYDMRNIFNGTVVQRHPSHAVTFVDNHDSQPEEALESFVEEWFKPLAYALTLTREQGYPSVFYGDYYGIPTHGVPAMRSKIDPILEARQKYAYGKQNDYLDHHNIIGWTREGNTAHPNSGLATIMSDGAGGSKWMFVGRNKAGQVWSDITGNRTGTVTINADGWGNFSVNGQSVSIWVNK

SEQ ID NO: 23048 - protein, 485 aa, Bacillus sp. 707
HHNGTNGTMMQYFEWYLPNDGNHWNRLNSDASNLKSKGITAVWIPPAWKGASQNDVGYGAYDLYDLGEFNQKGTVRTKYGTRSQLQAAVTSLKNNGIQVYGDVVMNHKGGADATEMVRAVEVNPNNRNQEVTGEYTIEAWTRFDFPGRGNTHSSFKWRWYHFDGVDWDQSRRLNNRIYKFRGHGKAWDWEVDTENGNYDYLMYADIDMDHPEVVNELRNWGVWYTNTLGLDGFRIDAVKHIKYSFTRDWINHVRSATGKNMFAVAEFWKNDLGAIENYLQKTNWNHSVFDVPLHYNLYNASKSGGNYDMRNIFNGTVVQRHPSHAVTFVDNHDSQPEEALESFVEEWFKPLAYALTLTREQGYPSVFYGDYYGIPTHGVPAMRSKIDPILEARQKYAYGKQNDYLDHHNIIGWTREGNTAHPDSGLATIMSDGAGGSKWMFVGRNKAGQVWSDITGNRTGTVTINADGWGNFSVNGGSVSIWVNK

SEQ ID NO: 23049 - protein, 485 aa, Bacillus sp. 707
HHNGTNGTMMQYFEWYLPNDGNHWNRLNSDASNLKSKGITAVWIPPAWKGASQNDVGYGAYDLYDLGEFNQKGTVRTKYGTRSQLQAAVTSLKNNGIQVYGDVVMNHKGGADATEMVRAVEVNPNNRNQEVTGEYTIEAWTRFDFPGRGNTHSSFKWRWYHFDGVDWDQSRRLNNRIYKFRGHGKAWDWEVDTENGNYDYLMYADIDMDHPEVVNELRNWGVWYTNTLGLDGFRIDAVKHIKYSFTRDWINHVRSATGKNMFAVAEFWKNDLGAIENYLQKTNWNHSVFDVPLHYNLYNASKSGGNYDMRNIFNGTVVQRHPSHAVTFVDNHDSQPEEALESFVEEWFKPLAYALTLTREQGYPSVFYGDYYGIPTHGVPAMRSKIDPILEARQKYAYGKQNDYLDHHNIIGWTRKGNTAHPNSGLATIMSDGAGGSKWMFVGRNKAGQVWSDITGNRTGTVTINADGWGNFSVNGGSVSIWVNK

SEQ ID NO: 23050 - protein, 485 aa, Bacillus sp. 707
HHNGTNGTMMQYFEWYLPNDGNHWNRLNSDASNLKSKGITAVWIPPAWKGASQNDVGYGAYDLYDLGEFNQKGTVRTKYGTRSQLQAAVTSLKNNGIQVYGDVVMNHKGGADATEMVRAVEVNPNNRNQEVTGEYTIEAWTRFDFPGRGNTHSSFKWRWYHFDGVDWDQSRRLNNRIYKFMGHGKAWDWEVDTENGNYDYLMYADIDMDHPEVVNELRNWGVWYTNTLGLDGFRIDAVKHIKYSFTRDWINHVRSATGKNMFAVAEFWKNDLGAIENYLQKTNWNHSVFDVPLHYNLYNASKSGGNYDMRNIFNGTVVQRHPSHAVTFVDNHDSQPEEALESFVEEWFKPLAYALTLTREQGYPSVFYGDYYGIPTHGVPAMRSKIDPILEARQKYAYGKQNDYLDHHNIIGWTREGNTAHPNSGLATIMSDGAGGSKWMFVGRNKAGQVWSDITGNRTGTVTINADGWGNFSVNGGSVSIWVNK

SEQ ID NO: 23051 - protein, 485 aa, Bacillus sp. 707
HHNGTNGTMMQYFEWYLPNDGNHWNRLNSDASNLKSKGITAVWIPPAWKGASQNDVGYGAYDLYDLGEFNQKGTVRTKYGTRSQLQAAVTSLKNNGIQVYGDVVMNHKGGADATEMVRAVEVNPNNRNQEVTGEYTIEAWTRFDFPGRGNTHSSFKWRWYHFDGVDWDQSRRLNNRIYKFRGHGKAWDWEVDTENGNYDYLMYADIDMDHPEVVNELRNWGVWYTNTLGLDGFRIDAVKHIKYSFTRDWINHVRSATGKNMFAVAEFWKNDLGAIENYLQKTNWNHSVFDVPLHYNLYNASKSGGNYDMRNIFIGTVVQRHPSHAVTFVDNHDSQPEEALESFVEEWFKPLAYALTLTREQGYPSVFYGDYYGIPTHGVPAMRSKIDPILEARQKYAYGKQNDYLDHHNIIGWTREGNTAHPNSGLATIMSDGAGGSKWMFVGRNKAGQVWSDITGNRTGTVTINADGWGNFSVNGGSVSIWVNK

SEQ ID NO: 23052 - protein, 485 aa, Bacillus sp. 707
HHNGTNGTMMQYFEWYLPNDGNHWNRLNSDASNLKSKGITAVWIPPAWKGASQNDVGYGAYDLYDLGEFNQKGTVRTKYGTRSQLQAAVTSLKNNGIQVYGDVVMNHKGGADATEMVRAVEVNPNNRNQEVTGEYTIEAWTRFDFPGRGNTHSSFKWRWYHFDGVDWDQSRRLNNRIYKFRGHGKAWDWEVDTENGNYDYLMYADIDMDHPEVVNELRNWGVWYTNTLGLDGFRIDAVKHIKYSFTRDWINHVRSATGKNMFAVAEFWKNDLGAIENYLQKTNWNHSVFDVPLHYNLYNASKSGGNYDMRNIFNGTVVQRHPSHAVTFVDNHDSQPEEALESFVEEWFKPLAYALTLTREQGYPSVFYGDYYGIPTHGVPAMRSKIDPILEARQKYAYGKQNDYLDHHNIIGWTREGNTAHPNVGLATIMSDGAGGSKWMFVGRNKAGQVWSDITGNRTGTVTINADGWGNFSVNGGSVSIWVNK

SEQ ID NO: 23053 - protein, 485 aa, Bacillus sp. 707
HHNGTNGTMMQYFEWYLPNDGNHWNRLNSDASNLKSKGITAVWIPPAWKGASQNDVGYGAYDLYDLGEFNQKGTVRTKYGTRSQLQAAVTSLKNNGIQVYGDVVMNHKGGADATEMVRAVEVNPNNRNQEVTGEYTIEAWTRFDFPGRGNTHSSFKWRWYHFDGVDWDQSRRLNNRIYKFRGHGKAWDWEVDTENGNYDYLMYADIDMDHPEVVNELRNWGVWYTNTLGLDGARIDAVKHIKYSFTRDWINHVRSATGKNMFAVAEFWKNDLGAIENYLQKTNWNHSVFDVPLHYNLYNASKSGGNYDMRNIFNGTVVQRHPSHAVTFVDNHDSQPEEALESFVEEWFKPLAYALTLTREQGYPSVFYGDYYGIPTHGVPAMRSKIDPILEARQKYAYGKQNDYLDHHNIIGWTREGNTAHPNSGLATIMSDGAGGSKWMFVGRNKAGQVWSDITGNRTGTVTINADGWGNFSVNGGSVSIWVNK

SEQ ID NO: 23054 - protein, 485 aa, Bacillus sp. 707
HHNGTNGTMMQYFEWYLPNDGNHWNRLNSDASNLKSKGITAVWIPPAWKGASQNDVGYGAYDLYDLGEFNQKGTVRTKYGTRSQLQAAVTSLKNNGIQVYGDVVMNHKGGADATEMVRAVEVNPNNRNQEVTGEYTIEAWTRFDFPGRGNTHSSFKWRWYHFDGVDWDQSRRLNNRIYKFRGHGKAWDWEVDTENGNYDYLMYADIDMDHPEVVNELRNWGVWYTNTLGLDGFRIDAVKHIKYSFTRDWINHVRSATPKNMFAVAEFWKNDLGAIENYLQKTNWNHSVFDVPLHYNLYNASKSGGNYDMRNIFNGTVVQRHPSHAVTFVDNHDSQPEEALESFVEEWFKPLAYALTLTREQGYPSVFYGDYYGIPTHGVPAMRSKIDPILEARQKYAYGKQNDYLDHHNIIGWTREGNTAHPNSGLATIMSDGAGGSKWMFVGRNKAGQVWSDITGNRTGTVTINADGWGNFSVNGGSVSIWVNK

SEQ ID NO: 23055 - protein, 485 aa, Bacillus sp. 707
HHNGTNGTMMQYFEWYLPNDGNHWNRLNSDASNLKSKGITAVWIPPAWKGASQNDVGYGAYDLYDLGEFNQKGTVRTKYGTRSQLQAAVTSLKNNGIQVYGDVVMNHKGGADATEMVRAVEVNPNNRNQEVTGEYTIEAWTRFDFPGRGNTHSSFKWRWYHFDGVDWDQSRRLNNRIYKFRGHGKAWDWEVDTENGNYDYLMYADIDMDHPEVVQELRNWGVWYTNTLGLDGFRIDAVKHIKYSFTRDWINHVRSATGKNMFAVAEFWKNDLGAIENYLQKTNWNHSVFDVPLHYNLYNASKSGGNYDMRNIFNGTVVQRHPSHAVTFVDNHDSQPEEALESFVEEWFKPLAYALTLTREQGYPSVFYGDYYGIPTHGVPAMRSKIDPILEARQKYAYGKQNDYLDHHNIIGWTREGNTAHPNSGLATIMSDGAGGSKWMFVGRNKAGQVWSDITGNRTGTVTINADGWGNFSVNGGSVSIWVNK

SEQ ID NO: 23056 - protein, 485 aa, Bacillus sp. 707
HHNGTNGTMMQYFEWYLPNDGNHWNRLNSDASNLKSKGITAVWIPPAWKGASQNDVGYGAYDLYDLGEFNQKGTVRTKYGTRSQLQAAVTSLKNNGIQVYGDVVMNHKGGADATEMVRAVEVNPNNRNQEVTGEYTIEAWTRFDFPGRGNTHSSFKWRWYHFDGVDWDQSRRLNNRIYKFRGHGKAWDWEVDTENGNYDYLMYADIDMDHPEVVNELRNWGVWYTNTLGLDGFRIDAVKHIKYSFTRDWINHVRSATGKNMFAVAEFWKNDLGAIENYLQKTNWNHSVFDVPLHYNLYNASKSGGNYDMRNIFNGTVVQRHPSHAVTFVDNHDSQPEEALESFVEEWFKPLAYALTLTREQGYPSVFYGDYYGIPTHGVPAMRSKIDPILEARQKYAYGKQNDYLDHHNIIGWTREGNTAHPNCGLATIMSDGAGGSKWMFVGRNKAGQVWSDITGNRTGTVTINADGWGNFSVNGGSVSIWVNK

SEQ ID NO: 23057 - protein, 485 aa, Bacillus sp. 707
HHNGTNGTMMQYFEWYLPNDGNHWNRLNSDASNLKSKGITAVWIPPAWKGASQNDVGYGAYDLYDLGEFNQKGTVRTKYGTRSQLQAAVTSLKNNGIQVYGDVVMNHKGGADATEMVRAVEVNPNNRNQEVTGEYTIEAWTRFDFPGRGNTHSSFKWRWYHFDGVDWDQSRRLNNRIYKFRGHGKAWDWEVDTENGNYDYLMYADIDMDHPEVVNELRNWGVWYTNTLGLDGFRIDAVKHIKYSFTRDWINHVRSATGKNMFAVAEFWKNDLGAIENYLQKTNWNHSVFDVPLHYNLYNASKSGGNYDMRNIFNGTVVNRHPSHAVTFVDNHDSQPEEALESFVEEWFKPLAYALTLTREQGYPSVFYGDYYGIPTHGVPAMRSKIDPILEARQKYAYGKQNDYLDHHNIIGWTREGNTAHPNSGLATIMSDGAGGSKWMFVGRNKAGQVWSDITGNRTGTVTINADGWGNFSVNGGSVSIWVNK

SEQ ID NO: 23058 - protein, 485 aa, Bacillus sp. 707
HHNSTNGTMMQYFEWYLPNDGNHWNRLNSDASNLKSKGITAVWIPPAWKGASQNDVGYGAYDLYDLGEFNQKGTVRTKYGTRSQLQAAVTSLKNNGIQVYGDVVMNHKGGADATEMVRAVEVNPNNRNQEVTGEYTIEAWTRFDFPGRGNTHSSFKWRWYHFDGVDWDQSRRLNNRIYKFRGHGKAWDWEVDTENGNYDYLMYADIDMDHPEVVNELRNWGVWYTNTLGLDGFRIDAVKHIKYSFTRDWINHVRSATGKNMFAVAEFWKNDLGAIENYLQKTNWNHSVFDVPLHYNLYNASKSGGNYDMRNIFNGTVVQRHPSHAVTFVDNHDSQPEEALESFVEEWFKPLAYALTLTREQGYPSVFYGDYYGIPTHGVPAMRSKIDPILEARQKYAYGKQNDYLDHHNIIGWTREGNTAHPNSGLATIMSDGAGGSKWMFVGRNKAGQVWSDITGNRTGTVTINADGWGNFSVNGGSVSIWVNK

SEQ ID NO: 23059 - protein, 485 aa, Bacillus sp. 707
HHNGTNGTMMQYFEWYLPNDGNHWNRLNSDASNLKSKGITAVWIPPAWKGASQNDVGYGAYDLYDLGEFNQKDTVRTKYGTRSQLQAAVTSLKNNGIQVYGDVVMNHKGGADATEMVRAVEVNPNNRNQEVTGEYTIEAWTRFDFPGRGNTHSSFKWRWYHFDGVDWDQSRRLNNRIYKFRGHGKAWDWEVDTENGNYDYLMYADIDMDHPEVVNELRNWGVWYTNTLGLDGFRIDAVKHIKYSFTRDWINHVRSATGKNMFAVAEFWKNDLGAIENYLQKTNWNHSVFDVPLHYNLYNASKSGGNYDMRNIFNGTVVQRHPSHAVTFVDNHDSQPEEALESFVEEWFKPLAYALTLTREQGYPSVFYGDYYGIPTHGVPAMRSKIDPILEARQKYAYGKQNDYLDHHNIIGWTREGNTAHPNSGLATIMSDGAGGSKWMFVGRNKAGQVWSDITGNRTGTVTINADGWGNFSVNGGSVSIWVNK

SEQ ID NO: 23060 - protein, 485 aa, Bacillus sp.
HHNGTNGTMMQYFEWYLPNDGNHWNRLNSDASNLKSKGITAVWIPPAWKGASQNDVGYGAYDLYDLGEFNQKGTVRTKYGTRSQLQAAVTSLKNNGIQVYGDVVMNHKGGADATEMVRAVEVNPNNRNQEVTGEYTIEAWTRFDFPGRGNTHSSFKWRWYHFDGVDWDQSRRLNNRIYKFRVHGKKWDWEVDTENGNYDYLMYADIDMDHPEVVNELRNWGVWYTNTLGLDGFRIDAVKHIKYSFTRDWINHVRSATGKNMFAVAEFWKNDLGAIENYLQKTNWNHSVFDVPLHYNLYNASKSGGNYDMRNIFNGTVVQRHPSHAVTFVDNHDSQPEEALESFVEEWFKPLAYALTLTREQGYPSVFYGDYYGIPTHGVPAMRSKIDPILEARQKYAYGKQNDYLDHHNIIGWTREGNTAHPNSGLATIMSDGAGGSKWMFVGRNKAGQVWSDITGNRTGTVTINADGWGNFSVNGGSVSIWVNK

SEQ ID NO: 23061 - protein, 485 aa, Bacillus sp. 707
HHNGTNGTMMQYFEWYLPNDGNHWNRLNSDASNLKSKGITAVWIPPAWKGASQNDVGYGAYDLYDLGEFNQKGTVRTKYGTRSQLQAAVTSLKNNGIQVYGDVVMNHKGGADATEMVRAVEVNPNNRNQEVTGEYTIEAWTRFDFPGRGNTHSSFKWRWYHFDGVDWDQSRRLNNRIYKFRGHGKAWDWEVDTENGNYDYLMYADIDMDHPEVVNELRNWGVWYTNTLGLDGFRIDAVKHIKYSFTRDWINHVRSATGKNMFAVAEFWKNDLGAIENYLQKTNWNHSVFDVPLHYNLYNASKSGGNYDMRNIFNGTVVQRHPSHAVTFVDNHDSQPEEALESFVEEWFKPLAYALTLTREAGYPSVFYGDYYGIPTHGVPAMRSKIDPILEARQKYAYGKQNDYLDHHNIIGWTREGNTAHPNSGLATIMSDGAGGSKWMFVGRNKAGQVWSDITGNRTGTVTINADGWGNFSVNGGSVSIWVNK

SEQ ID NO: 23062 - protein, 485 aa, Bacillus sp.
HHNGTNGTLMQYFEWYLPNDGNHWNRLRSDASNLKDKGISAVWIPPAWKGASQNDVGYGAYDLYDLGEFNQKGTIRTKYGTRNQLQAAVNALKSNGIQVYGDVVMNHKGGADATEMVRAVEVNPNNRNQEVSGEYTIEAWTKFDFPGRANTHSNFKWRWYHFDGVDWDQSRKLNNRIYKFRGDGKGWDWEVDTENGNYDYLLYADIDMDHPEVVNELRNWGVWYTNTLGLDGFRIDAVKHIKYSFTRDWINHVRSATGKNMFAVAEFWKNDLGAIENYLNKTNWNHSVFDVPLHFNLYNASKSGGNYDMRQIFNGTVVQRHPMHAVTFVDNHDSQPEESLESFVREWFKPLAYALTLTREQGYPSVFYGDYYGIPTHGVPAMKSKIDPILEARQKYAYGRQNDYLDHHNIIGWTREGNTAHPNSGLATIMSDGAGGNKWMFVGRNKAGQVWTDITGNRAGTVTINADGWGNFSVNGGSVSIWVNK

SEQ ID NO: 23063 - protein, 485 aa, Bacillus sp. 707
HHNGTNGTMMQYFEWYLPNDGNHWNRLNSDASNLKSKGITAVWIPPAWKGASQNDVGYGAYDLYDLGEFNQKGTVRTKYGTRSQLQAAVTSLKNNGIQVYGDVVMNHKGGADATEMVRAVEVNPNNRNQEVTGEYTIEAWTRFDFPGRGNTHSSFKWRWYHFDGVDWDQSRRLNNRIYKFRGHGKAWDWEVDTENGNYDYLMYADIDMDQPEVVNELRNWGVWYTNTLGLDGFRIDAVKHIKYSFTRDWINHVRSATGKNMFAVAEFWKNDLGAIENYLQKTNWNHSVFDVPLHYNLYNASKSGGNYDMRNIFNGTVVQRHPSHAVTFVDNHDSQPEEALESFVEEWFKPLAYALTLTREQGYPSVFYGDYYGIPTHGVPAMRSKIDPILEARQKYAYGKQNDYLDHHNIIGWTREGNTAHPNSGLATIMSDGAGGSKWMFVGRNKAGQVWSDITGNRTGTVTINADGWGNFSVNGGSVSIWVNK

SEQ ID NO: 23064 - protein, 485 aa, Bacillus sp. 707
HHNGTNGTMMQYFEWYLPNDGNHWNRLNSDASNLKSKGITAVWIPPAWKGASQNDVGYGAYDLYDLGEFNQKGTVRTKYGTRSQLQAAVTSLKNNGIQVYGDVVMNHKGGADATEMVRAVEVNPNNRNQEVTGEYTIEAWTRFDFPGRGNTHSSFKWRWYHFDGVDWDQSRRLNNRIYKFRGHGKAWDWEVDTENGNYDYLMYADIDMDHPEVVNELRNWGVWYTNTLGLDGFRIDAVKHIKYSFTRDWINHVRSATGKNCFAVAEFWKNDLGAIENYLQKTNWNHSVFDVPLHYNLYNASKSGGNYDMRNIFNGTVVQRHPSHAVTFVDNHDSQPEEALESFVEEWFKPLAYALTLTREQGYPSVFYGDYYGIPTHGVPAMRSKIDPILEARQKYAYGKQNDYLDHHNIIGWTREGNTAHPNSGLATIMSDGAGGSKWMFVGRNKAGQVWSDITGNRTGTVTINADGWGNFSVNGGSVSIWVNK

SEQ ID NO: 23065 - protein, 485 aa, Bacillus sp.
HHNGTNGTMMQYFEWYLPNDGNHWNRLNSDASNLKSKGITAVWIPPAWKGASQNDVGYGAYDLYDLGEFNQKGTVRTKYGTRSQLQAAVTSLKNNGIQVYGDVVFNHKGGADATEMVRAVEVNPNNRNQEVTGEYTIEAWTRFDFPGRGNTHSSFKWRWYHFDGVDWDQSRRLNNRIYKFRGHGKAWDWEVDTENGNYDYLMYADYDMDHPEVVNELRNWGVWYTNTLGLDGFRIDAVKHIKYSFTRDWINHVRSATGKNMFAVAEFWKNDLGAIENYLQKTNWNHSVFDVPLHYNLYNASKSGGNYDMRNIFNGTVVQRHPSHAVTFVDNHDSQPEEALESFVEEWFKPLAYALTLTREQGYPSVFYGDYYGIPTHGVPAMRSKIDPILEARQKYAYGKQNDYLDHHNIIGWTREGNTAHPNSGLATIMSDGAGGSKWMFVGRNKAGQVWSDITGNRTGTVTINADGWGNFSVNGGSVSIWVNK

SEQ ID NO: 23066 - protein, 485 aa, Bacillus sp. 707
HHNGTNGTMMQYFEWYLPNDGNHWNRLNSDASNLKSKGITAVWIPPAWKGASQNDVGYGAYDLYDLGEFNQKGTVRTKYGTRSQLQAAVTSLKNNGIQVYGDVVMNHKGGADATEMVRAVEVNPNNRNQEVTGEYTIEAWTRFDFPGRGNTHSSFKWRWYHFDGVDWDQSRRLNNRIYKFRGHGKAWDWEVDTENGNYDYLMYADIDMDHPEVVNELRNWGVWYTNTLGLDGFRIDAVKHIKYSFTRDWINHVRSATGKNMFAVAEFWKNDLGAIENYLQKTNWNHSVFDVPLHYNLYNASKSGGNYDMRNIFNGTVVQRHPSHAVTFVDNHDSQPEEALESFVEEWFKPLAYALTLTREQGYPSVFYGDYYGIPTHGVPAMRSKIDPILEARQKYAYGKQNDYLDHHNIIGWTREGNWAHPNSGLATIMSDGAGGSKWMFVGRNKAGQVWSDITGNRTGTVTINADGWGNFSVNGGSVSIWVNK

SEQ ID NO: 23067 - protein, 485 aa, Bacillus sp. 707
HHNGTNGTMMQYFEWYLPNDGNHWNRLNSDASNLKSKGITAVWIPPAWKGASQNDVGYGAYDLYDLGEFNQKGTVRTKYGTRSQLQAAVTSLKNNGIQVYGDVVMNHKGGADATEMVRAVEVNPNNRNQEVTGEYTIEAWTRFDFPGRGNTHSSFKWRWYHFDGVDWDQSRRLNNRIYKFRGHGKAWDWEVDTENGNYDYLMYADIDMDHPEVVNELRNWGVWYTNTLGLDGFRIDAVKHIKYSFTRDWINHVRSATGKNMEAVAEFWKNDLGAIENYLQKTNWNHSVFDVPLHYNLYNASKSGGNYDMRNIFNGTVVQRHPSHAVTFVDNHDSQPEEALESFVEEWFKPLAYALTLTREQGYPSVFYGDYYGIPTHGVPAMRSKIDPILEARQKYAYGKQNDYLDHHNIIGWTREGNTAHPNSGLATIMSDGAGGSKWMFVGRNKAGQVWSDITGNRTGTVTINADGWGNFSVNGGSVSIWVNK

SEQ ID NO: 23068 - protein, 485 aa, Bacillus sp.
HHNGTNGTMMQYFEWYLPNDGNHWNRLNSDASNLKSKGITAVWIPPAWKGASQNDVGYGAYDLYDLGEFNQKGTVRTKYGTRSQLQAAVTSLKNNGIQVYGDVVLNHKGGADATEMVRAVEVNPNNRNQEVTGEYTIEAWTRFDFPGRGNTHSSFKWRWYHFDGVDWDQSRRLNNRIYKFRGHGKAWDWEVDTENGNYDYLMYADFDMDHPEVVNELRNWGVWYTNTLGLDGFRIDAVKHIKYSFTRDWINHVRSATGKNMFAVAEFWKNDLGAIENYLQKTNWNHSVFDVPLHYNLYNASKSGGNYDMRNIFNGTVVQRHPSHAVTFVDNHDSQPEEALESFVEEWFKPLAYALTLTREQGYPSVFYGDYYGIPTHGVPAMRSKIDPILEARQKYAYGKQNDYLDHHNIIGWTREGNTAHPNSGLATIMSDGAGGSKWMFVGRNKAGQVWSDITGNRTGTVTINADGWGNFSVNGGSVSIWVNK

SEQ ID NO: 23069 - protein, 485 aa, Bacillus sp. 707
HHNGTNGTMMQYFEWYLPNDGNHWNRLNSDASNLKSKGITAVWIPPAWKGASQNDVGYGAYDLYDLGEFNQKGTVRTKYGTRSQLQAAVTSLKNNGIQVYGDVVMNHKGGADATEMVRAVEVNPNNRNQEVTGEYTIEAWTRFDFPGRGNTHSSFKWRWYHFDGVDWDQSRRLNNRIYKFRGHGKAWDWEVDTENGNYDYLMYADIDMDHPEVVNELRNWGVWYTNTLGLDGFRIDAVKHIKYSFTRDWINHVRSATGKNMFAVAEFWKNDLGAIENYLQKTNWNHSVFDVPLHYNLYNASKSGGNYDMRNIFNGTVVQRHPSHAVTFVDNHDSQPEEALESFVEEWFKPLAYALTLTREQGYPSVFYGDYHGIPTHGVPAMRSKIDPILEARQKYAYGKQNDYLDHHNIIGWTREGNTAHPNSGLATIMSDGAGGSKWMFVGRNKAGQVWSDITGNRTGTVTINADGWGNFSVNGGSVSIWVNK

SEQ ID NO: 23070 - protein, 485 aa, Bacillus sp.
HHNGTNGTMMQYFEWYLPNDGNHWNRLNSDASNLKSKGITAVWIPPAWKGASQNDVGYGAYDLYDLGEFNQKGTVRTKYGTRSQLQAAVTSLKNNGIQVYGDVVMNHKGGADATEMVRAVEVNPNNRNQEVTGEYTIEAWTRFDFPGRGNTHSSFKWRWYHFDGVDWDQSRRLNNRIYKFRGHGKAWDWEVDTENGNYDYLMYADYDYDHPEVVNELRNWGVWYTNTLGLDGFRIDAVKHIKYSFTRDWINHVRSATGKNMFAVAEFWKNDLGAIENYLQKTNWNHSVFDVPLHYNLYNASKSGGNYDMRNIFNGTVVQRHPSHAVTFVDNHDSQPEEALESFVEEWFKPLAYALTLTREQGYPSVFYGDYYGIPTHGVPAMRSKIDPILEARQKYAYGKQNDYLDHHNIIGWTREGNTAHPNSGLATIMSDGAGGSKWMFVGRNKAGQVWSDITGNRTGTVTINADGWGNFSVNGGSVSIWVNK

SEQ ID NO: 23071 - protein, 485 aa, Bacillus sp. 707
HHNGTNGTMMQYFEWYLPNDGNHWNRLNSDASNLKSKGITAVWIPPAWKGASQNDVGYGAYDLYDLGEFNQKGTVRTKYGTRSQLQAAVTSLKNNGIQVYGDVVMNHKGGADATEMVRAVEVNPNNRNQEVTGEYTIEAWTRFDFPGRGNTHSSFKWRWYHFDGVDWDQSRRLNNRIYKFRGHGKAWDWEVDTENGNYDYLMYADIDMDHPEVVNELRNWGVWYTNTLGLDGFRIDAVKHIKYSFTRDWINHVRSATGKNMFAVAEFWKNDLGAIENYLQKTNWNHSVFDVPLHYNLYNASKSGGNYDMRNIFNGTVVQRHPSHAVTFVDNHDSQPEEALESFVEEWFKPLAYALTLTREQGYPSVFYGDYYGIPTHGVPAMRSKIDFILEARQKYAYGKQNDYLDHHNIIGWTREGNTAHPNSGLATIMSDGAGGSKWMFVGRNKAGQVWSDITGNRTGTVTINADGWGNFSVNGGSVSIWVNK

SEQ ID NO: 23072 - protein, 485 aa, Bacillus sp. 707
HHNGTNGTMMQYFEWYLPNDGNHWNRLNSDASNLKSKGITAVWIPPAWKGASQNDVGYGAYDLYDLGEFNQKGTVRTKYGTRSQLQAAVTSLKNNGIQVYGDVVMNHKGGADATEMVRAVEVNPNNRNQEVTGEYTIEAWTRFDFPGRGNTHSSFKWRWYHFDGVDWDQSRRLNNRIYKFRGHGKAWDWEVDTENGNYDYLMYADIDMDHPEVVNELRNWGVWYTNTLGLDGFRIDAVKHIKYSFTRDWINHVRSATGKNMFAVAEFWKNDLGAIENYLQKTNWNHSVFDVPLHYNLYNASKSGGNYDMRNIFNGTVVQRHPSHAVTFVDNHDSQPEEALESFVEEWFKPLAYALTLTREQGYPSVFYGDYYGIPTHGVPAMRSKIDPILEARQKYAYGKQNDYLDHHNIIGWTRLGNTAHPNSGLATIMSDGAGGSKWMFVGRNKAGQVWSDITGNRTGTVTINADGWGNFSVNGGSVSIWVNK

SEQ ID NO: 23073 - protein, 485 aa, Bacillus sp. 707
HHNGTNGTMMQYFEWYLPNDGNHWNRLNSDANNLKSKGITAVWIPPAWKGASQNDVGYGAYDLYDLGEFNQKGTVRTKYGTRSQLQAAVTSLKNNGIQVYGDVVMNHKGGADATEMVRAVEVNPNNRNQEVTGEYTIEAWTRFDFPGRGNTHSSFKWRWYHFDGVDWDQSRRLNNRIYKFRGHGKAWDWEVDTENGNYDYLMYADIDMDHPEVVNELRNWGVWYTNTLGLDGFRIDAVKHIKYSFTRDWINHVRSATGKNMFAVAEFWKNDLGAIENYLQKTNWNHSVFDVPLHYNLYNASKSGGNYDMRNIFNGTVVQRHPSHAVTFVDNHDSQPEEALESFVEEWFKPLAYALTLTREQGYPSVFYGDYYGIPTHGVPAMRSKIDPILEARQKYAYGKQNDYLDHHNIIGWTREGNTAHPNSGLATIMSDGAGGSKWMFVGRNKAGQVWSDITGNRTGTVTINADGWGNFSVNGGSVSIWVNK

SEQ ID NO: 23074 - protein, 485 aa, Bacillus sp. 707
HHNGTNGTMMQYFEWYLPNDGNHWNRLNSDASNLKSKGITAVWIPPAWKGASQNDVGYGAYDLYDLGEFNQKGTVRTKYGTRSQLQAAVTSLKNNGIQVYGDVVMNHKGGADATEMVRAVEVNPNNRNQEVTGEYTIEAWTRFDFPGRGNTHSSFKWRWYHFDGVDWDYSRRLNNRIYKFRGHGKAWDWEVDTENGNYDYLMYADIDMDHPEVVNELRNWGVWYTNTLGLDGFRIDAVKHIKYSFTRDWINHVRSATGKNMFAVAEFWKNDLGAIENYLQKTNWNHSVFDVPLHYNLYNASKSGGNYDMRNIFNGTVVQRHPSHAVTFVDNHDSQPEEALESFVEEWFKPLAYALTLTREQGYPSVFYGDYYGIPTHGVPAMRSKIDPILEARQKYAYGKQNDYLDHHNIIGWTREGNTAHPNSGLATIMSDGAGGSKWMFVGRNKAGQVWSDITGNRTGTVTINADGWGNFSVNGGSVSIWVNK

SEQ ID NO: 23075 - protein, 485 aa, Bacillus sp.
HHNGTNGTLMQYFEWYLPNDGNHWNRLRSDASNLKDKGISAVWIPPAWKGASQNDVGYGAYDLYDLGEFNQKGTIRTKYGTRNQLQAAVNALKSNGIQVYGDVVMNHKGGADATEMVRAVEVNPNNRNQEVSGEYTIEAWTKFDFPGRGNTHSNFKWRWYHFDGVDWDQSRKLNNRIYKFRGDGKGWDWEVDTENGNYDYLIYADIDMDHPEVVNELRNWGVWYTNTLGLDGFRIDAVKHIKYSFTRDWINHVRSATGKNMFAVAEFWKNDLGAIENYLNKTNWNHSVFDVPLHYNLYNASKSGGNYDMRQIFNGTVVQRHPTHAVTFVDNHDSQPEEALESFVEEWFKPLAYALTLTREQGYPSVFYGDYYGIPTHGVPAMKSKIDPILEARQKYAYGRQNDYLDHHNIIGWTREGNTAHPNSGLATIMSDGAGGNKWMFVGRNKAGQVWTDITGNRAGTVTINADGWGNFSVNGGSVSIWVNK

SEQ ID NO: 23076 - protein, 485 aa, Bacillus sp. 707
HHNGTNGTMMQYFEWYLPNDGNHWNRLNSDASNLKSKGITAVWIPPAWKGASQNDVGYGAYDLYDLGEFNQKGTVRTKYGTRSQLQAAVTSLKNNGIQVYGDVVMNHKGGADATEMVRAVEVNPNNRNQEVTGEYTIEAWTRFDFPGRGNTHSSFKWRWYHFDGVDWDQSRRLNNRIYKFRGHGKAWDWEVDTENGNYDYLMYADIDMDHPEVVNELRNWGVWYTNTLGLDGFRIDAVKHIKYSFTRDWINHVRSATGKNMFAVAEFWKNDLGAIENYLQKTNWNHSVFDVPLHYNLYNASKSGGNYDMRNIFNGTVVQRHPSHAVTFVDNHDSQPEEALESFVEEWFKPLAYALTLTREQGYPSVFYGDYYGIPTHGVPAMRSKIDPILEARQKYAYGKQNDYLDHHNIIGWTREGNTAHPNSGLATIMSDGARGSKWMFVGRNKAGQVWSDITGNRTGTVTINADGWGNFSVNGGSVSIWVNK

SEQ ID NO: 23077 - protein, 485 aa, Bacillus sp. 707
HHNGTNGTMMQYFEWYLPNDGNHWNRLNSDASNLKSKGITAVWIPPAWKGASQNDVGYGAYDLYDLGEFNQKGTVRTKYGTRSQLQAAVTSLKNNGIQVYGDVVMNHKGGADATEMVRAVEVNPCNRNQEVTGEYTIEAWTRFDFPGRGNTHSSFKWRWYHFDGVDWDQSRRLNNRIYKFRGHGKAWDWEVDTENGNYDYLMYADIDMDHPEVVNELRNWGVWYTNTLGLDGFRIDAVKHIKYSFTRDWINHVRSATGKNMFAVAEFWKNDLGAIENYLQKTNWNHSVFDVPLHYNLYNASKSGGNYDMRNIFNGTVVQRHPSHAVTFVDNHDSQPEEALESFVEEWFKPLAYALTLTREQGYPSVFYGDYYGIPTHGVPAMRSKIDPILEARQKYAYGKQNDYLDHHNIIGWTREGNTAHPNSGLATIMSDGAGGSKWMFVGRNKAGQVWSDITGNRTGTVTINADGWGNFSVNGGSVSIWVNK

SEQ ID NO: 23078 - protein, 485 aa, Bacillus sp. 707
HHNGTNGTMMQYFEWYLPNDGNHWNRLNSDASNLKSKGITAVWIPPAWKGASQNDVGYGAYDLYDLGEFNQKGTVRTKYGTRSQLQAAVTSLKNNGIQVYGDVVMNHKGGADATEMVRAVEVNPNNRNQEVTGEYTIEAWTRFDFPGRGNTHSSFKWRWYHFDGVDWDQSRRLNNRIYKFRGHGKAWDWEVDTENGNYDYLMYADIDMDHPEVVNELRNWGVWYTNTLGLDGFRIDAVKHIKYSFTRDWINHVRSATGKNMFAVAEFWKNDLGAIENYLQKTNWNHSVFDVPLHYNLYNASKSGGNYDMRNIFNGTVVQRHPSHAVTFVDNHDSQPEEALESFVEEWFKPLAYALTLTREQGYPSVFYGDYYGIPTHGVPAMRSKIDPILEARQKYAYGKQNDYLDHHNIIGWTREGNTAHPNSGLATIMSDGAGGSKWMFVGRNKAGQVWSDITGNRTGTVTINADGWGNFSVNGKSVSIWVNK

SEQ ID NO: 23079 - protein, 485 aa, Bacillus sp. 707
HHNGTNGTMMQYFEWYLPNDGNHWNRLNSDASNLKSKGITAVWIPPAWKGASQNDVGYGAYDLYDLGEFNQKGTVRTKYGTRSQLQAAVTSLKNNGIQVYGDVVMNHKGGADATEMVRAVEVNPNNRNQEVTGEYTIEAWTRFDFPGRGNTHSSFKWRWYHFDGVDWDFSRRLNNRIYKFRGHGKAWDWEVDTENGNYDYLMYADIDMDHPEVVNELRNWGVWYTNTLGLDGFRIDAVKHIKYSFTRDWINHVRSATGKNMFAVAEFWKNDLGAIENYLQKTNWNHSVFDVPLHYNLYNASKSGGNYDMRNIFNGTVVQRHPSHAVTFVDNHDSQPEEALESFVEEWFKPLAYALTLTREQGYPSVFYGDYYGIPTHGVPAMRSKIDPILEARQKYAYGKQNDYLDHHNIIGWTREGNTAHPNSGLATIMSDGAGGSKWMFVGRNKAGQVWSDITGNRTGTVTINADGWGNFSVNGGSVSIWVNK

SEQ ID NO: 23080 - protein, 485 aa, Bacillus sp. 707
HHNGTNGTMMQYFEWYLPNDGNHWNRLNSDASNLKSKGITAVWIPPAWKGASQNDVGYGAYDLYDLGEFNQKGTVRTKYGTRSQLQAAVTSLKNNGIQVYGDVVMNHKGGADATEMVRAVEVNPNNRNQEVTGEYTIEAWTRFDFPGRENTHSSFKWRWYHFDGVDWDQSRRLNNRIYKFRGHGKAWDWEVDTENGNYDYLMYADIDMDHPEVVNELRNWGVWYTNTLGLDGFRIDAVKHIKYSFTRDWINHVRSATGKNMFAVAEFWKNDLGAIENYLQKTNWNHSVFDVPLHYNLYNASKSGGNYDMRNIFNGTVVQRHPSHAVTFVDNHDSQPEEALESFVEEWFKPLAYALTLTREQGYPSVFYGDYYGIPTHGVPAMRSKIDPILEARQKYAYGKQNDYLDHHNIIGWTREGNTAHPNSGLATIMSDGAGGSKWMFVGRNKAGQVWSDITGNRTGTVTINADGWGNFSVNGGSVSIWVNK

SEQ ID NO: 23081 - protein, 485 aa, Bacillus sp. 707
HHNGTNGTMMQYFEWYLPNDGNHWNRLNSDASNLKSKGITAVWIPPAWKGASQNDVGYGAYDLYDLGEFNQKGTVRTKYGTRSQLQAAVTSLKNNGIQVYGDVVMNHKGGADATEMVRAVEVNPNNRNQEVTGEYTIEAWTRFDFPGRGNTHSSFKWRWYHFDGVDWDQSRRLNNRIYKFRGHGKAWDWEVDTENGNYDYLMYADIDMDHPEVVNELRNWGVWYTNTLGLDGFRIDAVKHIKYSFTRDWINHVRSATGKNMFAVAEFWKNDLGAIENYLQKTNWNHSVFDVPLHYNLYNASKSGGNYDMRNIFNGTVVQRHPSHAVTFVDNHDSQPEEALESFVEEWFKPLAYALTLTREQGYPSVFYGDYYGIPTHGVPAMRSKIDPILEARQKYAYGKQNDYLDHHNIIGWTREGNTAHPTSGLATIMSDGAGGSKWMFVGRNKAGQVWSDITGNRTGTVTINADGWGNFSVNGGSVSIWVNK

SEQ ID NO: 23082 - protein, 485 aa, Bacillus sp. 707
HHNGTNGTMMQYFEWYLPNDGNHWNRLNSDASNLKSKGITAVWIPPAWKGASQNDVGYGAYDLYDLGEFNQKGTVRTKYGTRSQLQAAVTSLKNNGIQVYGDVVMNHKGGADATEMVRAVEVNPNNRNQEVTGEYTIEAWTRFDFPGRGNTHSSFKWRWYHFDGVDWDQSRRLNNRIYKFRGHGKAWDWEVDTENGNYDYLMYADIDMDHPEVVNELRNWGVWYTNTLGLDGFRIDAVKHIKYSFTRDWINHVRSATGKNMFAVAEFWKNDLGAIENYLQKTNWNHSVFDVPLHYNLYNASKSGGNYDMRNIFNGTVVQRHPSHAVTFVDNHDSQPEEALESFVEEWFKPLAYALTLTREQGYPSVFYGDYYGIPTHGVPAMRSKIDPILEARQKYAYGKQNDYLDHHNIIGWTREGNTAHPNSGLATIMSDGAGGSKWMFVGRNAAGQVWSDITGNRTGTVTINADGWGNFSVNGGSVSIWVNK

SEQ ID NO: 23083 - protein, 485 aa, Bacillus sp. 707
HHNGTNGTMMQYFEWYLPNDGNHWNRLNSDASHLKSKGITAVWIPPAWKGASQNDVGYGAYDLYDLGEFNQKGTVRTKYGTRSQLQAAVTSLKNNGIQVYGDVVMNHKGGADATEMVRAVEVNPNNRNQEVTGEYTIEAWTRFDFPGRGNTHSSFKWRWYHFDGVDWDQSRRLNNRIYKFRGHGKAWDWEVDTENGNYDYLMYADIDMDHPEVVNELRNWGVWYTNTLGLDGFRIDAVKHIKYSFTRDWINHVRSATGKNMFAVAEFWKNDLGAIENYLQKTNWNHSVFDVPLHYNLYNASKSGGNYDMRNIFNGTVVQRHPSHAVTFVDNHDSQPEEALESFVEEWFKPLAYALTLTREQGYPSVFYGDYYGIPTHGVPAMRSKIDPILEARQKYAYGKQNDYLDHHNIIGWTREGNTAHPNSGLATIMSDGAGGSKWMFVGRNKAGQVWSDITGNRTGTVTINADGWGNFSVNGGSVSIWVNK

SEQ ID NO: 23084 - protein, 485 aa, Bacillus sp. 707
HFNGTNGTMMQYFEWYLPNDGNHWNRLNSDASNLKSKGITAVWIPPAWKGASQNDVGYGAYDLYDLGEFNQKGTVRTKYGTRSQLQAAVTSLKNNGIQVYGDVVMNHKGGADATEMVRAVEVNPNNRNQEVTGEYTIEAWTRFDFPGRGNTHSSFKWRWYHFDGVDWDQSRRLNNRIYKFRGHGKAWDWEVDTENGNYDYLMYADIDMDHPEVVNELRNWGVWYTNTLGLDGFRIDAVKHIKYSFTRDWINHVRSATGKNMFAVAEFWKNDLGAIENYLQKTNWNHSVFDVPLHYNLYNASKSGGNYDMRNIFNGTVVQRHPSHAVTFVDNHDSQPEEALESFVEEWFKPLAYALTLTREQGYPSVFYGDYYGIPTHGVPAMRSKIDPILEARQKYAYGKQNDYLDHHNIIGWTREGNTAHPNSGLATIMSDGAGGSKWMFVGRNKAGQVWSDITGNRTGTVTINADGWGNFSVNGGSVSIWVNK

SEQ ID NO: 23085 - protein, 485 aa, Bacillus subtilis
HHNGTNGTMMQYFEWYLPNDGNHWNRLRSNASDLKDVGISAVWIPPAWKGASQNDVGYGAYDLYDLGEFNQKGTIRTKYGTRNQLQAAVNALKSNGIQVYGDVVMNHKGGADATEFVRAVEVNPNNRNQEVSGEYTIEAWTKFDFPGRGNTHSNFKWRWYHFDGVDWDQSRKLNNRIYKFRGDGKGWDWEVDTENGNYDYLMYADIDMDHPEVVNELRNWGVWYTNTLGLDGFRIDAVKHIKYSFTRDWINHVRSATGKNMFAVAEFWKNDLGAIENYLNKTNWNHSVFDVPLHYNLYNASKSGGNYDMRQIFNGTVVQRHPMHAVTFVDNHDSQPEEALESFVEEWFKPLAYALTLTREQGYPSVFYGDYYGIPTHGVPAMRSKIDPILEARQKYAYGRQNDYLDHHNIIGWTREGNTAHPNSGLATIMSDGAGGNKWMFVGRNKAGQVWTDITGNRAGTVTINADGWGNFSVNGGSVSIWVNK

SEQ ID NO: 23086 - protein, 485 aa, Bacillus sp. 707
HHNGTNGTMMQYFEWYLPNDGNHWNRLNSDASNLKSKGITAVWIPPAWKGASQNDVGYGAYDLYDLGEFNQKGTVRTKYGTISQLQAAVTSLKNNGIQVYGDVVMNHKGGADATEMVRAVEVNPNNRNQEVTGEYTIEAWTRFDFPGRGNTHSSFKWRWYHFDGVDWDQSRRLNNRIYKFRGHGKAWDWEVDTENGNYDYLMYADIDMDHPEVVNELRNWGVWYTNTLGLDGFRIDAVKHIKYSFTRDWINHVRSATGKNMFAVAEFWKNDLGAIENYLQKTNWNHSVFDVPLHYNLYNASKSGGNYDMRNIFNGTVVQRHPSHAVTFVDNHDSQPEEALESFVEEWFKPLAYALTLTREQGYPSVFYGDYYGIPTHGVPAMRSKIDPILEARQKYAYGKQNDYLDHHNIIGWTREGNTAHPNSGLATIMSDGAGGSKWMFVGRNKAGQVWSDITGNRTGTVTINADGWGNFSVNGGSVSIWVNK

SEQ ID NO: 23087 - protein, 485 aa, Bacillus sp. 707
HHNGTNGTMMQYFEWYLPNDGNHWNRLNSDASNLKSKGITAVWIPPAWKGASQNDVGYGAYDLYDLGEFNQKGTVRTKYGTRSQLQAAVTSLKNNGIQVYGDVVMNHKGGADATEMVRAVEVNPNNRNQEVTGEYTIEAWTRFDFPGRGNTHSSFKWRWYHFDGVDWDQSRRLNNRIYKFRGHGKAWDWEVDTENGNYDYLMYADIDMDHPEVVNELRNWGVWYTNTLGLDGFRIDAVKHIKYSFTRDWINHVRSATGKNMFAVAEFWKNDLGAIENYLQKTNWNHSVFDVPLHYNLYNASKSGGNYDMRNIFNGTVVQRHPSHAVTFVDNHDSQPEEALESFVEEWFKPLAYALTLTREQGYPSVFYGDYYGIPTHGVPAMRSKIDPILEARQKYAYGKQNDYLDHHNIIGWTRNGNTAHPNSGLATIMSDGAGGSKWMFVGRNKAGQVWSDITGNRTGTVTINADGWGNFSVNGGSVSIWVNK

SEQ ID NO: 23088 - protein, 485 aa, Bacillus sp. 707
HHNGTNGTMMQYFEWYLPNDGNHWNRLNSDASNLKSKGITAVWIPPAWKGASQNDVGYGAYDLYDLGEFNQKGTVRTKYGTRSQLQAAVTSLKNNGIQVYGDVVMNHKGGADATEMVRAVEVNPNNRNQEVTGEYTIEAWTRFDFPGRGNTHSSFKWRWYHFDGVDWDQSRRLNNRIYKFRGHGKAWDWEVDTENGNYDYLMYADIDMDHPEVVNEIRNWGVWYTNTLGLDGFRIDAVKHIKYSFTRDWINHVRSATGKNMFAVAEFWKNDLGAIENYLQKTNWNHSVFDVPLHYNLYNASKSGGNYDMRNIFNGTVVQRHPSHAVTFVDNHDSQPEEALESFVEEWFKPLAYALTLTREQGYPSVFYGDYYGIPTHGVPAMRSKIDPILEARQKYAYGKQNDYLDHHNIIGWTREGNTAHPNSGLATIMSDGAGGSKWMFVGRNKAGQVWSDITGNRTGTVTINADGWGNFSVNGGSVSIWVNK

SEQ ID NO: 23089 - protein, 485 aa, Bacillus sp. 707
HHNGTNGTMMQYFEWYLPNDGNHWNRLNSDASNLKSKGITAVWIPPAWKGASQNDVGYGAYDLYDLGEFNQKGTVRTKYGTRSQLQAAVTSLKNNGIQVYGDVVMNHKGGADATEMVRAVEVNPNNRNQEVTGEYTIEAWTRFDFPGRGNTHSSFKWRWYHFDGVDWDQSRRLNNRIYKFRGHGKAWDWEVDTENGNYDYLMYADIDMDHPEVVNELRNWGVWYTNTLGLDGFRIDAVKHIKYSFTRDWINHVRSATGKNMFAVAEFWKNDLGAIENYLQKTNWNHSVFDVPLHYNLYNASKSGGNYDMRNIFNGTVVERHPSHAVTFVDNHDSQPEEALESFVEEWFKPLAYALTLTREQGYPSVFYGDYYGIPTHGVPAMRSKIDPILEARQKYAYGKQNDYLDHHNIIGWTREGNTAHPNSGLATIMSDGAGGSKWMFVGRNKAGQVWSDITGNRTGTVTINADGWGNFSVNGGSVSIWVNK

SEQ ID NO: 23090 - protein, 485 aa, Bacillus sp. 707
HHNGTNGTMMQYFEWYLPNDGNHWNRLNSDASNLKSKGITAVWIPPAWKGASQNDVGYGAYDLYDLGEFNQKGTVRTKYGTRSQLQAAVTSLKNNGIQVYGDVVMNHKGGADATEMVRAVEVNPNNRNQEVTGEYTIEAWTRFDFPGRGNTHSSFKWRWYHFDGVDWDQSRRLNNRIYKFRGHGKAWDWEVDTENGNYDYLMYADIDMDHPEVVNELRNWGVWYTNTLGLDGFRIDAVKHIKYSFTRDWINHVRSATGKNMFAVAEFWKNDLGAIENYLQKTNWNHSVFDVPLHYNLYNASKSGGNYDMRNIFNGTVVQRHPSHAVTFVDNHDSQPEEALESFVEEWFKPLAYALTLTREQGYPSVFYGDYYGIPTHGVPAMRSKIDPILEARQKYAYGKQNDYLDHHNIIGWTREGNTAHPNSGLATIMSDGAGGSKWMFVGRNCAGQVWSDITGNRTGTVTINADGWGNFSVNGGSVSIWVNK

SEQ ID NO: 23091 - protein, 485 aa, Bacillus sp.
HHNGTNGTMMQYFEWYLPNDGNHWNRLNSDASNLKSKGITAVWIPPAWKGASQNDVGYGAYDLYDLGEFNQKGTVRTKYGTRSQLQAAVTSLKNNGIQVYGDVVINHKGGADATEMVRAVEVNPNNRNQEVTGEYTIEAWTRFDFPGRGNTHSSFKWRWYHFDGVDWDQSRRLNNRIYKFRGHGKAWDWEVDTENGNYDYLMYADYDMDHPEVVNELRNWGVWYTNTLGLDGFRIDAVKHIKYSFTRDWINHVRSATGKNMFAVAEFWKNDLGAIENYLQKTNWNHSVFDVPLHYNLYNASKSGGNYDMRNIFNGTVVQRHPSHAVTFVDNHDSQPEEALESFVEEWFKPLAYALTLTREQGYPSVFYGDYYGIPTHGVPAMRSKIDPILEARQKYAYGKQNDYLDHHNIIGWTREGNTAHPNSGLATIMSDGAGGSKWMFVGRNKAGQVWSDITGNRTGTVTINADGWGNFSVNGGSVSIWVNK

SEQ ID NO: 23092 - protein, 485 aa, Bacillus sp. 707
HHNGTNVTMMQYFEWYLPNDGNHWNRLNSDASNLKSKGITAVWIPPAWKGASQNDVGYGAYDLYDLGEFNQKGTVRTKYGTRSQLQAAVTSLKNNGIQVYGDVVMNHKGGADATEMVRAVEVNPNNRNQEVTGEYTIEAWTRFDFPGRGNTHSSFKWRWYHFDGVDWDQSRRLNNRIYKFRGHGKAWDWEVDTENGNYDYLMYADIDMDHPEVVNELRNWGVWYTNTLGLDGFRIDAVKHIKYSFTRDWINHVRSATGKNMFAVAEFWKNDLGAIENYLQKTNWNHSVFDVPLHYNLYNASKSGGNYDMRNIFNGTVVQRHPSHAVTFVDNHDSQPEEALESFVEEWFKPLAYALTLTREQGYPSVFYGDYYGIPTHGVPAMRSKIDPILEARQKYAYGKQNDYLDHHNIIGWTREGNTAHPNSGLATIMSDGAGGSKWMFVGRNKAGQVWSDITGNRTGTVTINADGWGNFSVNGGSVSIWVNK

SEQ ID NO: 23093 - protein, 485 aa, Bacillus sp. 707
HHNGTNGTMMQYFEWYLPNDGNHWNRLNSDASNLKSKGITAVWIPPAWKGASQNDVGYGAYDLYDLGEFNQKGTVRTKYGTRSQLQAAVTSLKNNGIQVYGDVVMNHKGGADATEMVRAVEVNPNNRNQEVTGEYTIEAWTRFDFAGRGNTHSSFKWRWYHFDGVDWDQSRRLNNRIYKFRGHGKAWDWEVDTENGNYDYLMYADIDMDHPEVVNELRNWGVWYTNTLGLDGFRIDAVKHIKYSFTRDWINHVRSATGKNMFAVAEFWKNDLGAIENYLQKTNWNHSVFDVPLHYNLYNASKSGGNYDMRNIFNGTVVQRHPSHAVTFVDNHDSQPEEALESFVEEWFKPLAYALTLTREQGYPSVFYGDYYGIPTHGVPAMRSKIDPILEARQKYAYGKQNDYLDHHNIIGWTREGNTAHPNSGLATIMSDGAGGSKWMFVGRNKAGQVWSDITGNRTGTVTINADGWGNFSVNGGSVSIWVNK

SEQ ID NO: 23094 - protein, 485 aa, Bacillus sp. 707
HHNGTNGTMMQYFEWYLPNDGNHWNRLNSDASNLKSKGITAVWIPPAWKGASQNDVGYGAYDLYDLGEFNQKGTVRTKYGTRSQLQAAVTSLKNNGIQVYGDVVMNHKGGADATEMVRAVEVNPNNRNQEVTGEYTIEAWTRFDFPGRGNTHSSFKWRWAHFDGVDWDQSRRLNNRIYKFRGHGKAWDWEVDTENGNYDYLMYADIDMDHPEVVNELRNWGVWYTNTLGLDGFRIDAVKHIKYSFTRDWINHVRSATGKNMFAVAEFWKNDLGAIENYLQKTNWNHSVFDVPLHYNLYNASKSGGNYDMRNIFNGTVVQRHPSHAVTFVDNHDSQPEEALESFVEEWFKPLAYALTLTREQGYPSVFYGDYYGIPTHGVPAMRSKIDPILEARQKYAYGKQNDYLDHHNIIGWTREGNTAHPNSGLATIMSDGAGGSKWMFVGRNKAGQVWSDITGNRTGTVTINADGWGNFSVNGGSVSIWVNK

SEQ ID NO: 23095 - protein, 485 aa, Bacillus sp. 707
HHNGTNGTMMQYFEWYLPNDGNHWNRLNSDASNLKSKGITAVWIPPAWKGASQNDVGYGAYDLYDLGEFNQKGTVRTKYGTRSQLQAAVTSLKNNGIQVYGDVVMNHKGGADATEMVRAVEVNPNNRNQEVTGEYTIEAWTRFDFPGRGNTHSSFKWRWYHFDGVDWDQSRRLNNRIYKFRGHGKAWDWEVDTENGNYDYLMYADIDMDHPEVVNELRNWGVWYTNTLGLDGFRIDAVKHIKYSFTRDWINHVRSATGKNMFAVAEFWKNDLGAIENYLQKTNWNHSVFDVPLHYNLYNASKSGGNYDMRNIFNGTVVGRHPSHAVTFVDNHDSQPEEALESFVEEWFKPLAYALTLTREQGYPSVFYGDYYGIPTHGVPAMRSKIDPILEARQKYAYGKQNDYLDHHNIIGWTREGNTAHPNSGLATIMSDGAGGSKWMFVGRNKAGQVWSDITGNRTGTVTINADGWGNFSVNGGSVSIWVNK

SEQ ID NO: 23096 - protein, 485 aa, Bacillus sp. 707
HHNGTNGTMMQYFEWYLPNDGNHWNRLNSDASNLKSKGITAVWIPPAWKGASQNDVGYGAYDLYDLGEFNQKGTVRTKYGTRSQLQAAVTSLKNNGIQVYGDVVMNHKGGADATEMSRAVEVNPNNRNQEVTGEYTIEAWTRFDFPGRGNTHSSFKWRWYHFDGVDWDQSRRLNNRIYKFRGHGKAWDWEVDTENGNYDYLMYADIDMDHPEVVNELRNWGVWYTNTLGLDGFRIDAVKHIKYSFTRDWINHVRSATGKNMFAVAEFWKNDLGAIENYLQKTNWNHSVFDVPLHYNLYNASKSGGNYDMRNIFNGTVVQRHPSHAVTFVDNHDSQPEEALESFVEEWFKPLAYALTLTREQGYPSVFYGDYYGIPTHGVPAMRSKIDPILEARQKYAYGKQNDYLDHHNIIGWTREGNTAHPNSGLATIMSDGAGGSKWMFVGRNKAGQVWSDITGNRTGTVTINADGWGNFSVNGGSVSIWVNK

SEQ ID NO: 23097 - protein, 485 aa, Bacillus sp. 707
HHNGTNGTMMQYFEWYLPNDGNHWNRLNSDASNLKSKGITAVWIPPAWKGASQNDVGYGAYDLYDLGEFNQKGTVRTKYGTRSQLQAAVTSLKNNGIQVYGDVVMNHKGGADATEMVRAVEVNPNNRNQEVTGEYTIEAWTRFDFPGRGNTHSSFKWRWYHFDGVDWDQSRRLNARIYKFRGHGKAWDWEVDTENGNYDYLMYADIDMDHPEVVNELRNWGVWYTNTLGLDGFRIDAVKHIKYSFTRDWINHVRSATGKNMFAVAEFWKNDLGAIENYLQKTNWNHSVFDVPLHYNLYNASKSGGNYDMRNIFNGTVVQRHPSHAVTFVDNHDSQPEEALESFVEEWFKPLAYALTLTREQGYPSVFYGDYYGIPTHGVPAMRSKIDPILEARQKYAYGKQNDYLDHHNIIGWTREGNTAHPNSGLATIMSDGAGGSKWMFVGRNKAGQVWSDITGNRTGTVTINADGWGNFSVNGGSVSIWVNK

SEQ ID NO: 23098 - protein, 485 aa, Bacillus sp. 707
HHNGTNGTMMQYFEWYLPNDGNHWNRLNSDASNLKSKGITAVWIPPAWKGASQNDVGYGAYDLYDLGEFNQKGTVRTKYGTRSQLQAAVTSLKNNGIQVYGDVVMNHKGGADATEMRRAVEVNPNNRNQEVTGEYTIEAWTRFDFPGRGNTHSSFKWRWYHFDGVDWDQSRRLNNRIYKFRGHGKAWDWEVDTENGNYDYLMYADIDMDHPEVVNELRNWGVWYTNTLGLDGFRIDAVKHIKYSFTRDWINHVRSATGKNMFAVAEFWKNDLGAIENYLQKTNWNHSVFDVPLHYNLYNASKSGGNYDMRNIFNGTVVQRHPSHAVTFVDNHDSQPEEALESFVEEWFKPLAYALTLTREQGYPSVFYGDYYGIPTHGVPAMRSKIDPILEARQKYAYGKQNDYLDHHNIIGWTREGNTAHPNSGLATIMSDGAGGSKWMFVGRNKAGQVWSDITGNRTGTVTINADGWGNFSVNGGSVSIWVNK

SEQ ID NO: 23099 - protein, 485 aa, Bacillus sp. 707
HWNGTNGTMMQYFEWYLPNDGNHWNRLNSDASNLKSKGITAVWIPPAWKGASQNDVGYGAYDLYDLGEFNQKGTVRTKYGTRSQLQAAVTSLKNNGIQVYGDVVMNHKGGADATEMVRAVEVNPNNRNQEVTGEYTIEAWTRFDFPGRGNTHSSFKWRWYHFDGVDWDQSRRLNNRIYKFRGHGKAWDWEVDTENGNYDYLMYADIDMDHPEVVNELRNWGVWYTNTLGLDGFRIDAVKHIKYSFTRDWINHVRSATGKNMFAVAEFWKNDLGAIENYLQKTNWNHSVFDVPLHYNLYNASKSGGNYDMRNIFNGTVVQRHPSHAVTFVDNHDSQPEEALESFVEEWFKPLAYALTLTREQGYPSVFYGDYYGIPTHGVPAMRSKIDPILEARQKYAYGKQNDYLDHHNIIGWTREGNTAHPNSGLATIMSDGAGGSKWMFVGRNKAGQVWSDITGNRTGTVTINADGWGNFSVNGGSVSIWVNK

SEQ ID NO: 23100 - protein, 485 aa, Bacillus sp. 707
HHNGTNGTMMQYFEWYLPNDGNHWNRLNSDASNLKSKGITAVWIPPAWKGASQNDVGYGAYDLYDLGEFNQKGTVRTKYGTRSQLQAAVTSLKNNGIQVYGDVVMNHKGGADATEMVRAVEVNPMNRNQEVTGEYTIEAWTRFDFPGRGNTHSSFKWRWYHFDGVDWDQSRRLNNRIYKFRGHGKAWDWEVDTENGNYDYLMYADIDMDHPEVVNELRNWGVWYTNTLGLDGFRIDAVKHIKYSFTRDWINHVRSATGKNMFAVAEFWKNDLGAIENYLQKTNWNHSVFDVPLHYNLYNASKSGGNYDMRNIFNGTVVQRHPSHAVTFVDNHDSQPEEALESFVEEWFKPLAYALTLTREQGYPSVFYGDYYGIPTHGVPAMRSKIDPILEARQKYAYGKQNDYLDHHNIIGWTREGNTAHPNSGLATIMSDGAGGSKWMFVGRNKAGQVWSDITGNRTGTVTINADGWGNFSVNGGSVSIWVNK

SEQ ID NO: 23101 - protein, 485 aa, Bacillus sp. 707
HHNGTNGTMMQYFEWYLPNDGNHWNRLNSDASNLKSKGITAVWIPPAWKGASQNDVGYGAYDLYDLGEFNQKGTVRTKYGTRSQLQAAVTSLKNNGIQVYGDVVMNHKGGADATEMVRAVEVNPNNRNQEVTGEYLIEAWTRFDFPGRGNTHSSFKWRWYHFDGVDWDQSRRLNNRIYKFRGHGKAWDWEVDTENGNYDYLMYADIDMDHPEVVNELRNWGVWYTNTLGLDGFRIDAVKHIKYSFTRDWINHVRSATGKNMFAVAEFWKNDLGAIENYLQKTNWNHSVFDVPLHYNLYNASKSGGNYDMRNIFNGTVVQRHPSHAVTFVDNHDSQPEEALESFVEEWFKPLAYALTLTREQGYPSVFYGDYYGIPTHGVPAMRSKIDPILEARQKYAYGKQNDYLDHHNIIGWTREGNTAHPNSGLATIMSDGAGGSKWMFVGRNKAGQVWSDITGNRTGTVTINADGWGNFSVNGGSVSIWVNK

SEQ ID NO: 23102 - protein, 485 aa, Bacillus sp.
HHNGTNGTMMQYFEWYLPNDGNHWNRLRSDASNLKDKGISAVWIPPAWKGASQNDVGYGAYDLYDLGEFNQKGTIRTKYGTRNQLQAAVNALKSNGIQVYGDVVMNHKGGADATEMVRAVEVNPNNRNQEVSGEYTIEAWTKFDFPGRGNTHSNFKWRWYHFDGVDWDQSRKLNNRIYKFRGDGKGWDWEVDTENGNYDYLIYADIDMDHPEVVNELRNWGVWYTNTLGLDGFRIDAVKHIKYSFTRDWINHVRSATGKNMFAVAEFWKNDLGAIENYLNKTNWNHSVFDVPLHYNLYNASKSGGNYDLRQIFNGTVVQRHPTHAVTFVDNHDSQPEEALESFVEEWFKPLAYALTLTREQGYPSVFYGDYYGIPTHGVPAMKSKIDPILEARQKYAYGRQNDYLDHHNIIGWTREGNTAHPNSGLATIMSDGAGGNKWMFVGRNKAGQVWTDITGNRAGTVTINADGWGNFSVNGGSVSIWVNK

SEQ ID NO: 23103 - protein, 485 aa, Bacillus sp. 707
HHNGTNGTMMQYFEWYLPNDGNHWNRLNSDASNLKSKGITAVWIPPAWKGASQNDVGYGAYDLYDLGEFNQKGTVRTKYGTRSQLQAAVTSLKNNGIQVYGDVVMNHKGGADATEMVRAVEVNPNNRNQEVTGEYTIEAWTRFDFPGRGNTHSSFKWRWYHFDGVDWDQSRRLNNRIYKFRGHGKAWDWEVDTENGNYDYLMYADIDMDHPEVVNELRNWGVWYTNTLGLDGFRIDAVKHIKYSFTRDWINHVRSATGKNMFAVAEFWKNDLGAIENYLQKTNWNHSVFDVPLHYNLYNASKSGGNYDMRNIFNGTVVQRHPSHAVTFVDNHDSQPEEALESFVEEWFKPLAYALTLTREQGYPSVFYGDYYGIPTHGVPAMRSKIDPILEARQKYAYGKQNDYLDHHNIIGWTREGNTAHPNSGLATIMSDGAGGSKWMFVGRNKAGQVWSDITGNRTGQVTINADGWGNFSVNGGSVSIWVNK

SEQ ID NO: 23104 - protein, 485 aa, Bacillus sp. 707
HHNGTNGTMMQYFEWYLPNDGNHWNRLNSDASNLKSKGITAVWIPPAWKGASQNDVGYGAYDLYDLGEFNQKGTVRTKYGTRSQLQAAVTSLKNNGIQVYGDVVMNHKGGADATEMVRAVEVNPNNRNQEVTGEYTIEAWTRFDFPGRGNTHSSFKWRWYHFDGVDWDQSRRLNNRIYKFRGHGKAWDWEVDTENGNYDYLMYADIDMDHPEVVNELRNWGVWYTNTLGLDGFRIDAVKHIKYSFTRDWINHVRSATGKNMFAVAEFWKNDLEAIENYLQKTNWNHSVFDVPLHYNLYNASKSGGNYDMRNIFNGTVVQRHPSHAVTFVDNHDSQPEEALESFVEEWFKPLAYALTLTREQGYPSVFYGDYYGIPTHGVPAMRSKIDPILEARQKYAYGKQNDYLDHHNIIGWTREGNTAHPNSGLATIMSDGAGGSKWMFVGRNKAGQVWSDITGNRTGTVTINADGWGNFSVNGGSVSIWVNK

SEQ ID NO: 23105 - protein, 485 aa, Bacillus sp. 707
HHNGTNPTMMQYFEWYLPNDGNHWNRLNSDASNLKSKGITAVWIPPAWKGASQNDVGYGAYDLYDLGEFNQKGTVRTKYGTRSQLQAAVTSLKNNGIQVYGDVVMNHKGGADATEMVRAVEVNPNNRNQEVTGEYTIEAWTRFDFPGRGNTHSSFKWRWYHFDGVDWDQSRRLNNRIYKFRGHGKAWDWEVDTENGNYDYLMYADIDMDHPEVVNELRNWGVWYTNTLGLDGFRIDAVKHIKYSFTRDWINHVRSATGKNMFAVAEFWKNDLGAIENYLQKTNWNHSVFDVPLHYNLYNASKSGGNYDMRNIFNGTVVQRHPSHAVTFVDNHDSQPEEALESFVEEWFKPLAYALTLTREQGYPSVFYGDYYGIPTHGVPAMRSKIDPILEARQKYAYGKQNDYLDHHNIIGWTREGNTAHPNSGLATIMSDGAGGSKWMFVGRNKAGQVWSDITGNRTGTVTINADGWGNFSVNGGSVSIWVNK

SEQ ID NO: 23106 - protein, 485 aa, Bacillus sp. 707
HHNGTNGTMMQYFEWYLPNDGNHWNRLNSDASNLKSKGITAVWIPPAWKGASQNDVGYGAYDLYDLGEFNQKGTVRTKYGTRSQLQAAVTSLKNNGIQVYGDVVMNHKGGADATEMVRAVEVNPNNRNQEVTGEYTIEAWTRFDFPGRGNTHSSFKWRWYHFDGVDWDQSRRLNNRIYKFRGHGKAWDWEVDTENGNYDYLMYADIDMDHPEVVNELRNWGVWYTNTLGLDGFRIDAVKHIKYSFTRDWINHVRSATGKNMFAVAEFWKNDLGAIENYLQKTNWNHSVFDVPLHYNLYNASKSGGNYDMRNIFNGTVVQRHPSHAVTFVDNHDSQPEEALESFVEEWFKPLAYALTLTREQGYPSVFYGDYYGIPTHGVPAMRSKIDPILEARQKYAYGKQNDYLDHHNIIGWTREGNTAHPNSGLATIMSDGAGGSKWMFVGRNKAGQVWSDMTGNRTGTVTINADGWGNFSVNGGSVSIWVNK

SEQ ID NO: 23107 - protein, 485 aa, Bacillus sp. 707
HHNGTNGTMMQYFEWYLPNDGNHWNRLNSDASNLKSKGITAVWIPPAWKGASQNDVGYGAYDLYDLGEFNQKGTVRTKYGTRSQLQAAVTSLKNNGIQVYGDVVMNHKGGADATEMVRAVEVNPNNRNQEVTGEYTIEAWTRFDFPGRGNTHSSFKWRWYHFDGVDWDQSRRLNNRIYKFRGHGKAWDWEVDTENGNYDYLMYADIDMDHPEVVNELRNWGVWYTNTLGLDGFRIDAVKHIKYSFTRDWINHVRSATGKNMFAVAEFWKNDLGAIENYLQKTNWNHSVFDVPLHYNLYNASKSGGNYDMRNIFNGTVVQRHPSHAVTFVDNHDSQPEEALESFVEEWFKPLAYALTLTREQGYPSVFYGDYYGIPTHGVPAMRSKIDPILEARQKYAYGKQNDYLDHHNIIGWTREGSTAHPNSGLATIMSDGAGGSKWMFVGRNKAGQVWSDITGNRTGTVTINADGWGNFSVNGGSVSIWVNK

SEQ ID NO: 23108 - protein, 485 aa, Bacillus sp. 707
HHNGTNGTMMQYFEWYLPNDGNHWNRLNSDASNLKSKGITAVWIPPAWKGASQNDVGYGAYDLYDLGEFNQKGTVRTKYGTRSQLQAAVTSLKNNGIQVYGDVVMNHKGGADATEMVRAVEVNPNNRNQEVTGEYTIEAWTRFDFPGRGNTHSSFKWRWYHFDGVDWDQSRRLNNRIYKFRGHGKAWDWEVDTENGNYDYLMYADIDMDHPEVVNELRNWGVWYTNTLGLDGFRIDAVKHIKYSFTRDWINHVRSATGKNMFAVAEFWKNDLGAIENYLQKTNWNHSVFDVPLHYNLYNASKSGGNYDMRNIFHGTVVQRHPSHAVTFVDNHDSQPEEALESFVEEWFKPLAYALTLTREQGYPSVFYGDYYGIPTHGVPAMRSKIDPILEARQKYAYGKQNDYLDHHNIIGWTREGNTAHPNSGLATIMSDGAGGSKWMFVGRNKAGQVWSDITGNRTGTVTINADGWGNFSVNGGSVSIWVNK

SEQ ID NO: 23109 - protein, 485 aa, Bacillus sp. 707
HHNGTNGTMMQYFEWYLPNDGSHWNRLNSDASNLKSKGITAVWIPPAWKGASQNDVGYGAYDLYDLGEFNQKGTVRTKYGTRSQLQAAVTSLKNNGIQVYGDVVMNHKGGADATEMVRAVEVNPNNRNQEVTGEYTIEAWTRFDFPGRGNTHSSFKWRWYHFDGVDWDQSRRLNNRIYKFRGHGKAWDWEVDTENGNYDYLMYADIDMDHPEVVNELRNWGVWYTNTLGLDGFRIDAVKHIKYSFTRDWINHVRSATGKNMFAVAEFWKNDLGAIENYLQKTNWNHSVFDVPLHYNLYNASKSGGNYDMRNIFNGTVVQRHPSHAVTFVDNHDSQPEEALESFVEEWFKPLAYALTLTREQGYPSVFYGDYYGIPTHGVPAMRSKIDPILEARQKYAYGKQNDYLDHHNIIGWTREGNTAHPNSGLATIMSDGAGGSKWMFVGRNKAGQVWSDITGNRTGTVTINADGWGNFSVNGGSVSIWVNK

SEQ ID NO: 23110 - protein, 485 aa, Bacillus sp. 707
HHNGTNGTMMQYFEWYLPNDGNHWNRLNSDASNLKSKGITAVWIPPAWKGASQNDVGYGAYDLYDLGEFNQKGTVRTKYGTRSQLQAAVTSLKNNGIQVYGDVVMNHKGGADATEMVRAVEVNPNNRNQEVTGEYTIEAWTRFDFPGRGNTHSSFKWRWYHFDGVDWDQSRRLNNRIYKFRGHGKAWDWEVDTENGNYDYLMYADIDMDHPEVVNELRNWGVWYTNTLGLDGFRIDAVKHIKYSFTRDWINHVRSATGKNMFAVAEFWKNDLGAIENYLQKTNWNHSVFDVPLHYNLYNASKSGGNYDMRNIFNGTVVQRHPSHAVTFVDNHDSQPEEALESFVEEWFKPLAYALTLTREQGYPSVFYGDYKGIPTHGVPAMRSKIDPILEARQKYAYGKQNDYLDHHNIIGWTREGNTAHPNSGLATIMSDGAGGSKWMFVGRNKAGQVWSDITGNRTGTVTINADGWGNFSVNGGSVSIWVNK

SEQ ID NO: 23111 - protein, 485 aa, Bacillus sp. 707
HHNGTNGTMMQYFEWYLPNDGNHWNRLNSDASNLKSKGITAVWIPPAWKGASQNDVGYGAYDLYDLGEFNQKGTVRTKYGTRSQLQAAVTSLKNNGIQVYGDVVMNHKGGADATEMVRAVEVNPNNRNQEVTGEYTIEAWTRFDFPGRGNTHSSFKWRWYHFDGVDWDQSRRLNNRIYKFRGHGKAWDWEVDTENGNYDYLMYADIDMDHPEVVNELRNWGVWYTNTLGLDGFRIDAVKHIKYSFTRDWINHVRSATGKNMFAVAEFWKNDLGAIENYLQKTNWNHSVFDVPLHYNLYTASKSGGNYDMRNIFNGTVVQRHPSHAVTFVDNHDSQPEEALESFVEEWFKPLAYALTLTREQGYPSVFYGDYYGIPTHGVPAMRSKIDPILEARQKYAYGKQNDYLDHHNIIGWTREGNTAHPNSGLATIMSDGAGGSKWMFVGRNKAGQVWSDITGNRTGTVTINADGWGNFSVNGGSVSIWVNK

SEQ ID NO: 23112 - protein, 485 aa, Bacillus sp. 707
HHNGTNGTMMQYFEWYLPNDGNHWNRLNSDASNLKSKGITAVWIPPAWKGASQNDVGYGAYDLYDLGEFNQKGTVRTKYGTRSQLQAAVTSLKNNGIQVYGDVVMNHKGGADATEMVRAVEVNPNNRNQEVTGEYTIEAWTRFDFPGRGNTHSSFKWRWYHFDGVDWDQSRRLNNRIYKFRGHGKAWDWEVDTENGNYDYLMYADIDMDHPEVVNELRNWGVWYTNTLGLDGFRIDAVKHIKYSFTRDWINHVRSATGKNMFAVAEFWKNDLGAIENYLQKTNWNHSVFDVPLHYNLYNASKSGGNYDMRNIFNGTVVQRHPSHAVTFVDNHDSQPEEALESFVEEWFKPLAYALTLTREQGYPSVFYGDYYGIPTHGVPAMRSKIDPILEARQKYAYGKQNDYLDHHNIIGWTREGNTAHPNSGLATIMSDGAGGSKWMFVGRNKAGQVWSDITGNRTSTVTINADGWGNFSVNGGSVSIWVNK

SEQ ID NO: 23113 - protein, 485 aa, Bacillus sp. 707
HHNGTNGTMMQYFEWYLPNDGNHWNRLNSDASNLKSKGITAVWIPPAWKGASQNDVGYGAYDLYDLGEFNQKGTVRTKYGTRSQLQAAVTSLKNNGIQVYGDVVMNHKGGADATEMVRAVEVNPNNRNQEVTGEYTIEAWTRFDFPGRGNTHSSFKWRWYHFDGVDWDQSRRLNNRIYKFRGHGKAWDWEVDTENGNYDYLMYADIDMDHPEVVNELRNWGVWYTNTLGLDGFRIDAVKHIKYSFTRDWINHVRSATGKNMFAVAEFWKNDLGAIENYLQKTNWNHSVFDVPLHYNLYNASKSGGNYDMRNIFNGTVVQRHPSHAVTFVDNHDSQPEEALESFVEEWFKPLAYALTLTREQGYPSVFYGDYYGIPTHGVPAMRSKIDPILEARQKYAYGKQNDYLDHHNIIGWTREGNKAHPNSGLATIMSDGAGGSKWMFVGRNKAGQVWSDITGNRTGTVTINADGWGNFSVNGGSVSIWVNK

SEQ ID NO: 23114 - protein, 485 aa, Bacillus sp. 707
HHNGTNGTMMQYFEWYLPNDGNHWNRLNSDASNLKSKGITAVWIPPAWKGASQNDVGYGAYDLYDLGEFNQKGTVRTKYGTRSQLQAAVTSLKNNGIQVYGDVVMNHKGGADATEMVRAVEVNPNNRNQEVTGEYTIEAWTRFDFPGRGNTHSSFKWRWYHFDGVDWDQSRRLNNRIYKFRGHGKAWDWEVDTENGNYDYLMYADIDMDHPEVVNELRNWGVWYTNTLGLDGFRIDAVKHIKYSFTRDWINHVRSATMKNMFAVAEFWKNDLGAIENYLQKTNWNHSVFDVPLHYNLYNASKSGGNYDMRNIFNGTVVQRHPSHAVTFVDNHDSQPEEALESFVEEWFKPLAYALTLTREQGYPSVFYGDYYGIPTHGVPAMRSKIDPILEARQKYAYGKQNDYLDHHNIIGWTREGNTAHPNSGLATIMSDGAGGSKWMFVGRNKAGQVWSDITGNRTGTVTINADGWGNFSVNGGSVSIWVNK

SEQ ID NO: 23115 - protein, 485 aa, Bacillus sp. 707
HHNGTNGTMMQYFEWYLPNDGNHWNRLNSDASNLKSKGITAVWIPPAWKGASQNDVGYGAYDLYDLGEFNQKGTVRTKYGTRSQLQAAVTSLKNNGIQVYGDVVMNHKGGADATEMVRAVEVNPNNRNQEVTGEYTIEAWTRFDFPGRGNTHSSFKWRWYHFDGVDWDQSRRLNNRIYKFRGHGKAWDWEVDTENGNYDYLMYADIDMDHPEVVNELRNWGVWYTNTLGLDGFRIDAVKHIKYSFTRDWINHVRSATGKNMFAVAEFWKNDLGAIENYLQKTNWNHSVFDVPLHYNLYNASKSGGNYDMRNIFNGTVVQRHPSHAVTFVDNHDSQPEEALESFVEEWFKPLAYALTLTREQGYPSVFYGDYYGIPTHGVPAMRSKIDPILEARQKYAYGKQNDYLDHHNIIGWTREGNYAHPNSGLATIMSDGAGGSKWMFVGRNKAGQVWSDITGNRTGTVTINADGWGNFSVNGGSVSIWVNK

SEQ ID NO: 23116 - protein, 485 aa, Bacillus sp. 707
HHNGTNGTMMQYFEWYLPNDGNHWNRLNSDASNLKSKGITAVWIPPAWKGASQNDVGYGAYDLYDLGEFNQKGTVRTKYGCRSQLQAAVTSLKNNGIQVYGDVVMNHKGGADATEMVRAVEVNPNNRNQEVTGEYTIEAWTRFDFPGRGNTHSSFKWRWYHFDGVDWDQSRRLNNRIYKFRGHGKAWDWEVDTENGNYDYLMYADIDMDHPEVVNELRNWGVWYTNTLGLDGFRIDAVKHIKYSFTRDWINHVRSATGKNMFAVAEFWKNDLGAIENYLQKTNWNHSVFDVPLHYNLYNASKSGGNYDMRNIFNGTVVQRHPSHAVTFVDNHDSQPEEALESFVEEWFKPLAYALTLTREQGYPSVFYGDYYGIPTHGVPAMRSKIDPILEARQKYAYGKQNDYLDHHNIIGWTREGNTAHPNSGLATIMSDGAGGSKWMFVGRNKAGQVWSDITGNRTGTVTINADGWGNFSVNGGSVSIWVNK

SEQ ID NO: 23117 - protein, 485 aa, Bacillus sp.
HHNGTNGTMMQYFEWYLPNDGNHWNRLNSDASNLKSKGITAVWIPPAWKGASQNDVGYGAYDLYDLGEFNQKGTVRTKYGTRSQLQAAVTSLKNNGIQVYGDVVMNHKGGADATEMVRAVEVNPNNRNQEVTGEYTIEAWTRFDFPGRGNTHSSFKWRWYHFDGVDWDQSRRLNNRIYKFRGHGKAWDWEVDTENGNYDYLMYADFDMDHPEVVNEIRNWGVWYTNTLGLDGFRIDAVKHIKYSFTRDWINHVRSATGKNMFAVAEFWKNDLGAIENYLQKTNWNHSVFDVPLHYNLYNASKSGGNYDMRNIFNGTVVQRHPSHAVTFVDNHDSQPEEALESFVEEWFKPLAYALTLTREQGYPSVFYGDYYGIPTHGVPAMRSKIDPILEARQKYAYGKQNDYLDHHNIIGWTREGNTAHPNSGLATIMSDGAGGSKWMFVGRNKAGQVWSDITGNRTGTVTINADGWGNFSVNGGSVSIWVNK

SEQ ID NO: 23118 - protein, 485 aa, Bacillus sp. 707
HHNGTNGTMMQYFEWYLPNDGNHWNRLNSDASNLKSKGITAVWIPPAWKGASQNDVGYGAYDLYDLGEFNQKGTVRTKYGTRSQLQAAVTSLKNNGIQVYGDVVMNHKGGADATEMVRAVEVNPNNRNQEVTGEYRIEAWTRFDFPGRGNTHSSFKWRWYHFDGVDWDQSRRLNNRIYKFRGHGKAWDWEVDTENGNYDYLMYADIDMDHPEVVNELRNWGVWYTNTLGLDGFRIDAVKHIKYSFTRDWINHVRSATGKNMFAVAEFWKNDLGAIENYLQKTNWNHSVFDVPLHYNLYNASKSGGNYDMRNIFNGTVVQRHPSHAVTFVDNHDSQPEEALESFVEEWFKPLAYALTLTREQGYPSVFYGDYYGIPTHGVPAMRSKIDPILEARQKYAYGKQNDYLDHHNIIGWTREGNTAHPNSGLATIMSDGAGGSKWMFVGRNKAGQVWSDITGNRTGTVTINADGWGNFSVNGGSVSIWVNK

SEQ ID NO: 23119 - protein, 485 aa, Bacillus sp. 707
HHNGTNGTMMQYFEWYLPNDGNHWNRLNSDASNLKSKGITAVWIPPAWKGASQNDVGYGAYDLYDLGEFNQKGTVRTKYGTRSQLQAAVTSLKNNGIQVYGDVVMNHKGGADATEMVRAVEVNPNNRNQEVTGEYTIEAWTRFDFPGRGNTHSSFKWRWYHFDGVDWDQSRRLNNRIYKFRGHGKAWDWEVDTENGNYDYLMYADIDMDHPEVVNELRNWGVWYTNTLGLDGFRIDAVKHIKYSFTRDWINHVRSATGKNMFAVAEFWKNDLGAIENYLQKTNWNHSVFDVPLHYNLYNASKSGGNYDMRNIFNGTVVQRHPSHAVTFVDNHDSQPEEALESFVEEWFKPLAYALTLTREQGYPSVFYGDYYGIPTHGVPAMRSKIDPILEARQKYAYGKQNDYLDHHNIIGWTRRGNTAHPNSGLATIMSDGAGGSKWMFVGRNKAGQVWSDITGNRTGTVTINADGWGNFSVNGGSVSIWVNK

SEQ ID NO: 23120 - protein, 485 aa, Bacillus sp. 707
HHNGTNGTMMQYFEWYLPNDGQHWNRLNSDASNLKSKGITAVWIPPAWKGASQNDVGYGAYDLYDLGEFNQKGTVRTKYGTRSQLQAAVTSLKNNGIQVYGDVVMNHKGGADATEMVRAVEVNPNNRNQEVTGEYTIEAWTRFDFPGRGNTHSSFKWRWYHFDGVDWDQSRRLNNRIYKFRGHGKAWDWEVDTENGNYDYLMYADIDMDHPEVVNELRNWGVWYTNTLGLDGFRIDAVKHIKYSFTRDWINHVRSATGKNMFAVAEFWKNDLGAIENYLQKTNWNHSVFDVPLHYNLYNASKSGGNYDMRNIFNGTVVQRHPSHAVTFVDNHDSQPEEALESFVEEWFKPLAYALTLTREQGYPSVFYGDYYGIPTHGVPAMRSKIDPILEARQKYAYGKQNDYLDHHNIIGWTREGNTAHPNSGLATIMSDGAGGSKWMFVGRNKAGQVWSDITGNRTGTVTINADGWGNFSVNGGSVSIWVNK

SEQ ID NO: 23121 - protein, 485 aa, Bacillus sp. 707
HHNGTNGTMMQYFEWYLPNDGNHWNRLNSDASNLKSKGITAVWIPPAWKGASQNDVGYGAYDLYDLGEFNQKGTVRTKYGTRSQLQAAVTSLKNNGIQVYGDVVMNHKGGADATEMVRAVEVNPNNRNQEVTGEYTIEAWTRFDFPGRGNTHSSFKWRWYHFDGVDWDQSRRLNNRIYKFRGHGKAWDWEVDTENGNYDYLMYADIDMDHPEVVNEARNWGVWYTNTLGLDGFRIDAVKHIKYSFTRDWINHVRSATGKNMFAVAEFWKNDLGAIENYLQKTNWNHSVFDVPLHYNLYNASKSGGNYDMRNIFNGTVVQRHPSHAVTFVDNHDSQPEEALESFVEEWFKPLAYALTLTREQGYPSVFYGDYYGIPTHGVPAMRSKIDPILEARQKYAYGKQNDYLDHHNIIGWTREGNTAHPNSGLATIMSDGAGGSKWMFVGRNKAGQVWSDITGNRTGTVTINADGWGNFSVNGGSVSIWVNK

SEQ ID NO: 23122 - protein, 485 aa, Bacillus sp. 707
HHNGTNGTMMQYFEWYLPNDGNHWNRLNSDASNLKSKGITAVWIPPAWKGASQNDVGYGAYDLYDLGEFNQKGTVRTKYGTRSQLQAAVTSLKNNGIQVYGDVVMNHKGGADATEMVRAVEVNPNNRNQEVTGEYTIEAWTRFDFPGRGNTHSSFKWRWYHFDGVDWDQSRRLNNRIYKFRGHGKAWDWEVDTENGNYDYLMYADIDMDHPEVVNELRNWGVWYTNTLGLDGFRIDAVKHIKYSFTRDWINHVRSATGKNMFAVAEFWKNDLGAIENYLQKTNWNHSVFDVPLHYNLYNASKSGGNYDMRNIFNGTVVQRHPSHAVTFVDNHDSQPEEALESFVEEWFKPLAYALTLTRNQGYPSVFYGDYYGIPTHGVPAMRSKIDPILEARQKYAYGKQNDYLDHHNIIGWTREGNTAHPNSGLATIMSDGAGGSKWMFVGRNKAGQVWSDITGNRTGTVTINADGWGNFSVNGGSVSIWVNK

SEQ ID NO: 23123 - protein, 485 aa, Bacillus sp. 707
HDNGTNGTMMQYFEWYLPNDGNHWNRLNSDASNLKSKGITAVWIPPAWKGASQNDVGYGAYDLYDLGEFNQKGTVRTKYGTRSQLQAAVTSLKNNGIQVYGDVVMNHKGGADATEMVRAVEVNPNNRNQEVTGEYTIEAWTRFDFPGRGNTHSSFKWRWYHFDGVDWDQSRRLNNRIYKFRGHGKAWDWEVDTENGNYDYLMYADIDMDHPEVVNELRNWGVWYTNTLGLDGFRIDAVKHIKYSFTRDWINHVRSATGKNMFAVAEFWKNDLGAIENYLQKTNWNHSVFDVPLHYNLYNASKSGGNYDMRNIFNGTVVQRHPSHAVTFVDNHDSQPEEALESFVEEWFKPLAYALTLTREQGYPSVFYGDYYGIPTHGVPAMRSKIDPILEARQKYAYGKQNDYLDHHNIIGWTREGNTAHPNSGLATIMSDGAGGSKWMFVGRNKAGQVWSDITGNRTGTVTINADGWGNFSVNGGSVSIWVNK

SEQ ID NO: 23124 - protein, 485 aa, Bacillus sp. 707
HHNGTNGTMMQYFEWYLPNDGNHWNRLNSDASNLKSKGITAVWIPPAWKGASQNDVGYGAYDLYDLGEFNQKGTVRTKYGTKSQLQAAVTSLKNNGIQVYGDVVMNHKGGADATEMVRAVEVNPNNRNQEVTGEYTIEAWTRFDFPGRGNTHSSFKWRWYHFDGVDWDQSRRLNNRIYKFRGHGKAWDWEVDTENGNYDYLMYADIDMDHPEVVNELRNWGVWYTNTLGLDGFRIDAVKHIKYSFTRDWINHVRSATGKNMFAVAEFWKNDLGAIENYLQKTNWNHSVFDVPLHYNLYNASKSGGNYDMRNIFNGTVVQRHPSHAVTFVDNHDSQPEEALESFVEEWFKPLAYALTLTREQGYPSVFYGDYYGIPTHGVPAMRSKIDPILEARQKYAYGKQNDYLDHHNIIGWTREGNTAHPNSGLATIMSDGAGGSKWMFVGRNKAGQVWSDITGNRTGTVTINADGWGNFSVNGGSVSIWVNK

SEQ ID NO: 23125 - protein, 485 aa, Bacillus sp. 707
HHNGTNGTMMQYFEWYLPNDGNHWNRLNSDASNLKSKGITAVWIPPAWKGASQNDVGYGAYDLYDLGEFIQKGTVRTKYGTRSQLQAAVTSLKNNGIQVYGDVVMNHKGGADATEMVRAVEVNPNNRNQEVTGEYTIEAWTRFDFPGRGNTHSSFKWRWYHFDGVDWDQSRRLNNRIYKFRGHGKAWDWEVDTENGNYDYLMYADIDMDHPEVVNELRNWGVWYTNTLGLDGFRIDAVKHIKYSFTRDWINHVRSATGKNMFAVAEFWKNDLGAIENYLQKTNWNHSVFDVPLHYNLYNASKSGGNYDMRNIFNGTVVQRHPSHAVTFVDNHDSQPEEALESFVEEWFKPLAYALTLTREQGYPSVFYGDYYGIPTHGVPAMRSKIDPILEARQKYAYGKQNDYLDHHNIIGWTREGNTAHPNSGLATIMSDGAGGSKWMFVGRNKAGQVWSDITGNRTGTVTINADGWGNFSVNGGSVSIWVNK

SEQ ID NO: 23126 - protein, 485 aa, Bacillus sp. 707
HHNGTNGTMMQYFEWYLPNDGNHWNRLNSDASNLKSKGITAVWIPPAWKGASQNDVGYGAYDLYDLGEFNQKGTVRTKYGTRSQLQAAVTSLKNNGIQVYGDVVMNHKGGADATEMVRAVEVNPNNRNQEVTGEYTIEAWTRFDFPGRGNTHSSFKWRWYHFDGVDWDQSRRLNNRIYKFRGHGKAWDWEVDTENGNYDYLMYADIDMDHVEVVNELRNWGVWYTNTLGLDGFRIDAVKHIKYSFTRDWINHVRSATGKNMFAVAEFWKNDLGAIENYLQKTNWNHSVFDVPLHYNLYNASKSGGNYDMRNIFNGTVVQRHPSHAVTFVDNHDSQPEEALESFVEEWFKPLAYALTLTREQGYPSVFYGDYYGIPTHGVPAMRSKIDPILEARQKYAYGKQNDYLDHHNIIGWTREGNTAHPNSGLATIMSDGAGGSKWMFVGRNKAGQVWSDITGNRTGTVTINADGWGNFSVNGGSVSIWVNK

SEQ ID NO: 23127 - protein, 485 aa, Bacillus sp. 707
HHNGTNGTMMQYFEWYLPNDGNHWNRLNSDASNLKSKGITAVWIPPAWKGASQNDVGYGAYDLYDLGEFNQKGTVRTKYGTRSQLQAAVTSLKNNGIQVYGDVVMNHKGGADATEMVRAVEVNPNNRNQEVTGEYTIEAWTRFDFPGRGNTHSSFKWRWYHFDGVDWDQSRRLNNRIYKFRGHGKAWDWEVDTENGNYDYLMYADIDMDMPEVVNELRNWGVWYTNTLGLDGFRIDAVKHIKYSFTRDWINHVRSATGKNMFAVAEFWKNDLGAIENYLQKTNWNHSVFDVPLHYNLYNASKSGGNYDMRNIFNGTVVQRHPSHAVTFVDNHDSQPEEALESFVEEWFKPLAYALTLTREQGYPSVFYGDYYGIPTHGVPAMRSKIDPILEARQKYAYGKQNDYLDHHNIIGWTREGNTAHPNSGLATIMSDGAGGSKWMFVGRNKAGQVWSDITGNRTGTVTINADGWGNFSVNGGSVSIWVNK

SEQ ID NO: 23128 - protein, 485 aa, Bacillus sp. 707
HHNGTNGTMMQYFEWYLPNDGNHWNRLNSDASNLKSKGITAVWIPPAWKGASQNDVGYGAYDLYDLGEFNQKGTVRTKYGTRSQLQAAVTSLKNNGIQVYGDVVMNHKGGADATEMVRAVEVNPNNRNQEVTGEYTIEAWTRFDFPGRGNTHSSFKWRWYHFDGVDWDQSRRLNNRIYKFRGHGKAWDWEVDTENGNYDYLMYADIDMDHPEVVNELRNWGVWYTNTLGLDGFRIDAVKHIKYSFTRDWINHVRSATGKNMFAVAEFWKNDLGAIENYLQKTNWNHSVFDVPLHYNLYNASKSGGNYDMRNIFNGTVVQRHPSHAVTFVDNHDSQPEEALESFVEEWFKPLAYALTLTREQGYPSVFYGDYYGIPTHGVPAMRSKIDPILEARQKYAYGKQNDYLDHENIIGWTREGNTAHPNSGLATIMSDGAGGSKWMFVGRNKAGQVWSDITGNRTGTVTINADGWGNFSVNGGSVSIWVNK

SEQ ID NO: 23129 - protein, 485 aa, Bacillus sp. 707
HHNGTNGTMMQYFEWYLPNDGNHWNRLNSDASNLKSKGITAVWIPPAWKGASQNDVGYGAYDLYDLGEFNQKGTVRTKYGTSSQLQAAVTSLKNNGIQVYGDVVMNHKGGADATEMVRAVEVNPNNRNQEVTGEYTIEAWTRFDFPGRGNTHSSFKWRWYHFDGVDWDQSRRLNNRIYKFRGHGKAWDWEVDTENGNYDYLMYADIDMDHPEVVNELRNWGVWYTNTLGLDGFRIDAVKHIKYSFTRDWINHVRSATGKNMFAVAEFWKNDLGAIENYLQKTNWNHSVFDVPLHYNLYNASKSGGNYDMRNIFNGTVVQRHPSHAVTFVDNHDSQPEEALESFVEEWFKPLAYALTLTREQGYPSVFYGDYYGIPTHGVPAMRSKIDPILEARQKYAYGKQNDYLDHHNIIGWTREGNTAHPNSGLATIMSDGAGGSKWMFVGRNKAGQVWSDITGNRTGTVTINADGWGNFSVNGGSVSIWVNK

SEQ ID NO: 23130 - protein, 485 aa, Bacillus sp. 707
HHNGTNGTMMQYFEWYLPNDGNHWNRLNSDASWLKSKGITAVWIPPAWKGASQNDVGYGAYDLYDLGEFNQKGTVRTKYGTRSQLQAAVTSLKNNGIQVYGDVVMNHKGGADATEMVRAVEVNPNNRNQEVTGEYTIEAWTRFDFPGRGNTHSSFKWRWYHFDGVDWDQSRRLNNRIYKFRGHGKAWDWEVDTENGNYDYLMYADIDMDHPEVVNELRNWGVWYTNTLGLDGFRIDAVKHIKYSFTRDWINHVRSATGKNMFAVAEFWKNDLGAIENYLQKTNWNHSVFDVPLHYNLYNASKSGGNYDMRNIFNGTVVQRHPSHAVTFVDNHDSQPEEALESFVEEWFKPLAYALTLTREQGYPSVFYGDYYGIPTHGVPAMRSKIDPILEARQKYAYGKQNDYLDHHNIIGWTREGNTAHPNSGLATIMSDGAGGSKWMFVGRNKAGQVWSDITGNRTGTVTINADGWGNFSVNGGSVSIWVNK

SEQ ID NO: 23131 - protein, 485 aa, Bacillus sp. 707
HHNGTNGTMMQYFEWYLPNDGNHWNRLNSDASNLKSKGITAVWIPPAWKGASQNDVGYGAYDLYDLGEFNQKGTVRTKYGTRSQLQAAVTSLKNNGIQVYGDVVMNHKGGADATEMVRAVEVNPNNRNQEVTGEYTIEAWTRFDFPGRGNTHSSFKWRWYHFDGVDWDQSRRLNNRIYKFRGHGKAWDWEVDTENGNYDYLMYADIDMDHPEVVNELRNWGVWYTNTLGLDGFRIDAVKHIKYSFTRDWINHVRSATGKNMFAVAEFWKNDLGAIENYLQKTNWNHSVFDVPLHYNLYNASKSGGNYDMRNIFNGTVVQRHPSHAVTFVDNHDSQPEEALESFVEEWFKPLAYALTLTRFQGYPSVFYGDYYGIPTHGVPAMRSKIDPILEARQKYAYGKQNDYLDHHNIIGWTREGNTAHPNSGLATIMSDGAGGSKWMFVGRNKAGQVWSDITGNRTGTVTINADGWGNFSVNGGSVSIWVNK

SEQ ID NO: 23132 - protein, 485 aa, Bacillus sp. 707
HHNGTNGTMMQYFEWYLPNDGNHWNRLNSDASNLKSKGITAVWIPPAWKGASQNDVGYGAYDLYDLGEFNQKGTVRTKYGTRSQLQAAVTSLKNNGIQVYGDVVMNHKGGADATEMVRAVEVNPNNRNQEVTGEYTIEAWTRFDFPGRGNTHSSFKWRWYHFDGVDWDQSRRLNNRIYKFRGHGKAWDWEVDTENGNYDYLMYADIDMDHSEVVNELRNWGVWYTNTLGLDGFRIDAVKHIKYSFTRDWINHVRSATGKNMFAVAEFWKNDLGAIENYLQKTNWNHSVFDVPLHYNLYNASKSGGNYDMRNIFNGTVVQRHPSHAVTFVDNHDSQPEEALESFVEEWFKPLAYALTLTREQGYPSVFYGDYYGIPTHGVPAMRSKIDPILEARQKYAYGKQNDYLDHHNIIGWTREGNTAHPNSGLATIMSDGAGGSKWMFVGRNKAGQVWSDITGNRTGTVTINADGWGNFSVNGGSVSIWVNK

SEQ ID NO: 23133 - protein, 485 aa, Bacillus sp. 707
HHNGTNGTMMQYFEWYLPNDGNHWNRLNSDASNLKSKGITAVWIPPAWKGASQNDVGYGAYDLYDLGEFNQKGTVRTKYGTRSQLQAAVTSLKNNGIQVYGDVVMNHKGGADATEMVRAVEVNPNNRNQEVTGEYTIEAWTRFDFPGRGNTHSSFKWRWYHFDGVDWDQSRRLNNRIYKFRGHGKAWDWEVDTENGNYDYLMYADIDMDHPEVVNELRNWGVWYTNTLGLDGFRIDAVKHIKYSFTRDWINHVRSATGKNMFAVAEFWKNDLGAIENYLQKTNWNHSVFDVPLHYNLYNASKSGGNYDMRNIFNGTVVQRHPSHAVTFVDNHDSQPEEALESFVEEWFKPLAYALTLTREQGYPSVFYGDYYGIPTHGVPAMRSKIDPILEARQKYAYGKQNDYLDHHNIIGWTREGNTAHPNSGLATIMSDGAGGSKWMFVGRNKAGQVWSDITGNRTGTVTINADGWGCFSVNGGSVSIWVNK

SEQ ID NO: 23134 - protein, 485 aa, Bacillus sp. 707
HHNGTNGTMMQYFEWYLPNDGNHWNRLNSDASNLKSKGITAVWIPPAWKGASQNDVGYGAYDLYDLGEFNQKGTVRTKYGTRSQLQAAVTSLKNNGIQVYGDVVMNHKGGADATEMVRAVEVNPNNRNQEVTGEYTIEAWTRFDFPGRCNTHSSFKWRWYHFDGVDWDQSRRLNNRIYKFRGHGKAWDWEVDTENGNYDYLMYADIDMDHPEVVNELRNWGVWYTNTLGLDGFRIDAVKHIKYSFTRDWINHVRSATGKNMFAVAEFWKNDLGAIENYLQKTNWNHSVFDVPLHYNLYNASKSGGNYDMRNIFNGTVVQRHPSHAVTFVDNHDSQPEEALESFVEEWFKPLAYALTLTREQGYPSVFYGDYYGIPTHGVPAMRSKIDPILEARQKYAYGKQNDYLDHHNIIGWTREGNTAHPNSGLATIMSDGAGGSKWMFVGRNKAGQVWSDITGNRTGTVTINADGWGNFSVNGGSVSIWVNK

SEQ ID NO: 23135 - protein, 485 aa, Bacillus sp. 707
HHNGTNGTMMQYFEWYLPNDGNHWNRLNSDASNLKSKGITAVWIPPAWKGASQNDVGYGAYDLYDLGEFNQKGTVRTKYGTRSQLQAAVTSLKNNGIQVYGDVVMNHKGGADATEMVRAVEVNPNNRNQEVTGEYTIEAWTRFDFPGRGNTHSSFKWRWYHFDGVDWDQSRRLNNRIYKFRGHGKAWDWEVDTENGNYDYLMYADIDMDHPEVVNELRNWGVWYTNTLGLDGFRIDAVKHIKYSFTRDWINHVRSATGKNMFAVAEFWKNDLGAIENYLQKTNWNHSVFDVPLHYNLYNASKSGGNYDMRNIFNGTVVQRHPSHAVTFVDNHDSQPEEALESFVEMWFKPLAYALTLTREQGYPSVFYGDYYGIPTHGVPAMRSKIDPILEARQKYAYGKQNDYLDHHNIIGWTREGNTAHPNSGLATIMSDGAGGSKWMFVGRNKAGQVWSDITGNRTGTVTINADGWGNFSVNGGSVSIWVNK

SEQ ID NO: 23136 - protein, 485 aa, Bacillus sp.
HHNGTNGTMMQYFEWYLPNDGNHWNRLNSDASNLKSKGITAVWIPPAWKGASQNDVGYGAYDVYDLGEFNQKGTVRTKYGTRSQLQAAVTSLKNNGIQVYGDVVMNHKGGADATEMVRAVEVNPNNRNQEVTGEYTIEAWTRFDFPGRGNTHSSFKWRWYHFDGVDWDQSRRLNNRIYKFRGHGKAWDWEVDTENGNYDYLMYADFDMDHPEVVNELRNWGVWYTNTLGLDGFRIDAVKHIKYSFTRDWINHVRSATGKNMFAVAEFWKNDLGAIENYLQKTNWNHSVFDVPLHYNLYNASKSGGNYDMRNIFNGTVVQRHPSHAVTFVDNHDSQPEEALESFVEEWFKPLAYALTLTREQGYPSVFYGDYYGIPTHGVPAMRSKIDPILEARQKYAYGKQNDYLDHHNIIGWTREGNTAHPNSGLATIMSDGAGGSKWMFVGRNKAGQVWSDITGNRTGTVTINADGWGNFSVNGGSVSIWVNK

SEQ ID NO: 23137 - protein, 485 aa, Bacillus sp. 707
HHNGTNGTMMQYFEWYLPNDGNHWNRLNSDASNLKSKGITAVWIPPAWKGASQNDVGYGAYDLYDLGEFNQKGTVRTKYGTRSQLQAAVTSLKNNGIQVYGDVVMNHKGGADATEMVRAVEVNPNNRNQEVTGEYTIEAWTRFDFPGRGNTHSSFKWRWYHFDGVDWDQSRRLNNRIYKFRGHGKAWDWEVDTENGNYDYLMYADIDMDHPEVVNELRNWGVWYTNTLGLDGFRIDAVKHIKYSFTRDWINHVRSATGKNMFAVAEFWKNDLGAIENYLQKTNWNHSVFDVPLHYNLYNASKSGGNYDMRNIFNGTVVQRHPSHAVTFVDNHDSQPEEALESFVEEWFKPLAYALTLTREQGYPSVFYGDYYGIATHGVPAMRSKIDPILEARQKYAYGKQNDYLDHHNIIGWTREGNTAHPNSGLATIMSDGAGGSKWMFVGRNKAGQVWSDITGNRTGTVTINADGWGNFSVNGGSVSIWVNK

SEQ ID NO: 23138 - protein, 485 aa, Bacillus sp. 707
HHNGTNGTMMQYFEWYLPNDGNHWNRLNSDASNLKSKGITAVWIPPAWKGASQNDVGYGAYDLYDLGEFNQKGTVRTKYGTRSQLQAAVTSLKNNGIQVYGDVVMNHKGGADATEMVRAVEVNPNNRNQEVTGEYTIEAWTRFDFPGRGNTHSSFKWRWYHFDGVDWDQSRRLNNRIYKFRGHGKAWDWEVDTENGNYDYLMYADIDMDHPEVVNELRNWGVWYTNTLGLDGFRIDAVKHIKYSFTRDWINHVRSATGKNMFAVAEFWKNDLGAIENYLQKTNWNHSVFDVPLHYNLYNASKSGGNYDMRNIFNGTVVQRHPSHAVTFVDNHDSQPEEALESFVEEWFKPLAYALTLTREQGYPSVFYGDYYGIPTHGVPAMRSKIDPILGARQKYAYGKQNDYLDHHNIIGWTREGNTAHPNSGLATIMSDGAGGSKWMFVGRNKAGQVWSDITGNRTGTVTINADGWGNFSVNGGSVSIWVNK

SEQ ID NO: 23139 - protein, 485 aa, Bacillus sp. 707
HHNGTNGTMMQYFEWYLPNCGNHWNRLNSDASNLKSKGITAVWIPPAWKGASQNDVGYGAYDLYDLGEFNQKGTVRTKYGTRSQLQAAVTSLKNNGIQVYGDVVMNHKGGADATEMVRAVEVNPNNRNQEVTGEYTIEAWTRFDFPGRGNTHSSFKWRWYHFDGVDWDQSRRLNNRIYKFRGHGKAWDWEVDTENGNYDYLMYADIDMDHPEVVNELRNWGVWYTNTLGLDGFRIDAVKHIKYSFTRDWINHVRSATGKNMFAVAEFWKNDLGAIENYLQKTNWNHSVFDVPLHYNLYNASKSGGNYDMRNIFNGTVVQRHPSHAVTFVDNHDSQPEEALESFVEEWFKPLAYALTLTREQGYPSVFYGDYYGIPTHGVPAMRSKIDPILEARQKYAYGKQNDYLDHHNIIGWTREGNTAHPNSGLATIMSDGAGGSKWMFVGRNKAGQVWSDITGNRTGTVTINADGWGNFSVNGGSVSIWVNK

SEQ ID NO: 23140 - protein, 485 aa, Bacillus sp. 707
HHNGTNGTMMQYFEWYLPNDGNHWNRLNSDASNLKSKGITAVWIPPAWKGASQNDVGYGAYDLYDLGEFNQKGTVRTKYGTRSQLQAAVTSLKNNGIQVYGDVVMNHKGGADATEMVRAVEVNPNNRNQEVTGEYTIEAWTRFDFPGRGNTHSSFKWRWYHFDGVDWDQSRRLNNRIYKFRGHGKAWDWEVDTENGNYDYLMYADIDMDHPEVVNELRNWGVWYTNTLGLDGFRIDAVKHIKYSFTRDWINHVRSATGKNMFAVAEFWKNDLGAIENYLQKTNWNHSVFDVPLHYNLYNASKSGGNYDMRNIFNGTVVQRHPSHAVTFVDNHDSQPEEALESFVEEWFKPLAYALTLTREQGYPSVFYGDYYGIPTHGVPAMRSKIDPILEARQKYAYGKQNDYLDHHNIIGWTREGNTAHPNSGLATIMSDGAGGSKWMFVGRNKAGQVWSDITGNRTGTVTINADGWGYFSVNGGSVSIWVNK

SEQ ID NO: 23141 - protein, 485 aa, Bacillus sp. 707
HHNGTNGTMMQYFEWYLPNDGNHWNRLNSDASNLKSKGITAVWIPPAWKGASQNDVGYGAYDLYDLGEFNQKGTVRTKYGTRSQLQAAVTSLKNNGIQVYGDVVMNHKGGADATEMVRAVEVNPNNRNQEVTGEYTIEAWTRFDFPGRGNTHSSFKWRWYHFDGVDWDQSRRLNNRIYKFRGHGKAWDWEVDTENGNYDYLMYADIDMDHPEVVNELRNWGVWYTNTLGLDGFRIDAVKHIKYSFTRDWINHVRSATGKNMFAVAEFWKNDLGAIENYLQKTNWNHSVFDVPLHYNLYNASKSGGNYDMRNIFSGTVVQRHPSHAVTFVDNHDSQPEEALESFVEEWFKPLAYALTLTREQGYPSVFYGDYYGIPTHGVPAMRSKIDPILEARQKYAYGKQNDYLDHHNIIGWTREGNTAHPNSGLATIMSDGAGGSKWMFVGRNKAGQVWSDITGNRTGTVTINADGWGNFSVNGGSVSIWVNK

SEQ ID NO: 23142 - protein, 485 aa, Bacillus sp. 707
HHNGTNGTMMQYFEWYLPNDGNHWNRLNSDASNLKSKGITAVWIPPAWKGASQNDVGYGAYDLYDLGEFNQKGTVRTKYGTRSQLQAAVTSLKNNGIQVYGDVVMNHKGGADATEMVRAVEVNPNNRNQEVTGEYTIEAWTRFDFPGRGNTHSSFKWRWYHFDGVDWDQSRRLNNRIYKFRGHGKAWDWEVDTENGNYDYLMYADIDMDHPEVVNELRNWGVWYTNTLGLDGFRIDAVKHIKYSFTRDWINHVRSATGKNMFAVAEFWKNDLGAIENYLQKTNWNHSVFDVPLHYNLYNASKSGGNYDMRNIFNGTVVQRHPSHAVTFVDNHDSQPEEALESFVEEWFKPLAYALTLTREQGYPSVFYGDYYGIPTHGVPAMRSKIDPILEARQKYAYGKQNDYLDHHNIIGWTREGNTAHPNSGLATIMSDGAGGSKWMFVGRNKAGQVWSDITGNRTGTVTINRDGWGNFSVNGGSVSIWVNK

SEQ ID NO: 23143 - protein, 485 aa, Bacillus sp. 707
HHNGTNGTMMQYFEWYLPNDGNHWNRLNSDASNLKSKGITAVWIPPAWKGASQNDVGYGAYDLYDLGEFNQKGTVRTKYGTRSQLQAAVTSLKNNGIQVYGDVVMNHKGGADATEMVRAVEVNPNNRNQEVTGEYTIEAWTRFDFPGRGNTHSSFKWRWYHFDGVDWDQSRRLNNRIYKFRGHGKAWDWEVDTENGNYDYLMYADIDMDHPEVVNELRNWGVWYTNTLGLDGFRIDAVKHIKYSFTRDWINHVRSATGKNMFAVAEFWKNDLGAIENYLQKTNWNHSVFDVPLHYNLYNASKSGGNYDMRNIFNGTVVQRHPSHAVTFVDNHDSQPEEALESFVEEWFKPLAYALTLTREHGYPSVFYGDYYGIPTHGVPAMRSKIDPILEARQKYAYGKQNDYLDHHNIIGWTREGNTAHPNSGLATIMSDGAGGSKWMFVGRNKAGQVWSDITGNRTGTVTINADGWGNFSVNGGSVSIWVNK

SEQ ID NO: 23144 - protein, 485 aa, Bacillus sp. 707
HHNGTNGTMMQYFEWYLPNDGNHWNRLNSDASNLKSKGITAVWIPPAWKGASQNDVGYGAYDLYDLGEFNQKGTVRTKYGTRSQLQAAVTSLKNNGIQVYGDVVMNHKGGADATEMVRAVEVNPNNRNQEVTGEYTIEAWTRFDFPGRGNTHSSFKWRWYHFDGVDWDQSRRLNNRIYKFRGHGKAWDWEVDTENGNYDYLMYADIDMDHPEVVNELRNWGVWYTNTLGLDGFRIDAVKHIKYSFTRDWINHVRSATGTNMFAVAEFWKNDLGAIENYLQKTNWNHSVFDVPLHYNLYNASKSGGNYDMRNIFNGTVVQRHPSHAVTFVDNHDSQPEEALESFVEEWFKPLAYALTLTREQGYPSVFYGDYYGIPTHGVPAMRSKIDPILEARQKYAYGKQNDYLDHHNIIGWTREGNTAHPNSGLATIMSDGAGGSKWMFVGRNKAGQVWSDITGNRTGTVTINADGWGNFSVNGGSVSIWVNK

SEQ ID NO: 23145 - protein, 485 aa, Bacillus sp. 707
HHNGTNGTMMQYFEWYLPNDGNHWNRLNSDASNLKSKGITAVWIPPAWKGASQNDVGYGAYDLYDLGEFNQKGTVRTKYGTRSQLQAAVTSLKNNGIQVYGDVVMNHKGGADATEMVRAVEVNPNNRNQEVTGEYTIEAWTRFDFPGRGNTHSSFKWRWYHFDGVDWDQSRRLNNRIYKFRGHGKAWDWEVDTENGNYDYLMYADIDMDHPEVVNELRNWGVWYTNTLGLDGFRIDAVKHIKYSFTRDWINHVRSATGKNMFAVAEFWKNDLGAIENYLQKTNWNHSVFDVPLHYNLYNASKSGGNYDMRNIFNGTVVQRHPSHAVTFVDNHDSQPEEALESFVEEWFKPLAYALTLTREQGYPSVFYGDYYGIPTHGRPAMRSKIDPILEARQKYAYGKQNDYLDHHNIIGWTREGNTAHPNSGLATIMSDGAGGSKWMFVGRNKAGQVWSDITGNRTGTVTINADGWGNFSVNGGSVSIWVNK

SEQ ID NO: 23146 - protein, 485 aa, Bacillus sp. 707
HHNGTNGTMMQYFEWYLPNDGNHWNRLNSDASNLKSKGITAVWIPPAWKGASQNDVGYGAYDLYDLGEFNQKGTVRTKYGTRSQLQAAVTSLKNNGIQVYGDVVMNHKGGADATEMVRAVEVNPNNRNQEVTGEYTIEAWTRFDFPGRGNTHSSFKWRWYHFDGVDWDQSRRLNNRIYKFRGHGKAWDWEVDTENGNYDYLMYADIDMDHPEVVNELRNWGVWYTNTLGLDGFRIDAVKHIKYSFTRDWINHVRSATGKNMFAVAEFWKNDLMAIENYLQKTNWNHSVFDVPLHYNLYNASKSGGNYDMRNIFNGTVVQRHPSHAVTFVDNHDSQPEEALESFVEEWFKPLAYALTLTREQGYPSVFYGDYYGIPTHGVPAMRSKIDPILEARQKYAYGKQNDYLDHHNIIGWTREGNTAHPNSGLATIMSDGAGGSKWMFVGRNKAGQVWSDITGNRTGTVTINADGWGNFSVNGGSVSIWVNK

SEQ ID NO: 23147 - protein, 485 aa, Bacillus sp. 707
HHNGTNGTMMQYFEWYLPNDGNHWNRLNSDASNLKSKGITAVWIPPAWKGASQNDVGYGAYDLYDLGEFNQKGTVRTKYGTRSQLQAAVTSLKNNGIQVYGDVVMNHKGGADATEMVRAVEVNPNNRNQEVTGEYTIEAWTRFDFPGRGNTHSSFKWRWYHFDGVDWDQSRRLNNRIYKFRGHGKAWDWEVDTENGNYDYLMYADIDMDHPEVVNELRNWGVWYTNTLGLDGFRIDAVKHIKYSFTRDWINHVRSATGKNMFAVAEFWKNDLGAIENYLQKTNWNHSVFDVPLHYNLYNASKSGGNYDMRNIFNGTVVQRHPSHAVTFVDNHDSQPEEALESFVEEWFKPLAYALTLTREGGYPSVFYGDYYGIPTHGVPAMRSKIDPILEARQKYAYGKQNDYLDHHNIIGWTREGNTAHPNSGLATIMSDGAGGSKWMFVGRNKAGQVWSDITGNRTGTVTINADGWGNFSVNGGSVSIWVNK

SEQ ID NO: 23148 - protein, 485 aa, Bacillus sp. 707
HHNGTNGTMMQYFEWYLPNDGNHWNRLNSDASNLKSKGITAVWIPPAWKGASQNDVGYGAYDLYDLGEFNQKGTVRTKYGTRSQLQAAVTSLKNNGIQVYGDVVMNHKGGADATEMVRAVEVNPNNRNQEVTGEYTIEAWTRFDFPGRGNTHSSFKWRWYHFDGVDWDQSRRLNNRIYKFRGHGKAWDWEVDTENGNYDYLMYADIDMDHPEVVNELRNWGVWYTNTLGLDGFRIDAVKHIKYSFTRDWINHVRSATGKNMFAVAEFWKNDLGAIENYLQKTNWNHSVFDVPLHYNLYNASKSGGNYDMRNIFNGTVVQRHPSHAVTFVDNHDSQPEEALESFVEEWFKPLAYALTLTREQGYPSVFYGDYYGIPTHGVPAMRSKIDPILEARQKYAYGKQNDYLDHHNIIGWTREGNTAHPNSGLATIMSDGAGGSKWMFVGRNKAGQLWSDITGNRTGTVTINADGWGNFSVNGGSVSIWVNK

SEQ ID NO: 23149 - protein, 485 aa, Bacillus sp. 707
HHNGTNGTMMQYFEWYLPNDGNHWNRLNSDASNLKSKGITAVWIPPAWKGASQNDVGYGAYDLYDLGEFKQKGTVRTKYGTRSQLQAAVTSLKNNGIQVYGDVVMNHKGGADATEMVRAVEVNPNNRNQEVTGEYTIEAWTRFDFPGRGNTHSSFKWRWYHFDGVDWDQSRRLNNRIYKFRGHGKAWDWEVDTENGNYDYLMYADIDMDHPEVVNELRNWGVWYTNTLGLDGFRIDAVKHIKYSFTRDWINHVRSATGKNMFAVAEFWKNDLGAIENYLQKTNWNHSVFDVPLHYNLYNASKSGGNYDMRNIFNGTVVQRHPSHAVTFVDNHDSQPEEALESFVEEWFKPLAYALTLTREQGYPSVFYGDYYGIPTHGVPAMRSKIDPILEARQKYAYGKQNDYLDHHNIIGWTREGNTAHPNSGLATIMSDGAGGSKWMFVGRNKAGQVWSDITGNRTGTVTINADGWGNFSVNGGSVSIWVNK

SEQ ID NO: 23150 - protein, 485 aa, Bacillus sp. 707
HHNGTNGTMMQYFEWYLPNDGNHWNRLNSDASNLKSKGITAVWIPPAWKGASQNDVGYGAYDLYDLGEFNQKGTVRTKYGTRSQLQAAVTSLKNNGIQVYGDVVMNHKGGADATEMVRAVEVNPNNRNQEVTGEYTIEAWTRFDFPGRGNTHSSFKWRWQHFDGVDWDQSRRLNNRIYKFRGHGKAWDWEVDTENGNYDYLMYADIDMDHPEVVNELRNWGVWYTNTLGLDGFRIDAVKHIKYSFTRDWINHVRSATGKNMFAVAEFWKNDLGAIENYLQKTNWNHSVFDVPLHYNLYNASKSGGNYDMRNIFNGTVVQRHPSHAVTFVDNHDSQPEEALESFVEEWFKPLAYALTLTREQGYPSVFYGDYYGIPTHGVPAMRSKIDPILEARQKYAYGKQNDYLDHHNIIGWTREGNTAHPNSGLATIMSDGAGGSKWMFVGRNKAGQVWSDITGNRTGTVTINADGWGNFSVNGGSVSIWVNK

SEQ ID NO: 23151 - protein, 485 aa, Bacillus sp. 707
HHNGTNGTMMQYFEWYLPNDGNHWNRLNSDASNLKSKGITAVWIPPAWKGASQNDVGYGAYDLYDLGEFNQKGTVRTKYGTRSQLQAAVTSLKNNGIQVYGDVVMNHKGGADATEMVRAVEVNPNNRNQEVTGEYTIEAWTRFDFPGRGNTHSSFKWRWYHFDGVDWDQSRRLNNRIYKFRGHGKAWDWEVDTENGNYDYLMYADIDMDHPEVVNELRNWGVWYTNTLGLDGFRIDAVKHIKYSFTRDWINHVRSATGKNMFAVAEFWKNDLGAIENYLQKTNWNHSVFDVPLHYNLYNASKSGGNYDMRNIFNGTVVQRHPSHAVTFVDNHDSQPEEALESFVEEWFKPLAYALTLTREQGEPSVFYGDYYGIPTHGVPAMRSKIDPILEARQKYAYGKQNDYLDHHNIIGWTREGNTAHPNSGLATIMSDGAGGSKWMFVGRNKAGQVWSDITGNRTGTVTINADGWGNFSVNGGSVSIWVNK

SEQ ID NO: 23152 - protein, 485 aa, Bacillus sp. 707
HHNGVNGTMMQYFEWYLPNDGNHWNRLNSDASNLKSKGITAVWIPPAWKGASQNDVGYGAYDLYDLGEFNQKGTVRTKYGTRSQLQAAVTSLKNNGIQVYGDVVMNHKGGADATEMVRAVEVNPNNRNQEVTGEYTIEAWTRFDFPGRGNTHSSFKWRWYHFDGVDWDQSRRLNNRIYKFRGHGKAWDWEVDTENGNYDYLMYADIDMDHPEVVNELRNWGVWYTNTLGLDGFRIDAVKHIKYSFTRDWINHVRSATGKNMFAVAEFWKNDLGAIENYLQKTNWNHSVFDVPLHYNLYNASKSGGNYDMRNIFNGTVVQRHPSHAVTFVDNHDSQPEEALESFVEEWFKPLAYALTLTREQGYPSVFYGDYYGIPTHGVPAMRSKIDPILEARQKYAYGKQNDYLDHHNIIGWTREGNTAHPNSGLATIMSDGAGGSKWMFVGRNKAGQVWSDITGNRTGTVTINADGWGNFSVNGGSVSIWVNK

SEQ ID NO: 23153 - protein, 485 aa, Bacillus sp. 707
HHNGTNGTMMQYFEWYLPNDGNHWNRLNSDASNLKSKGITAVWIPPAWKGASQNDVGYGAYDLYDLGEFNQKGTVRTKYGTRSQLQAAVTSLKNNGIQVYGDVVMNHKGGADATEMVRAVEVNPHNRNQEVTGEYTIEAWTRFDFPGRGNTHSSFKWRWYHFDGVDWDQSRRLNNRIYKFRGHGKAWDWEVDTENGNYDYLMYADIDMDHPEVVNELRNWGVWYTNTLGLDGFRIDAVKHIKYSFTRDWINHVRSATGKNMFAVAEFWKNDLGAIENYLQKTNWNHSVFDVPLHYNLYNASKSGGNYDMRNIFNGTVVQRHPSHAVTFVDNHDSQPEEALESFVEEWFKPLAYALTLTREQGYPSVFYGDYYGIPTHGVPAMRSKIDPILEARQKYAYGKQNDYLDHHNIIGWTREGNTAHPNSGLATIMSDGAGGSKWMFVGRNKAGQVWSDITGNRTGTVTINADGWGNFSVNGGSVSIWVNK

SEQ ID NO: 23154 - protein, 485 aa, Bacillus sp.
HHNGTNGTMMQYFEWYLPNDGNHWNRLNSDASNLKSKGITAVWIPPAWKGASQNDVGYGAYDLYDLGEFNQKGTVRTKYGTRSQLQAAVTSLKNNGIQVYGDVVMNHKGGADATEMVRAVEVNPNNRNQEVTGEYTIEAWTRFDFPGRGNTHSSFKWRWYHFDGVDWDQSRRLNNRIYKFRGHGKAWDWEVDTEFGNYDYLMYADYDMDHPEVVNELRNWGVWYTNTLGLDGFRIDAVKHIKYSFTRDWINHVRSATGKNMFAVAEFWKNDLGAIENYLQKTNWNHSVFDVPLHYNLYNASKSGGNYDMRNIFNGTVVQRHPSHAVTFVDNHDSQPEEALESFVEEWFKPLAYALTLTREQGYPSVFYGDYYGIPTHGVPAMRSKIDPILEARQKYAYGKQNDYLDHHNIIGWTREGNTAHPNSGLATIMSDGAGGSKWMFVGRNKAGQVWSDITGNRTGTVTINADGWGNFSVNGGSVSIWVNK

SEQ ID NO: 23155 - protein, 485 aa, Bacillus sp. 707
HHNGTNGTMMQYFEWYLPNDGNHWNRLNSDASNLKSKGITAVWIPPAWKGASQNDVGYGAYDLYDLGEFNQKGTVRTKYGTRSQLQAAVTSLKNNGIQVYGDVVMNHKGGADATEMVRAVEVNPNNRNQEVTGEYTIEAWTRFDFPGRGNTHSSFKWRWYHFDGVDWDQSRRLNNRIYKFRGHGKAWDWEVDTENGNYDYLMYADIDMDHPEVVNELRNWGVWYTNTLGLDGFRIDAVKHIKYSFTRDWINHVRSATGKNMFAVAEFWKNDLGAIENYLQKTNWNHSVFDVPLHYNLYNASKSGGNYDMRNIFNGTVVQRHPSHAVTFVDNHDSQPEEALESFVEEWFKPLAYALTLTREQGYPSVFYGDYYGIPTHGVPAMRSKIDPILEARQKYAYGKQNDYLDHHNIIGWTREGNTAHPNSGLATIMSDGAGGSKWMFVGRCKAGQVWSDITGNRTGTVTINADGWGNFSVNGGSVSIWVNK

SEQ ID NO: 23156 - protein, 485 aa, Bacillus sp. 707
HHNGTNGTMMQYFEWYLPNDGNHWNRLNSDAQNLKSKGITAVWIPPAWKGASQNDVGYGAYDLYDLGEFNQKGTVRTKYGTRSQLQAAVTSLKNNGIQVYGDVVMNHKGGADATEMVRAVEVNPNNRNQEVTGEYTIEAWTRFDFPGRGNTHSSFKWRWYHFDGVDWDQSRRLNNRIYKFRGHGKAWDWEVDTENGNYDYLMYADIDMDHPEVVNELRNWGVWYTNTLGLDGFRIDAVKHIKYSFTRDWINHVRSATGKNMFAVAEFWKNDLGAIENYLQKTNWNHSVFDVPLHYNLYNASKSGGNYDMRNIFNGTVVQRHPSHAVTFVDNHDSQPEEALESFVEEWFKPLAYALTLTREQGYPSVFYGDYYGIPTHGVPAMRSKIDPILEARQKYAYGKQNDYLDHHNIIGWTREGNTAHPNSGLATIMSDGAGGSKWMFVGRNKAGQVWSDITGNRTGTVTINADGWGNFSVNGGSVSIWVNK

SEQ ID NO: 23157 - protein, 485 aa, Bacillus sp. 707
HHNGTNGTMMQYFEWYLPNDGNHWNRLNSDASNLKSKGITAVWIPPAWKGASQNDVGYGAYDLYDLGEFNQKGTVRTKYGTRSQLQAAVTSLKNNGIQVYGDVVMNHKGGADATEMVRAVEVNPNNRNQEVTGEYTIEAWTRFDFPGRGNTHSSFKWRWYHFDGVDWDQSRRLNNRIYKFRGHGKAWDWEVDTENGNYDYLMYADIDMDHPEVVNELRNWGVWYTNTLGLDGFRIDAVKHIKYSFTRDWINHVRSATGKNMFAVAEFWKNDLGAIENYLQKTNWNHSVFDVPLHYNLYNASKSGGNYDMRNIFNGTVVQRHPSHAVTFVDNHDSQPEEALESFVEAWFKPLAYALTLTREQGYPSVFYGDYYGIPTHGVPAMRSKIDPILEARQKYAYGKQNDYLDHHNIIGWTREGNTAHPNSGLATIMSDGAGGSKWMFVGRNKAGQVWSDITGNRTGTVTINADGWGNFSVNGGSVSIWVNK

SEQ ID NO: 23158 - protein, 485 aa, Bacillus sp. 707
HHNGTNGTMMQYFEWYLPNDGNHWNRLNSDASNLKSKGITAVWIPPAWKGASQNDVGYGAYDLYDLGEFNQKGTVRTKYGTRSQLQAAVTSLKNNGIQVYGDVVMNHKGGADATEMVRAVEVNPNNRNQEVTGEYTIEAWTRFDFPGRGNTHSSFKWRWYHFDGVDWDQSRRLNNRIYKFRGHGKAWDWEVDTENGNYDYLMYADIDMDHPEVVNELRNWGVWYTNTLGLDGFRIDAVKHIKYSFTRDWINHVRSATGKNMFAVAEFWKNDLGAIENYLQKTNWNHSVFDVPLHYNLYNASKSGGNYDMRNIFNGTVVQRHPSHAVTFVDNHDSQPEEALESFVEEWFKPLAYALTLTREQGYPSVFYGDYYGIPTHGVPAMRSKIDPILEARYKYAYGKQNDYLDHHNIIGWTREGNTAHPNSGLATIMSDGAGGSKWMFVGRNKAGQVWSDITGNRTGTVTINADGWGNFSVNGGSVSIWVNK

SEQ ID NO: 23159 - protein, 485 aa, Bacillus sp. 707
HHNGTNGTMMQYFEWYLPNDGNHWNRLNSDASNLKSKGITAVWIPPAWKGASQNDVGYGAYDLYDLGEFNQKGTVRTKYGTRSQLQAAVTSLKNNGIQVYGDVVMNHKGGADATEMVRAVEVNPNNRNQEVTGEYTIEAWTRFDFPGRGNTHSSFKWRWYHFDGVDWDQSRRLNNRIYKFRGHGKAWDWEVDTENGNYDYLMYADIDMDHPEVVNELRNWGVWYTNTLGLDGFRIDAVKHIKYSFTRDWINHVRSATGKNMFAVAEFWKNDLGAIENYLQKTNWNHSVFDVPLHYNLYNASKSGGNYDMRNIFNGTVVQRHPSHAVTFVDNHDSQPEEALESFVEEWFKPLAYALTLTREQGYPSVFYGDYYGIPTHGVPAMRSKIDQILEARQKYAYGKQNDYLDHHNIIGWTREGNTAHPNSGLATIMSDGAGGSKWMFVGRNKAGQVWSDITGNRTGTVTINADGWGNFSVNGGSVSIWVNK

SEQ ID NO: 23160 - protein, 485 aa, Bacillus sp. 707
HHNGTNGTMMQYFEWYLPNDGNHWNRLNSDASNLKSKGITAVWIPPAWKGASQNDVGYGAYDLYDLGEFNQKGTVRTKYGTRSQLQAAVTSLKNNGIQVYGDVVMNHKGGADATEMVRAVEVNPNNRNQEVTGEYTIEAWTRFDFPGRGNTHSSFKWRWYHFDGVDWDQSRRLNNRIYKFRGHGKAWDWEVDTENGNYDYLMYADIDMDHPEVVNELRNWGVWYTNTLGLDGFRIDAVKHIKYSFTRDWINHVRSATGKNMFAVAEFWKNDLGAIENYLQKTNWNHSVFDVPLHYNLYNASKSGGNYDMRNIFNGTVVQRHPSHAVTFVDNHDSQPEEALESFVEEWFKPLAYALTLTREQGYPSVFYGDYYGIPTHGVPAMRSKIDPILEARQKYAYGKQNDYLDHHNIIGWTREGNTAHPNSGLATIMSDGAGGSKWMFVGRNKAGQVWSDCTGNRTGTVTINADGWGNFSVNGGSVSIWVNK

SEQ ID NO: 23161 - protein, 485 aa, Bacillus sp. 707
HHNGTNGTMMQYFEWYLPNDGNHWNRLNSDASNLKSKGITAVWIPPAWKGASQNDVGYGAYDLYDLGEFNQKGTVRTKYGTRSQLQAAVTSLKNNGIQVYGDVVMNHKGGADATEMVRAVEVNPNNRNQEVTGEYTIEAWTRFDFPGRGNTHSSFKWRWYHFDGVDWDQSRRLNNRIYKFRGHGKAWDWEVDTENGNYDYLMYADIDMDHPEVVNELRNWGVWYTNTLGLDGFRIDAVKHIKYSFTRDWINHVRSATGKNMFAVAEFWKNDLGAIENYLQKTNWNHSVFDVPLHYNLYNASKSGGNYDMRNIFNGTVVARHPSHAVTFVDNHDSQPEEALESFVEEWFKPLAYALTLTREQGYPSVFYGDYYGIPTHGVPAMRSKIDPILEARQKYAYGKQNDYLDHHNIIGWTREGNTAHPNSGLATIMSDGAGGSKWMFVGRNKAGQVWSDITGNRTGTVTINADGWGNFSVNGGSVSIWVNK

SEQ ID NO: 23162 - protein, 485 aa, Bacillus sp. 707
HHNGTNGTMMQYFEWYLPNDGNHWNRLNSDASNLKSKGITAVWIPPAWKGASQNDVGYGAYDLYDLGEFNQKGTVRTKYGTRSQLQAAVTSLKNNGIQVYGDVVMNHKGGADATEMVRAVEVNPNNRNQEVTGEYTIEAWTRFDFPGRGNTHSSFKWRWYHFDGVDWDQSRRLNNRIYKFRGHGKAWDWEVDTENGNYDYLMYADIDMDHPEVVNELRNWGVWYTNTLGLDGFRIDAVKHIKYSFTRDWINHVRSATGKNMFAVAEFWKNDLGAIENYLQKTNWNHSVFDVPLHYNLYNASKSGGNYDMRNIFNGTVVQRHPSHAVTFVDNHDSQPEEALESFVEEWFKPLAYALTLTREQGYPSVFYGDYYGIPTHGVPAMRSKIDPILEARQKYAYGKQNDYLDHHNIIGWTREGNTAHPNSGLATIMSDRAGGSKWMFVGRNKAGQVWSDITGNRTGTVTINADGWGNFSVNGGSVSIWVNK

SEQ ID NO: 23163 - protein, 485 aa, Bacillus sp. 707
HHNGTNGTMMQYFEWYLPNDGNHWNRLNSDASNLKSKGITAVWIPPAWKGASQMDVGYGAYDLYDLGEFNQKGTVRTKYGTRSQLQAAVTSLKNNGIQVYGDVVMNHKGGADATEMVRAVEVNPNNRNQEVTGEYTIEAWTRFDFPGRGNTHSSFKWRWYHFDGVDWDQSRRLNNRIYKFRGHGKAWDWEVDTENGNYDYLMYADIDMDHPEVVNELRNWGVWYTNTLGLDGFRIDAVKHIKYSFTRDWINHVRSATGKNMFAVAEFWKNDLGAIENYLQKTNWNHSVFDVPLHYNLYNASKSGGNYDMRNIFNGTVVQRHPSHAVTFVDNHDSQPEEALESFVEEWFKPLAYALTLTREQGYPSVFYGDYYGIPTHGVPAMRSKIDPILEARQKYAYGKQNDYLDHHNIIGWTREGNTAHPNSGLATIMSDGAGGSKWMFVGRNKAGQVWSDITGNRTGTVTINADGWGNFSVNGGSVSIWVNK

SEQ ID NO: 23164 - protein, 485 aa, Bacillus sp. 707
HHNGTNGTMMQYFEWYLPNDGNHWNRLNSDASNLKSKGITAVWIPPAWKGASQNDVGYGAYDLYDLGEFNQKGTVRTKYGTRSQLQAAVTSLKNNGIQVYGDVVMNHKGGADATEMVRAVEVNPNNRNQEVTGEYTIEAWTRFDFPGRGNTHSSFKWRWYHFDGVDWDQSRRLNNRIYKFRGHGKAWDWEVDTENGNYDYLMYADIDMDHPEVVNELRNWGVWYTNTLGLDGFRIDAVKHIKYSFTRDWINHVRSATGKNMFAVAEFWKNDLGAIENYLQKTNWNHSVFDVPLHYNLYNASKSGGNYDMRNIFNGTVVQRHPSHAVTFVDNHDSQPEEALESFVEEWFKPLAYALTLTREQGYPSVFYGDYYGIPTHGVPAMRSKIDYILEARQKYAYGKQNDYLDHHNIIGWTREGNTAHPNSGLATIMSDGAGGSKWMFVGRNKAGQVWSDITGNRTGTVTINADGWGNFSVNGGSVSIWVNK

SEQ ID NO: 23165 - protein, 485 aa, Bacillus sp. 707
HHNGTNGTMMQYFEWYLPNDGNHWNRLNSDASNLKSKGITAVWIPPAWKGASQNDVGYGAYDLYDLGEFNQKGTVRTKYGTRSQLQAAVTSLKNNGIQVYGDVVMNHKGGADATEMVRAVEVNPNNRNQEVTGEYTIEAWTRFDFPGRGNTHSSFKWRWYHFDGVDWDQSRRLNNRIYKFRGHGKAWDWEVDTENGNYDYLMYADIDMDHPEVVNELRNWGVWYTNTLGLDGCRIDAVKHIKYSFTRDWINHVRSATGKNMFAVAEFWKNDLGAIENYLQKTNWNHSVFDVPLHYNLYNASKSGGNYDMRNIFNGTVVQRHPSHAVTFVDNHDSQPEEALESFVEEWFKPLAYALTLTREQGYPSVFYGDYYGIPTHGVPAMRSKIDPILEARQKYAYGKQNDYLDHHNIIGWTREGNTAHPNSGLATIMSDGAGGSKWMFVGRNKAGQVWSDITGNRTGTVTINADGWGNFSVNGGSVSIWVNK

SEQ ID NO: 23166 - protein, 485 aa, Bacillus sp. 707
HHNGTNGTMMQYFEWYLPNDGNHWNRLNSDASNLKSKGITAVWIPPAWKGASQNDVGYGAYDLYDLGEFNQKGTVRTKYGTRSQLQAAVTSLKNNGIQVYGDVVMNHKGGADATEMVRAVEVNPNNRNQEVTGEYTIEAWTRFDFPGRGNTHSSFKWRWYHFDGVDWDQSRRLNNRIYKFRGHGKAWDWEVDTENGNYDYLMYADIDMDHPEVVNELRNWGVWYTNTLGLDGFRIDAVKHIKYSFTRDWINHVRSATGKNMFAVAEFWKNDLGAIENYLQKTNWNHSVFDVPLHYNLYNASKSGGNYDMRNIFNGTVVQRHPSHAVTFVDNHDSQPEEALESFVEEWFKPLAYALTLTREQGYPSVFYGDYYGIPTHGVPAMRSKIDPILEARQKYAYGKQNDYLDHHNIIGWTREGNTACPNSGLATIMSDGAGGSKWMFVGRNKAGQVWSDITGNRTGTVTINADGWGNFSVNGGSVSIWVNK

SEQ ID NO: 23167 - protein, 485 aa, Bacillus sp. 707
HHNGTNGTMMQYFEWYLPNDGNHWNRLNSDASNLKSKGITAVWIPPAWKGASQNDVGYGAYDLYDLGEFNQKGTVRTKYGTRSQLQAAVTSLKNNGIQVYGDVVMNHKGGADATEMVRAVEVNPNNRNQEVTGEYTIEAWTRFDFPGRGNTHSSFKWRWYHFDGVDWDQSRRLNSRIYKFRGHGKAWDWEVDTENGNYDYLMYADIDMDHPEVVNELRNWGVWYTNTLGLDGFRIDAVKHIKYSFTRDWINHVRSATGKNMFAVAEFWKNDLGAIENYLQKTNWNHSVFDVPLHYNLYNASKSGGNYDMRNIFNGTVVQRHPSHAVTFVDNHDSQPEEALESFVEEWFKPLAYALTLTREQGYPSVFYGDYYGIPTHGVPAMRSKIDPILEARQKYAYGKQNDYLDHHNIIGWTREGNTAHPNSGLATIMSDGAGGSKWMFVGRNKAGQVWSDITGNRTGTVTINADGWGNFSVNGGSVSIWVNK

SEQ ID NO: 23168 - protein, 485 aa, Bacillus sp. 707
HHNGTNGTMMQYFEWYLPNDGNHWNRLNSDASNLKSKGITAVWIPPAWKGASQNDVGYGAYDLYDLGEFNQKGTVRTKYGTRSQLQAAVTSLKRNGIQVYGDVVMNHKGGADATEMVRAVEVNPNNRNQEVTGEYTIEAWTRFDFPGRGNTHSSFKWRWYHFDGVDWDQSRRLNNRIYKFRGHGKAWDWEVDTENGNYDYLMYADIDMDHPEVVNELRNWGVWYTNTLGLDGFRIDAVKHIKYSFTRDWINHVRSATGKNMFAVAEFWKNDLGAIENYLQKTNWNHSVFDVPLHYNLYNASKSGGNYDMRNIFNGTVVQRHPSHAVTFVDNHDSQPEEALESFVEEWFKPLAYALTLTREQGYPSVFYGDYYGIPTHGVPAMRSKIDPILEARQKYAYGKQNDYLDHHNIIGWTREGNTAHPNSGLATIMSDGAGGSKWMFVGRNKAGQVWSDITGNRTGTVTINADGWGNFSVNGGSVSIWVNK

SEQ ID NO: 23169 - protein, 485 aa, Bacillus sp. 707
HHNGTNGTMMQYFEWYLPNDGNHWNRLNSDASNLKSKGITAVWIPPAWKGASQNDVGYGAYDLYDLGEFNQKGTVRTKYGTYSQLQAAVTSLKNNGIQVYGDVVMNHKGGADATEMVRAVEVNPNNRNQEVTGEYTIEAWTRFDFPGRGNTHSSFKWRWYHFDGVDWDQSRRLNNRIYKFRGHGKAWDWEVDTENGNYDYLMYADIDMDHPEVVNELRNWGVWYTNTLGLDGFRIDAVKHIKYSFTRDWINHVRSATGKNMFAVAEFWKNDLGAIENYLQKTNWNHSVFDVPLHYNLYNASKSGGNYDMRNIFNGTVVQRHPSHAVTFVDNHDSQPEEALESFVEEWFKPLAYALTLTREQGYPSVFYGDYYGIPTHGVPAMRSKIDPILEARQKYAYGKQNDYLDHHNIIGWTREGNTAHPNSGLATIMSDGAGGSKWMFVGRNKAGQVWSDITGNRTGTVTINADGWGNFSVNGGSVSIWVNK

SEQ ID NO: 23170 - protein, 485 aa, Bacillus sp. 707
HKNGTNGTMMQYFEWYLPNDGNHWNRLNSDASNLKSKGITAVWIPPAWKGASQNDVGYGAYDLYDLGEFNQKGTVRTKYGTRSQLQAAVTSLKNNGIQVYGDVVMNHKGGADATEMVRAVEVNPNNRNQEVTGEYTIEAWTRFDFPGRGNTHSSFKWRWYHFDGVDWDQSRRLNNRIYKFRGHGKAWDWEVDTENGNYDYLMYADIDMDHPEVVNELRNWGVWYTNTLGLDGFRIDAVKHIKYSFTRDWINHVRSATGKNMFAVAEFWKNDLGAIENYLQKTNWNHSVFDVPLHYNLYNASKSGGNYDMRNIFNGTVVQRHPSHAVTFVDNHDSQPEEALESFVEEWFKPLAYALTLTREQGYPSVFYGDYYGIPTHGVPAMRSKIDPILEARQKYAYGKQNDYLDHHNIIGWTREGNTAHPNSGLATIMSDGAGGSKWMFVGRNKAGQVWSDITGNRTGTVTINADGWGNFSVNGGSVSIWVNK

SEQ ID NO: 23171 - protein, 485 aa, Bacillus sp. 707
HHNGTNGTMMQYFEWYLPNDGNHWSRLNSDASNLKSKGITAVWIPPAWKGASQNDVGYGAYDLYDLGEFNQKGTVRTKYGTRSQLQAAVTSLKNNGIQVYGDVVMNHKGGADATEMVRAVEVNPNNRNQEVTGEYTIEAWTRFDFPGRGNTHSSFKWRWYHFDGVDWDQSRRLNNRIYKFRGHGKAWDWEVDTENGNYDYLMYADIDMDHPEVVNELRNWGVWYTNTLGLDGFRIDAVKHIKYSFTRDWINHVRSATGKNMFAVAEFWKNDLGAIENYLQKTNWNHSVFDVPLHYNLYNASKSGGNYDMRNIFNGTVVQRHPSHAVTFVDNHDSQPEEALESFVEEWFKPLAYALTLTREQGYPSVFYGDYYGIPTHGVPAMRSKIDPILEARQKYAYGKQNDYLDHHNIIGWTREGNTAHPNSGLATIMSDGAGGSKWMFVGRNKAGQVWSDITGNRTGTVTINADGWGNFSVNGGSVSIWVNK

SEQ ID NO: 23172 - protein, 485 aa, Bacillus sp. 707
HHNGTNGTMMQYFEWYLPNDGNHWNRLNSDASNLKSKGITAVWIPPAWKGASQNDVGYGAYDLYDLGEFNQKGTVRTKYGTRSQLQAAVTSLKNNGIQVYGDVVMNHKGGADATEMVRAVEVNPNNRNQEVTGEYTIEAWTRFDFPGRGNTHSSFKWRWYHFDGVDWDQSRRLNNRIYKFRGHGKAWDWEVDTENGNYDYLMYADIDMDHPEVVNELRNWGVWYTNTLGLDGFRIDAVKHIKYSFTRDWINHVRSATGKNMFAVAEFWKNDLGAIENYLQKTNWNHSVFDVPLHYNLYNASKEGGNYDMRNIFNGTVVQRHPSHAVTFVDNHDSQPEEALESFVEEWFKPLAYALTLTREQGYPSVFYGDYYGIPTHGVPAMRSKIDPILEARQKYAYGKQNDYLDHHNIIGWTREGNTAHPNSGLATIMSDGAGGSKWMFVGRNKAGQVWSDITGNRTGTVTINADGWGNFSVNGGSVSIWVNK

SEQ ID NO: 23173 - protein, 485 aa, Bacillus sp. 707
HHNGTNGTMMQYFEWYLPNDGNHWKRLNSDASNLKSKGITAVWIPPAWKGASQNDVGYGAYDLYDLGEFNQKGTVRTKYGTRSQLQAAVTSLKNNGIQVYGDVVMNHKGGADATEMVRAVEVNPNNRNQEVTGEYTIEAWTRFDFPGRGNTHSSFKWRWYHFDGVDWDQSRRLNNRIYKFRGHGKAWDWEVDTENGNYDYLMYADIDMDHPEVVNELRNWGVWYTNTLGLDGFRIDAVKHIKYSFTRDWINHVRSATGKNMFAVAEFWKNDLGAIENYLQKTNWNHSVFDVPLHYNLYNASKSGGNYDMRNIFNGTVVQRHPSHAVTFVDNHDSQPEEALESFVEEWFKPLAYALTLTREQGYPSVFYGDYYGIPTHGVPAMRSKIDPILEARQKYAYGKQNDYLDHHNIIGWTREGNTAHPNSGLATIMSDGAGGSKWMFVGRNKAGQVWSDITGNRTGTVTINADGWGNFSVNGGSVSIWVNK

SEQ ID NO: 23174 - protein, 485 aa, Bacillus sp. 707
HHNGTNDTMMQYFEWYLPNDGNHWNRLNSDASNLKSKGITAVWIPPAWKGASQNDVGYGAYDLYDLGEFNQKGTVRTKYGTRSQLQAAVTSLKNNGIQVYGDVVMNHKGGADATEMVRAVEVNPNNRNQEVTGEYTIEAWTRFDFPGRGNTHSSFKWRWYHFDGVDWDQSRRLNNRIYKFRGHGKAWDWEVDTENGNYDYLMYADIDMDHPEVVNELRNWGVWYTNTLGLDGFRIDAVKHIKYSFTRDWINHVRSATGKNMFAVAEFWKNDLGAIENYLQKTNWNHSVFDVPLHYNLYNASKSGGNYDMRNIFNGTVVQRHPSHAVTFVDNHDSQPEEALESFVEEWFKPLAYALTLTREQGYPSVFYGDYYGIPTHGVPAMRSKIDPILEARQKYAYGKQNDYLDHHNIIGWTREGNTAHPNSGLATIMSDGAGGSKWMFVGRNKAGQVWSDITGNRTGTVTINADGWGNFSVNGGSVSIWVNK

SEQ ID NO: 23175 - protein, 485 aa, Bacillus sp.
HHNGTNGTMMQYFEWYLPNDGNHWNRLRSDASNLKDKGISAVWIPPAWKGASQNDVGYGAYDLYDLGEFNQKGTIRTKYGTRNQLQAAVNALKSNGIQVYGDVVMNHKGGADATEMVRAVEVNPNNRNQEVSGEYTIEAWTKFDFPGRGNTHSNFKWRWYHFNGVDWDQSRKLNNRIYKFRGDGKGWDWEVDTENGNYDYLMYADINMSHPEVVNELRNWGVWYTNTLGLDGFRIDAVKHIKYSFTRDWINHVRSATGKNMFAVAEFWKNDLGAIENYLNKTNWNHSVFDVPLHYNLYNASKSGGNYDMRQIFNGTVVQRHPMHAVTFVDNHDSQPEEALESFVEEWFKPLAYALTLTREQGYPSVFYGDYYGIPTHGVPAMKSKIDPILEARQKYAYGRQNDYLDHHNIIGWTREGNTAHPNSGLATIMSDGAGGNKWMFVGRNKAGQVWTDITGNRAGTVTINADGWGNFSVNGGSVSIWVNK

SEQ ID NO: 23176 - protein, 485 aa, Bacillus sp. 707
HHNGTNGTMMQYFEWYLPNDGNHWNRLNSDASNLKSKGITAVWIPPAWKGASQNDVGYGAYDLYDLGEFNQKGTVRTKYGTRSQLQAAVTSLKNNGIQVYGDVVMNHKGGADATEMVRAVEVNPNNRNQEVTGEYTIEAWTRFDFPGRGNTHSSFKWRWYHFDGVDWDQSRRLNNRIYKFRGHGKAWDWEVDTENGNYDYLMYADIDMDHPEVVNELRNWGVWYTNTLGLDGFRIDAVKHIKYSFTRDWINHVRSATGKNMFAVAEFWKNDLGAIENYLQKTNWNHSVFDVPLHYNLYNASKSGGNYDMRNIFNGTVVQRHPSHAVTFVDNHDSQPEEALESFVEEWFKPLAYALTLTREQGYPSVFYGDYYGIPTHGVPAMRSKIDPILEARQKYAYGKQNDYLDHHNIIGWTREGNTAHPNSGLATIMSDGAGGSKWMFVGRNSAGQVWSDITGNRTGTVTINADGWGNFSVNGGSVSIWVNK

SEQ ID NO: 23177 - protein, 485 aa, Bacillus sp.
HHNGTNGTMMQYFEWYLPNDGNHWNRLNSDASNLKSKGITAVWIPPAWKGASQNDVGYGAYDLYDLGEFNQKGTVRTKYGTRSQLQAAVTSLKNNGIQVYGDVVMNHKGGADATEMVRAVEVNPNNRNQEVTGEYTIEAWTRFDFPGRGNTHSSFKWRWYHFDGVDWDQSRRLNNRIYKFRGHGKAWDWEVDTENGNYDYLMYADYDMDHPEGVNELRNWGVWYTNTLGLDGFRIDAVKHIKYSFTRDWINHVRSATGKNMFAVAEFWKNDLGAIENYLQKTNWNHSVFDVPLHYNLYNASKSGGNYDMRNIFNGTVVQRHPSHAVTFVDNHDSQPEEALESFVEEWFKPLAYALTLTREQGYPSVFYGDYYGIPTHGVPAMRSKIDPILEARQKYAYGKQNDYLDHHNIIGWTREGNTAHPNSGLATIMSDGAGGSKWMFVGRNKAGQVWSDITGNRTGTVTINADGWGNFSVNGGSVSIWVNK

SEQ ID NO: 23178 - protein, 485 aa, Bacillus sp. 707
HHNGTNGTMMQYFEWYLPNDGNHWNRLNSDASNLKSKGITAVWIPPAWKGASQNDVGYGAYDLYDLGEFNQKGTVRTKYGTRSQLQAAVTSLKNNGIQVYGDVVMNHKGGADATEMVRAVEVNPNNRNQEVTGEYTIEAWTRFDFPGRGNTHSSFKWRWYHFDGVDWDQSRRLNNRIYKFRGHGKAWDWEVDTENGNYDYLMYADIDMDHPEVVNELRNWGVWYTNTLGLDGMRIDAVKHIKYSFTRDWINHVRSATGKNMFAVAEFWKNDLGAIENYLQKTNWNHSVFDVPLHYNLYNASKSGGNYDMRNIFNGTVVQRHPSHAVTFVDNHDSQPEEALESFVEEWFKPLAYALTLTREQGYPSVFYGDYYGIPTHGVPAMRSKIDPILEARQKYAYGKQNDYLDHHNIIGWTREGNTAHPNSGLATIMSDGAGGSKWMFVGRNKAGQVWSDITGNRTGTVTINADGWGNFSVNGGSVSIWVNK

SEQ ID NO: 23179 - protein, 485 aa, Bacillus sp. 707
HHNGTNGTMMQYFEWYLPNDGNHWNRLNSDASNLKSKGITAVWIPPAWKGASQNDVGYGAYDLYDLGEFNQKGTVRTKYGTRSQLQAAVTSLKKNGIQVYGDVVMNHKGGADATEMVRAVEVNPNNRNQEVTGEYTIEAWTRFDFPGRGNTHSSFKWRWYHFDGVDWDQSRRLNNRIYKFRGHGKAWDWEVDTENGNYDYLMYADIDMDHPEVVNELRNWGVWYTNTLGLDGFRIDAVKHIKYSFTRDWINHVRSATGKNMFAVAEFWKNDLGAIENYLQKTNWNHSVFDVPLHYNLYNASKSGGNYDMRNIFNGTVVQRHPSHAVTFVDNHDSQPEEALESFVEEWFKPLAYALTLTREQGYPSVFYGDYYGIPTHGVPAMRSKIDPILEARQKYAYGKQNDYLDHHNIIGWTREGNTAHPNSGLATIMSDGAGGSKWMFVGRNKAGQVWSDITGNRTGTVTINADGWGNFSVNGGSVSIWVNK

SEQ ID NO: 23180 - protein, 485 aa, Bacillus sp. 707
HHNGTNGTMMQYFEWYLPNDGNHWNRLNSDASNLKSKGITAVWIPPAWKGASQNDVGYGAYDLYDLGEFNQKGTVRTKYGTRSQLQAAVTSLKNNGIQVYGDVVMNHKGGADATEMVRAVEVNPNNRNQEVTGEYTIEAWTRFDFPGRGNTHSSFKWRWYHFDGVDWDQSRRLNNRIYKFRGHGKAWDWEVDTENGNYDYLMYADIDMDHPEVVNELRNWGVWYTNTLGLDGFRIDAVKHIKYSFTRDWINHVRSATGKNMFAVAEFWKNDLGAIENYLQKTNWNHSVFDVPLHYNLYNASKSGGNYDMRNIFNGTVVQRHPSHAVTFVDNHDSQPEEALESFVEEWFKPLAYALTLTREQGYPSVFYGDYYGIPTHGVPAMRSKIDPILEARQKYAYGKQNDYLDHHNIIGWTREGNTAHPNSGLATIMSDGAGGSKWMFVGRNKAGQVWSDITGNRTGAVTINADGWGNFSVNGGSVSIWVNK

SEQ ID NO: 23181 - protein, 485 aa, Bacillus sp. 707
HHNGTNGTMMQYFEWYLPNDGNHWNRLNSDASNLKSKGITAVWIPPAWKGASQNDVGYGAYDLYDLGEFNQKGTVRTKYGTRSQLQAAVTSLKNNGIQVYGDVVMNHKGGADATEMVRAVEVNPNNRNQEVTGEYTIEAWTRFDFPGRGNTHSSFKWRWYHFDGVDWDQSRRLNNRIYKFRGHGKAWDWEVDTENGNYDYLMYADIDMDHPEVVNELRNWGVWYTNTLGLDGFRIDAVKHIKYSFTRDWINHVRSATGKNMFAVAEFWKNDLGAIENYLQKTNWNHSVFDVPLHYNLYNASKSGGNYDMRNIFNGTVVQRHPSHAVTFVDNHDSQPEEALESFVEEWFKPLAYALTLTREQGYPSVFYGDYYGIPTHGVPAMRSKIDPMLEARQKYAYGKQNDYLDHHNIIGWTREGNTAHPNSGLATIMSDGAGGSKWMFVGRNKAGQVWSDITGNRTGTVTINADGWGNFSVNGGSVSIWVNK

SEQ ID NO: 23182 - protein, 485 aa, Bacillus sp. 707
HHNGTNGTMMQYFEWYLPNDGNHWNRLNSDASNLKSKGITAVWIPPAWKGASQNDVGYGAYDLYDLGEFNQKGTVRTKYGTRSQLQAAVTSLKNNGIQVYGDVVMNHKGGADATEMVRAVEVNPNNRNQEVTGEYTIEAWTRFDFPGRGNTHSSFKWRWYHFDGVDWDQSRRLNNRIYKFRGHGKAWDWEVDTENGNYDYLMYADIDMDHPEVVNELRNWGVWYTNTLGLDGFRIDAVKHIKYSFTRDWINHVRSATGKNMFAVAEFWKNDLGAIENYLQKTNWNHSVFDVPLHYNLYNASKSGGNYDMRNIFNGTVVQRHPSHAVTFVDNHDSQPEEALESFVEEWFKPLAYALTLTREEGYPSVFYGDYYGIPTHGVPAMRSKIDPILEARQKYAYGKQNDYLDHHNIIGWTREGNTAHPNSGLATIMSDGAGGSKWMFVGRNKAGQVWSDITGNRTGTVTINADGWGNFSVNGGSVSIWVNK

SEQ ID NO: 23183 - protein, 485 aa, Bacillus sp. 707
HHNGTNGTMMQYFEWYLPNDGNHWNRLNSDASNLKSKGITAVWIPPAWKGASQNDVGYGAYDLYDLGEFNQKGTVRTKYGTRSQLQAAVTSLKNNGIQVYGDVVMNHKGGADATEMVRAVEVNPNNRNQEVTGEYTIEAWTRFDFPGRGNTHSSFKWRWYHFDGVDWDQSRRLNNRIYKFRGHGKAWDWEVDTENGNYDYLMYADIDMDHPEVVNELRNWGVWYTNTLGLDGFRIDAVKHIKYSFTRDWINHVRSATGKNMFAVAEFWKNDLGAIENYLQKTNWNHSVFDVPLHYNLYNASKMGGNYDMRNIFNGTVVQRHPSHAVTFVDNHDSQPEEALESFVEEWFKPLAYALTLTREQGYPSVFYGDYYGIPTHGVPAMRSKIDPILEARQKYAYGKQNDYLDHHNIIGWTREGNTAHPNSGLATIMSDGAGGSKWMFVGRNKAGQVWSDITGNRTGTVTINADGWGNFSVNGGSVSIWVNK

SEQ ID NO: 23184 - protein, 485 aa, Bacillus sp. 707
HHNGTNGTMMQYFEWYLPNDGNHWNRLNSDASNLKSKGITAVWIPPAWKGASQNDVGYGAYDLYDLGEFNQKGTVRTKYGTRSQLQAAVTSLKNNGIQVYGDVVMNHKGGADATEMVRAVEVNPNNRNQEVTGEYTIEAWTRFDFPGRGNTHSSFKWRWNHFDGVDWDQSRRLNNRIYKFRGHGKAWDWEVDTENGNYDYLMYADIDMDHPEVVNELRNWGVWYTNTLGLDGFRIDAVKHIKYSFTRDWINHVRSATGKNMFAVAEFWKNDLGAIENYLQKTNWNHSVFDVPLHYNLYNASKSGGNYDMRNIFNGTVVQRHPSHAVTFVDNHDSQPEEALESFVEEWFKPLAYALTLTREQGYPSVFYGDYYGIPTHGVPAMRSKIDPILEARQKYAYGKQNDYLDHHNIIGWTREGNTAHPNSGLATIMSDGAGGSKWMFVGRNKAGQVWSDITGNRTGTVTINADGWGNFSVNGGSVSIWVNK

SEQ ID NO: 23185 - protein, 485 aa, Bacillus sp. 707
HHNGTNGTMMQYFEWYLPNDGNHWTRLNSDASNLKSKGITAVWIPPAWKGASQNDVGYGAYDLYDLGEFNQKGTVRTKYGTRSQLQAAVTSLKNNGIQVYGDVVMNHKGGADATEMVRAVEVNPNNRNQEVTGEYTIEAWTRFDFPGRGNTHSSFKWRWYHFDGVDWDQSRRLNNRIYKFRGHGKAWDWEVDTENGNYDYLMYADIDMDHPEVVNELRNWGVWYTNTLGLDGFRIDAVKHIKYSFTRDWINHVRSATGKNMFAVAEFWKNDLGAIENYLQKTNWNHSVFDVPLHYNLYNASKSGGNYDMRNIFNGTVVQRHPSHAVTFVDNHDSQPEEALESFVEEWFKPLAYALTLTREQGYPSVFYGDYYGIPTHGVPAMRSKIDPILEARQKYAYGKQNDYLDHHNIIGWTREGNTAHPNSGLATIMSDGAGGSKWMFVGRNKAGQVWSDITGNRTGTVTINADGWGNFSVNGGSVSIWVNK

SEQ ID NO: 23186 - protein, 485 aa, Bacillus sp. 707
HHNGTNGTMMQYFEWYLPNDGNHWNRLNSDASNLKSKGITAVWIPPAWKGASQNDVGYGAYDLYDLGEFNQKGTVRTKYGTRSQLQAAVTSLKNNGIQVYGDVVMNHKGGADATEMVRAVEVNPNNRNQEVTGEYTIEAWTRFDFPGRGNTHSSFKWRWYHFDGVDWDQSRRLNNRIYKFRGHGKAWDWEVDTENGNYDYLMYADIDMDHPEVVNELRNWGVWYTNTLGLDGFRIDAVKHIKYSFTRDWINHVRSATGKNMFAVAEFWKNDLGAIENYLQKTNWNHSVFDVPLHYNLYNASKSGGNYDMRNIFNGTVVQRHPSHAVTFVDNHDSQPEEALESFVEEWFKPLAYALTLTREQGYPSVFYGDYYGIPTHGVPAMRSKIDPILEARQKYAYGKQNDYLDHHNIIGWTREGNTAHPNSGLATIMSDGAGGSKWMFVGRNKAGQVWSDITGNRTETVTINADGWGNFSVNGGSVSIWVNK

SEQ ID NO: 23187 - protein, 485 aa, Bacillus sp. 707
HHNGTNGTMMQYFEWYLPNDGNHWNRLNSDASNLKSKGITAVWIPPAWKGASQNDVGYGAYDLYDLGEFNQKGTVRTKYGTRSQLQAAVTSLKNNGIQVYGDVVMNHKGGADATEMVRAVEVNPNNRNQEVTGEYTIEAWTRFDFPGRGNTHSSFKWRWYHFDGVDWDQSRRLNNRIYKFRGHGKAWDWEVDTENGNYDYLMYADIDMDHPEVVNELRNWGVWYTNTLGLDGFRIDAVKHIKYSFTRDWINHVRSATGKNMFAVAEFWKNDLGAIENYLQKTNWNHSVFDVPLHYNLYNASKSGGNYDMRNIFNGTVVQRHPSHAVTFVDNHDSQPEEALESFVEEWFKPLAYALTLTREQGYPSVFYGDYYGIPTHGVPAMRSKIDPILEARQKYAYGKQNDYLDHHNIIGWTREGNTAHPNSGLATIMSDGAQGSKWMFVGRNKAGQVWSDITGNRTGTVTINADGWGNFSVNGGSVSIWVNK

SEQ ID NO: 23188 - protein, 485 aa, Bacillus sp.
HHNGTNGTMMQYFEWYLPNDGNHWNRLNSDASNLKSKGITAVWIPPAWKGASQNDVGYGAYDLYDLGEFNQKGTVRTKYGTRSQLQAAVTSLKNNGIQVYGDVVMNHKGGADATEMVRAVEVNPNNRNQEVTGEYTIEAWTRFDFPGRGNTHSSFKWRWYHFDGVDWDQSRRLNNRIYKFRGHGKAWDWEVDTENGNYDYLMYADIDMDHPEVVNELRNWGVWYTNTLGLDGFRIDAVKHIKYSFTRDWINHVRSATGKNMFAVAEFWKNDLGAIENYLQKTNWNHSVFDVPLHYNLYNASKSGGNYDMRNIFNGTVVQRHPSHAVTFVDNHDSQPEEALESFVEEWFKPLAYALTLTREQGYPSVFYGDYYGIPKHGVPAMRSKIDPILEARQKYAYGKQNDYLDHHNIIGWTREGNTAHPNSGLATIMSDGAGGSKWMFVGRNKAGQVWSDITGNRTGTVTINADGWGNFSVNGGSVSIWVNK

SEQ ID NO: 23189 - protein, 485 aa, Bacillus sp. 707
HHNGTNGTMMQYFEWYLPNDGNHWNRLNSDASNLKSKGITAVWIPPAWKGASQNDVGYGAYDLYDLGEFNQKGTVRTKYGTRSQLQAAVTSLKNNGIQVYGDVVMNHKGGADATEMVRAVEVNPNNRNQEVTGEYTIEAWTRFDFPGRGNTHSSFKWRWYHFDGVDWDQSRRLNNRIYKFRGHGKAWDWEVDTENGNYDYLMYADIDMDHPEVVNELRNWGVWYTNTLGLDGFRIDAVKHIKYSFTRDWINHVRSATGKNMFAVAEFWKNDLGAIENYLQKTNWNHSVFDVPLHYNLYNASKSGGNYDMRNIFNGTVVQRHPSHAVTFVDNHDSQPEEALESFVEEWFKPLAYALTLTREQGYPSVFYGDYYGIPTHGVPAMRSKIDPILEARQKYAYGKQNDYLDHHNIIGWTREGNTAHPISGLATIMSDGAGGSKWMFVGRNKAGQVWSDITGNRTGTVTINADGWGNFSVNGGSVSIWVNK

SEQ ID NO: 23190 - protein, 485 aa, Bacillus sp. 707
HHNGTNGTMMQYFEWYLPNDGNHWNRLNSDASNLKSKGITAVWIPPAWKGASQNDVGYGAYDLYDLGEFNQKGTVRTKYGTRSQLQAAVTSLKNNGIQVYGDVVMNHKGGADATEMVRAVEVNPNNRNQEVTGEYTIEAWTRFDFPGRGNTHSSFKWRWEHFDGVDWDQSRRLNNRIYKFRGHGKAWDWEVDTENGNYDYLMYADIDMDHPEVVNELRNWGVWYTNTLGLDGFRIDAVKHIKYSFTRDWINHVRSATGKNMFAVAEFWKNDLGAIENYLQKTNWNHSVFDVPLHYNLYNASKSGGNYDMRNIFNGTVVQRHPSHAVTFVDNHDSQPEEALESFVEEWFKPLAYALTLTREQGYPSVFYGDYYGIPTHGVPAMRSKIDPILEARQKYAYGKQNDYLDHHNIIGWTREGNTAHPNSGLATIMSDGAGGSKWMFVGRNKAGQVWSDITGNRTGTVTINADGWGNFSVNGGSVSIWVNK

SEQ ID NO: 23191 - protein, 485 aa, Bacillus sp. 707
HHNGTNGTMMQYFEWYLPNDGNHWNRLNSDASNLKSKGITAVWIPPAWKGASQFDVGYGAYDLYDLGEFNQKGTVRTKYGTRSQLQAAVTSLKNNGIQVYGDVVMNHKGGADATEMVRAVEVNPNNRNQEVTGEYTIEAWTRFDFPGRGNTHSSFKWRWYHFDGVDWDQSRRLNNRIYKFRGHGKAWDWEVDTENGNYDYLMYADIDMDHPEVVNELRNWGVWYTNTLGLDGFRIDAVKHIKYSFTRDWINHVRSATGKNMFAVAEFWKNDLGAIENYLQKTNWNHSVFDVPLHYNLYNASKSGGNYDMRNIFNGTVVQRHPSHAVTFVDNHDSQPEEALESFVEEWFKPLAYALTLTREQGYPSVFYGDYYGIPTHGVPAMRSKIDPILEARQKYAYGKQNDYLDHHNIIGWTREGNTAHPNSGLATIMSDGAGGSKWMFVGRNKAGQVWSDITGNRTGTVTINADGWGNFSVNGGSVSIWVNK

SEQ ID NO: 23192 - protein, 485 aa, Bacillus sp.
HHNGTNGTLMQYFEWYLPNDGNHWNRLRSDASNLKDKGISAVWIPPAWKGASQNDVGYGAYDLYDLGEFNQKGTIRTKYGTRNQLQAAVNALKSNGIQVYGDVVMNHKGGADATEMVRAVEVNPNNRNQEVSGEYTIEAWTKFDFPGRANTHSNFKWRWYHFDGVDWDQSRKLNNRIYKFRGDGKGWDWEVDTENGNYDYLTYADIDMDHPEVVNELRNWGVWYTNTLGLDGFRIDAVKHIKYSFTRDWINHVRSATGKNMFAVAEFWKNDLGAIENYLNKTNWNHSVFDVPLHFNLYNASKSGGNYDMRQIFNGTVVQRHPMHAVTFVDNHDSQPEESLESFVREWFKPLAYALTLTREQGYPSVFYGDYYGIPTHGVPAMKSKIDPILEARQKYAYGRQNDYLDHHNIIGWTREGNTAHPNSGLATIMSDGAGGNKWMFVGRNKAGQVWTDITGNRAGTVTINADGWGNFSVNGGSVSIWVNK

SEQ ID NO: 23193 - protein, 485 aa, Bacillus sp.
HHNGTNGTMMQYFEWYLPNDGNHWNRLRSDASNLKDKGISAVWIPPAWKGASQNDVGYGAYDLYDLGEFNQKGTIRTKYGTRNQLQAAVNALKSNGIQVYGDVVMNHKGGADATEMVRAVEVNPNNRNQEVSGEYTIEAWTKFDFPGRGNTHSNFKWRWYHFDGVDWDQSRKLNNRIYKFRGDGKGWDWEVDTENGNYDYLTYADIDMDHPEVVNELRNWGVWYTNTLGLDGFRIDAVKHIKYSFTRDWINHVRSATGKNMFAVAEFWKNDLGAIENYLNKTNWNHSVFDVPLHYNLYNASKSGGNYDLRQIFNGTVVQRHPTHAVTFVDNHDSQPEEALESFVEEWFKPLAYALTLTREQGYPSVFYGDYYGIPTHGVPAMKSKIDPILEARQKYAYGRQNDYLDHHNIIGWTREGNTAHPNSGLATIMSDGAGGNKWMFVGRNKAGQVWTDITGNRAGTVTINADGWGNFSVNGGSVSIWVNK

SEQ ID NO: 23194 - protein, 485 aa, Bacillus sp. 707
HHNGTNGTMMQYFEWYLPNDGNHWNRLNSDASNLKSKGITAVWIPPAWKGASQNDVGYGAYDLYDLGEFNQKGTVRTKYGTRSQLQAAVTSLKNNGIQVYGDVVMNHKGGADATEMVRAVEVNPNNRNQEVTGEYTIEAWTRFDFPGRGNTHSSFKWRWYHFDGVDWDQSRRLNNRIYKFRGHGKAWDWEVDTENGNYDYLMYADIDMDHPEVVNELRNWGVWYTNTLGLDGFRIDAVKHIKYSFTRDWINHVRSATGKNMFAVAEFWKNDLGAIENYLQKTNWNHSVFDVPLHYNLYNASKSGGNYDMRNIFNGTVVQRHPSHAVTFVDNHDSQPEEALESFVEEWFKPLAYALTLTREQGYPSVFYGDYYGIPTHGVPAMRSKIDPILEARQKYAYGKQNDYLDHHNIIGWTREGNTAHPNSGLATIMSDGAGGSKWMFVGRNKAGQVWSDITGNRTGGVTINADGWGNFSVNGGSVSIWVNK

SEQ ID NO: 23195 - protein, 485 aa, Bacillus sp. 707
HHNGTNGTMMQYFEWYLPNDGNHWNRLNSDASNLKSKGITAVWIPPAWKGASQNDVGYGAYDLYDLGEFNQKGTVRTKYGTRSQLQAAVTSLKNNGIQVYGDVVMNHKGGADATEMVRAVEVNPNNRNQEVTGEYTIEAWTRFDFPGRGNTHSSFKWRWYHFDGVDWDQSRRLNNRIYKFRGHGKAWDWEVDTENGNYDYLMYADIDMDHPEVVNELRNWGVWYTNTLGLDGFRIDAVKHIKYSFTRDWINHVRSATGKNMFAVAEFWKNDLGAIENYLQKTNWNHSVFDVPLHYNLYNASKSGGNYDMRNIFNGTVVQRHPSHAVTFVDNHDSQPEEALESFVEEWFKPLAYALTLTREQGYPSVFYGDYYGIPTHGVPAMRSKIDPILEARQKYAYGKQNDYLDHHNIIGWTREGNQAHPNSGLATIMSDGAGGSKWMFVGRNKAGQVWSDITGNRTGTVTINADGWGNFSVNGGSVSIWVNK

SEQ ID NO: 23196 - protein, 483 aa, Bacillus sp. SP70
HHNGTNGTMMQYFEWYLPNDGNHWNRLNSDASNLKSKGITAVWIPPAWKGASQNDVGYGAYDLYDLGEFNQKGTVRTKYGTRSQLQAAVTSLKNNGIQVYGDVVMNHKGGADATEMVRAVEVNPNNRNQEVTGEYTIEAWTRFDFPGRGNTHSSFKWRWSHFDGVDWDQSRRLNNRIYKFRGKAWDWEVDTENGNYDYLMYADIDMDHPEVVNELRNWGVWYTNTLGLDGFRIDAVKHIKYSFTRDWINHVRSATGKNMFAVAEFWKNDLGAIENYLQKTNWNHSVFDVPLHYNLYNASKSGGNYDMRNIFNGTVVQRHPSHAVTFVDNHDSQPEEALESFVEEWFKPLAYALTLTREQGYPSVFYGDYYGIPTHGVPAMRSKIDPILEARQKYAYGKQNDYLDHHNIIGWTREGNTAHPNSGLATIMSDGAGGSKWMFVGRNKAGQVWSDITGNRTGTVTINADGWGNFSVNGGSVSIWVNK

SEQ ID NO: 23197 - protein, 485 aa, Bacillus sp.
HHNGTNGTMMQYFEWYLPNDGNHWNRLRSDASNLKDKGISAVWIPPAWKGASQNDVGYGAYDLYDLGEFNQKGTIRTKYGTRNQLQAAVNALKSNGIQVYGDVVFNHKGGADATEMVRAVEVNPNNRNQEVSGEYTIEAWTKFDFPGRGNTHSNFKWRWYHFDGVDWDQSRKLNNRIYKFRGDGKGWDWEVDTENGNYDYLVYADIDFDHPEVVNELRNWGVWYTNTLGLDGFRIDAVKHIKYSFTRDWINHVRSATGKNMFAVAEFWKNDLGAIENYLNKTNWNHSVFDVPLHYNLYNASKSGGNYDMRQIFNGTVVQRHPMHAVTFVDNHDSQPEEALESFVEEWFKPLAYALTLTREQGYPSVFYGDYYGIPTHGVPAMKSKIDPILEARQKYAYGRQNDYLDHHNIIGWTREGNTAHPNSGLATIMSDGAGGNKWMFVGRNKAGQVWTDITGNRAGTVTINADGWGNFSVNGGSVSIWVNK

SEQ ID NO: 23198 - protein, 485 aa, Bacillus sp.
HHNGTNGTLMQYFEWYLPNDGNHWNRLRSDASNLKDKGISAVWIPPAWKGASQNDVGYGAYDLYDLGEFNQKGTIRTKYGTRNQLQAAVNALKSNGIQVYGDVVMNHKGGADATEMVRAVEVNPNNRNQEVSGEYTIEAWTKFDFPGRGNTHSNFKWRWYHFDGVDWDQSRKLNNRIYKFRGDGKGWDWEVDTENGNYDYLXYADIDMDHPEVVNELRNWGVWYTNTLGLDGFRIDAVKHIKYSFTRDWINHVRSATGKNMFAVAEFWKNDLGAIENYLNKTNWNHSVFDVPLHYNLYNASKSGGNYDMRQIFNGTVVQRHPTHAVTFVDNHDSQPEEALESFVEEWFKPLAYALTLTREQGYPSVFYGDYYGIPTHGVPAMKSKIDPILEARQKYAYGRQNDYLDHHNIIGWTREGNTAHPNSGLATIMSDGAGGNKWMFVGRNKAGQVWTDITGNRAGTVTINADGWGNFSVNGGSVSIWVNK

SEQ ID NO: 23199 - protein, 483 aa, Bacillus sp.
HHNGTNGTLMQYFEWYLPNDGNHWNRLRSDASNLKDKGISAVWIPPAWKGTSQNDVGYGAYDLYDLGEFNQKGTIRTKYGTRNQLQAAVNALKSNGIQVYGDVVMNHKGGADATEMVKAVEVNPNNRNQEVSGEYTIEAWTKFDFPGRANTHSNFKWRWYHFDGVDWDQSRKLNNRIYKFRTKAWDWEVDTEFGNYDYLMYADIDMDHPEVVNELRNWGVWYTNTLGLDGFRIDAVKHIKYSFTRDWINHVRSAIGKNMFAVAEFWKNDLGAIENYLNKTNWNHSVFDVPLHFNLYWASKSGGNYDMRQIFNGTVVQKHPTHAVTFVDNHDSQPEESLESFVREWFKPLAYALTLTREQGYPSVFYGDYYGIPTHGVPAMKSKIDPILEARQKYAYGRQNDYLDHHNIIGWTREGNTAHPNSGLATIMSDGAGGNKWMFVGRNKAGQVWTDITGNKAGTVTINADGWGNFSVNGGSVSIWVNK

SEQ ID NO: 23200 - protein, 485 aa, Bacillus sp. 707
HHNGTNGTMMQYFEWYLPNDGNHWNRLNSDASNLKSKGITAVWIPPAWKGASQNDVGYGAYDLYDLGEFNQKGTVRTKYGTRSQLQAAVTSLKNNGIQVYGDVVMNHKGGADATEMVRAVEVNPNNRNQEVTGEYTIEAWTRFDFPGRGNTHSSFKWRWYHFDGVDWDQSRRLNNRIYKFRGHGKAWDWEVDTENGNYDYLMYADIDMDHPEVVNELRNWGVWYTNTLGLDGFRIDAVKHIKYSFTRDWINHVRSATGKNMFAVAEFWKNDLGAIENYLQKTNWNHSVFDVPLHYNLYNASKSGGNYDMRNIFNGTVVQRHPSHAVTFVDNHDSQPEEALESFVEEWFKPLAYALTLTREQGYPSVFYGDYYGIPTHGVPAMRSKIDPILEARQKYAYGKQNDYLDHHNIIGWTREGNTAHPNSGLATIMSDGAGGSKWMFVGRNHAGQVWSDITGNRTGTVTINADGWGNFSVNGGSVSIWVNK

SEQ ID NO: 23201 - protein, 485 aa, Bacillus sp. 707
HHNGTNGTMMQYFEWYLPNDGNHWNRLNSDASNLKSKGITAVWIPPAWKGASQNDVGYGAYDLYDLGEFNQKGTVRTKYGTRSQLQAAVTSLKNNGIQVYGDVVMNHKGGADATEMVRAVEVNPNNRNQEVTGEYTIEAWTRFDFPGRGNTHSSFKWRWYHFDGVDWDQSRRLNNRIYKFCGHGKAWDWEVDTENGNYDYLMYADIDMDHPEVVNELRNWGVWYTNTLGLDGFRIDAVKHIKYSFTRDWINHVRSATGKNMFAVAEFWKNDLGAIENYLQKTNWNHSVFDVPLHYNLYNASKSGGNYDMRNIFNGTVVQRHPSHAVTFVDNHDSQPEEALESFVEEWFKPLAYALTLTREQGYPSVFYGDYYGIPTHGVPAMRSKIDPILEARQKYAYGKQNDYLDHHNIIGWTREGNTAHPNSGLATIMSDGAGGSKWMFVGRNKAGQVWSDITGNRTGTVTINADGWGNFSVNGGSVSIWVNK

SEQ ID NO: 23202 - protein, 485 aa, Bacillus sp. 707
HHNGTNGTMMQYFEWYLPNDGNHWNRLNSDASNLKSKGITAVWIPPAWKGASQNDVGYGAYDLYDLGEFNQKGTVRTKYGTRSQLQAAVTSLKNNGIQVYGDVVMNHKGGADATEMVRAVEVNPNNRNQEVTGEYTIEAWTRFDFPGRGNTHSSFKWRWYHFDGVDWDQSRRLNNRIYKFRGHGKAWDWEVDTENGNYDYLMYADIDMDHPEVVLELRNWGVWYTNTLGLDGFRIDAVKHIKYSFTRDWINHVRSATGKNMFAVAEFWKNDLGAIENYLQKTNWNHSVFDVPLHYNLYNASKSGGNYDMRNIFNGTVVQRHPSHAVTFVDNHDSQPEEALESFVEEWFKPLAYALTLTREQGYPSVFYGDYYGIPTHGVPAMRSKIDPILEARQKYAYGKQNDYLDHHNIIGWTREGNTAHPNSGLATIMSDGAGGSKWMFVGRNKAGQVWSDITGNRTGTVTINADGWGNFSVNGGSVSIWVNK

SEQ ID NO: 23203 - protein, 485 aa, Bacillus sp. 707
HHNGTNGTMMQYFEWYLPNDGNHWNRLNSDASNLKSKGITAVWIPPAWKGASQNDVGYGAYDLYDLGEFNQKGTVRTKYGTRSQLQAAVTSLKNNGIQVYGDVVMNHKGGADATEMVRAVEVNPNNRNQEVTGEYTIEAWTRFDFPGRGNTHSSFKWRWYHFDGVDWDQSRRLNNRIYKFRGHGKAWDWEVDTENGNYDYLMYADIDMDHPEVVNELRNWGVWYTNTLGLDGFRIDAVKHIKYSFTRDWINHVRSATGKNMFAVAEFWKNDLGAIENYLQKTNWNHSVFDVPLHYNLYNASKSGGNYDMRNIFNGTVVQRHPSHANTFVDNHDSQPEEALESFVEEWFKPLAYALTLTREQGYPSVFYGDYYGIPTHGVPAMRSKIDPILEARQKYAYGKQNDYLDHHNIIGWTREGNTAHPNSGLATIMSDGAGGSKWMFVGRNKAGQVWSDITGNRTGTVTINADGWGNFSVNGGSVSIWVNK

SEQ ID NO: 23204 - protein, 485 aa, Bacillus sp. 707
HHNGTNGTMMQYFEWYLPNDGNHWNRLNSDASNLKSKGITAVWIPPAWKGASQNDVGYGAYDLYDLGEFNQKGTVRTKYGTRSQLQAAVTSLKNNGIQVYGDVVMNHKGGADATEMTRAVEVNPNNRNQEVTGEYTIEAWTRFDFPGRGNTHSSFKWRWYHFDGVDWDQSRRLNNRIYKFRGHGKAWDWEVDTENGNYDYLMYADIDMDHPEVVNELRNWGVWYTNTLGLDGFRIDAVKHIKYSFTRDWINHVRSATGKNMFAVAEFWKNDLGAIENYLQKTNWNHSVFDVPLHYNLYNASKSGGNYDMRNIFNGTVVQRHPSHAVTFVDNHDSQPEEALESFVEEWFKPLAYALTLTREQGYPSVFYGDYYGIPTHGVPAMRSKIDPILEARQKYAYGKQNDYLDHHNIIGWTREGNTAHPNSGLATIMSDGAGGSKWMFVGRNKAGQVWSDITGNRTGTVTINADGWGNFSVNGGSVSIWVNK

SEQ ID NO: 23205 - protein, 485 aa, Bacillus sp. 707
HHNGTNGTMMQYFEWYLPNDGNHWNRLNSDASNLKSKGITAVWIPPAWKGASQNDVGYGAYDLYDLGEFNQKGTVRTKYGTRSQLQAAVTSLKNNGIQVYGDVVMNHKGGADATEMVRAVEVNPNNRNQEVTGEYTIEAWTRFDFPGRGNTHSSFKWRWYHFDGVDWDQSRRLNNRIYKFRGHGKAWDWEVDTENGNYDYLMYADIDMDHPEVVNELRNWGVWYTNTLGLDGFRIDAVKHIKYSFTRDWINHVRSATGKNMFAVAEFWKNDLGAIENYLQKTNWNHSVFDVPLHYNLYNASKSGGNYDMRNIFNGTVVQRHPSHAVTFVDNHDSQPEEALESFVEEWFKPLAYALTLTRAQGYPSVFYGDYYGIPTHGVPAMRSKIDPILEARQKYAYGKQNDYLDHHNIIGWTREGNTAHPNSGLATIMSDGAGGSKWMFVGRNKAGQVWSDITGNRTGTVTINADGWGNFSVNGGSVSIWVNK

SEQ ID NO: 23206 - protein, 485 aa, Bacillus sp. 707
HHNGTNGTMMQYFEWYLPNDGNHWNRLNSDASNLKSKGITAVWIPPAWKGASQNDVGYGAYDLYDLGEFNQKGTVRTKYGTRSQLQAAVTSLKNNGIQVYGDVVMNHKGGADATEMVRAVEVNPNNRNQEVTGEYTIEAWTRFDFPGRGNTHSSFKWRWYHFDGVDWDQSRRLNNRIYKFRGHGKAWDWEVDTENGNYDYLMYADIDMDHPEVVNELRNWGVWYTNTLGLDGFRIDAVKHIKYSFTRDWINHVRSATGKNMFAVAEFWKNDLGAIENYLQKTNWNHSVFDVPLHYNLYNASKSGGNYDMRNIFNGTVVDRHPSHAVTFVDNHDSQPEEALESFVEEWFKPLAYALTLTREQGYPSVFYGDYYGIPTHGVPAMRSKIDPILEARQKYAYGKQNDYLDHHNIIGWTREGNTAHPNSGLATIMSDGAGGSKWMFVGRNKAGQVWSDITGNRTGTVTINADGWGNFSVNGGSVSIWVNK

SEQ ID NO: 23207 - protein, 485 aa, Bacillus sp. 707
HANGTNGTMMQYFEWYLPNDGNHWNRLNSDASNLKSKGITAVWIPPAWKGASQNDVGYGAYDLYDLGEFNQKGTVRTKYGTRSQLQAAVTSLKNNGIQVYGDVVMNHKGGADATEMVRAVEVNPNNRNQEVTGEYTIEAWTRFDFPGRGNTHSSFKWRWYHFDGVDWDQSRRLNNRIYKFRGHGKAWDWEVDTENGNYDYLMYADIDMDHPEVVNELRNWGVWYTNTLGLDGFRIDAVKHIKYSFTRDWINHVRSATGKNMFAVAEFWKNDLGAIENYLQKTNWNHSVFDVPLHYNLYNASKSGGNYDMRNIFNGTVVQRHPSHAVTFVDNHDSQPEEALESFVEEWFKPLAYALTLTREQGYPSVFYGDYYGIPTHGVPAMRSKIDPILEARQKYAYGKQNDYLDHHNIIGWTREGNTAHPNSGLATIMSDGAGGSKWMFVGRNKAGQVWSDITGNRTGTVTINADGWGNFSVNGGSVSIWVNK

SEQ ID NO: 23208 - protein, 485 aa, Bacillus sp. 707
HHNGTNGTMMQYFEWYLPNDGNHWNRLNSDASNLKSKGITAVWIPPAWKGASQNDVGYGAYDLYDLGEFNQKGTVRTKYGTRSQLQAAVTSLKNNGIQVYGDVVMNHKGGADATEMVRAVEVNPNNRNQEVTGEYTIEAWTRFDFPGRGNTHSSFKWRWYHFDGVDWDQSRRLNNRIYKFRGHGKAWDWEVDTENGNYDYLMYADIDMDHPEVVNELRNWGVWYTNTLGLDGFRIDAVKHIKYSFTRDWINHVRSATGKNMFAVAEFWKNDLGAIENYLQKTNWNHSVFDVPLHYNLYNASKSGGNYDMRNIFNGTVVQRHPSHAVTFVDNHDSQPEEALESFVEEWFKPLAYALTLTREQGYPSVFYGDYYGIPTHGVPAMRSKIDPILEARQKYAYGKQNDYLDHHNIIGWTREGNTAHPNDGLATIMSDGAGGSKWMFVGRNKAGQVWSDITGNRTGTVTINADGWGNFSVNGGSVSIWVNK

SEQ ID NO: 23209 - protein, 485 aa, Bacillus sp. 707
HHNGTNGTMMQYFEWYLPNDGNHWNRLNSDASNLKSKGITAVWIPPAWKGASQNDVGYGAYDLYDLGEFNQKGTVRTKYGTRSQLQAAVTSLKNNGIQVYGDVVMNHKGGADATEMVRAVEVNPNNRNQEVTGEYTIEAWTRFDFPGRGNTHSSFKWRWYHFDGVDWDQSRRLNNRIYKFRGHGKAWDWEVDTENGNYDYLMYADIDMDHPEVVNELRNWGVWYTNTLGLDGFRIDAVKHIKYSFTRDWINHVRSATGKNMFAVAEFWKNDLGAIENYLQKTNWNHSVFDVPLHYNLYNASKSGGNYDMRNIFNGTVVQRHPSHAVTFVDNHDSQPEEALESFVEEWFKPLAYALTLTREQGWPSVFYGDYYGIPTHGVPAMRSKIDPILEARQKYAYGKQNDYLDHHNIIGWTREGNTAHPNSGLATIMSDGAGGSKWMFVGRNKAGQVWSDITGNRTGTVTINADGWGNFSVNGGSVSIWVNK

SEQ ID NO: 23210 - protein, 485 aa, Bacillus sp. 707
HHNGTNGTMMQYFEWYLPNDGNHWGRLNSDASNLKSKGITAVWIPPAWKGASQNDVGYGAYDLYDLGEFNQKGTVRTKYGTRSQLQAAVTSLKNNGIQVYGDVVMNHKGGADATEMVRAVEVNPNNRNQEVTGEYTIEAWTRFDFPGRGNTHSSFKWRWYHFDGVDWDQSRRLNNRIYKFRGHGKAWDWEVDTENGNYDYLMYADIDMDHPEVVNELRNWGVWYTNTLGLDGFRIDAVKHIKYSFTRDWINHVRSATGKNMFAVAEFWKNDLGAIENYLQKTNWNHSVFDVPLHYNLYNASKSGGNYDMRNIFNGTVVQRHPSHAVTFVDNHDSQPEEALESFVEEWFKPLAYALTLTREQGYPSVFYGDYYGIPTHGVPAMRSKIDPILEARQKYAYGKQNDYLDHHNIIGWTREGNTAHPNSGLATIMSDGAGGSKWMFVGRNKAGQVWSDITGNRTGTVTINADGWGNFSVNGGSVSIWVNK

SEQ ID NO: 23211 - protein, 485 aa, Bacillus sp. 707
HHNGTNQTMMQYFEWYLPNDGNHWNRLNSDASNLKSKGITAVWIPPAWKGASQNDVGYGAYDLYDLGEFNQKGTVRTKYGTRSQLQAAVTSLKNNGIQVYGDVVMNHKGGADATEMVRAVEVNPNNRNQEVTGEYTIEAWTRFDFPGRGNTHSSFKWRWYHFDGVDWDQSRRLNNRIYKFRGHGKAWDWEVDTENGNYDYLMYADIDMDHPEVVNELRNWGVWYTNTLGLDGFRIDAVKHIKYSFTRDWINHVRSATGKNMFAVAEFWKNDLGAIENYLQKTNWNHSVFDVPLHYNLYNASKSGGNYDMRNIFNGTVVQRHPSHAVTFVDNHDSQPEEALESFVEEWFKPLAYALTLTREQGYPSVFYGDYYGIPTHGVPAMRSKIDPILEARQKYAYGKQNDYLDHHNIIGWTREGNTAHPNSGLATIMSDGAGGSKWMFVGRNKAGQVWSDITGNRTGTVTINADGWGNFSVNGGSVSIWVNK

SEQ ID NO: 23212 - protein, 485 aa, Bacillus sp. 707
HHNGTNGTMMQYFEWYLPNDGNHWNRLNSDASNLKSKGITAVWIPPAWKGASQNDVGYGAYDLYDLGEFNQKGTVRTKYGTRSQLQAAVTSLKNNGIQVYGDVVMNHKGGADATEMVRAVEVNPNNRNQEVTGEYTIEAWTRFDFPGRGNTHSSFKWRWYHFDGVDWDQSRRLNNRIYKFRGHGKAWDWEVDTENGNYDYLMYADIDMDHPEVVNELRNWGVWYTNTLGLDGFRIDAVKHIKYSFTRDWINHVRSATGKNMFAVAEFWKNDLGAIENYLQKTNWNHSVFDVPLHYNLYNASKSGGNYDMRNIFNGTVVQRHPSHAVTFVDNHDSQPEEALESFVEEWFKPLAYALTLTREQGYPSVFYGDYIGIPTHGVPAMRSKIDPILEARQKYAYGKQNDYLDHHNIIGWTREGNTAHPNSGLATIMSDGAGGSKWMFVGRNKAGQVWSDITGNRTGTVTINADGWGNFSVNGGSVSIWVNK

SEQ ID NO: 23213 - protein, 485 aa, Bacillus sp. 707
HHNGTNGTMMQYFEWYLPNDGNHWNRLNSDASNLKSKGITAVWIPPAWKGASQNDVGYGAYDLYDLGEFNQKGTVRTKYGTRSQLQAAVTSLKNNGIQVYGDVVMNHKGGADATEMVRAVEVNPNNRNQEVTGEYTIEAWTRFDFPGRGNTHSSFKWRWYHFDGVDWDQSRRLNNRIYKFNGHGKAWDWEVDTENGNYDYLMYADIDMDHPEVVNELRNWGVWYTNTLGLDGFRIDAVKHIKYSFTRDWINHVRSATGKNMFAVAEFWKNDLGAIENYLQKTNWNHSVFDVPLHYNLYNASKSGGNYDMRNIFNGTVVQRHPSHAVTFVDNHDSQPEEALESFVEEWFKPLAYALTLTREQGYPSVFYGDYYGIPTHGVPAMRSKIDPILEARQKYAYGKQNDYLDHHNIIGWTREGNTAHPNSGLATIMSDGAGGSKWMFVGRNKAGQVWSDITGNRTGTVTINADGWGNFSVNGGSVSIWVNK

SEQ ID NO: 23214 - protein, 485 aa, Bacillus sp. 707
HHNGTNGTMMQYFEWYLPNDGNHWNRLNSDASNLKSKGITAVWIPPAWKGASQNDVGYGAYDLYDLGEFNQKGTVRTKYGTRSQLQAAVTSLKNNGIQVYGDVVMNHKGGADATEMVRAVEVNPNNRNQEVTGEYTIEAWTRFDFPGRGNTHSSFKWRWYHFDGVDWDQSRRLNNRIYKFRGHGKAWDWEVDTENGNYDYLMYADIDMDHPEVVNELRNWGVWYTNTLGLDGFRIDAVKHIKYSFTRDWINHVRSATGKNMFAVAEFWKNDLGAIENYLQKTNWNHSVFDVPLHYNLYNASKSGGNYDMRNIFNGTVVQRHPSHAVTFVDNHDSQPEEALESFVEEWFKPLAYALTLTREQGYPSVFYGDYYGIPTHGVPAMRSKIDPILEARQKYAYGKQNDYLDHHNIIGWTREGVTAHPNSGLATIMSDGAGGSKWMFVGRNKAGQVWSDITGNRTGTVTINADGWGNFSVNGGSVSIWVNK

SEQ ID NO: 23215 - protein, 485 aa, Bacillus sp. 707
HHNGTNGTMMQYFEWYLPNDGNHWNRLNSDASNLKSKGITAVWIPPAWKGASQNDVGYGAYDLYDLGEFMQKGTVRTKYGTRSQLQAAVTSLKNNGIQVYGDVVMNHKGGADATEMVRAVEVNPNNRNQEVTGEYTIEAWTRFDFPGRGNTHSSFKWRWYHFDGVDWDQSRRLNNRIYKFRGHGKAWDWEVDTENGNYDYLMYADIDMDHPEVVNELRNWGVWYTNTLGLDGFRIDAVKHIKYSFTRDWINHVRSATGKNMFAVAEFWKNDLGAIENYLQKTNWNHSVFDVPLHYNLYNASKSGGNYDMRNIFNGTVVQRHPSHAVTFVDNHDSQPEEALESFVEEWFKPLAYALTLTREQGYPSVFYGDYYGIPTHGVPAMRSKIDPILEARQKYAYGKQNDYLDHHNIIGWTREGNTAHPNSGLATIMSDGAGGSKWMFVGRNKAGQVWSDITGNRTGTVTINADGWGNFSVNGGSVSIWVNK

SEQ ID NO: 23216 - protein, 485 aa, Bacillus sp. 707
HHNGTNGTMMQYFEWYLPNDGNHWNRLNSDASNLKSKGITAVWIPPAWKGASQNDVGYGAYDLYDLGEFNQKGTVRTKYGTRSQLQAAVTSLKNNGIQVYGDVVMNHKGGADATEMVRAVEVNPNNRNQEVTGEYTIEAWTRFDFPGRGNTHSSFKWRWYHFDGVDWDQSRRLNNRIYKFRGHGKAWDWEVDTENGNYDYLMYADIDMDHPEVVNELRNWGVWYTNTLGLDGFRIDAVKHIKYSFTRDWINHVRSATGKNMFAVAEFWKNDLGAIENYLQKTNWNHSVFDVPLHYNLYNASKSGGNYDMRNIFNGTVVQRHPSHAVTFVDNHDSQPEEALESFVEEWFKPLAYALTLTREQGYPSVFYGDYYGIPTHGVPAMRSKIDPILEARQKYAYGKQNDYLDHHNIIGWTREGNTAHPNSGLATIMSDGAMGSKWMFVGRNKAGQVWSDITGNRTGTVTINADGWGNFSVNGGSVSIWVNK

SEQ ID NO: 23217 - protein, 485 aa, Bacillus sp. 707
HHNGTNGTMMQYFEWYLPNDGNHWNRLNSDASNLKSKGITAVWIPPAWKGASQNDVGYGAYDLYDLGEFNQKGTVRTKYGTRSQLQAAVTSLKNNGIQVYGDVVMNHKGGADATEMVRAVEVNPNNRNQEVTGEYTIEAWTRFDFPGRGNTHSSFKWRWYHFDGVDWDQSRRLNNRIYKFRGHGKAWDWEVDTENGNYDYLMYADIDMDHMEVVNELRNWGVWYTNTLGLDGFRIDAVKHIKYSFTRDWINHVRSATGKNMFAVAEFWKNDLGAIENYLQKTNWNHSVFDVPLHYNLYNASKSGGNYDMRNIFNGTVVQRHPSHAVTFVDNHDSQPEEALESFVEEWFKPLAYALTLTREQGYPSVFYGDYYGIPTHGVPAMRSKIDPILEARQKYAYGKQNDYLDHHNIIGWTREGNTAHPNSGLATIMSDGAGGSKWMFVGRNKAGQVWSDITGNRTGTVTINADGWGNFSVNGGSVSIWVNK

SEQ ID NO: 23218 - protein, 485 aa, Bacillus sp. 707
HHNGTNGTMMQYFEWYLPNDGNHWNRLNSDASNLKSKGITAVWIPPAWKGASQNDVGYGAYDLYDLGEFNQKGTVRTKYGTRSQLQAAVTSLKNNGIQVYGDVVMNHKGGADATEMVRAVEVNPNNRNQEVTGEYTIEAWTRFDFPGRGNTHSSFKWRWYHFDGVDWDQSRRLNLRIYKFRGHGKAWDWEVDTENGNYDYLMYADIDMDHPEVVNELRNWGVWYTNTLGLDGFRIDAVKHIKYSFTRDWINHVRSATGKNMFAVAEFWKNDLGAIENYLQKTNWNHSVFDVPLHYNLYNASKSGGNYDMRNIFNGTVVQRHPSHAVTFVDNHDSQPEEALESFVEEWFKPLAYALTLTREQGYPSVFYGDYYGIPTHGVPAMRSKIDPILEARQKYAYGKQNDYLDHHNIIGWTREGNTAHPNSGLATIMSDGAGGSKWMFVGRNKAGQVWSDITGNRTGTVTINADGWGNFSVNGGSVSIWVNK

SEQ ID NO: 23219 - protein, 485 aa, Bacillus sp. 707
HHNGTNGTMMQYFEWYLPNDGNHWNRLNSDASNLKSKGITAVWIPPAWKGASQNDVGYGAYDLYDLGEFNQKGTVRTKYGTRSQLQAAVTSLKNNGIQVYGDVVMNHKGGADATEMVRAVEVNPNNRNQEVTGEYTIEAWTRFDFPGRGNTHSSFKWRWYHFDGVDWDQSRRLNNRIYKFRGHGKAWDWEVDTENGNYDYLMYADIDMDHPEVVNELRNWGVWYTNTLGLDGFRIDAVKHIKYSFTRDWINHVRSATGKNMFAVAEFWKNDLGAIENYLQKTNWNHSVFDVPLHYNLYNASKSGGNYDMRNIFDGTVVQRHPSHAVTFVDNHDSQPEEALESFVEEWFKPLAYALTLTREQGYPSVFYGDYYGIPTHGVPAMRSKIDPILEARQKYAYGKQNDYLDHHNIIGWTREGNTAHPNSGLATIMSDGAGGSKWMFVGRNKAGQVWSDITGNRTGTVTINADGWGNFSVNGGSVSIWVNK

SEQ ID NO: 23220 - protein, 485 aa, Bacillus sp. 707
HHNGTNGTMMQYFEWYLPNDGNHWNRLNSDASNLKSKGITAVWIPPAWKGASQNDVGYGAYDLYDLGEFNQKGTVRTKYGTRSQLQAAVTSLKNNGIQVYGDVVMNHKGGADATEMVRAVEVNPNNRNQEVTGEYTIEAWTRFDFPGRGNTHSSFKWRWYHFDGVDWDQSRRLNNRIYKFRGHGKAWDWEVDTENGNYDYLMYADIDMDHPEVVNELRNWGVWYTNTLGLDGFRIDAVKHIKYSFTRDWINHVRSATGKNMFAVAEFWKNDLGAIENYLQKTNWNHSVFDVPLHYNLYNASKSGGNYDMRNIFNGTVVQRHPSHAVTFVDNHDSQPEEALESFVEEWFKPLAYALTLTREQGYPSVFYGDYYGIPTHGVPAMRSKIDPILEARQKYAYGKQNDYLDHHNIIGWTREGNDAHPNSGLATIMSDGAGGSKWMFVGRNKAGQVWSDITGNRTGTVTINADGWGNFSVNGGSVSIWVNK

SEQ ID NO: 23221 - protein, 485 aa, Bacillus sp. 707
HHNGTNGTMMQYFEWYLPNDGNHWNRLNSDASNLKSKGITAVWIPPAWKGASQNDVGYGAYDLYDLGEFNQKGTVRTKYGTRSQLQAAVTSLKNNGIQVYGDVVMNHKGGADATEMVRAVEVNPNNRNQEVTGEYTIEAWTRFDFPGRGNTHSSFKWRWYHFDGVDWDQSRRLNNRIYKFRGHGKAWDWEVDTENGNYDYLMYADIDMDHPEVVNELRNWGVWYTNTLGLDGFRIDAVKHIKYSFTRDWINHVRSATGKNMFAVAEFWKNDLGAIENYLQKTNWNHSVFDVPLHYNLYNASKSGGNYDMRNIFNGTVVQRHPSHAVTFVDNHDSQPEEALESFVEEWFKPLAYALTLTRCQGYPSVFYGDYYGIPTHGVPAMRSKIDPILEARQKYAYGKQNDYLDHHNIIGWTREGNTAHPNSGLATIMSDGAGGSKWMFVGRNKAGQVWSDITGNRTGTVTINADGWGNFSVNGGSVSIWVNK

SEQ ID NO: 23222 - protein, 485 aa, Bacillus sp. 707
HHNGTNGTMMQYFEWYLPNDGNHWNRLNSDASNLKSKGITAVWIPPAWKGASQNDVGYGAYDLYDLGEFNQKGTVRTKYGTRSQLQAAVTSLKNNGIQVYGDVVMNHKGGADATEMVRAVEVNPNNRNQEVTGEYTIEAWTRFDFPGRGNTHSSFKWRWYHFDGVDWDQSRRLNNRIYKFRGHGKAWDWEVDTENGNYDYLMYADIDMDHPEVVNELRNWGVWYTNTLGLDGFRIDAVKHIKYSFTRDWINHVRSATGKNMFAVAEFWKNDLGAIENYLQKTNWNHSVFDVPLHYNLYNASKSGGNYDMRNIFNGTVVQRHPSHAVTFVDNHDSQPEEALESFVEEWFKPLAYALTLTREQGNPSVFYGDYYGIPTHGVPAMRSKIDPILEARQKYAYGKQNDYLDHHNIIGWTREGNTAHPNSGLATIMSDGAGGSKWMFVGRNKAGQVWSDITGNRTGTVTINADGWGNFSVNGGSVSIWVNK

SEQ ID NO: 23223 - protein, 485 aa, Bacillus sp. 707
HHNGTNGTMMQYFEWYLPNIGNHWNRLNSDASNLKSKGITAVWIPPAWKGASQNDVGYGAYDLYDLGEFNQKGTVRTKYGTRSQLQAAVTSLKNNGIQVYGDVVMNHKGGADATEMVRAVEVNPNNRNQEVTGEYTIEAWTRFDFPGRGNTHSSFKWRWYHFDGVDWDQSRRLNNRIYKFRGHGKAWDWEVDTENGNYDYLMYADIDMDHPEVVNELRNWGVWYTNTLGLDGFRIDAVKHIKYSFTRDWINHVRSATGKNMFAVAEFWKNDLGAIENYLQKTNWNHSVFDVPLHYNLYNASKSGGNYDMRNIFNGTVVQRHPSHAVTFVDNHDSQPEEALESFVEEWFKPLAYALTLTREQGYPSVFYGDYYGIPTHGVPAMRSKIDPILEARQKYAYGKQNDYLDHHNIIGWTREGNTAHPNSGLATIMSDGAGGSKWMFVGRNKAGQVWSDITGNRTGTVTINADGWGNFSVNGGSVSIWVNK

SEQ ID NO: 23224 - protein, 485 aa, Bacillus sp.
HHNGTNGTMMQYFEWYLPNDGNHWNRLRSDASNLKDKGISAVWIPPAWKGASQNDVGYGAYDLYDLGEFNQKGTIRTKYGTRNQLQAAVNALKSNGIQVYGDVVMNHKGGADATEMVRAVEVNPNNRNQEVSGEYTIEAWTKFDFPGRGNTHSNFKWRWYHFDGVDWDQSRKLNNRIYKFRGDGKGWDWEVDTENGNYDYLLYADIDMDHPEVVNELRNWGVWYTNTLGLDGFRIDAVKHIKYSFTRDWINHVRSATGKNMFAVAEFWKNDLGAIENYLNKTDWNHSVFDVPLHYNLYNASKSGGNYDMRQIFNGTVVQRHPMHAVTFVDNHDSQPEEALESFVEEWFKPLAYALTLTREEGYPSVFYGDYYGIPTHGVPAMKSKIDPILEARQKYAYGRQNDYLDHHNIIGWTREGNTAHPNSGLATIMSDGAGGNKWMFVGRNKAGQVWTDITGNRAGTVTINADGWGNFSVNGGSVSIWVNK

SEQ ID NO: 23225 - protein, 485 aa, Bacillus sp. 707
HHNGTNGTMMQYFEWYLPNDGNHWNRLNSDASNLKSKGITAVWIPPAWKGASQNDVGYGAYDLYDLGEFEQKGTVRTKYGTRSQLQAAVTSLKNNGIQVYGDVVMNHKGGADATEMVRAVEVNPNNRNQEVTGEYTIEAWTRFDFPGRGNTHSSFKWRWYHFDGVDWDQSRRLNNRIYKFRGHGKAWDWEVDTENGNYDYLMYADIDMDHPEVVNELRNWGVWYTNTLGLDGFRIDAVKHIKYSFTRDWINHVRSATGKNMFAVAEFWKNDLGAIENYLQKTNWNHSVFDVPLHYNLYNASKSGGNYDMRNIFNGTVVQRHPSHAVTFVDNHDSQPEEALESFVEEWFKPLAYALTLTREQGYPSVFYGDYYGIPTHGVPAMRSKIDPILEARQKYAYGKQNDYLDHHNIIGWTREGNTAHPNSGLATIMSDGAGGSKWMFVGRNKAGQVWSDITGNRTGTVTINADGWGNFSVNGGSVSIWVNK

SEQ ID NO: 23226 - protein, 484 aa, Bacillus sp.
HHNGTNGTLMQYFEWYLPNDGNHWNRLRSDASNLKDKGISAVWIPPAWKGASQNDVGYGAYDLYDLGEFNQKGTIRTKYGTRNQLQAAVNALKSNGIQVYGDVVMNHKGGADATEMVKAVEVNPNNRNQEVSGEYTIEAWTKFDFPGRGNTHSNFKWRWYHFDGVDWDQSRKLNNRIYKFRGGKGWDWEVDTEFGNYDYLLYADIDMDHPEVTNELRNWGVWYTNTLGLDGFRIDAVKHIKYSFTRDWINHVRSATGKNMFAVAEFWKNDLGAIENYLNKTNWNHSVFDVPLHYNLYNASKSGGNYDMRQIFNGTVVQKHPTHAVTFVDNHDSQPEEALESFVNEWFKPLAYALTLTREQGYPSVFYGDYYGIPTHGVPAMKSKIDPILEARQKYAYGRQNDYLDHHNIIGWTREGNTAHPNSGLATIMSDGAGGNKWMFVGRNKAGQVWTDITGNKAGTVTINADGWGNFSVNGGSVSIWVNK

SEQ ID NO: 23227 - protein, 485 aa, Bacillus sp. 707
HHNGTNGTMMQYFEWYLPNDGNHWNRLNSDASNLKSKGITAVWIPPAWKGASQNDVGYGAYDLYDLGEFNQKGTVRTKYGTRSQLQAAVTSLKNNGIQVYGDVVMNHKGGADATEMVRAVEVNPNNRNQEVTGEYTIEAWTRFDFPGRGNTHSSFKWRWYHFDGVDWDQSRRLNNRIYKFRGHGKAWDWEVDTENGNYDYLTYADIDMDHPEVVNELRNWGVWYTNTLGLDGFRIDAVKHIKYSFTRDWINHVRSATGKNMFAVAEFWKNDLGAIENYLQKTNWNHSVFDVPLHYNLYNASKSGGNYDMRNIFNGTVVQRHPSHAVTFVDNHDSQPEEALESFVEEWFKPLAYALTLTREQGYPSVFYGDYYGIPTHGVPAMRSKIDPILEARQKYAYGKQNDYLDHHNIIGWTREGNTAHPNSGLATIMSDGAGGSKWMFVGRNKAGQVWSDITGNRTGTVTINADGWGNFSVNGGSVSIWVNK

SEQ ID NO: 23228 - protein, 485 aa, Bacillus sp. 707
HHNGTNGTMMQYFEWYLPNDGNHWNRLNSDASNLKSKGITAVWIPPAWKGASQNDVGYGAYDLYDLGEFNQKGTVRTKYGTRSQLQAAVTSLKNNGIQVYGDVVMNHKGGADATEMVRAVEVNPNNRNQEVTGEYTIEAWTRFDFPGRGNTHSSFKWRWYHFDGVDWDQSRRLNNRIYKFRGHGKAWDWEVDTENGNYDYLMYADIDMDHPEVVNELRNWGVWYTNTLGLDGFRIDAVKHIKYSFTRDWINHVRSATGKNMFAVAEFWKNDLGAIENYLQKTNWNHSVFDVPLHYNLYNASKSGGNYDMRNIFNGTVVQRHPSHAVTFVDNHDSQPEEALESFVEEWFKPLAYALTLTREQGYPSVFYGDYYGIPTHGVPAMRSKIDPILEARQKYAYGKQNDYLDHHNIIGWTREGNTAHPNSGLATIMSDGAGGSKWMFVGRNKAGQVWSDFTGNRTGTVTINADGWGNFSVNGGSVSIWVNK

SEQ ID NO: 23229 - protein, 485 aa, Bacillus sp. 707
HHNGANGTMMQYFEWYLPNDGNHWNRLNSDASNLKSKGITAVWIPPAWKGASQNDVGYGAYDLYDLGEFNQKGTVRTKYGTRSQLQAAVTSLKNNGIQVYGDVVMNHKGGADATEMVRAVEVNPNNRNQEVTGEYTIEAWTRFDFPGRGNTHSSFKWRWYHFDGVDWDQSRRLNNRIYKFRGHGKAWDWEVDTENGNYDYLMYADIDMDHPEVVNELRNWGVWYTNTLGLDGFRIDAVKHIKYSFTRDWINHVRSATGKNMFAVAEFWKNDLGAIENYLQKTNWNHSVFDVPLHYNLYNASKSGGNYDMRNIFNGTVVQRHPSHAVTFVDNHDSQPEEALESFVEEWFKPLAYALTLTREQGYPSVFYGDYYGIPTHGVPAMRSKIDPILEARQKYAYGKQNDYLDHHNIIGWTREGNTAHPNSGLATIMSDGAGGSKWMFVGRNKAGQVWSDITGNRTGTVTINADGWGNFSVNGGSVSIWVNK

SEQ ID NO: 23230 - protein, 485 aa, Bacillus sp. 707
HHDGTNGTMMQYFEWYLPNDGNHWNRLNSDASNLKSKGITAVWIPPAWKGASQNDVGYGAYDLYDLGEFNQKGTVRTKYGTRSQLQAAVTSLKNNGIQVYGDVVMNHKGGADATEMVRAVEVNPNNRNQEVTGEYTIEAWTRFDFPGRGNTHSSFKWRWYHFDGVDWDQSRRLNNRIYKFRGHGKAWDWEVDTENGNYDYLMYADIDMDHPEVVNELRNWGVWYTNTLGLDGFRIDAVKHIKYSFTRDWINHVRSATGKNMFAVAEFWKNDLGAIENYLQKTNWNHSVFDVPLHYNLYNASKSGGNYDMRNIFNGTVVQRHPSHAVTFVDNHDSQPEEALESFVEEWFKPLAYALTLTREQGYPSVFYGDYYGIPTHGVPAMRSKIDPILEARQKYAYGKQNDYLDHHNIIGWTREGNTAHPNSGLATIMSDGAGGSKWMFVGRNKAGQVWSDITGNRTGTVTINADGWGNFSVNGGSVSIWVNK

SEQ ID NO: 23231 - protein, 485 aa, Bacillus sp. 707
HHNGTNGTMMQYFEWYLPNDGNHWNRLNSDASNLKSKGITAVWIPPAWKGASQNDVGYGAYDLYDLGEFNQKGTVRTKYGTRSQLQAAVTSLKNNGIQVYGDVVMNHKGGADATEMVRAVEVNPWNRNQEVTGEYTIEAWTRFDFPGRGNTHSSFKWRWYHFDGVDWDQSRRLNNRIYKFRGHGKAWDWEVDTENGNYDYLMYADIDMDHPEVVNELRNWGVWYTNTLGLDGFRIDAVKHIKYSFTRDWINHVRSATGKNMFAVAEFWKNDLGAIENYLQKTNWNHSVFDVPLHYNLYNASKSGGNYDMRNIFNGTVVQRHPSHAVTFVDNHDSQPEEALESFVEEWFKPLAYALTLTREQGYPSVFYGDYYGIPTHGVPAMRSKIDPILEARQKYAYGKQNDYLDHHNIIGWTREGNTAHPNSGLATIMSDGAGGSKWMFVGRNKAGQVWSDITGNRTGTVTINADGWGNFSVNGGSVSIWVNK

SEQ ID NO: 23232 - protein, 485 aa, Bacillus sp. 707
HHNGTNGTMMQYFEWYLPNDGNHWNRLNSDASNLKSKGITAVWIPPAWKGASQNDVGYGAYDLYDLGEFNQKGTVRTKYGTRSQLQAAVTSLKNNGIQVYGDVVMNHKGGADATEMVRAVEVNPNNRNQEVTGEYTIEAWTRFDFPGRGNTHSSFKWRWYHFDGVDWDQSRRLNNRIYKFRGHGKAWDWEVDTENGNYDYLMYADIDMDHPEVVNELRNWGVWYTNTLGLDGFRIDAVKHIKYSFTRDWINHVRSATGKNMFAVAEFWKNDLGAIENYLQKTNWNHSVFDVPLHYNLYNASKSGGNYDMRNIFNGTVVQRHPSHAVTFVDNHDSQPEEALESFVEEWFKPLAYALTLTREQGYPSVFYGDYYGIPTHGVPAMRSKIDPILEARQKYAYGKQNDYLDHHNIIGWTREGNTAAPNSGLATIMSDGAGGSKWMFVGRNKAGQVWSDITGNRTGTVTINADGWGNFSVNGGSVSIWVNK

SEQ ID NO: 23233 - protein, 485 aa, Bacillus sp. 707
HHNGTNGTMMQYFEWYLPNDGNHWNRLNSDASNLKSKGITAVWIPPAWKGASQNDVGYGAYDLYDLGEFNQKGTVRTKYGTRSQLQAAVTSLKNNGIQVYGDVVMNHKGGADATEMVRAVEVNPNNRNQEVTGEYTIEAWTRFDFPGRGNIHSSFKWRWYHFDGVDWDQSRRLNNRIYKFRGHGKAWDWEVDTENGNYDYLMYADIDMDHPEVVNELRNWGVWYTNTLGLDGFRIDAVKHIKYSFTRDWINHVRSATGKNMFAVAEFWKNDLGAIENYLQKTNWNHSVFDVPLHYNLYNASKSGGNYDMRNIFNGTVVQRHPSHAVTFVDNHDSQPEEALESFVEEWFKPLAYALTLTREQGYPSVFYGDYYGIPTHGVPAMRSKIDPILEARQKYAYGKQNDYLDHHNIIGWTREGNTAHPNSGLATIMSDGAGGSKWMFVGRNKAGQVWSDITGNRTGTVTINADGWGNFSVNGGSVSIWVNK

SEQ ID NO: 23234 - protein, 485 aa, Bacillus sp. 707
HHNGTNGTMMQYFEWYLPNDGNHWNRLNSDASNLKSKGITAVWIPPAWKGASQNDVGYGAYDLYDLGEFNQKGTVRTKYGTRSQLQAAVTSLKNNGIQVYGDVVMNHKGGADATEMVRAVEVNPNNRNQEVTGEYTIEAWTRFDFPGRGNTHSSFKWRWYHFDGVDWDQSRRLNNRIYKFRGHGKAWDWEVDTENGNYDYLMYADIDMDHPEVVNELRNWGVWYTNTLGLDGFRIDAVKHIKYSFTRDWINHVRSATGKNMFAVAEFWKNDLGAIENYLQKTNWNHSVFDVPLHYNLYNASKSGGNYDMRNIFNGTVVQRHPSHAVTFVDNHDSQPEEALESFVEEWFKPLAYALTLTREQGYPSVFYGDYYGIPTHGVPAMRSKIDPILKARQKYAYGKQNDYLDHHNIIGWTREGNTAHPNSGLATIMSDGAGGSKWMFVGRNKAGQVWSDITGNRTGTVTINADGWGNFSVNGGSVSIWVNK

SEQ ID NO: 23235 - protein, 485 aa, Bacillus sp. 707
HHNGTNGTMMQYFEWYLPNDGNHWNRLNSDAMNLKSKGITAVWIPPAWKGASQNDVGYGAYDLYDLGEFNQKGTVRTKYGTRSQLQAAVTSLKNNGIQVYGDVVMNHKGGADATEMVRAVEVNPNNRNQEVTGEYTIEAWTRFDFPGRGNTHSSFKWRWYHFDGVDWDQSRRLNNRIYKFRGHGKAWDWEVDTENGNYDYLMYADIDMDHPEVVNELRNWGVWYTNTLGLDGFRIDAVKHIKYSFTRDWINHVRSATGKNMFAVAEFWKNDLGAIENYLQKTNWNHSVFDVPLHYNLYNASKSGGNYDMRNIFNGTVVQRHPSHAVTFVDNHDSQPEEALESFVEEWFKPLAYALTLTREQGYPSVFYGDYYGIPTHGVPAMRSKIDPILEARQKYAYGKQNDYLDHHNIIGWTREGNTAHPNSGLATIMSDGAGGSKWMFVGRNKAGQVWSDITGNRTGTVTINADGWGNFSVNGGSVSIWVNK

SEQ ID NO: 23236 - protein, 485 aa, Bacillus sp. 707
HHNGTNGTMMQYFEWYLPNDGNHWNRLNSDASNLKSKGITAVWIPPAWKGASQNDVGYGAYDLYDLGEFNQKGTVRTKYGTRSQLQAAVTSLKNNGIQVYGDVVMNHKGGADATEMVRAVEVNPNNRNQEVTGEYTIEAWTRFDFPGRGNTHSSFKWRWYHFDGVDWDQSRRLNNRIYKFRGHGKAWDWEVDTENGNYDYLMYADIDMDHPEVVNELRNWGVWYTNTLGLDGFRIDAVKHIKYSFTRDWINHVRSATGKNMFAVAEFWKNDLGAIENYLQKTNWNHSVFDVPLHYNLYNASKSGGNYDMRNIFNGTVVQRHPSHAVTFVDNHDSQPEEALESFVEEWFKPLAYALTLTREQGMPSVFYGDYYGIPTHGVPAMRSKIDPILEARQKYAYGKQNDYLDHHNIIGWTREGNTAHPNSGLATIMSDGAGGSKWMFVGRNKAGQVWSDITGNRTGTVTINADGWGNFSVNGGSVSIWVNK

SEQ ID NO: 23237 - protein, 485 aa, Bacillus sp. 707
HHNGTNGTMMQYFEWYLPNDGNHWNRLNSDASNLKSKGITAVWIPPAWKGASQNDVGYGAYDLYDLGEFNQKGTVRTKYGTRSQLQAAVTSLKNNGIQVYGDVVMNHKGGADATEMVRAVEVNPNNRNQEVTGEYTIEAWTRFDFPGRGNTHSSFKWRWYHFDGVDWDQSRRLNNRIYKFRGHGKAWDWEVDTENGNYDYLMYADIDMDHLEVVNELRNWGVWYTNTLGLDGFRIDAVKHIKYSFTRDWINHVRSATGKNMFAVAEFWKNDLGAIENYLQKTNWNHSVFDVPLHYNLYNASKSGGNYDMRNIFNGTVVQRHPSHAVTFVDNHDSQPEEALESFVEEWFKPLAYALTLTREQGYPSVFYGDYYGIPTHGVPAMRSKIDPILEARQKYAYGKQNDYLDHHNIIGWTREGNTAHPNSGLATIMSDGAGGSKWMFVGRNKAGQVWSDITGNRTGTVTINADGWGNFSVNGGSVSIWVNK

SEQ ID NO: 23238 - protein, 485 aa, Bacillus sp. 707
HHNGTNGTMMQYFEWYLPNDGEHWNRLNSDASNLKSKGITAVWIPPAWKGASQNDVGYGAYDLYDLGEFNQKGTVRTKYGTRSQLQAAVTSLKNNGIQVYGDVVMNHKGGADATEMVRAVEVNPNNRNQEVTGEYTIEAWTRFDFPGRGNTHSSFKWRWYHFDGVDWDQSRRLNNRIYKFRGHGKAWDWEVDTENGNYDYLMYADIDMDHPEVVNELRNWGVWYTNTLGLDGFRIDAVKHIKYSFTRDWINHVRSATGKNMFAVAEFWKNDLGAIENYLQKTNWNHSVFDVPLHYNLYNASKSGGNYDMRNIFNGTVVQRHPSHAVTFVDNHDSQPEEALESFVEEWFKPLAYALTLTREQGYPSVFYGDYYGIPTHGVPAMRSKIDPILEARQKYAYGKQNDYLDHHNIIGWTREGNTAHPNSGLATIMSDGAGGSKWMFVGRNKAGQVWSDITGNRTGTVTINADGWGNFSVNGGSVSIWVNK

SEQ ID NO: 23239 - protein, 485 aa, Bacillus sp. 707
HHNGTNGTMMQYFEWYLPNDGNHWNRLNSDASNLKSKGITAVWIPPAWKGASQNDVGYGAYDLYDLGEFNQKGTVRTKYGTRSQLQAAVTSLKNNGIQVYGDVVMNHKGGADATEMVRAVEVNPNNRNQEVTGEYTIEAWTRFDFPGRGNTHSSFKWRWYHFDGVDWDQSRRLNNRIYKFRGHGKAWDWEVDTENGNYDYLMYADIDMDHPEVVNELRNWGVWYTNTLGLDGFRIDAVKHIKYSFTRDWINHVRSATGKNMFAVAEFWKNDLGAIENYLQKTNWNHSVFDVPLHYNLYNASKSGGNYDMRNIFNGTVVQRHPSHAVTFVDNHDSQPEEALESFVEEWFKPLAYALTLTREQGYPSVFYGDYYGIPTHGVPAMRSKIDPILEARQKYAYGKQNDYLDHHNIIGWTREGNTAHPNSGLATIMSDGAGGSKWMFVGRNKAGQVWSDITGNRTGTVTINQDGWGNFSVNGGSVSIWVNK

SEQ ID NO: 23240 - protein, 485 aa, Bacillus sp. 707
HHNGTNGTMMQYFEWYLPNDGNHWNRLNSDASNLKSKGITAVWIPPAWKGASQNDVGYGAYDLYDLGEFNQKGTVRTKYGTRSQLQAAVTSLKNNGIQVYGDVVMNHKGGADATEMVRAVEVNPNNRNQEVTGEYTIEAWTRFDFPGRGNTHSSFKWRWYHFDGVDWDQSRRLNNRIYKFRGHGKAWDWEVDTENGNYDYLMYADIDMDHPEVVNELRNWGVWYTNTLGLDGFRIDAVKHIKYSFTRDWINHVRSATIKNMFAVAEFWKNDLGAIENYLQKTNWNHSVFDVPLHYNLYNASKSGGNYDMRNIFNGTVVQRHPSHAVTFVDNHDSQPEEALESFVEEWFKPLAYALTLTREQGYPSVFYGDYYGIPTHGVPAMRSKIDPILEARQKYAYGKQNDYLDHHNIIGWTREGNTAHPNSGLATIMSDGAGGSKWMFVGRNKAGQVWSDITGNRTGTVTINADGWGNFSVNGGSVSIWVNK

SEQ ID NO: 23241 - protein, 485 aa, Bacillus sp. 707
HHNGTNGTMMQYFEWYLPNDGNHWNRLNSDASNLKSKGITAVWIPPAWKGASQNDVGYGAYDLYDLGEFNQKGTVRTKYGTRSQLQAAVTSLKNNGIQVYGDVVMNHKGGADATEMVRAVEVNPNNRNQEVTGEYTIEAWTRFDFPGRGNTHSSFKWRWYHFDGVDWDQSRRLNNRIYKFRGHGKAWDWEVDTENGNYDYLMYADIDMDHPEVVNELRNWGVWYTNTLGLDGFRIDAVKHIKYSFTRDWINHVRSATGKNMFAVAEFWKNDLGAIENYLQKTNWNHSVFDVPLHYNLYNASKQGGNYDMRNIFNGTVVQRHPSHAVTFVDNHDSQPEEALESFVEEWFKPLAYALTLTREQGYPSVFYGDYYGIPTHGVPAMRSKIDPILEARQKYAYGKQNDYLDHHNIIGWTREGNTAHPNSGLATIMSDGAGGSKWMFVGRNKAGQVWSDITGNRTGTVTINADGWGNFSVNGGSVSIWVNK

SEQ ID NO: 23242 - protein, 485 aa, Bacillus sp. 707
HHNGTNGTMMQYFEWYLPNDGNHWNRLNSDASNLKSKGITAVWIPPAWKGASQNDVGYGAYDLYDLGEFNQKGTVRTKYGTRSQLQAAVTSLKNNGIQVYGDVVMNHKGGADATEMVRAVEVNPNNRNQEVTGEYTIEAWTRFDFPGRGNTHSSFKWRWYHFDGVDWDQSRRLNNRIYKFRGHGKAWDWEVDTENGNYDYLMYADIDMDHPEVVNELRNWGVWYTNTLGLDGFRIDAVKHIKYSFTRDWINHVRSATGKNMFAVAEFWKNDLGAIENYLQKTNWNHSVFDVPLHYNLYNASKSGGNYDMRNIFNGTVVQRHPSHATTFVDNHDSQPEEALESFVEEWFKPLAYALTLTREQGYPSVFYGDYYGIPTHGVPAMRSKIDPILEARQKYAYGKQNDYLDHHNIIGWTREGNTAHPNSGLATIMSDGAGGSKWMFVGRNKAGQVWSDITGNRTGTVTINADGWGNFSVNGGSVSIWVNK

SEQ ID NO: 23243 - protein, 485 aa, Bacillus sp. 707
HHNGTNGTMMQYFEWYLPNDGNHWNRLNSDASNLKSKGITAVWIPPAWKGASQNDVGYGAYDLYDLGEFNQKGTVRTKYGTRSQLQAAVTSLKNNGIQVYGDVVMNHKGGADATEMVRAVEVNPNNRNQEVTGEYTIEAWTRFDFPGRGNTHSSFKWRWYHFDGVDWDQSRRLNNRIYKFRGHGKAWDWEVDTENGNYDYLMYADIDMDHPEVVNELRNWGVWYTNTLGLDGFRIDAVKHIKYSFTRDWINHVRSATGKNMFAVAEFWKNDLQAIENYLQKTNWNHSVFDVPLHYNLYNASKSGGNYDMRNIFNGTVVQRHPSHAVTFVDNHDSQPEEALESFVEEWFKPLAYALTLTREQGYPSVFYGDYYGIPTHGVPAMRSKIDPILEARQKYAYGKQNDYLDHHNIIGWTREGNTAHPNSGLATIMSDGAGGSKWMFVGRNKAGQVWSDITGNRTGTVTINADGWGNFSVNGGSVSIWVNK

SEQ ID NO: 23244 - protein, 485 aa, Bacillus sp. 707
HHNGTNGTMMQYFEWYLPNDGNHWNRLNSDASNLKSKGITAVWIPPAWKGASQNDVGYGAYDLYDLGEFNQKGTVRTKYGTRSFLQAAVTSLKNNGIQVYGDVVMNHKGGADATEMVRAVEVNPNNRNQEVTGEYTIEAWTRFDFPGRGNTHSSFKWRWYHFDGVDWDQSRRLNNRIYKFRGHGKAWDWEVDTENGNYDYLMYADIDMDHPEVVNELRNWGVWYTNTLGLDGFRIDAVKHIKYSFTRDWINHVRSATGKNMFAVAEFWKNDLGAIENYLQKTNWNHSVFDVPLHYNLYNASKSGGNYDMRNIFNGTVVQRHPSHAVTFVDNHDSQPEEALESFVEEWFKPLAYALTLTREQGYPSVFYGDYYGIPTHGVPAMRSKIDPILEARQKYAYGKQNDYLDHHNIIGWTREGNTAHPNSGLATIMSDGAGGSKWMFVGRNKAGQVWSDITGNRTGTVTINADGWGNFSVNGGSVSIWVNK

SEQ ID NO: 23245 - protein, 485 aa, Bacillus sp. 707
HHNGTNGTMMQYFEWYLPNDGNHWNRLNSDADNLKSKGITAVWIPPAWKGASQNDVGYGAYDLYDLGEFNQKGTVRTKYGTRSQLQAAVTSLKNNGIQVYGDVVMNHKGGADATEMVRAVEVNPNNRNQEVTGEYTIEAWTRFDFPGRGNTHSSFKWRWYHFDGVDWDQSRRLNNRIYKFRGHGKAWDWEVDTENGNYDYLMYADIDMDHPEVVNELRNWGVWYTNTLGLDGFRIDAVKHIKYSFTRDWINHVRSATGKNMFAVAEFWKNDLGAIENYLQKTNWNHSVFDVPLHYNLYNASKSGGNYDMRNIFNGTVVQRHPSHAVTFVDNHDSQPEEALESFVEEWFKPLAYALTLTREQGYPSVFYGDYYGIPTHGVPAMRSKIDPILEARQKYAYGKQNDYLDHHNIIGWTREGNTAHPNSGLATIMSDGAGGSKWMFVGRNKAGQVWSDITGNRTGTVTINADGWGNFSVNGGSVSIWVNK

SEQ ID NO: 23246 - protein, 485 aa, Bacillus sp. 707
HHNGTNGTMMQYFEWYLPNDGNHWNRLNSDASNLKSKGITAVWIPPAWKGASQNDVGYGAYDLYDLGEFNQKGTVRTKYGTRSQLQAAVTSLKNNGIQVYGDVVMNHKGGADATEMVRAVEVNPNNRNQEVTGEYTIEAWTRFDFPGRGNTHSSFKWRWYHFDGVDWDQSRRLNNRIYKFRGHGKAWDWEVDTENGNYDYLMYADIDMDHPEVVNELRNWGVWYTNTLGLDGFRIDAVKHIKYSFTRDWINHVRSATGKNMFAVAEFWKNDLGAIENYLQKTNWNHSVFDVPLHYNLYNASKSGGNYDMRNIFNGTVVQRHPSHAVTFVDNHDSQPEEALESFVEEWFKPLAYALTLTREQGYPSVFYGDYYGIPTHGVPAMRSKIDRILEARQKYAYGKQNDYLDHHNIIGWTREGNTAHPNSGLATIMSDGAGGSKWMFVGRNKAGQVWSDITGNRTGTVTINADGWGNFSVNGGSVSIWVNK

SEQ ID NO: 23247 - protein, 485 aa, Bacillus sp. 707
HHNGTNGTMMQYFEWYLPNDGNHWNRLNSDASNLKSKGITAVWIPPAWKGASQNDVGYGAYDLYDLGEFNQKGTVRTKYGTRSQLQAAVTSLKNNGIQVYGDVVMNHKGGADATEMVRAVEVNPNNRNQEVTGEYTIEAWTRFDFPGRGNTHSSFKWRWYHFDGVDWDQSRRLNNRIYKFRGHGKAWDWEVDTENGNYDYLMYADIDMDHPEVVNELRNWGVWYTNTLGLDGFRIDAVKHIKYSFTRDWINHVRSATGKNMFAVAEFWKNDLGAIENYLQKTNWNHSVFDVPLHYNLYNASKSGGNYDMRNIFNGTVVQRHPSHAVTFVDNHDSQPEEALESFVEEWFKPLAYALTLTREQGYPSVFYGDYYGIPTHGVPAMRSKIDPILEARQKYAYGKQNDYLDHHNIIGWTREGNTAHPNSGLATIMSDGAGGSKWMFVGRTKAGQVWSDITGNRTGTVTINADGWGNFSVNGGSVSIWVNK

SEQ ID NO: 23248 - protein, 485 aa, Bacillus sp. 707
HHNGTNGTMMQYFEWYLPNDGNHWNRLNSDASNLKSKGITAVWIPPAWKGASQNDVGYGAYDLYDLGEFNQKGTVRTKYGTRSQLQAAVTSLKNNGIQVYGDVVMNHKGGADATEMVRAVEVNPNNRNQEVTGEYTIEAWTRFDFPGRGNTHSSFKWRWYHFDGVDWDQSRRLNNRIYKFRGHGKAWDWEVDTENGNYDYLLYADIDMDHPEVVNELRNWGVWYTNTLGLDGFRIDAVKHIKYSFTRDWINHVRSATGKNMFAVAEFWKNDLGAIENYLQKTNWNHSVFDVPLHYNLYNASKSGGNYDMRNIFNGTVVQRHPSHAVTFVDNHDSQPEEALESFVEEWFKPLAYALTLTREQGYPSVFYGDYYGIPTHGVPAMRSKIDPILEARQKYAYGKQNDYLDHHNIIGWTREGNTAHPNSGLATIMSDGAGGSKWMFVGRNKAGQVWSDITGNRTGTVTINADGWGNFSVNGGSVSIWVNK

SEQ ID NO: 23249 - protein, 485 aa, Bacillus sp. 707
HHNGTNGTMMQYFEWYLPNDGNHWNRLNSDASNLKSKGITAVWIPPAWKGASQNDVGYGAYDLYDLGEFNQKGTVRTKYGTRSQLQAAVTSLKNNGIQVYGDVVMNHKGGADATEMVRAVEVNPNNRNQEVTGEYTIEAWTRFDFPGRGNTHSSFKWRWYHFDGVDWDQSRRLNNRIYKFRGHGKAWDWEVDTENGNYDYLMYADIDMDHPEVVNELRNWGVWYTNTLGLDGFRIDAVKHIKYSFTRDWINHVRSATGKNMFAVAEFWKNDLGAIENYLQKTNWNHSVFDVPLHYNLYNASKSGGNYDMRNIFNGTVVQRHPSHAVTFVDNHDSQPEEALESFVEEWFKPLAYALTLTRPQGYPSVFYGDYYGIPTHGVPAMRSKIDPILEARQKYAYGKQNDYLDHHNIIGWTREGNTAHPNSGLATIMSDGAGGSKWMFVGRNKAGQVWSDITGNRTGTVTINADGWGNFSVNGGSVSIWVNK

SEQ ID NO: 23250 - protein, 485 aa, Bacillus sp. 707
HHNGTNGTMMQYFEWYLPNDGNHWNRLNSDASNLKSKGITAVWIPPAWKGASQNDVGYGAYDLYDLGEFNQKGTVRTKYGTRSQLQAAVTSLKNNGIQVYGDVVMNHKGGADATEMVRAVEVNPNNRNQEVTGEYTIEAWTRFDFPGRGNLHSSFKWRWYHFDGVDWDQSRRLNNRIYKFRGHGKAWDWEVDTENGNYDYLMYADIDMDHPEVVNELRNWGVWYTNTLGLDGFRIDAVKHIKYSFTRDWINHVRSATGKNMFAVAEFWKNDLGAIENYLQKTNWNHSVFDVPLHYNLYNASKSGGNYDMRNIFNGTVVQRHPSHAVTFVDNHDSQPEEALESFVEEWFKPLAYALTLTREQGYPSVFYGDYYGIPTHGVPAMRSKIDPILEARQKYAYGKQNDYLDHHNIIGWTREGNTAHPNSGLATIMSDGAGGSKWMFVGRNKAGQVWSDITGNRTGTVTINADGWGNFSVNGGSVSIWVNK

SEQ ID NO: 23251 - protein, 485 aa, Bacillus sp. 707
HHNGTNGTMMQYFEWYLPNDGNHWNRLNSDASNLKSKGITAVWIPPAWKGASQNDVGYGAYDLYDLGEFNQKGTVRTKYGTRSKLQAAVTSLKNNGIQVYGDVVMNHKGGADATEMVRAVEVNPNNRNQEVTGEYTIEAWTRFDFPGRGNTHSSFKWRWYHFDGVDWDQSRRLNNRIYKFRGHGKAWDWEVDTENGNYDYLMYADIDMDHPEVVNELRNWGVWYTNTLGLDGFRIDAVKHIKYSFTRDWINHVRSATGKNMFAVAEFWKNDLGAIENYLQKTNWNHSVFDVPLHYNLYNASKSGGNYDMRNIFNGTVVQRHPSHAVTFVDNHDSQPEEALESFVEEWFKPLAYALTLTREQGYPSVFYGDYYGIPTHGVPAMRSKIDPILEARQKYAYGKQNDYLDHHNIIGWTREGNTAHPNSGLATIMSDGAGGSKWMFVGRNKAGQVWSDITGNRTGTVTINADGWGNFSVNGGSVSIWVNK

SEQ ID NO: 23252 - protein, 485 aa, Bacillus sp. 707
HHNGTNGTMMQYFEWYLPNDGNHWNRLNSDASNLKSKGITAVWIPPAWKGASQNDVGYGAYDLYDLGEFNQKGTVRTKYGTRSQLQAAVTSLKNNGIQVYGDVVMNHKGGADATEMVRAVEVNPNNRNQEVTGEYTIEAWTRFDFPGRGNTHSSFKWRWYHFDGVDWDQSRRLNNRIYKFFGHGKAWDWEVDTENGNYDYLMYADIDMDHPEVVNELRNWGVWYTNTLGLDGFRIDAVKHIKYSFTRDWINHVRSATGKNMFAVAEFWKNDLGAIENYLQKTNWNHSVFDVPLHYNLYNASKSGGNYDMRNIFNGTVVQRHPSHAVTFVDNHDSQPEEALESFVEEWFKPLAYALTLTREQGYPSVFYGDYYGIPTHGVPAMRSKIDPILEARQKYAYGKQNDYLDHHNIIGWTREGNTAHPNSGLATIMSDGAGGSKWMFVGRNKAGQVWSDITGNRTGTVTINADGWGNFSVNGGSVSIWVNK

SEQ ID NO: 23253 - protein, 485 aa, Bacillus sp. 707
HHNGTNGTMMQYFEWYLPNDGNHWNRLNSDASNLKSKGITAVWIPPAWKGASQNDVGYGAYDLYDLGEFNQKGTVRTKYGTRSQLQAAVTSLKNNGIQVYGDVVMNHKGGADATEMVRAVEVNPNNRNQEVTGEYTIEAWTRFDFPGRGNTHSSFKWRWYHFDGVDWDQSRRLNNRIYKFRGHGKAWDWEVDTENGNYDYLMYADIDMDHPEVVNELRNWGVWYTNTLGLDGFRIDAVKHIKYSFTRDWINHVRSATGKNMFAVAEFWKNDLGAIENYLQKTNWNHSVFDVPLHYNLYNASKSGGNYDMRNIFEGTVVQRHPSHAVTFVDNHDSQPEEALESFVEEWFKPLAYALTLTREQGYPSVFYGDYYGIPTHGVPAMRSKIDPILEARQKYAYGKQNDYLDHHNIIGWTREGNTAHPNSGLATIMSDGAGGSKWMFVGRNKAGQVWSDITGNRTGTVTINADGWGNFSVNGGSVSIWVNK

SEQ ID NO: 23254 - protein, 485 aa, Bacillus sp. 707
HHNGTNGTMMQYFEWYLPNDGNHWNRLNSDASKLKSKGITAVWIPPAWKGASQNDVGYGAYDLYDLGEFNQKGTVRTKYGTRSQLQAAVTSLKNNGIQVYGDVVMNHKGGADATEMVRAVEVNPNNRNQEVTGEYTIEAWTRFDFPGRGNTHSSFKWRWYHFDGVDWDQSRRLNNRIYKFRGHGKAWDWEVDTENGNYDYLMYADIDMDHPEVVNELRNWGVWYTNTLGLDGFRIDAVKHIKYSFTRDWINHVRSATGKNMFAVAEFWKNDLGAIENYLQKTNWNHSVFDVPLHYNLYNASKSGGNYDMRNIFNGTVVQRHPSHAVTFVDNHDSQPEEALESFVEEWFKPLAYALTLTREQGYPSVFYGDYYGIPTHGVPAMRSKIDPILEARQKYAYGKQNDYLDHHNIIGWTREGNTAHPNSGLATIMSDGAGGSKWMFVGRNKAGQVWSDITGNRTGTVTINADGWGNFSVNGGSVSIWVNK

SEQ ID NO: 23255 - protein, 485 aa, Bacillus sp. 707
HHNGTNGTMMQYFEWYLPNDGNHWNRLNSDASNLKSKGITAVWIPPAWKGASQNDVGYGAYDLYDLGEFNQKGTVRTKYGTRSQLQAAVTSLKNNGIQVYGDVVMNHKGGADATEMVRAVEVNPNNRNQEVTGEYTIEAWTRFDFPGRGNTHSSFKWRWYHFDGVDWDQSRRLNNRIYKFRGHGKAWDWEVDTENGNYDYLMYADIDMDHPEVVNELRNWGVWYTNTLGLDGFRIDAVKHIKYSFTRDWINHVRSATGKNMFAVAEFWKNDLGAIENYLQKTNWNHSVFDVPLHYNLYNASKSGGNYDMRNIFNGTVVQRHPSHAVTFVDNHDSQPEEALESFVEEWFKPLAYALTLTREQGYPSVFYGDYYGIPTHGVPAMRSKIDLILEARQKYAYGKQNDYLDHHNIIGWTREGNTAHPNSGLATIMSDGAGGSKWMFVGRNKAGQVWSDITGNRTGTVTINADGWGNFSVNGGSVSIWVNK

SEQ ID NO: 23256 - protein, 485 aa, Bacillus sp. 707
HHNGTNGTMMQYFEWYLPNDGNHWNRLNSDASNLKSKGITAVWIPPAWKGASQNDVGYGAYDLYDLGEFNQKGTVRTKYGTRSQLQAAVTSLKNNGIQVYGDVVMNHKGGADATEMVRAVEVNPNNRNQEVTGEYGIEAWTRFDFPGRGNTHSSFKWRWYHFDGVDWDQSRRLNNRIYKFRGHGKAWDWEVDTENGNYDYLMYADIDMDHPEVVNELRNWGVWYTNTLGLDGFRIDAVKHIKYSFTRDWINHVRSATGKNMFAVAEFWKNDLGAIENYLQKTNWNHSVFDVPLHYNLYNASKSGGNYDMRNIFNGTVVQRHPSHAVTFVDNHDSQPEEALESFVEEWFKPLAYALTLTREQGYPSVFYGDYYGIPTHGVPAMRSKIDPILEARQKYAYGKQNDYLDHHNIIGWTREGNTAHPNSGLATIMSDGAGGSKWMFVGRNKAGQVWSDITGNRTGTVTINADGWGNFSVNGGSVSIWVNK

SEQ ID NO: 23257 - protein, 485 aa, Bacillus sp. 707
HCNGTNGTMMQYFEWYLPNDGNHWNRLNSDASNLKSKGITAVWIPPAWKGASQNDVGYGAYDLYDLGEFNQKGTVRTKYGTRSQLQAAVTSLKNNGIQVYGDVVMNHKGGADATEMVRAVEVNPNNRNQEVTGEYTIEAWTRFDFPGRGNTHSSFKWRWYHFDGVDWDQSRRLNNRIYKFRGHGKAWDWEVDTENGNYDYLMYADIDMDHPEVVNELRNWGVWYTNTLGLDGFRIDAVKHIKYSFTRDWINHVRSATGKNMFAVAEFWKNDLGAIENYLQKTNWNHSVFDVPLHYNLYNASKSGGNYDMRNIFNGTVVQRHPSHAVTFVDNHDSQPEEALESFVEEWFKPLAYALTLTREQGYPSVFYGDYYGIPTHGVPAMRSKIDPILEARQKYAYGKQNDYLDHHNIIGWTREGNTAHPNSGLATIMSDGAGGSKWMFVGRNKAGQVWSDITGNRTGTVTINADGWGNFSVNGGSVSIWVNK

SEQ ID NO: 23258 - protein, 485 aa, Bacillus sp. 707
HHNGTNGTMMQYFEWYLPNDGNHWNRLNSDASNLKSKGITAVWIPPAWKGASQNDVGYGAYDLYDLGEFNQKGTVRTKYGTRSQLQAAVTSLKNNGIQVYGDVVMNHKGGADATEMVRAVEVNPNNRNQEVTGEYTIEAWTRFDFPGRGNTHSSFKWRWYHFDGVDWDQSRRLNNRIYKFRGHGKAWDWEVDTENGNYDYLMYADIDMDHPEVVNELRNWGVWYTNTLGLDGFRIDAVKHIKYSFTRDWINHVRSATKKNMFAVAEFWKNDLGAIENYLQKTNWNHSVFDVPLHYNLYNASKSGGNYDMRNIFNGTVVQRHPSHAVTFVDNHDSQPEEALESFVEEWFKPLAYALTLTREQGYPSVFYGDYYGIPTHGVPAMRSKIDPILEARQKYAYGKQNDYLDHHNIIGWTREGNTAHPNSGLATIMSDGAGGSKWMFVGRNKAGQVWSDITGNRTGTVTINADGWGNFSVNGGSVSIWVNK

SEQ ID NO: 23259 - protein, 485 aa, Bacillus sp. 707
HHNGTNGTMMQYFEWYLPNDGNHWNRLNSDASNLKSKGITAVWIPPAWKGASQNDVGYGAYDLYDLGEFNQKGTVRTKYGTRSQLQAAVTSLKNNGIQVYGDVVMNHKGGADATEMVRAVEVNPNNRNQEVTGEYTIEAWTRFDFPGRGNTHSSFKWRWYHFDGVDWDQSRRLNNRIYKFRGHGKAWDWEVDTENGNYDYLMYADIDMDHPEVVNELRNWGVWYTNTLGLDGFRIDAVKHIKYSFTRDWINHVRSATGKNMAAVAEFWKNDLGAIENYLQKTNWNHSVFDVPLHYNLYNASKSGGNYDMRNIFNGTVVQRHPSHAVTFVDNHDSQPEEALESFVEEWFKPLAYALTLTREQGYPSVFYGDYYGIPTHGVPAMRSKIDPILEARQKYAYGKQNDYLDHHNIIGWTREGNTAHPNSGLATIMSDGAGGSKWMFVGRNKAGQVWSDITGNRTGTVTINADGWGNFSVNGGSVSIWVNK

SEQ ID NO: 23260 - protein, 485 aa, Bacillus sp. 707
HHNGTNGTMMQYFEWYLPNDGNHWNRLNSDASNLKSKGITAVWIPPAWKGASQNDVGYGAYDLYDLGEFNQKGTVRTKYGTRSQLQAAVTSLKNNGIQVYGDVVMNHKGGADATEMVRAVEVNPNNRNQEVTGEYTIEAWTRFDFPGRGNTHSSFKWRWYHFDGVDWDQSRRLNNRIYKFRGHGKAWDWEVDTENGNYDYLMYADIDMDHPEVVNELRNWGVWYTNTLGLDGFRIDAVKHIKYSFTRDWINHVRSATGKNMFAVAEFWKNDLGAIENYLQKTNWNHSVFDVPLHYNLYMASKSGGNYDMRNIFNGTVVQRHPSHAVTFVDNHDSQPEEALESFVEEWFKPLAYALTLTREQGYPSVFYGDYYGIPTHGVPAMRSKIDPILEARQKYAYGKQNDYLDHHNIIGWTREGNTAHPNSGLATIMSDGAGGSKWMFVGRNKAGQVWSDITGNRTGTVTINADGWGNFSVNGGSVSIWVNK

SEQ ID NO: 23261 - protein, 485 aa, Bacillus sp. 707
HHNGTNGTMMQYFEWYLPNDGNHWNRLNSDASNLKSKGITAVWIPPAWKGASQNDVGYGAYDLYDLGEFNQKKTVRTKYGTRSQLQAAVTSLKNNGIQVYGDVVMNHKGGADATEMVRAVEVNPNNRNQEVTGEYTIEAWTRFDFPGRGNTHSSFKWRWYHFDGVDWDQSRRLNNRIYKFRGHGKAWDWEVDTENGNYDYLMYADIDMDHPEVVNELRNWGVWYTNTLGLDGFRIDAVKHIKYSFTRDWINHVRSATGKNMFAVAEFWKNDLGAIENYLQKTNWNHSVFDVPLHYNLYNASKSGGNYDMRNIFNGTVVQRHPSHAVTFVDNHDSQPEEALESFVEEWFKPLAYALTLTREQGYPSVFYGDYYGIPTHGVPAMRSKIDPILEARQKYAYGKQNDYLDHHNIIGWTREGNTAHPNSGLATIMSDGAGGSKWMFVGRNKAGQVWSDITGNRTGTVTINADGWGNFSVNGGSVSIWVNK

SEQ ID NO: 23262 - protein, 485 aa, Bacillus sp. 707
HLNGTNGTMMQYFEWYLPNDGNHWNRLNSDASNLKSKGITAVWIPPAWKGASQNDVGYGAYDLYDLGEFNQKGTVRTKYGTRSQLQAAVTSLKNNGIQVYGDVVMNHKGGADATEMVRAVEVNPNNRNQEVTGEYTIEAWTRFDFPGRGNTHSSFKWRWYHFDGVDWDQSRRLNNRIYKFRGHGKAWDWEVDTENGNYDYLMYADIDMDHPEVVNELRNWGVWYTNTLGLDGFRIDAVKHIKYSFTRDWINHVRSATGKNMFAVAEFWKNDLGAIENYLQKTNWNHSVFDVPLHYNLYNASKSGGNYDMRNIFNGTVVQRHPSHAVTFVDNHDSQPEEALESFVEEWFKPLAYALTLTREQGYPSVFYGDYYGIPTHGVPAMRSKIDPILEARQKYAYGKQNDYLDHHNIIGWTREGNTAHPNSGLATIMSDGAGGSKWMFVGRNKAGQVWSDITGNRTGTVTINADGWGNFSVNGGSVSIWVNK

SEQ ID NO: 23263 - protein, 485 aa, Bacillus sp. 707
HHNGTNGTMMQYFEWYLPNDGNHWNRLNSDASNLKSKGITAVWIPPAWKGASQNDVGYGAYDLYDLGEFNQKGTVRTKYGTRSQLQAAVTSLKNNGIQVYGDVVMNHKGGADATEMVRAVEVNPNNRNQEVTGEYTIEAWTRFDFPGRGNTHSSFKWRWYHFDGVDWDQSRRLNNRIYKFRGHGKAWDWEVDTENGNYDYLMYADIDMDHPEVVNELRNWGVWYTNTLGLDGFRIDAVKHIKYSFTRDWINHVRSATGKNMFAVAEFWKNDLGAIENYLQKTNWNHSVFDVPLHYNLYNASKSGGNYDMRNIFNGTVVQRHPSHAVTFVDNHDSQPEEALESFVEEWFKPLAYALTLTREQGQPSVFYGDYYGIPTHGVPAMRSKIDPILEARQKYAYGKQNDYLDHHNIIGWTREGNTAHPNSGLATIMSDGAGGSKWMFVGRNKAGQVWSDITGNRTGTVTINADGWGNFSVNGGSVSIWVNK

SEQ ID NO: 23264 - protein, 485 aa, Bacillus sp. 707
HHNGTNGTMMQYFEWYLPNDGNHWNRLNSDASNLKSKGITAVWIPPAWKGASQNDVGYGAYDLYDLGEFNQKGTVRTKYGTRSQLQAAVTSLKNNGIQVYGDVVMNHKGGADATEMVRAVEVNPNNRNQEVTGEYTIEAWTRFDFPGRGNTHSSFKWRWYHFDGVDWDVSRRLNNRIYKFRGHGKAWDWEVDTENGNYDYLMYADIDMDHPEVVNELRNWGVWYTNTLGLDGFRIDAVKHIKYSFTRDWINHVRSATGKNMFAVAEFWKNDLGAIENYLQKTNWNHSVFDVPLHYNLYNASKSGGNYDMRNIFNGTVVQRHPSHAVTFVDNHDSQPEEALESFVEEWFKPLAYALTLTREQGYPSVFYGDYYGIPTHGVPAMRSKIDPILEARQKYAYGKQNDYLDHHNIIGWTREGNTAHPNSGLATIMSDGAGGSKWMFVGRNKAGQVWSDITGNRTGTVTINADGWGNFSVNGGSVSIWVNK

SEQ ID NO: 23265 - protein, 485 aa, Bacillus sp. 707
HHNGTNGTMMQYFEWYLPNDGNHWNRLNSDASNLKSKGITAVWIPPAWKGASQNDVGYGAYDLYDLGEFNQKGTVRTKYGTRSQLQAAVTSLKANGIQVYGDVVMNHKGGADATEMVRAVEVNPNNRNQEVTGEYTIEAWTRFDFPGRGNTHSSFKWRWYHFDGVDWDQSRRLNNRIYKFRGHGKAWDWEVDTENGNYDYLMYADIDMDHPEVVNELRNWGVWYTNTLGLDGFRIDAVKHIKYSFTRDWINHVRSATGKNMFAVAEFWKNDLGAIENYLQKTNWNHSVFDVPLHYNLYNASKSGGNYDMRNIFNGTVVQRHPSHAVTFVDNHDSQPEEALESFVEEWFKPLAYALTLTREQGYPSVFYGDYYGIPTHGVPAMRSKIDPILEARQKYAYGKQNDYLDHHNIIGWTREGNTAHPNSGLATIMSDGAGGSKWMFVGRNKAGQVWSDITGNRTGTVTINADGWGNFSVNGGSVSIWVNK

SEQ ID NO: 23266 - protein, 485 aa, Bacillus sp. 707
HHNITNGTMMQYFEWYLPNDGNHWNRLNSDASNLKSKGITAVWIPPAWKGASQNDVGYGAYDLYDLGEFNQKGTVRTKYGTRSQLQAAVTSLKNNGIQVYGDVVMNHKGGADATEMVRAVEVNPNNRNQEVTGEYTIEAWTRFDFPGRGNTHSSFKWRWYHFDGVDWDQSRRLNNRIYKFRGHGKAWDWEVDTENGNYDYLMYADIDMDHPEVVNELRNWGVWYTNTLGLDGFRIDAVKHIKYSFTRDWINHVRSATGKNMFAVAEFWKNDLGAIENYLQKTNWNHSVFDVPLHYNLYNASKSGGNYDMRNIFNGTVVQRHPSHAVTFVDNHDSQPEEALESFVEEWFKPLAYALTLTREQGYPSVFYGDYYGIPTHGVPAMRSKIDPILEARQKYAYGKQNDYLDHHNIIGWTREGNTAHPNSGLATIMSDGAGGSKWMFVGRNKAGQVWSDITGNRTGTVTINADGWGNFSVNGGSVSIWVNK

SEQ ID NO: 23267 - protein, 485 aa, Bacillus sp. 707
HHNGTNGTMMQYFEWYLPNDGNHWNRLNSDASNLKSKGITAVWIPPAWKGASQNDVGYGAYDLYDLGEFNQKGTVRTKYGTRSQLQAAVTSLKNNGIQVYGDVVMNHKGGADATEMVRAVEVNPNNRNQEVTGEYQIEAWTRFDFPGRGNTHSSFKWRWYHFDGVDWDQSRRLNNRIYKFRGHGKAWDWEVDTENGNYDYLMYADIDMDHPEVVNELRNWGVWYTNTLGLDGFRIDAVKHIKYSFTRDWINHVRSATGKNMFAVAEFWKNDLGAIENYLQKTNWNHSVFDVPLHYNLYNASKSGGNYDMRNIFNGTVVQRHPSHAVTFVDNHDSQPEEALESFVEEWFKPLAYALTLTREQGYPSVFYGDYYGIPTHGVPAMRSKIDPILEARQKYAYGKQNDYLDHHNIIGWTREGNTAHPNSGLATIMSDGAGGSKWMFVGRNKAGQVWSDITGNRTGTVTINADGWGNFSVNGGSVSIWVNK

SEQ ID NO: 23268 - protein, 485 aa, Bacillus sp. 707
HHNGTNGTMMQYFEWYLPNDGNHWNRLNSDASNLKSKGITAVWIPPAWKGASQNDVGYGAYDLYDLGEFNQKGTVRTKYGTRSQLQAAVTSLKNNGIQVYGDVVMNHKGGADATEMVRAVEVNPNNRNQEVTGEYTIEAWTRFDFPGRGNTHSSFKWRWYHFDGVDWDQSRRLNNRIYKFRGHGKAWDWEVDTENGNYDYLMYADIDMDHPEVVNELRNWGVWYTNTLGLDGYRIDAVKHIKYSFTRDWINHVRSATGKNMFAVAEFWKNDLGAIENYLQKTNWNHSVFDVPLHYNLYNASKSGGNYDMRNIFNGTVVQRHPSHAVTFVDNHDSQPEEALESFVEEWFKPLAYALTLTREQGYPSVFYGDYYGIPTHGVPAMRSKIDPILEARQKYAYGKQNDYLDHHNIIGWTREGNTAHPNSGLATIMSDGAGGSKWMFVGRNKAGQVWSDITGNRTGTVTINADGWGNFSVNGGSVSIWVNK

SEQ ID NO: 23269 - protein, 485 aa, Bacillus sp. 707
HHNGTNGTMMQYFEWYLPNDGNHWNRLNSDASNLKSKGITAVWIPPAWKGASQNDVGYGAYDLYDLGEFNQKGTVRTKYGTRSQLQAAVTSLKNNGIQVYGDVVMNHKGGADATEMVRAVEVNPNNRNQEVTGEYTIEAWTRFDFPGRGNTHSSFKWRWYHFDGVDWDQSRRLNNRIYKFRGHGKAWDWEVDTENGNYDYLMYADIDMDHPEVVNELRNWGVWYTNTLGLDGFRIDAVKHIKYSFTRDWINHVRSATGKNMFAVAEFWKNDLGAIENYLQKTNWNHSVFDVPLHYNLYNASKSGGNYDMRNIFNGTVVQRHPSHAVTFVDNHDSQPEEALESFVEEWFKPLAYALTLTREQGYPSVFYGDYYGIPTHGNPAMRSKIDPILEARQKYAYGKQNDYLDHHNIIGWTREGNTAHPNSGLATIMSDGAGGSKWMFVGRNKAGQVWSDITGNRTGTVTINADGWGNFSVNGGSVSIWVNK

SEQ ID NO: 23270 - protein, 485 aa, Bacillus sp. 707
HHNGTNGTMMQYFEWYLPNDGNHWNRLNSDASNLKSKGITAVWIPPAWKGASQNDVGYGAYDLYDLGEFNQKGTVRTKYGTRSQLQAAVTSLKNNGIQVYGDVVMNHKGGADATEMVRAVEVNPNNRNQEVTGEYTIEAWTRFDFPGRGNTHSSFKWRWYHFDGVDWDQSRRLNNRIYKFRGHGKAWDWEVDTENGNYDYLMYADIDMDHPEVVNELRNWGVWYTNTLGLDGFRIDAVKHIKYSFTRDWINHVRSATGKNMFAVAEFWKNDLGAIENYLQKTNWNHSVFDVPLHYNLYNASKSGGNYDMRNIFNGTVVQRHPSHAVTFVDNHDSQPEEALESFVEEWFKPLAYALTLTREQGYPSVFYGDYYGIPTHGVPAMRSKIDPILEARQKYAYGKQNDYLDHSNIIGWTREGNTAHPNSGLATIMSDGAGGSKWMFVGRNKAGQVWSDITGNRTGTVTINADGWGNFSVNGGSVSIWVNK

SEQ ID NO: 23271 - protein, 485 aa, Bacillus sp. 707
HHNGTNGTMMQYFEWYLPNDGNHWNRLNSDASNLKSKGITAVWIPPAWKGASQNDVGYGAYDLYDLGEFNQKGTVRTKYGTRSQLQAAVTSLKNNGIQVYGDVVMNHKGGADATEMVRAVEVNPNNRNQEVTGEYTIEAWTRFDFPGRGNTHSSFKWRWYHFDGVDWDQSRRLNNRIYKFRGHGKAWDWEVDTENGNYDYLMYADIDMDHPEVVNELRNWGVWYTNTLGLDGFRIDAVKHIKYSFTRDWINHVRSATGKNMFAVAEFWKNDLGAIENYLQKTNWNHSVFDVPLHYNLYNASKSGGNYDMRNIFNGTVVQRHPSHAVTFVDNHDSQPEEALESFVEEWFKPLAYALTLTREQGYPSVFYGDYYGIPTHGVPAMRSKIDPILEARQKYAYGKQNDYLDHHNIIGWTREGNTAKPNSGLATIMSDGAGGSKWMFVGRNKAGQVWSDITGNRTGTVTINADGWGNFSVNGGSVSIWVNK

SEQ ID NO: 23272 - protein, 485 aa, Bacillus sp. 707
HHNGTNGTMMQYFEWYLPNDGNHWNRLNSDASNLKSKGITAVWIPPAWKGASQNDVGYGAYDLYDLGEFNQKGTVRTKYGTRSQLQAAVTSLKNNGIQVYGDVVMNHKGGADATEMVRAVEVNPNNRNQEVTGEYTIEAWTRFDFPGRGNTHSSFKWRWFHFDGVDWDQSRRLNNRIYKFRGHGKAWDWEVDTENGNYDYLMYADIDMDHPEVVNELRNWGVWYTNTLGLDGFRIDAVKHIKYSFTRDWINHVRSATGKNMFAVAEFWKNDLGAIENYLQKTNWNHSVFDVPLHYNLYNASKSGGNYDMRNIFNGTVVQRHPSHAVTFVDNHDSQPEEALESFVEEWFKPLAYALTLTREQGYPSVFYGDYYGIPTHGVPAMRSKIDPILEARQKYAYGKQNDYLDHHNIIGWTREGNTAHPNSGLATIMSDGAGGSKWMFVGRNKAGQVWSDITGNRTGTVTINADGWGNFSVNGGSVSIWVNK

SEQ ID NO: 23273 - protein, 485 aa, Bacillus sp. 707
HHNGQNGTMMQYFEWYLPNDGNHWNRLNSDASNLKSKGITAVWIPPAWKGASQNDVGYGAYDLYDLGEFNQKGTVRTKYGTRSQLQAAVTSLKNNGIQVYGDVVMNHKGGADATEMVRAVEVNPNNRNQEVTGEYTIEAWTRFDFPGRGNTHSSFKWRWYHFDGVDWDQSRRLNNRIYKFRGHGKAWDWEVDTENGNYDYLMYADIDMDHPEVVNELRNWGVWYTNTLGLDGFRIDAVKHIKYSFTRDWINHVRSATGKNMFAVAEFWKNDLGAIENYLQKTNWNHSVFDVPLHYNLYNASKSGGNYDMRNIFNGTVVQRHPSHAVTFVDNHDSQPEEALESFVEEWFKPLAYALTLTREQGYPSVFYGDYYGIPTHGVPAMRSKIDPILEARQKYAYGKQNDYLDHHNIIGWTREGNTAHPNSGLATIMSDGAGGSKWMFVGRNKAGQVWSDITGNRTGTVTINADGWGNFSVNGGSVSIWVNK

SEQ ID NO: 23274 - protein, 485 aa, Bacillus sp. 707
HHNGTNGTMMQYFEWYLPNDGNHWNRLNSDASNLKSKGITAVWIPPAWKGASQNDVGYGAYDLYDLGEFNQKGTVRTKYGTRSQLQAAVTSLKNNGIQVYGDVVMNHKGGADATEMVRAVEVNPNNRNQEVTGEYTIEAWTRFDFPGRGNTHSSFKWRWYHFDGVDWDQSRRLNNRIYKFRGHGKAWDWEVDTENGNYDYLMYADIDMDHPEVVNELRNWGVWYTNTLGLDGFRIDAVKHIKYSFTRDWINHVRSATGKNMFAVAEFWKNDLGAIENYLQKTNWNHSVFDVPLHYNLYNASKLGGNYDMRNIFNGTVVQRHPSHAVTFVDNHDSQPEEALESFVEEWFKPLAYALTLTREQGYPSVFYGDYYGIPTHGVPAMRSKIDPILEARQKYAYGKQNDYLDHHNIIGWTREGNTAHPNSGLATIMSDGAGGSKWMFVGRNKAGQVWSDITGNRTGTVTINADGWGNFSVNGGSVSIWVNK

SEQ ID NO: 23275 - protein, 483 aa, Bacillus sp. SP70
HHNGTNGTMMQYFEWYLPNDGNHWNRLNSDASNLKSKGITAVWIPPAWKGASQNDVGYGAYDLYDLGEFNQKGTVRTKYGTRSQLQAAVTSLKNNGIQVYGDVVMNHKGGADATEMVRAVEVNPNNRNQEVTGEYTIEAWTRFDFPGRGNTHSSFKWRWYHFDGVDWDQSRRLNNRIYKFRGKAWDWEVDTSNGNYDYLMYADIDMDHPEVVNELRNWGVWYTNTLGLDGFRIDAVKHIKYSFTRDWINHVRSATGKNMFAVAEFWKNDLGAIENYLQKTNWNHSVFDVPLHYNLYNASKSGGNYDMRNIFNGTVVQRHPSHAVTFVDNHDSQPEEALESFVEEWFKPLAYALTLTREQGYPSVFYGDYYGIPTHGVPAMRSKIDPILEARQKYAYGKQNDYLDHHNIIGWTREGNTAHPNSGLATIMSDGAGGSKWMFVGRNKAGQVWSDITGNRTGTVTINADGWGNFSVNGGSVSIWVNK

SEQ ID NO: 23276 - protein, 485 aa, Bacillus sp. 707
HHNGTNGTMMQYFEWYLPNDGNHWNRLNSDASNLKSKGITAVWIPPAWKGASQNDVGYGAYDLYDLGEFNQKGTVRTKYGTRSQLQAAVTSLKNNGIQVYGDVVMNHKGGADATEMVRAVEVNPNNRNQEVTGEYTIEAWTRFDFPGRGNTHSSFKWRWYHFDGVDWDQSRRLNNRIYKFRGHGKAWDWEVDTENGNYDYLMYADIDMDHPEVVNELRNWGVWYTNTLGLDGFRIDAVKHIKYSFTRDWINHVRSATGKNMFAVAEFWKNDLGAIENYLQKTNWNHSVFDVPLHYNLYNASKSGGNYDMRNIFNGTVVQRHPSHAVTFVDNHDSQPEEALESFVECWFKPLAYALTLTREQGYPSVFYGDYYGIPTHGVPAMRSKIDPILEARQKYAYGKQNDYLDHHNIIGWTREGNTAHPNSGLATIMSDGAGGSKWMFVGRNKAGQVWSDITGNRTGTVTINADGWGNFSVNGGSVSIWVNK

SEQ ID NO: 23277 - protein, 483 aa, Bacillus sp. SP70
HHNGTNGTMMQYFEWYLPNDGNHWNRLNSDASNLKSKGITAVWIPPAWKGASQNDVGYGAYDLYDLGEFNQKGTVRTKYGTRSQLQAAVTSLKNNGIQVYGDVVMNHKGGADATEMVRAVEVNPNNRNQEVTGEYTIEAWTRFDFPGRGNTHSSFKWRWYHFDGVDWDQSRRLNNRIYKFRGKAWDWEVDTENGNYDYLMYADIDMDHPEVVNELRNWGVWYTNTLGLDGFRIDAVKHIKYSFTRDWINHVRSATGKPMFAVAEFWKNDLGAIENYLQKTNWNHSVFDVPLHYNLYNASKSGGNYDMRNIFNGTVVQRHPSHAVTFVDNHDSQPEEALESFVEEWFKPLAYALTLTREQGYPSVFYGDYYGIPTHGVPAMRSKIDPILEARQKYAYGKQNDYLDHHNIIGWTREGNTAHPNSGLATIMSDGAGGSKRMFVGRNKAGQVWSDITGNRTGTVTINADGWGNFSVNGGSVSIWVNK

SEQ ID NO: 23278 - protein, 485 aa, Bacillus sp. 707
HHNGTNGTMMQYFEWYLPNDGRHWNRLNSDASNLKSKGITAVWIPPAWKGASQNDVGYGAYDLYDLGEFNQKGTVRTKYGTRSQLQAAVTSLKNNGIQVYGDVVMNHKGGADATEMVRAVEVNPNNRNQEVTGEYTIEAWTRFDFPGRGNTHSSFKWRWYHFDGVDWDQSRRLNNRIYKFRGHGKAWDWEVDTENGNYDYLMYADIDMDHPEVVNELRNWGVWYTNTLGLDGFRIDAVKHIKYSFTRDWINHVRSATGKNMFAVAEFWKNDLGAIENYLQKTNWNHSVFDVPLHYNLYNASKSGGNYDMRNIFNGTVVQRHPSHAVTFVDNHDSQPEEALESFVEEWFKPLAYALTLTREQGYPSVFYGDYYGIPTHGVPAMRSKIDPILEARQKYAYGKQNDYLDHHNIIGWTREGNTAHPNSGLATIMSDGAGGSKWMFVGRNKAGQVWSDITGNRTGTVTINADGWGNFSVNGGSVSIWVNK

SEQ ID NO: 23279 - protein, 485 aa, Bacillus sp.
HHNGTNGTMMQYFEWYLPNDGNHWNRLRSDASNLKDKGISAVWIPPAWKGASQNDVGYGAYDLYDLGEFNQKGTIRTKYGTRNQLQAAVNALKSNGIQVYGDVVMNHKGGADATEMVRAVEVNPNNRNQEVSGEYTIEAWTKFDFPGRGNTHSNFKWRWYHFNGVDWDQSRKLNNRIYKFRGDGKGWNWEVDTENGNYDYLMYADIDMSHPEVVNELRNWGVWYTNTLGLDGFRIDAVKHIKYSFTRDWINHVRSATGKNMFAVAEFWKNDLGAIENYLNKTNWNHSVFDVPLHYNLYNASKSGGNYDMRQIFNGTVVQRHPMHAVTFVDNHDSQPEEALESFVEEWFKPLAYALTLTREQGYPSVFYGDYYGIPTHGVPAMKSKIDPILEARQKYAYGRQNDYLDHHNIIGWTREGNTAHPNSGLATIMSDGAGGNKWMFVGRNKAGQVWTDITGNRAGTVTINADGWGNFSVNGGSVSIWVNK

SEQ ID NO: 23280 - protein, 485 aa, Bacillus sp. 707
HHNFTNGTMMQYFEWYLPNDGNHWNRLNSDASNLKSKGITAVWIPPAWKGASQNDVGYGAYDLYDLGEFNQKGTVRTKYGTRSQLQAAVTSLKNNGIQVYGDVVMNHKGGADATEMVRAVEVNPNNRNQEVTGEYTIEAWTRFDFPGRGNTHSSFKWRWYHFDGVDWDQSRRLNNRIYKFRGHGKAWDWEVDTENGNYDYLMYADIDMDHPEVVNELRNWGVWYTNTLGLDGFRIDAVKHIKYSFTRDWINHVRSATGKNMFAVAEFWKNDLGAIENYLQKTNWNHSVFDVPLHYNLYNASKSGGNYDMRNIFNGTVVQRHPSHAVTFVDNHDSQPEEALESFVEEWFKPLAYALTLTREQGYPSVFYGDYYGIPTHGVPAMRSKIDPILEARQKYAYGKQNDYLDHHNIIGWTREGNTAHPNSGLATIMSDGAGGSKWMFVGRNKAGQVWSDITGNRTGTVTINADGWGNFSVNGGSVSIWVNK

SEQ ID NO: 23281 - protein, 485 aa, Bacillus sp. 707
HHNGTNGTMMQYFEWYLPNDGNHWNRLNSDASNLKSKGITAVWIPPAWKGASQNDVGYGAYDLYDLGEFNQKGTVRTKYGTRSQLQAAVTSLKNHGIQVYGDVVMNHKGGADATEMVRAVEVNPNNRNQEVTGEYTIEAWTRFDFPGRGNTHSSFKWRWYHFDGVDWDQSRRLNNRIYKFRGHGKAWDWEVDTENGNYDYLMYADIDMDHPEVVNELRNWGVWYTNTLGLDGFRIDAVKHIKYSFTRDWINHVRSATGKNMFAVAEFWKNDLGAIENYLQKTNWNHSVFDVPLHYNLYNASKSGGNYDMRNIFNGTVVQRHPSHAVTFVDNHDSQPEEALESFVEEWFKPLAYALTLTREQGYPSVFYGDYYGIPTHGVPAMRSKIDPILEARQKYAYGKQNDYLDHHNIIGWTREGNTAHPNSGLATIMSDGAGGSKWMFVGRNKAGQVWSDITGNRTGTVTINADGWGNFSVNGGSVSIWVNK

SEQ ID NO: 23282 - protein, 485 aa, Bacillus sp. 707
HINGTNGTMMQYFEWYLPNDGNHWNRLNSDASNLKSKGITAVWIPPAWKGASQNDVGYGAYDLYDLGEFNQKGTVRTKYGTRSQLQAAVTSLKNNGIQVYGDVVMNHKGGADATEMVRAVEVNPNNRNQEVTGEYTIEAWTRFDFPGRGNTHSSFKWRWYHFDGVDWDQSRRLNNRIYKFRGHGKAWDWEVDTENGNYDYLMYADIDMDHPEVVNELRNWGVWYTNTLGLDGFRIDAVKHIKYSFTRDWINHVRSATGKNMFAVAEFWKNDLGAIENYLQKTNWNHSVFDVPLHYNLYNASKSGGNYDMRNIFNGTVVQRHPSHAVTFVDNHDSQPEEALESFVEEWFKPLAYALTLTREQGYPSVFYGDYYGIPTHGVPAMRSKIDPILEARQKYAYGKQNDYLDHHNIIGWTREGNTAHPNSGLATIMSDGAGGSKWMFVGRNKAGQVWSDITGNRTGTVTINADGWGNFSVNGGSVSIWVNK

SEQ ID NO: 23283 - protein, 485 aa, Bacillus sp. 707
HHNGTNGTMMQYFEWYLPNDGNHWNRLNSDASNLKSKGITAVWIPPAWKGASQNDVGYGAYDLYDLGEFNQKGTVRTKYGTRSQLQAAVTSLKNNGIQVYGDVVMNHKGGADATEMVRAVEVNPNNRNQEVTGEYTIEAWTRFDFPGRGNTHSSFKWRWYHFDGVDWDQSRRLNNRIYKFRGHGKAWDWEVDTENGNYDYLMYADIDMDHPEVVNELRNWGVWYTNTLGLDGFRIDAVKHIKYSFTRDWINHVRSATGKNMFAVAEFWKNDLGAIENYLQKTNWNHSVFDVPLHYNLYNASKSGGNYDMRNIFNGTVVQRHPSHAVTFVDNHDSQPEEALESFVEEWFKPLAYALTLTREQGYPSVFYGDYYGIPTHGVPAMRSKIDPILEARQKYAYGKQNDYLDHHNIIGWTREGNTAHPNSGLATIMSDGAGGSKWMFVGRNKAGQVWSDITGNRTGLVTINADGWGNFSVNGGSVSIWVNK

SEQ ID NO: 23284 - protein, 485 aa, Bacillus sp. 707
HHNGTNGTMMQYFEWYLPNDGNHWNRLNSDASNLKSKGITAVWIPPAWKGASQNDVGYGAYDLYDLGEFNQKGTVRTKYGTRSQLQAAVTSLKNNGIQVYGDVVMNHKGGADATEMVRAVEVNPNNRNQEVTGEYTIEAWTRFDFPGRGNTHSSFKWRWYHFDGVDWDQSRRLNNRIYKFRGHGKAWDWEVDTENGNYDYLMYADIDMDHPEVVNELRNWGVWYTNTLGLDGFRIDAVKHIKYSFTRDWINHVRSATGKNMRAVAEFWKNDLGAIENYLQKTNWNHSVFDVPLHYNLYNASKSGGNYDMRNIFNGTVVQRHPSHAVTFVDNHDSQPEEALESFVEEWFKPLAYALTLTREQGYPSVFYGDYYGIPTHGVPAMRSKIDPILEARQKYAYGKQNDYLDHHNIIGWTREGNTAHPNSGLATIMSDGAGGSKWMFVGRNKAGQVWSDITGNRTGTVTINADGWGNFSVNGGSVSIWVNK

SEQ ID NO: 23285 - protein, 485 aa, Bacillus sp. 707
HHNGTNGTMMQYFEWYLPNDGNHWNRLNSDASNLKSKGITAVWIPPAWKGASQWDVGYGAYDLYDLGEFNQKGTVRTKYGTRSQLQAAVTSLKNNGIQVYGDVVMNHKGGADATEMVRAVEVNPNNRNQEVTGEYTIEAWTRFDFPGRGNTHSSFKWRWYHFDGVDWDQSRRLNNRIYKFRGHGKAWDWEVDTENGNYDYLMYADIDMDHPEVVNELRNWGVWYTNTLGLDGFRIDAVKHIKYSFTRDWINHVRSATGKNMFAVAEFWKNDLGAIENYLQKTNWNHSVFDVPLHYNLYNASKSGGNYDMRNIFNGTVVQRHPSHAVTFVDNHDSQPEEALESFVEEWFKPLAYALTLTREQGYPSVFYGDYYGIPTHGVPAMRSKIDPILEARQKYAYGKQNDYLDHHNIIGWTREGNTAHPNSGLATIMSDGAGGSKWMFVGRNKAGQVWSDITGNRTGTVTINADGWGNFSVNGGSVSIWVNK

SEQ ID NO: 23286 - protein, 485 aa, Bacillus sp. 707
HHNGTNGTMMQYFEWYLPNDGNHWNRLNSDASNLKSKGITAVWIPPAWKGASQNDVGYGAYDLYDLGEFNQKGTVRTKYGTRSQLQAAVTSLKNNGIQVYGDVVMNHKGGADATEMVRAVEVNPNNRNQEVTGEYYIEAWTRFDFPGRGNTHSSFKWRWYHFDGVDWDQSRRLNNRIYKFRGHGKAWDWEVDTENGNYDYLMYADIDMDHPEVVNELRNWGVWYTNTLGLDGFRIDAVKHIKYSFTRDWINHVRSATGKNMFAVAEFWKNDLGAIENYLQKTNWNHSVFDVPLHYNLYNASKSGGNYDMRNIFNGTVVQRHPSHAVTFVDNHDSQPEEALESFVEEWFKPLAYALTLTREQGYPSVFYGDYYGIPTHGVPAMRSKIDPILEARQKYAYGKQNDYLDHHNIIGWTREGNTAHPNSGLATIMSDGAGGSKWMFVGRNKAGQVWSDITGNRTGTVTINADGWGNFSVNGGSVSIWVNK

SEQ ID NO: 23287 - protein, 485 aa, Bacillus sp. 707
HHNGTNGTMMQYFEWYLPNDGNHWNRLNSDASNLKSKGITAVWIPPAWKGASQNDVGYGAYDLYDLGEFNQKSTVRTKYGTRSQLQAAVTSLKNNGIQVYGDVVMNHKGGADATEMVRAVEVNPNNRNQEVTGEYTIEAWTRFDFPGRGNTHSSFKWRWYHFDGVDWDQSRRLNNRIYKFRGHGKAWDWEVDTENGNYDYLMYADIDMDHPEVVNELRNWGVWYTNTLGLDGFRIDAVKHIKYSFTRDWINHVRSATGKNMFAVAEFWKNDLGAIENYLQKTNWNHSVFDVPLHYNLYNASKSGGNYDMRNIFNGTVVQRHPSHAVTFVDNHDSQPEEALESFVEEWFKPLAYALTLTREQGYPSVFYGDYYGIPTHGVPAMRSKIDPILEARQKYAYGKQNDYLDHHNIIGWTREGNTAHPNSGLATIMSDGAGGSKWMFVGRNKAGQVWSDITGNRTGTVTINADGWGNFSVNGGSVSIWVNK

SEQ ID NO: 23288 - protein, 485 aa, Bacillus sp. 707
HHNGTNMTMMQYFEWYLPNDGNHWNRLNSDASNLKSKGITAVWIPPAWKGASQNDVGYGAYDLYDLGEFNQKGTVRTKYGTRSQLQAAVTSLKNNGIQVYGDVVMNHKGGADATEMVRAVEVNPNNRNQEVTGEYTIEAWTRFDFPGRGNTHSSFKWRWYHFDGVDWDQSRRLNNRIYKFRGHGKAWDWEVDTENGNYDYLMYADIDMDHPEVVNELRNWGVWYTNTLGLDGFRIDAVKHIKYSFTRDWINHVRSATGKNMFAVAEFWKNDLGAIENYLQKTNWNHSVFDVPLHYNLYNASKSGGNYDMRNIFNGTVVQRHPSHAVTFVDNHDSQPEEALESFVEEWFKPLAYALTLTREQGYPSVFYGDYYGIPTHGVPAMRSKIDPILEARQKYAYGKQNDYLDHHNIIGWTREGNTAHPNSGLATIMSDGAGGSKWMFVGRNKAGQVWSDITGNRTGTVTINADGWGNFSVNGGSVSIWVNK

SEQ ID NO: 23289 - protein, 485 aa, Bacillus sp. 707
HHNGTNGTMMQYFEWYLPNDGNHWNRLNSDASNLKSKGITAVWIPPAWKGASQNDVGYGAYDLYDLGEFNQKGTVRTKYGTRSQLQAAVTSLKNNGIQVYGDVVMNHKGGADATEMVRAVEVNPNNRNQEVTGEYTIEAWTRFDFPGRGNTHSSFKWRWYHFDGVDWDQSRRLNNRIYKFRGHGKAWDWEVDTENGNYDYLMYADIDMDHPEVVNELRNWGVWYTNTLGLDGFRIDAVKHIKYSFTRDWINHVRSATGKNMFAVAEFWKNDLGAIENYLQKTNWNVSVFDVPLHYNLYNASKSGGNYDMRNIFNGTVVQRHPSHAVTFVDNHDSQPEEALESFVEEWFKPLAYALTLTREQGYPSVFYGDYYGIPTHGVPAMRSKIDPILEARQKYAYGKQNDYLDHHNIIGWTREGNTAHPNSGLATIMSDGAGGSKWMFVGRNKAGQVWSDITGNRTGTVTINADGWGNFSVNGGSVSIWVNK

SEQ ID NO: 23290 - protein, 485 aa, Bacillus sp. 707
HHNGTNGTMMQYFEWYLPNDGNHWNRLNSDASNLKSKGITAVWIPPAWKGASQNDVGYGAYDLYDLGEFNQKGTVRTKYGTRSQLQAAVTSLKNNGIQVYGDVVMNHKGGADATEMVRAVEVNPNNRNQEVTGEYTIEAWTRFDFPGRGNTHSSFKWRWYHFDGVDWDQSRRLNNRIYKFRGHGKAWDWEVDTENGNYDYLMYADIDMDHPEVVNELRNWGVWYTNTLGLDGFRIDAVKHIKYSFTRDWINHVRSATGGNMFAVAEFWKNDLGAIENYLQKTNWNHSVFDVPLHYNLYNASKSGGNYDMRNIFNGTVVQRHPSHAVTFVDNHDSQPEEALESFVEEWFKPLAYALTLTREQGYPSVFYGDYYGIPTHGVPAMRSKIDPILEARQKYAYGKQNDYLDHHNIIGWTREGNTAHPNSGLATIMSDGAGGSKWMFVGRNKAGQVWSDITGNRTGTVTINADGWGNFSVNGGSVSIWVNK

SEQ ID NO: 23291 - protein, 485 aa, Bacillus sp. 707
HHNGTNGTMMQYFEWYLPNDGNHWNRLNSDASNLKSKGITAVWIPPAWKGASQNDVGYGAYDLYDLGEFNQKGTVRTKYGTRSNLQAAVTSLKNNGIQVYGDVVMNHKGGADATEMVRAVEVNPNNRNQEVTGEYTIEAWTRFDFPGRGNTHSSFKWRWYHFDGVDWDQSRRLNNRIYKFRGHGKAWDWEVDTENGNYDYLMYADIDMDHPEVVNELRNWGVWYTNTLGLDGFRIDAVKHIKYSFTRDWINHVRSATGKNMFAVAEFWKNDLGAIENYLQKTNWNHSVFDVPLHYNLYNASKSGGNYDMRNIFNGTVVQRHPSHAVTFVDNHDSQPEEALESFVEEWFKPLAYALTLTREQGYPSVFYGDYYGIPTHGVPAMRSKIDPILEARQKYAYGKQNDYLDHHNIIGWTREGNTAHPNSGLATIMSDGAGGSKWMFVGRNKAGQVWSDITGNRTGTVTINADGWGNFSVNGGSVSIWVNK

SEQ ID NO: 23292 - protein, 485 aa, Bacillus sp. 707
HHNGTNGTMMQYFEWYLPNDGNHWNRLNSDASNLKSKGITAVWIPPAWKGASQNDVGYGAYDLYDLGEFNQKGTVRTKYGTRSQLQAAVTSLKNCGIQVYGDVVMNHKGGADATEMVRAVEVNPNNRNQEVTGEYTIEAWTRFDFPGRGNTHSSFKWRWYHFDGVDWDQSRRLNNRIYKFRGHGKAWDWEVDTENGNYDYLMYADIDMDHPEVVNELRNWGVWYTNTLGLDGFRIDAVKHIKYSFTRDWINHVRSATGKNMFAVAEFWKNDLGAIENYLQKTNWNHSVFDVPLHYNLYNASKSGGNYDMRNIFNGTVVQRHPSHAVTFVDNHDSQPEEALESFVEEWFKPLAYALTLTREQGYPSVFYGDYYGIPTHGVPAMRSKIDPILEARQKYAYGKQNDYLDHHNIIGWTREGNTAHPNSGLATIMSDGAGGSKWMFVGRNKAGQVWSDITGNRTGTVTINADGWGNFSVNGGSVSIWVNK

SEQ ID NO: 23293 - protein, 485 aa, Bacillus sp. 707
HHCGTNGTMMQYFEWYLPNDGNHWNRLNSDASNLKSKGITAVWIPPAWKGASQNDVGYGAYDLYDLGEFNQKGTVRTKYGTRSQLQAAVTSLKNNGIQVYGDVVMNHKGGADATEMVRAVEVNPNNRNQEVTGEYTIEAWTRFDFPGRGNTHSSFKWRWYHFDGVDWDQSRRLNNRIYKFRGHGKAWDWEVDTENGNYDYLMYADIDMDHPEVVNELRNWGVWYTNTLGLDGFRIDAVKHIKYSFTRDWINHVRSATGKNMFAVAEFWKNDLGAIENYLQKTNWNHSVFDVPLHYNLYNASKSGGNYDMRNIFNGTVVQRHPSHAVTFVDNHDSQPEEALESFVEEWFKPLAYALTLTREQGYPSVFYGDYYGIPTHGVPAMRSKIDPILEARQKYAYGKQNDYLDHHNIIGWTREGNTAHPNSGLATIMSDGAGGSKWMFVGRNKAGQVWSDITGNRTGTVTINADGWGNFSVNGGSVSIWVNK

SEQ ID NO: 23294 - protein, 485 aa, Bacillus sp. 707
HHMGTNGTMMQYFEWYLPNDGNHWNRLNSDASNLKSKGITAVWIPPAWKGASQNDVGYGAYDLYDLGEFNQKGTVRTKYGTRSQLQAAVTSLKNNGIQVYGDVVMNHKGGADATEMVRAVEVNPNNRNQEVTGEYTIEAWTRFDFPGRGNTHSSFKWRWYHFDGVDWDQSRRLNNRIYKFRGHGKAWDWEVDTENGNYDYLMYADIDMDHPEVVNELRNWGVWYTNTLGLDGFRIDAVKHIKYSFTRDWINHVRSATGKNMFAVAEFWKNDLGAIENYLQKTNWNHSVFDVPLHYNLYNASKSGGNYDMRNIFNGTVVQRHPSHAVTFVDNHDSQPEEALESFVEEWFKPLAYALTLTREQGYPSVFYGDYYGIPTHGVPAMRSKIDPILEARQKYAYGKQNDYLDHHNIIGWTREGNTAHPNSGLATIMSDGAGGSKWMFVGRNKAGQVWSDITGNRTGTVTINADGWGNFSVNGGSVSIWVNK

SEQ ID NO: 23295 - protein, 485 aa, Bacillus sp. 707
HHNGTNGTMMQYFEWYLPNDGNHWNRLNSDASNLKSKGITAVWIPPAWKGASQNDVGYGAYDLYDLGEFNQKGTVRTKYGTRSQLQAAVTSLKNNGIQVYGDVVMNHKGGADATEMVRAVEVNPNNRNQEVTGEYTIEAWTRFDFPGRGNTHSSFKWRWYHFDGVDWDQSRRLNNRIYKFRGHGKAWDWEVDTENGNYDYLMYADIDMDHPEVVDELRNWGVWYTNTLGLDGFRIDAVKHIKYSFTRDWINHVRSATGKNMFAVAEFWKNDLGAIENYLQKTNWNHSVFDVPLHYNLYNASKSGGNYDMRNIFNGTVVQRHPSHAVTFVDNHDSQPEEALESFVEEWFKPLAYALTLTREQGYPSVFYGDYYGIPTHGVPAMRSKIDPILEARQKYAYGKQNDYLDHHNIIGWTREGNTAHPNSGLATIMSDGAGGSKWMFVGRNKAGQVWSDITGNRTGTVTINADGWGNFSVNGGSVSIWVNK

SEQ ID NO: 23296 - protein, 485 aa, Bacillus sp. 707
HHNGTNGTMMQYFEWYLPNAGNHWNRLNSDASNLKSKGITAVWIPPAWKGASQNDVGYGAYDLYDLGEFNQKGTVRTKYGTRSQLQAAVTSLKNNGIQVYGDVVMNHKGGADATEMVRAVEVNPNNRNQEVTGEYTIEAWTRFDFPGRGNTHSSFKWRWYHFDGVDWDQSRRLNNRIYKFRGHGKAWDWEVDTENGNYDYLMYADIDMDHPEVVNELRNWGVWYTNTLGLDGFRIDAVKHIKYSFTRDWINHVRSATGKNMFAVAEFWKNDLGAIENYLQKTNWNHSVFDVPLHYNLYNASKSGGNYDMRNIFNGTVVQRHPSHAVTFVDNHDSQPEEALESFVEEWFKPLAYALTLTREQGYPSVFYGDYYGIPTHGVPAMRSKIDPILEARQKYAYGKQNDYLDHHNIIGWTREGNTAHPNSGLATIMSDGAGGSKWMFVGRNKAGQVWSDITGNRTGTVTINADGWGNFSVNGGSVSIWVNK

SEQ ID NO: 23297 - protein, 485 aa, Bacillus sp. 707
HHNGTNGTMMQYFEWYLPNDGNHWNRLNSDASNLKSKGITAVWIPPAWKGASQNDVGYGAYDLYDLGEFNQKGTVRTKYGTRSQLQAAVTSLKNNGIQVYGDVVMNHKGGADATEMVRAVEVNPNNRNQEVTGEYTIEAWTRFDFPGRGNTHSSFKWRWYHFDGVDWDQSRRLNNRIYKFRGHGKAWDWEVDTENGNYDYLMYADIDMDHPEVVNELRNWGVWYTNTLGLDGFRIDAVKHIKYSFTRDWINHVRSATGKNMFAVAEFWKNDLGAIENYLQKTNWNHSVFDVPLHYNLYNASKSGGNYDMRNIFNGTVVQRHPSHAVTFVDNHDSQPEEALESFVEEWFKPLAYALTLTREQGYPSVFYGDYYGIPTHGVPAMRSKIDPILEARQKYAYGKQNDYLDHHNIIGWTREGNTAHGNSGLATIMSDGAGGSKWMFVGRNKAGQVWSDITGNRTGTVTINADGWGNFSVNGGSVSIWVNK

SEQ ID NO: 23298 - protein, 485 aa, Bacillus sp. 707
HHNGTNGTMMQYFEWYLPNDGNHWNRLNSDASNLKSKGITAVWIPPAWKGASQNDVGYGAYDLYDLGEFNQKGTVRTKYGTRSQLQAAVTSLKNNGIQVYGDVVMNHKGGADATEMVRAVEVNPNNRNQEVTGEYTIEAWTRFDFPGRGNTHSSFKWRWYHFDGVDWDQSRRLNNRIYKFRGHGKAWDWEVDTENGNYDYLMYADIDMDHPEVVNELRNWGVWYTNTLGLDGFRIDAVKHIKYSFTRDWINHVRSATGKNMFAVAEFWKNDLGAIENYLQKTNWNHSVFDVPLHYNLYNASKSGGNYDMRNIFNGTVVQRHPSHAVTFVDNHDSQPEEALESFVEEWFKPLAYALTLTREQGYPSVFYGDYYGIPTHGVPAMRSKIDPILEARQKYAYGKQNDYLDHHNIIGWTREGNTAHPNSGLATIMSDGAGGSKWMFVGRNKAGQVWSDITGNRTHTVTINADGWGNFSVNGGSVSIWVNK

SEQ ID NO: 23299 - protein, 485 aa, Bacillus sp. 707
HHNGTNGTMMQYFEWYLPNDGNHWNRLNSDASNLKSKGITAVWIPPAWKGASQNDVGYGAYDLYDLGEFNQKGTVRTKYGTRSQLQAAVTSLKNNGIQVYGDVVMNHKGGADATEMVRAVEVNPNNRNQEVTGEYMIEAWTRFDFPGRGNTHSSFKWRWYHFDGVDWDQSRRLNNRIYKFRGHGKAWDWEVDTENGNYDYLMYADIDMDHPEVVNELRNWGVWYTNTLGLDGFRIDAVKHIKYSFTRDWINHVRSATGKNMFAVAEFWKNDLGAIENYLQKTNWNHSVFDVPLHYNLYNASKSGGNYDMRNIFNGTVVQRHPSHAVTFVDNHDSQPEEALESFVEEWFKPLAYALTLTREQGYPSVFYGDYYGIPTHGVPAMRSKIDPILEARQKYAYGKQNDYLDHHNIIGWTREGNTAHPNSGLATIMSDGAGGSKWMFVGRNKAGQVWSDITGNRTGTVTINADGWGNFSVNGGSVSIWVNK

SEQ ID NO: 23300 - protein, 485 aa, Bacillus sp. 707
HHNGTNGTMMQYFEWYLPNDGNHWNRLNSDASNLKSKGITAVWIPPAWKGASQNDVGYGAYDLYDLGEFNQKGTVRTKYGTRSQLQAAVTSLKNNGIQVYGDVVMNHKGGADATEMVRAVEVNPNNRNQEVTGEYTIEAWTRFDFPGRGNMHSSFKWRWYHFDGVDWDQSRRLNNRIYKFRGHGKAWDWEVDTENGNYDYLMYADIDMDHPEVVNELRNWGVWYTNTLGLDGFRIDAVKHIKYSFTRDWINHVRSATGKNMFAVAEFWKNDLGAIENYLQKTNWNHSVFDVPLHYNLYNASKSGGNYDMRNIFNGTVVQRHPSHAVTFVDNHDSQPEEALESFVEEWFKPLAYALTLTREQGYPSVFYGDYYGIPTHGVPAMRSKIDPILEARQKYAYGKQNDYLDHHNIIGWTREGNTAHPNSGLATIMSDGAGGSKWMFVGRNKAGQVWSDITGNRTGTVTINADGWGNFSVNGGSVSIWVNK

SEQ ID NO: 23301 - protein, 485 aa, Bacillus sp. 707
HHNGTNGTMMQYFEWYLPNDGNHWNRLNSDASNLKSKGITAVWIPPAWKGASQNDVGYGAYDLYDLGEFNQKGTVRTKYGTRSQLQAAVTSLKNNGIQVYGDVVMNHKGGADATEMVRAVEVNPNNRNQEVTGEYTIEAWTRFDFPGRGNTHSSFKWRWYHFDGVDWDQSRRLNNRIYKFRGHGKAWDWEVDTENGNYDYLMYADIDMDHPEVVNELRNWGVWYTNTLGLDGFRIDAVKHIKYSFTRDWINHVRSATGKNMFAVAEFWKNDLGAIENYLQKTNWNHSVFDVPLHYNLYNASKSGGNYDMRNIFQGTVVQRHPSHAVTFVDNHDSQPEEALESFVEEWFKPLAYALTLTREQGYPSVFYGDYYGIPTHGVPAMRSKIDPILEARQKYAYGKQNDYLDHHNIIGWTREGNTAHPNSGLATIMSDGAGGSKWMFVGRNKAGQVWSDITGNRTGTVTINADGWGNFSVNGGSVSIWVNK

SEQ ID NO: 23302 - protein, 485 aa, Bacillus sp. 707
HHNGTNGTMMQYFEWYLPNDGNHWNRLNSDASNLKSKGITAVWIPPAWKGASQNDVGYGAYDLYDLGEFNQKGTVRTKYGTRSQLQAAVTSLKNNGIQVYGDVVMNHKGGADATEMVRAVEVNPNNRNQEVTGEYTIEAWTRFDFFGRGNTHSSFKWRWYHFDGVDWDQSRRLNNRIYKFRGHGKAWDWEVDTENGNYDYLMYADIDMDHPEVVNELRNWGVWYTNTLGLDGFRIDAVKHIKYSFTRDWINHVRSATGKNMFAVAEFWKNDLGAIENYLQKTNWNHSVFDVPLHYNLYNASKSGGNYDMRNIFNGTVVQRHPSHAVTFVDNHDSQPEEALESFVEEWFKPLAYALTLTREQGYPSVFYGDYYGIPTHGVPAMRSKIDPILEARQKYAYGKQNDYLDHHNIIGWTREGNTAHPNSGLATIMSDGAGGSKWMFVGRNKAGQVWSDITGNRTGTVTINADGWGNFSVNGGSVSIWVNK

SEQ ID NO: 23303 - protein, 485 aa, Bacillus sp. 707
HHNGTNGTMMQYFEWYLPNDGNHWNRLNSDASNLKSKGITAVWIPPAWKGASQNDVGYGAYDLYDLGEFNQKGTVRTKYGTRSQLQAAVTSLKNNGIQVYGDVVMNHKGGADATEMVRAVEVNPNNRNQEVTGEYTIEAWTRFDFPGRGNTHSSFKWRWYHFDGVDWDQSRRLNNRIYKFRGHGKAWDWEVDTENGNYDYLMYADIDMDHPEVVNELRNWGVWYTNTLGLDGFRIDAVKHIKYSFTRDWINHVRSATGKNMFAVAEFWKNDLGAIENYLQKTNWNHSVFDVPLHYNLYNASKSGGNYDMRNIFNGTVVQRHPSHAVTFVDNHDSQPEEALESFVEEWFKPLAYALTLTREQGYPSVFYGDYYGIPTHGVPAMRSKIDPILEARQKYAYGKQNDYLDHHNIIGWTREGNTAHPNSGLATIMSDGAGGSKWMFVGRNKAGQVWSDITGNRTGTVTINADGWGNFSVNGDSVSIWVNK

SEQ ID NO: 23304 - protein, 485 aa, Bacillus sp. 707
HHNGTNGTMMQYFEWYLPNDGNHWNRLNSDASNLKSKGITAVWIPPAWKGASQNDVGYGAYDLYDLGEFNQKRTVRTKYGTRSQLQAAVTSLKNNGIQVYGDVVMNHKGGADATEMVRAVEVNPNNRNQEVTGEYTIEAWTRFDFPGRGNTHSSFKWRWYHFDGVDWDQSRRLNNRIYKFRGHGKAWDWEVDTENGNYDYLMYADIDMDHPEVVNELRNWGVWYTNTLGLDGFRIDAVKHIKYSFTRDWINHVRSATGKNMFAVAEFWKNDLGAIENYLQKTNWNHSVFDVPLHYNLYNASKSGGNYDMRNIFNGTVVQRHPSHAVTFVDNHDSQPEEALESFVEEWFKPLAYALTLTREQGYPSVFYGDYYGIPTHGVPAMRSKIDPILEARQKYAYGKQNDYLDHHNIIGWTREGNTAHPNSGLATIMSDGAGGSKWMFVGRNKAGQVWSDITGNRTGTVTINADGWGNFSVNGGSVSIWVNK

SEQ ID NO: 23305 - protein, 485 aa, Bacillus sp. 707
HHNGTNGTMMQYFEWYLPNDGNHWNRLNSDASNLKSKGITAVWIPPAWKGASQNDVGYGAYDLYDLGEFNQKGTVRTKYGTRSQLQAAVTSLKNNGIQVYGDVVMNHKGGADATEMVRAVEVNPNNRNQEVTGEYTIEAWTRFIFPGRGNTHSSFKWRWYHFDGVDWDQSRRLNNRIYKFRGHGKAWDWEVDTENGNYDYLMYADIDMDHPEVVNELRNWGVWYTNTLGLDGFRIDAVKHIKYSFTRDWINHVRSATGKNMFAVAEFWKNDLGAIENYLQKTNWNHSVFDVPLHYNLYNASKSGGNYDMRNIFNGTVVQRHPSHAVTFVDNHDSQPEEALESFVEEWFKPLAYALTLTREQGYPSVFYGDYYGIPTHGVPAMRSKIDPILEARQKYAYGKQNDYLDHHNIIGWTREGNTAHPNSGLATIMSDGAGGSKWMFVGRNKAGQVWSDITGNRTGTVTINADGWGNFSVNGGSVSIWVNK

SEQ ID NO: 23306 - protein, 485 aa, Bacillus sp.
HHNGTNGTMMQYFEWYLPNDGNHWNRLNSDASNLKSKGITAVWIPPAWKGASQNDVGYGAYDLYDLGEFNQKGTVRTKYGTRSQLQAAVTSLKNNGIQVYGDVVMNHKGGADATEMVRAVEVNPNNRNQEVTGEYTIEAWTRFDFPGRGNTHSSFKWRWYHFDGVDWDQSRRLNNRIYKFRSHGKEWDWEVDTENGNYDYLMYADIDMDHPEVVNELRNWGVWYTNTLGLDGFRIDAVKHIKYSFTRDWINHVRSATGKNMFAVAEFWKNDLGAIENYLQKTNWNHSVFDVPLHYNLYNASKSGGNYDMRNIFNGTVVQRHPSHAVTFVDNHDSQPEEALESFVEEWFKPLAYALTLTREQGYPSVFYGDYYGIPTHGVPAMRSKIDPILEARQKYAYGKQNDYLDHHNIIGWTREGNTAHPNSGLATIMSDGAGGSKWMFVGRNKAGQVWSDITGNRTGTVTINADGWGNFSVNGGSVSIWVNK

SEQ ID NO: 23307 - protein, 485 aa, Bacillus sp. 707
HHNGTNGTMMQYFEWYLPNDGNHWNRLNSDASNLKSKGITAVWIPPAWKGASQNDVGYGAYDLYDLGEFNQKGTVRTKYGTRSQLQAAVTSLKNNGIQVYGDVVMNHKGGADATEMVRAVEVNPNNRNQEVTGEYTIEAWTRFDFPGRGNTHSSFKWRWYHFDGVDWDQSRRLNNRIYKFTGHGKAWDWEVDTENGNYDYLMYADIDMDHPEVVNELRNWGVWYTNTLGLDGFRIDAVKHIKYSFTRDWINHVRSATGKNMFAVAEFWKNDLGAIENYLQKTNWNHSVFDVPLHYNLYNASKSGGNYDMRNIFNGTVVQRHPSHAVTFVDNHDSQPEEALESFVEEWFKPLAYALTLTREQGYPSVFYGDYYGIPTHGVPAMRSKIDPILEARQKYAYGKQNDYLDHHNIIGWTREGNTAHPNSGLATIMSDGAGGSKWMFVGRNKAGQVWSDITGNRTGTVTINADGWGNFSVNGGSVSIWVNK

SEQ ID NO: 23308 - protein, 485 aa, Bacillus sp. 707
HHNGTNGTMMQYFEWYLPNDGNHWNRLNSDASNLKSKGITAVWIPPAWKGASQNDVGYGAYDLYDLGEFNQKGTVRTKYGTRSQLQAAVTSLKNNGIQVYGDVVMNHKGGADATEMVRAVEVNPNNRNQEVTGEYTIEAWTRFDFPGRGNTHSSFKWRWYHFDGVDWDQSRRLNNRIYKFRGHGKAWDWEVDTENGNYDYLMYADIDMDHPEVVNELRNWGVWYTNTLGLDGFRIDAVKHIKYSFTRDWINHVRSATGKNMFAVAEFWKNDLGAIENYLQKTNWNHSVFDVPLHYNLYNASKSGGNYDMRNIFNGTVVQRHPSHAVTFVDNHDSQPEEALESFVEEWFKPLAYALTLTREQGYPSVFYGDYYGIPTHGVPAMRSKIDPILEARQKYAYGKQNDYLDHHNIIGWTREGNLAHPNSGLATIMSDGAGGSKWMFVGRNKAGQVWSDITGNRTGTVTINADGWGNFSVNGGSVSIWVNK

SEQ ID NO: 23309 - protein, 485 aa, Bacillus sp. 707
HHNGTNGTMMQYFEWYLPNDGNHWMRLNSDASNLKSKGITAVWIPPAWKGASQNDVGYGAYDLYDLGEFNQKGTVRTKYGTRSQLQAAVTSLKNNGIQVYGDVVMNHKGGADATEMVRAVEVNPNNRNQEVTGEYTIEAWTRFDFPGRGNTHSSFKWRWYHFDGVDWDQSRRLNNRIYKFRGHGKAWDWEVDTENGNYDYLMYADIDMDHPEVVNELRNWGVWYTNTLGLDGFRIDAVKHIKYSFTRDWINHVRSATGKNMFAVAEFWKNDLGAIENYLQKTNWNHSVFDVPLHYNLYNASKSGGNYDMRNIFNGTVVQRHPSHAVTFVDNHDSQPEEALESFVEEWFKPLAYALTLTREQGYPSVFYGDYYGIPTHGVPAMRSKIDPILEARQKYAYGKQNDYLDHHNIIGWTREGNTAHPNSGLATIMSDGAGGSKWMFVGRNKAGQVWSDITGNRTGTVTINADGWGNFSVNGGSVSIWVNK

SEQ ID NO: 23310 - protein, 485 aa, Bacillus sp. 707
HHNGTNGTMMQYFEWYLPNDGNHWNRLNSDASNLKSKGITAVWIPPAWKGASQNDVGYGAYDLYDLGEFNQKGTVRTKYGTRSQLQAAVTSLKNNGIQVYGDVVMNHKGGADATEMVRAVEVNPNNRNQEVTGEYTIEAWTRFDFPGRGNTHSSFKWRWYHFDGVDWDQSRRLNNRIYKFRGHGKAWDWEVDTENGNYDYLMYADIDMDHPEVVNELRNWGVWYTNTLGLDGFRIDAVKHIKYSFTRDWINHVRSATGKNMFAVAEFWKNDLGAIENYLQKTNWNHSVFDVPLHYNLYNASKSGGNYDMRNIFNGTVVQRHPSHAVTFVDNHDSQPEEALESFVEEWFKPLAYALTLTREQGYPSVFYGDYYGIPTHGVPAMRSKIDPILEARQKYAYGKQNDYLDHHNIIGWTREGNTAHPNSGLATIMSDGAGGSKWMFVGRNKAGQVWSDITGNRTGCVTINADGWGNFSVNGGSVSIWVNK

SEQ ID NO: 23311 - protein, 485 aa, Bacillus sp. 707
HHNGTNGTMMQYFEWYLPNDGNHWNRLNSDASNLKSKGITAVWIPPAWKGASQNDVGYGAYDLYDLGEFNQKGTVRTKYGTRSQLQAAVTSLKNNGIQVYGDVVMNHKGGADATEMVRAVEVNPNNRNQEVTGEYTIEAWTRFDFPGRGNTHSSFKWRWYHFDGVDWDQSRRLNNRIYKFRGHGKAWDWEVDTENGNYDYLMYADIDMDHPEVVNELRNWGVWYTNTLGLDGFRIDAVKHIKYSFTRDWINHVRSATGKNMFAVAEFWKNDLGAIENYLQKTNWNHSVFDVPLHYNLYNASKSGGNYDMRNIFNGTVVQRHPSHAVTFVDNHDSQPEEALESFVEEWFKPLAYALTLTREQGYPSVFYGDYYGIGTHGVPAMRSKIDPILEARQKYAYGKQNDYLDHHNIIGWTREGNTAHPNSGLATIMSDGAGGSKWMFVGRNKAGQVWSDITGNRTGTVTINADGWGNFSVNGGSVSIWVNK

SEQ ID NO: 23312 - protein, 485 aa, Bacillus sp. 707
HHNGTNGTMMQYFEWYLPNDGNHWNRLNSDASNLKSKGITAVWIPPAWKGASQNDVGYGAYDLYDLGEFNQKGTVRTKYGTRSQLQAAVTSLKNNGIQVYGDVVMNHKGGADATEMVRAVEVNPNNRNQEVTGEYTIEAWTRFDFPGRGNTHSSFKWRWYHFDGVDWDQSRRLNNRIYKFRGHGKAWDWEVDTENGNYDYLMYADIDMDHPEVVNELRNWGVWYTNTLGLDGFRIDAVKHIKYSFTRDWINHVRSATGKNMFAVAEFWKNDLGAIENYLQKTNWNHSVFDVPLHYNLYNASKSGGNYDMRNIFNGTVVQRHPSHAVTFVDNHDSQPEEALESFVEEWFKPLAYALTLTREQGYPSVFYGDYYGIPTHGVPAMRSKIDPILEARQKYAYGKQNDYLDHHNIIGWTREGNTAHPNSGLATIMSDGAGGSKWMFVGRNKAGQVWSDITGNRTGTVTINADGWGNFSVNGTSVSIWVNK

SEQ ID NO: 23313 - protein, 485 aa, Bacillus sp. 707
HHNDTNGTMMQYFEWYLPNDGNHWNRLNSDASNLKSKGITAVWIPPAWKGASQNDVGYGAYDLYDLGEFNQKGTVRTKYGTRSQLQAAVTSLKNNGIQVYGDVVMNHKGGADATEMVRAVEVNPNNRNQEVTGEYTIEAWTRFDFPGRGNTHSSFKWRWYHFDGVDWDQSRRLNNRIYKFRGHGKAWDWEVDTENGNYDYLMYADIDMDHPEVVNELRNWGVWYTNTLGLDGFRIDAVKHIKYSFTRDWINHVRSATGKNMFAVAEFWKNDLGAIENYLQKTNWNHSVFDVPLHYNLYNASKSGGNYDMRNIFNGTVVQRHPSHAVTFVDNHDSQPEEALESFVEEWFKPLAYALTLTREQGYPSVFYGDYYGIPTHGVPAMRSKIDPILEARQKYAYGKQNDYLDHHNIIGWTREGNTAHPNSGLATIMSDGAGGSKWMFVGRNKAGQVWSDITGNRTGTVTINADGWGNFSVNGGSVSIWVNK

SEQ ID NO: 23314 - protein, 485 aa, Bacillus sp. 707
HHNGTNGTMMQYFEWYLPNDGNHWNRLNSDASNLKSKGITAVWIPPAWKGASQNDVGYGAYDLYDLGEFNQKGTVRTKYGTRSQLQAAVTSLKNNGIQVYGDVVMNHKGGADATEMVRAVEVNPNNRNQEVTGEYTIEAWTRFDFPGRGNTHSSFKWRWYHFDGVDWDQSRRLNNRIYKFRGHGKAWDWEVDTENGNYDYLMYADIDMDHPEVVNELRNWGVWYTNTLGLDGFRIDAVKHIKYSFTRDWINHVRSATGKNMFAVAEFWKNDLGAIENYLQKTNWNHSVFDVPLHYNLYNASKSGGNYDMRNIFNGTVVQRHPSHAVTFVDNHDSQPEEALESFVEEWFKPLAYALTLTREQGYPSVFYGDYYGIPTHGVPAMRSKIDPILEARQKYAYGKQNDYLDHHNIIGWTREGNTAHPNSGLATIMSDGAGGSKWMFVGRNKAGQVWSDITGNRTGTVTINADGWGNFSVNGASVSIWVNK

SEQ ID NO: 23315 - protein, 485 aa, Bacillus sp. 707
HHNGTNGTMMQYFEWYLPNDGNHWNRLNSDASNLKSKGITAVWIPPAWKGASQNDVGYGAYDLYDLGEFNQKGTVRTKYGTRSQLQAAVTSLKNNGICVYGDVVMNHKGGADATEMVRAVEVNPNNRNQEVTGEYTIEAWTRFDFPGRGNTHSSFKWRWYHFDGVDWDQSRRLNNRIYKFRGHGKAWDWEVDTENGNYDYLMYADIDMDHPEVVNELRNWGVWYTNTLGLDGFRIDAVKHIKYSFTRDWINHVRSATGKNMFAVAEFWKNDLGAIENYLQKTNWNHSVFDVPLHYNLYNASKSGGNYDMRNIFNGTVVQRHPSHAVTFVDNHDSQPEEALESFVEEWFKPLAYALTLTREQGYPSVFYGDYYGIPTHGVPAMRSKIDPILEARQKYAYGKQNDYLDHHNIIGWTREGNTAHPNSGLATIMSDGAGGSKWMFVGRNKAGQVWSDITGNRTGTVTINADGWGNFSVNGGSVSIWVNK

SEQ ID NO: 23316 - protein, 485 aa, Bacillus sp. 707
HHNGTNGTMMQYFEWYLPNDGNHWNRLNSDASNLKSKGITAVWIPPAWKGASQNDVGYGAYDLYDLGEFNQKGTVRTKYGTRSQLQAAVTSLKNNGIQVYGDVVMNHKGGADATEMVRAVEVNPNNRNQEVTGEYTIEAWTRFDFPGRGNTHSSFKWRWYHFDGVDWDQSRRLNNRIYKFRGHGKAWDWEVDTENGNYDYLMYADIDMDHPEVVNELRNWGVWYTNTLGLDGFRIDAVKHIKYSFTRDWINHVRSATGKNMFAVAEFWKNDLGAIENYLQKTNWNHSVFDVPLHYNLYNASKSGGNYDMRNIFNGTVVQRHPSHAVTFVDNHDSQPEEALESFVEEWFKPLAYALTLTREQGYPSVFYGDYYGIPTHGVPAMRSKIDPILEARQKYAYGKQNDYLDHHNIIGWTREGNTAHANSGLATIMSDGAGGSKWMFVGRNKAGQVWSDITGNRTGTVTINADGWGNFSVNGGSVSIWVNK

SEQ ID NO: 23317 - protein, 485 aa, Bacillus sp. 707
HHNGTNGTMMQYFEWYLPNDGNHWNRLNSDASNLKSKGITAVWIPPAWKGASQNDVGYGAYDLYDLGEFNQKGTVRTKYGTRSQLQAAVTSLKNNGIQVYGDVVMNHKGGADATEMVRAVEVNPNNRNQEVTGEYTIEAWTRFDFPGRGNTHSSFKWRWYHFDGVDWDQSRRLNNRIYKFRGHGKAWDWEVDTENGNYDYLMYADIDMDHPEVVNELRNWGVWYTNTLGLDGFRIDAVKHIKYSFTRDWINHVRSATGKNMFAVAEFWKNDLGAIENYLQKTNWNHSVFDVPLHYNLYNASKSGGNYDMRNIFNGTVVQRHPSHAVTFVDNHDSQPEEALESFVEEWFKPLAYALTLTREQGYPSVFYGDYYGIPTHGVPAMRSKIDPILEARQKYAYGKQNDYLDHKNIIGWTREGNTAHPNSGLATIMSDGAGGSKWMFVGRNKAGQVWSDITGNRTGTVTINADGWGNFSVNGGSVSIWVNK

SEQ ID NO: 23318 - protein, 483 aa, Bacillus sp. SP70
HHNGTNGTMMQYFEWYLPNDGNHWNRLNSDASNLKSKGITAVWIPPAWKGASQNDVGYGAYDLYDLGEFNQKGTVRTKYGTRSQLQAAVTSLKNNGIQVYGDVVMNHKGGADATEMVRAVEVNPNNRNQEVTGEYTIEAWTRFDFPGRGNTHSSFKWRWYHFDGVDWDQSRRLNNRIYKFRGKAWDWEVDTENGNYDYLMYADIDMDHPEVVNELRNWGVWYTNTLGLDGFRIDAVKHIKYSFTRDWINHVRSATGKNMFAVAEFWKNDLGAIENYLQKTNWNHSVFDVPLHYNLYNASKSGGNYDMRNIFNGTVVQRHPSHAVTFVDNHDSQPEEALESFVDEWFKPLAYALTLTREQGYPSVFYGDYYGIPTHGVPAMRSKIDPILEARQKYAYGKQNDYLDHHNIIGWTREGNTAHPNSGLATIMSDGAGGSKWMFVGRNKAGQVWSDITGNRTGTVTINADGWGNFSVNGRSVSIWVNK

SEQ ID NO: 23319 - protein, 485 aa, Bacillus sp. 707
HHNGTNGTMMQYFEWYLPNDGNHWNRLNSDASNLKSKGITAVWIPPAWKGASQNDVGYGAYDLYDLGEFNQKGTVRTKYGTRSQLQAAVTSLKNNGIQVYGDVVMNHKGGADATEMVRAVEVNPNNRNQEVTGEYTIEAWTRFDFPGRGNTHSSFKWRWYHFDGVDWDQSRRLNNRIYKFRGHGKAWDWEVDTENGNYDYLMYADIDMDHPEVVNELRNWGVWYTNTLGLDGFRIDAVKHIKYSFTRDWINHVRSATGKNMFAVAEFWKNDLGAIENYLQKTNWNHSVFDVPLHYNLYNASKSGGNYDMRNIFNGTVVQRHPSHAVTFVDNHDSQPEEALESFVEEWFKPLAYALTLTREQGYPSVFYGDYYGIPTHGVPAMRSKIDPILEARQKYAYGKQNDYLDHHNIIGWTREGNTAHPNSGLATIMSDGAGGSKWMFVGRRKAGQVWSDITGNRTGTVTINADGWGNFSVNGGSVSIWVNK

SEQ ID NO: 23320 - protein, 485 aa, Bacillus sp. 707
HHNGTNGTMMQYFEWYLPNDGNHWNRLNSDASNLKSKGITAVWIPPAWKGASQNDVGYGAYDLYDLGEFNQKGTVRTKYGTRSQLQAAVTSLKNNGIQVYGDVVMNHKGGADATEMVRAVEVNPNNRNQEVTGEYTIEAWTRFDFPGRGNTHSSFKWRWYHFDGVDWDQSRRLNNRIYKFSGHGKAWDWEVDTENGNYDYLMYADIDMDHPEVVNELRNWGVWYTNTLGLDGFRIDAVKHIKYSFTRDWINHVRSATGKNMFAVAEFWKNDLGAIENYLQKTNWNHSVFDVPLHYNLYNASKSGGNYDMRNIFNGTVVQRHPSHAVTFVDNHDSQPEEALESFVEEWFKPLAYALTLTREQGYPSVFYGDYYGIPTHGVPAMRSKIDPILEARQKYAYGKQNDYLDHHNIIGWTREGNTAHPNSGLATIMSDGAGGSKWMFVGRNKAGQVWSDITGNRTGTVTINADGWGNFSVNGGSVSIWVNK

SEQ ID NO: 23321 - protein, 485 aa, Bacillus sp. 707
HHNGTNGTMMQYFEWYLPNDGNHWNRLNSDASNLKSKGITAVWIPPAWKGASQDDVGYGAYDLYDLGEFNQKGTVRTKYGTRSQLQAAVTSLKNNGIQVYGDVVMNHKGGADATEMVRAVEVNPNNRNQEVTGEYTIEAWTRFDFPGRGNTHSSFKWRWYHFDGVDWDQSRRLNNRIYKFRGHGKAWDWEVDTENGNYDYLMYADIDMDHPEVVNELRNWGVWYTNTLGLDGFRIDAVKHIKYSFTRDWINHVRSATGKNMFAVAEFWKNDLGAIENYLQKTNWNHSVFDVPLHYNLYNASKSGGNYDMRNIFNGTVVQRHPSHAVTFVDNHDSQPEEALESFVEEWFKPLAYALTLTREQGYPSVFYGDYYGIPTHGVPAMRSKIDPILEARQKYAYGKQNDYLDHHNIIGWTREGNTAHPNSGLATIMSDGAGGSKWMFVGRNKAGQVWSDITGNRTGTVTINADGWGNFSVNGGSVSIWVNK

SEQ ID NO: 23322 - protein, 483 aa, Bacillus sp.
HHNGTNGTLMQYFEWYLPNDGNHWNRLRSDASNLKDKGISAVWIPPAWKGTSQNDVGYGAYDLYDLGEFNQKGTIRTKYGTRNQLQAAVNALKSNGIQVYGDVVMNHKGGADATEMVKAVEVNPNNRNQEVSGEYTIEAWTKFDFPGRANTHSNFKWRWYHFDGVDWDQSRKLNNRIYKFRTKAWDWEVDTEFGNYDYLMYADIDMDHPEVVNELRNWGVWYTNTLGLDGFRIDAVKHIKYSFTRDWINHVRSAIGKNMFAVAEFWKNDLGAIENYLNKTNWNHSVFDVPLHFNLYYASKSGGNYDMRQIFNGTVVQKHPTHAVTFVDNHDSQPEESLESFVREWFKPLAYALTLTREQGYPSVFYGDYYGIPTHGVPAMKSKIDPILEARQKYAYGRQNDYLDHHNIIGWTREGNTAHPNSGLATIMSDGAGGNKWMFVGRNKAGQVWTDITGNKAGTVTINADGWGNFSVNGGSVSIWVNK

SEQ ID NO: 23323 - protein, 485 aa, Bacillus sp. 707
HHNGTEGTMMQYFEWYLPNDGNHWNRLNSDASNLKSKGITAVWIPPAWKGASQNDVGYGAYDLYDLGEFNQKGTVRTKYGTRSQLQAAVTSLKNNGIQVYGDVVMNHKGGADATEMVRAVEVNPNNRNQEVTGEYTIEAWTRFDFPGRGNTHSSFKWRWYHFDGVDWDQSRRLNNRIYKFRGHGKAWDWEVDTENGNYDYLMYADIDMDHPEVVNELRNWGVWYTNTLGLDGFRIDAVKHIKYSFTRDWINHVRSATGKNMFAVAEFWKNDLGAIENYLQKTNWNHSVFDVPLHYNLYNASKSGGNYDMRNIFNGTVVQRHPSHAVTFVDNHDSQPEEALESFVEEWFKPLAYALTLTREQGYPSVFYGDYYGIPTHGVPAMRSKIDPILEARQKYAYGKQNDYLDHHNIIGWTREGNTAHPNSGLATIMSDGAGGSKWMFVGRNKAGQVWSDITGNRTGTVTINADGWGNFSVNGGSVSIWVNK

SEQ ID NO: 23324 - protein, 485 aa, Bacillus sp. 707
HHNGTNGTMMQYFEWYLPNDGNHWNRLNSDASNLKSKGITAVWIPPAWKGASQNDVGYGAYDLYDLGEFNQKGTVRTKYGTRSQLQAAVTSLKNNGIQVYGDVVMNHKGGADATEMVRAVEVNPNNRNQEVTGEYTIEAWTRFDFPGRGNTHSSFKWRWYHFDGVDWDQSRRLNNRIYKFRGHGKAWDWEVDTENGNYDYLMYADIDMDHPEVVNELRNWGVWYTNTLGLDGFRIDAVKHIKYSFTRDWINHVRSATGKNMFAVAEFWKNDLGAIENYLQKTNWNHSVFDVPLHYNLYNASKSGGNYDMRNIFNGTVVQRHPSHAVTFVDNHDSQPEEALESFVEEWFKPLAYALTLTREQGYPSVFYGDYYGIPTHGVPAMRSKIDPILEARQKYAYGKQNDYLDHHNIIGWTREGTTAHPNSGLATIMSDGAGGSKWMFVGRNKAGQVWSDITGNRTGTVTINADGWGNFSVNGGSVSIWVNK

SEQ ID NO: 23325 - protein, 485 aa, Bacillus sp. 707
HHNGTNGTMMQYFEWYLPNDGNHWNRLNSDARNLKSKGITAVWIPPAWKGASQNDVGYGAYDLYDLGEFNQKGTVRTKYGTRSQLQAAVTSLKNNGIQVYGDVVMNHKGGADATEMVRAVEVNPNNRNQEVTGEYTIEAWTRFDFPGRGNTHSSFKWRWYHFDGVDWDQSRRLNNRIYKFRGHGKAWDWEVDTENGNYDYLMYADIDMDHPEVVNELRNWGVWYTNTLGLDGFRIDAVKHIKYSFTRDWINHVRSATGKNMFAVAEFWKNDLGAIENYLQKTNWNHSVFDVPLHYNLYNASKSGGNYDMRNIFNGTVVQRHPSHAVTFVDNHDSQPEEALESFVEEWFKPLAYALTLTREQGYPSVFYGDYYGIPTHGVPAMRSKIDPILEARQKYAYGKQNDYLDHHNIIGWTREGNTAHPNSGLATIMSDGAGGSKWMFVGRNKAGQVWSDITGNRTGTVTINADGWGNFSVNGGSVSIWVNK

SEQ ID NO: 23326 - protein, 485 aa, Bacillus sp. 707
HHNGTNGTMMQYFEWYLPNDGNHWNRLNSDASNLKSKGITAVWIPPAWKGASQNDVGYGAYDLYDLGEFNQKGTVRTKYGTRSQLQAAVTSLKNNGIQVYGDVVMNHKGGADATEMVRAVEVNPFNRNQEVTGEYTIEAWTRFDFPGRGNTHSSFKWRWYHFDGVDWDQSRRLNNRIYKFRGHGKAWDWEVDTENGNYDYLMYADIDMDHPEVVNELRNWGVWYTNTLGLDGFRIDAVKHIKYSFTRDWINHVRSATGKNMFAVAEFWKNDLGAIENYLQKTNWNHSVFDVPLHYNLYNASKSGGNYDMRNIFNGTVVQRHPSHAVTFVDNHDSQPEEALESFVEEWFKPLAYALTLTREQGYPSVFYGDYYGIPTHGVPAMRSKIDPILEARQKYAYGKQNDYLDHHNIIGWTREGNTAHPNSGLATIMSDGAGGSKWMFVGRNKAGQVWSDITGNRTGTVTINADGWGNFSVNGGSVSIWVNK

SEQ ID NO: 23327 - protein, 485 aa, Bacillus sp. 707
HHNGTNGTMMQYFEWYLPNDGNHWNRLNSDASNLKSKGITAVWIPPAWKGASQNDVGYGAYDLYDLGEFNQKGTVRTKYGTRSQLQAAVTSLKNNGIQVYGDVVMNHKGGADATEMVRAVEVNPNNRNQEVTGEYTIEAWTRFDFPGRGNTHSSFKWRWYHFDGVDWDQSRRLNNRIYKFRGHGKAWDWEVDTENGNYDYLMYADIDMDHPEVVNELRNWGVWYTNTLGLDGFRIDAVKHIKYSFTRDWINHVRSATGKNMFAVAEFWKNDLGAIENYLQKTNWNHSVFDVPLHYNLYNASKSGGNYDMRNIFNGTVVQRHPSHAVTFVDNHDSQPEEALESFVEEWFKPLAYALTLTREQGYPSVFYGDYYGIPTHGVPAMRSKIDPILEAREKYAYGKQNDYLDHHNIIGWTREGNTAHPNSGLATIMSDGAGGSKWMFVGRNKAGQVWSDITGNRTGTVTINADGWGNFSVNGGSVSIWVNK

SEQ ID NO: 23328 - protein, 485 aa, Bacillus sp. 707
HHNMTNGTMMQYFEWYLPNDGNHWNRLNSDASNLKSKGITAVWIPPAWKGASQNDVGYGAYDLYDLGEFNQKGTVRTKYGTRSQLQAAVTSLKNNGIQVYGDVVMNHKGGADATEMVRAVEVNPNNRNQEVTGEYTIEAWTRFDFPGRGNTHSSFKWRWYHFDGVDWDQSRRLNNRIYKFRGHGKAWDWEVDTENGNYDYLMYADIDMDHPEVVNELRNWGVWYTNTLGLDGFRIDAVKHIKYSFTRDWINHVRSATGKNMFAVAEFWKNDLGAIENYLQKTNWNHSVFDVPLHYNLYNASKSGGNYDMRNIFNGTVVQRHPSHAVTFVDNHDSQPEEALESFVEEWFKPLAYALTLTREQGYPSVFYGDYYGIPTHGVPAMRSKIDPILEARQKYAYGKQNDYLDHHNIIGWTREGNTAHPNSGLATIMSDGAGGSKWMFVGRNKAGQVWSDITGNRTGTVTINADGWGNFSVNGGSVSIWVNK

SEQ ID NO: 23329 - protein, 485 aa, Bacillus sp.
HHNGTNGTMMQYFEWYLPNDGNHWNRLNSDASNLKSKGITAVWIPPAWKGASQNDVGYGAYDIYDLGEFNQKGTVRTKYGTRSQLQAAVTSLKNNGIQVYGDVVMNHKGGADATEMVRAVEVNPNNRNQEVTGEYTIEAWTRFDFPGRGNTHSSFKWRWYHFDGVDWDQSRRLNNRIYKFRGHGKAWDWEVDTENGNYDYLMYADYDMDHPEVVNELRNWGVWYTNTLGLDGFRIDAVKHIKYSFTRDWINHVRSATGKNMFAVAEFWKNDLGAIENYLQKTNWNHSVFDVPLHYNLYNASKSGGNYDMRNIFNGTVVQRHPSHAVTFVDNHDSQPEEALESFVEEWFKPLAYALTLTREQGYPSVFYGDYYGIPTHGVPAMRSKIDPILEARQKYAYGKQNDYLDHHNIIGWTREGNTAHPNSGLATIMSDGAGGSKWMFVGRNKAGQVWSDITGNRTGTVTINADGWGNFSVNGGSVSIWVNK

SEQ ID NO: 23330 - protein, 485 aa, Bacillus sp. 707
HHNGTNGTMMQYFEWYLPNDGNHWNRLNSDASNLKSKGITAVWIPPAWKGASQNDVGYGAYDLYDLGEFNQKGTVRTKYGTRSQLQAAVTSLKNNGIQVYGDVVMNHKGGADATEMVRAVEVNPNNRNQEVTGEYTIEAWTRFDFPGRGNTHSSFKWRWYHFDGVDWDQSRRLNNRIYKFRGHGKAWDWEVDTENGNYDYLMYADIDMDHPEVVNELRNWGVWYTNTLGLDGFRIDAVKHIKYSFTRDWINHVRSATGKNMFAVAEFWKNDLGAIENYLQKTNWNHSVFDVPLHYNLYNASKSGGNYDMRNIFNGTVVQRHPSHAVTFVDNHDSQPEEALESFVEEWFKPLAYALTLTREQGYPSVFYGDYYGIPTHGVPAMRSKIDPILEARQKYAYGKQNDYLDHHNIIGWTREGNTAHPNSGLATIMSDGAGGSKWMFVGRNKAGQVWSDITGNRTGPVTINADGWGNFSVNGGSVSIWVNK

SEQ ID NO: 23331 - protein, 485 aa, Bacillus sp. 707
HHNGTNGTMMQYFEWYLPNDGNHWNRLNSDASNLKSKGITAVWIPPAWKGASQNDVGYGAYDLYDLGEFNQKGTVRTKYGTRSQLQAAVTSLKNNGIQVYGDVVMNHKGGADATEMVRAVEVNPNNRNQEVTGEYTIEAWTRFDFPGRGNHHSSFKWRWYHFDGVDWDQSRRLNNRIYKFRGHGKAWDWEVDTENGNYDYLMYADIDMDHPEVVNELRNWGVWYTNTLGLDGFRIDAVKHIKYSFTRDWINHVRSATGKNMFAVAEFWKNDLGAIENYLQKTNWNHSVFDVPLHYNLYNASKSGGNYDMRNIFNGTVVQRHPSHAVTFVDNHDSQPEEALESFVEEWFKPLAYALTLTREQGYPSVFYGDYYGIPTHGVPAMRSKIDPILEARQKYAYGKQNDYLDHHNIIGWTREGNTAHPNSGLATIMSDGAGGSKWMFVGRNKAGQVWSDITGNRTGTVTINADGWGNFSVNGGSVSIWVNK

SEQ ID NO: 23332 - protein, 485 aa, Bacillus sp. 707
HHNGTNGTMMQYFEWYLPNDGNHWNRLNSDASNLKSKGITAVWIPPAWKGASQNDVGYGAYDLYDLGEFNQKGTVRTKYGTRSQLQAAVTSLKNNGIQVYGDVVMNHKGGADATEMVRAVEVNPNNRNQEVTGEYTIEAWTRFDFPGRKNTHSSFKWRWYHFDGVDWDQSRRLNNRIYKFRGHGKAWDWEVDTENGNYDYLMYADIDMDHPEVVNELRNWGVWYTNTLGLDGFRIDAVKHIKYSFTRDWINHVRSATGKNMFAVAEFWKNDLGAIENYLQKTNWNHSVFDVPLHYNLYNASKSGGNYDMRNIFNGTVVQRHPSHAVTFVDNHDSQPEEALESFVEEWFKPLAYALTLTREQGYPSVFYGDYYGIPTHGVPAMRSKIDPILEARQKYAYGKQNDYLDHHNIIGWTREGNTAHPNSGLATIMSDGAGGSKWMFVGRNKAGQVWSDITGNRTGTVTINADGWGNFSVNGGSVSIWVNK

SEQ ID NO: 23333 - protein, 483 aa, Bacillus sp.
HHNGTNGTLMQYFEWYLPNDGNHWNRLRSDASNLKDKGISAVWIPPAWKGTSQNDVGYGAYDLYDLGEFNQKGTIRTKYGTRNQLQAAVNALKSNGIQVYGDVVMNHKGGADATEMVKAVEVNPNNRNQEVSGEYTIEAWTKFDFPGRANTHSNFKWRWYHFDGVDWDQSRKLQNRIYKFRTKAWDWEVDTEFGNYDYLMYADIDMDHPEVVNELRNWGVWYTNTLGLDGFRIDAVKHIKYSFTRDWINHVRSAIGKNMFAVAEFWKNDLGAIENYLNKTNWNHSVFDVPLHFNLYYASKSGGNYDMRRIFNGTVVQKHPTHAVTFVDNHDTQPEESLESFVREWFKPLAYALTLTREQGYPSVFYGDYYGIPTHGVPAMKSKIDPILEARQKYAYGRQNDYLDHHNIIGWTREGNTAHPNSGLATIMSDGAGGNKWMFVGRNKAGQVWTDITGNKAGTVTINADGWGNFSVNGGSVSIWVNK

SEQ ID NO: 23334 - protein, 485 aa, Bacillus sp. 707
HHNGTNGTMMQYFEWYLPNDGNHWNRLNSDASNLKSKGITAVWIPPAWKGASQNDVGYGAYDLYDLGEFNQKGTVRTKYGTRSQLQAAVTSLKNNGIQVYGDVVMNHKGGADATEMVRAVEVNPNNRNQEVTGEYTIEAWTRFDFPGRGNTHSSFKWRWYHFDGVDWDQSRRLNNRIYKFRGHGKAWDWEVDTENGNYDYLMYADIDMDHPEVVNELRNWGVWYTNTLGLDGFRIDAVKHIKYSFTRDWINHVRSATGKNMFAVAEFWKNDLGAIENYLQKTNWNHSVFDVPLHYNLYNASKSGGNYDMRNIFNGTVVQRHPSHAVTFVDNHDSQPEEALESFVEEWFKPLAYALTLTRECGYPSVFYGDYYGIPTHGVPAMRSKIDPILEARQKYAYGKQNDYLDHHNIIGWTREGNTAHPNSGLATIMSDGAGGSKWMFVGRNKAGQVWSDITGNRTGTVTINADGWGNFSVNGGSVSIWVNK

SEQ ID NO: 23335 - protein, 485 aa, Bacillus sp. 707
HHNGTNGTMMQYFEWYLPNDGNHWNRLNSDASNLKSKGITAVWIPPAWKGASQNDVGYGAYDLYDLGEFNQKGTVRTKYGTRSQLQAAVTSLKNNGIQVYGDVVMNHKGGADATEMVRAVEVNPNNRNQEVTGEYTIEAWTRFDFPGRGNTHSSFKWRWYHFDGVDWDQSRRLNNRIYKFRGHGKAWDWEVDTENGNYDYLMYADIDMDHPEVVNELRNWGVWYTNTLGLDGFRIDAVKHIKYSFTRDWINHVRSATGKNMFAVAEFWKNDLGAIENYLQKTNWNHSVFDVPLHYNLYNASKSGGNYDMRNIFNGTVVQRHPSHAVTFVDNHDSQPEEALESFVEEWFKPLAYALTLTREQGYPSVFYGDYYGIPTHGVPAMRSKIDPILEARQKYAYGKQNDYLDHHNIIGWTREGNTAHPNSGLATIMSDGAGGSKWMFVGRNKAGQVWSDVTGNRTGTVTINADGWGNFSVNGGSVSIWVNK

SEQ ID NO: 23336 - protein, 485 aa, Bacillus sp. 707
HHNGTNGTMMQYFEWYLPNDGNHWNRLNSDASNLKSKGITAVWIPPAWKGASQNDVGYGAYDLYDLGEFNQKGTVRTKYGTRSQLQAAVTSLKNNGIQVYGDVVMNHKGGADATEMVRAVEVNPNNRNQEVTGEYTIEAWTRFDFPGRGNTHSSFKWRWYHFDGVDWDQSRRLNNRIYKFRGHGKAWDWEVDTENGNYDYLMYADIDMDHPEVVKELRNWGVWYTNTLGLDGFRIDAVKHIKYSFTRDWINHVRSATGKNMFAVAEFWKNDLGAIENYLQKTNWNHSVFDVPLHYNLYNASKSGGNYDMRNIFNGTVVQRHPSHAVTFVDNHDSQPEEALESFVEEWFKPLAYALTLTREQGYPSVFYGDYYGIPTHGVPAMRSKIDPILEARQKYAYGKQNDYLDHHNIIGWTREGNTAHPNSGLATIMSDGAGGSKWMFVGRNKAGQVWSDITGNRTGTVTINADGWGNFSVNGGSVSIWVNK

SEQ ID NO: 23337 - protein, 485 aa, Bacillus sp. 707
HHNGTNGTMMQYFEWYLPNDGNHWNRLNSDASNLKSKGITAVWIPPAWKGASQNDVGYGAYDLYDLGEFNQKGTVRTKYGTRSQLQAAVTSLKNNGIQVYGDVVMNHKGGADATEMVRAVEVNPNNRNQEVTGEYTIEAWTRFDFPGRGNTHSSFKWRWYHFDGVDWDQSRRLNNRIYKFRGHGKAWDWEVDTENGNYDYLMYADIDMDHPEVVNELRNWGVWYTNTLGLDGFRIDAVKHIKYSFTRDWINHVRSATGKNMFAVAEFWKNDLGAIENYLQKTNWNHSVFDVPLHYNLYNASKSGGNYDMRNIFNGTVVQRHPSHAVTFVDNHDSQPEEALESFVEEWFKPLAYALTLTREQGYPSVFYGDYYGIPTHGVPAMRSKIDPILNARQKYAYGKQNDYLDHHNIIGWTREGNTAHPNSGLATIMSDGAGGSKWMFVGRNKAGQVWSDITGNRTGTVTINADGWGNFSVNGGSVSIWVNK

SEQ ID NO: 23338 - protein, 485 aa, Bacillus sp. 707
HHNGTNGTMMQYFEWYLPNDGNHWNRLNSDASNLKSKGITAVWIPPAWKGASQNDVGYGAYDLYDLGEFNQKGTVRTKYGTRSQLQAAVTSLKNNGIQVYGDVVMNHKGGADATEMVRAVEVNPNNRNQEVTGEYTIEAWTRFDFPGRGNTHSSFKWRWYHFDGVDWDQSRRLNNRIYKFRGHGKAWDWEVDTENGNYDYLMYADIDMDHPEVVNELRNWGVWYTNTLGLDGFRIDAVKHIKYSFTRDWINHVRSATGKNMFAVAEFWKNDLGAIENYLQKTNWNHSVFDVPLHYNLYNASKSGGNYDMRNIFNGTVVQRHPSHAVTFVDNHDSQPEEALESFVEEWFKPLAYALTLTREQGYPSVFYGDYYGIPTHGVPAMRSKIDGILEARQKYAYGKQNDYLDHHNIIGWTREGNTAHPNSGLATIMSDGAGGSKWMFVGRNKAGQVWSDITGNRTGTVTINADGWGNFSVNGGSVSIWVNK

SEQ ID NO: 23339 - protein, 485 aa, Bacillus sp. 707
HHNGSNGTMMQYFEWYLPNDGNHWNRLNSDASNLKSKGITAVWIPPAWKGASQNDVGYGAYDLYDLGEFNQKGTVRTKYGTRSQLQAAVTSLKNNGIQVYGDVVMNHKGGADATEMVRAVEVNPNNRNQEVTGEYTIEAWTRFDFPGRGNTHSSFKWRWYHFDGVDWDQSRRLNNRIYKFRGHGKAWDWEVDTENGNYDYLMYADIDMDHPEVVNELRNWGVWYTNTLGLDGFRIDAVKHIKYSFTRDWINHVRSATGKNMFAVAEFWKNDLGAIENYLQKTNWNHSVFDVPLHYNLYNASKSGGNYDMRNIFNGTVVQRHPSHAVTFVDNHDSQPEEALESFVEEWFKPLAYALTLTREQGYPSVFYGDYYGIPTHGVPAMRSKIDPILEARQKYAYGKQNDYLDHHNIIGWTREGNTAHPNSGLATIMSDGAGGSKWMFVGRNKAGQVWSDITGNRTGTVTINADGWGNFSVNGGSVSIWVNK

SEQ ID NO: 23340 - protein, 485 aa, Bacillus sp.
HHNGTNGTMMQYFEWYLPNDGNHWNRLRSDASNLKDKGISAVWIPPAWKGASQNDVGYGAYDLYDLGEFNQKGTIRTKYGTRNQLQAAVNALKSNGIQVYGDVVMNHKGGADATEMVRAVEVNPNNRNQEVSGEYTIEAWTKFDFPGRGNTHSNFKWRWYHFDGVDWDQSRKLNNRIYKFRGDGKGWDWEVDTENGNYDYLLYADIDMDHPEVVNELRNWGVWYTNTLGLDGFRIDAVKHIKYSFTRDWINHVRSATGKNMFAVAEFWKNDLGAIENYLNKTNWNHSVFDVPLHYNLYNASKSGGNYDLRQIFNGTVVQRHPTHAVTFVDNHDSQPEEALESFVEEWFKPLAYALTLTREQGYPSVFYGDYYGIPTHGVPAMKSKIDPILEARQKYAYGRQNDYLDHHNIIGWTREGNTAHPNSGLATIMSDGAGGNKWMFVGRNKAGQVWTDITGNRAGTVTINADGWGNFSVNGGSVSIWVNK

SEQ ID NO: 23341 - protein, 485 aa, Bacillus sp. 707
HHNGTNGTMMQYFEWYLPNDGNHWNRLNSDASNLKSKGITAVWIPPAWKGASQNDVGYGAYDLYDLGEFNQKGTVRTKYGTRSQLQAAVTSLKNNGIQVYGDVVMNHKGGADATEMVRAVEVNPNNRNQEVTGEYTIEAWTRFDFPGRGNTHSSFKWRWYHFDGVDWDQSRRLNNRIYKFRGHGKAWDWEVDTENGNYDYLMYADIDMDHPEVVNELRNWGVWYTNTLGLDGFRIDAVKHIKYSFTRDWINHVRSATGKNMFAVAEFWKNDLGAIENYLQKTNWNHSVFDVPLHYNLYNASKSGGNYDMRNIFNGTVVQRHPSHAVTFVDNHDSQPEEALESFVEEWFKPLAYALTLTREQGYPSVFYGDYYGIPTHGVPAMRSKIDCILEARQKYAYGKQNDYLDHHNIIGWTREGNTAHPNSGLATIMSDGAGGSKWMFVGRNKAGQVWSDITGNRTGTVTINADGWGNFSVNGGSVSIWVNK

SEQ ID NO: 23342 - protein, 485 aa, Bacillus sp. 707
HHNGTNGTMMQYFEWYLPNDGNHWNRLNSDASNLKSKGITAVWIPPAWKGASQNDVGYGAYDLYDLGEFNQKGTVRTKYGTRSQLQAAVTSLKNNGIQVYGDVVMNHKGGADATEMVRAVEVNPNNRNQEVTGEYTIEAWTRFDFPGRGNTHSSFKWRWYHFDGVDWDQSRRLNNRIYKFRGHGKAWDWEVDTENGNYDYLMYADIDMDHPEVVNELRNWGVWYTNTLGLDGFRIDAVKHIKYSFTRDWINHVRSATGKNMFAVAEFWKNDLGAIENYLQKTNWNHSVFDVPLHYNLYNASKSGGNYDMRNIFNGTVVQRHPSHAVTFVDNHDSQPEEALESFVEEWFKPLAYALTLTREQGYPSVFYGDYYGIPTHGVPAMRSKIDPILEARQKYAYGKQNDYLDHHNIIGWTREGNTAHPNEGLATIMSDGAGGSKWMFVGRNKAGQVWSDITGNRTGTVTINADGWGNFSVNGGSVSIWVNK

SEQ ID NO: 23343 - protein, 485 aa, Bacillus sp. 707
HHNGTNGTMMQYFEWYLPNDGNHWNRLNSDASNLKSKGITMVWIPPAWKGASQNDVGYGAYDLYDLGEFNQKGTVRTKYGTRSQLQAAVTSLKNNGIQVYGDVVMNHKGGADATEMVRAVEVNPNNRNQEVTGEYTIEAWTRFDFPGRGNTHSSFKWRWYHFDGVDWDQSRRLNNRIYKFRGHGKAWDWEVDTENGNYDYLMYADIDMDHPEVVNELRNWGVWYTNTLGLDGFRIDAVKHIKYSFTRDWINHVRSATGKNMFAVAEFWKNDLGAIENYLQKTNWNHSVFDVPLHYNLYNASKSGGNYDMRNIFNGTVVQRHPSHAVTFVDNHDSQPEEALESFVEEWFKPLAYALTLTREQGYPSVFYGDYYGIPTHGVPAMRSKIDPILEARQKYAYGKQNDYLDHHNIIGWTREGNTAHPNSGLATIMSDGAGGSKWMFVGRNKAGQVWSDITGNRTGTVTINADGWGNFSVNGGSVSIWVNK

SEQ ID NO: 23344 - protein, 485 aa, Bacillus sp. 707
HHNGTNGTMMQYFEWYLPNDGNHWNRLNSDASNLKSKGITAVWIPPAWKGASQNDVGYGAYDLYDLGEFNQKGTVRTKYGTRSQLQAAVTSLKNNGIQVYGDVVMNHKGGADATEMVRAVEVNPNNRNQEVTGEYTIEAWTRFDFPGRGNTHSSFKWRWYHFDGVDWDQSRRLNNRIYKFRGHGKAWDWEVDTENGNYDYLMYADIDMDHPEVVNELRNWGVWYTNTLGLDGFRIDAVKHIKYSFTRDWINHVRSATGKNQFAVAEFWKNDLGAIENYLQKTNWNHSVFDVPLHYNLYNASKSGGNYDMRNIFNGTVVQRHPSHAVTFVDNHDSQPEEALESFVEEWFKPLAYALTLTREQGYPSVFYGDYYGIPTHGVPAMRSKIDPILEARQKYAYGKQNDYLDHHNIIGWTREGNTAHPNSGLATIMSDGAGGSKWMFVGRNKAGQVWSDITGNRTGTVTINADGWGNFSVNGGSVSIWVNK

SEQ ID NO: 23345 - protein, 485 aa, Bacillus sp. 707
HHNGTNGTMMQYFEWYLPNDGNHWNRLNSDASNLKSKGITAVWIPPAWKGASQNDVGYGAYDLYDLGEFNQKGTVRTKYGTRSQLQAAVTSLKNNGIQVYGDVVMNHKGGADATEMVRAVEVNPNNRNQEVTGEYTIEAWTRFDFPGRGNTHSSFKWRWYHFDGVDWDQSRRLNNRIYKFRGHGKAWDWEVDTENGNYDYLMYADIDMDHPEVVNELRNWGVWYTNTLGLDGFRIDAVKHIKYSFTRDWINHVRSATGKNMFAVAEFWKNDLGAIENYLQKTNWNHSVFDVPLHYNLYNASKSGGNYDMRNIFNGTVVQRHPSHAVTFVDNHDSQPEEALESFVEEWFKPLAYALTLTREQGYPSVFYGDYYGIPTHGVPAMRSKIDPILEARQKYAYGKQNDYLDHHNIIGWTREGKTAHPNSGLATIMSDGAGGSKWMFVGRNKAGQVWSDITGNRTGTVTINADGWGNFSVNGGSVSIWVNK

SEQ ID NO: 23346 - protein, 485 aa, Bacillus sp. 707
HHNGTNGTMMQYFEWYLPNDGNHWNRLNSDASCLKSKGITAVWIPPAWKGASQNDVGYGAYDLYDLGEFNQKGTVRTKYGTRSQLQAAVTSLKNNGIQVYGDVVMNHKGGADATEMVRAVEVNPNNRNQEVTGEYTIEAWTRFDFPGRGNTHSSFKWRWYHFDGVDWDQSRRLNNRIYKFRGHGKAWDWEVDTENGNYDYLMYADIDMDHPEVVNELRNWGVWYTNTLGLDGFRIDAVKHIKYSFTRDWINHVRSATGKNMFAVAEFWKNDLGAIENYLQKTNWNHSVFDVPLHYNLYNASKSGGNYDMRNIFNGTVVQRHPSHAVTFVDNHDSQPEEALESFVEEWFKPLAYALTLTREQGYPSVFYGDYYGIPTHGVPAMRSKIDPILEARQKYAYGKQNDYLDHHNIIGWTREGNTAHPNSGLATIMSDGAGGSKWMFVGRNKAGQVWSDITGNRTGTVTINADGWGNFSVNGGSVSIWVNK

SEQ ID NO: 23347 - protein, 485 aa, Bacillus sp. 707
HHNGTNGTMMQYFEWYLPNDGNHWNRLNSDASNLKSKGITAVWIPPAWKGASQNDVGYGAYDLYDLGEFNQKGTVRTKYGTRSQLQAAVTSLKNNGIQVYGDVVMNHKGGADATEMVRAVEVNPNNRNQEVTGEYTIEAWTRFDFPGRGNTHSSFKWRWYHFDGVDWDQSRRLNNRIYKFRGHGKAWDWEVDTENGNYDYLMYADIDMDHPEVVNELRNWGVWYTNTLGLDGFRIDAVKHIKYSFTRDWINHVRSATGKNMFAVAEFWKNDLGAIENYLQKTNWNHSVFDVPLHYNLYNASKSGGNYDMRNIFNGTVVQRHPSHACTFVDNHDSQPEEALESFVEEWFKPLAYALTLTREQGYPSVFYGDYYGIPTHGVPAMRSKIDPILEARQKYAYGKQNDYLDHHNIIGWTREGNTAHPNSGLATIMSDGAGGSKWMFVGRNKAGQVWSDITGNRTGTVTINADGWGNFSVNGGSVSIWVNK

SEQ ID NO: 23348 - protein, 485 aa, Bacillus sp. 707
HHNGTNGTMMQYFEWYLPNDGNHWNRLNSDASNLKSKGITAVWIPPAWKGASQNDVGYGAYDLYDLGEFNQKGTVRTKYGTRSQLQAAVTSLKNNGIQVYGDVVMNHKGGADATEMVRAVEVNPNNRNQEVTGEYTIEAWTRFDFPGRGNTHSSFKWRWYHFDGVDWDQSRRLNNRIYKFRGHGKAWDWEVDTENGNYDYLMYADIDMDHPEVVNELRNWGVWYTNTLGLDGFRIDAVKHIKYSFTRDWINHVRSATGKNMFAVAEFWKNDLGAIENYLQKTNWNHSVFDVPLHYNLYNASKSGGNYDMRNIFNGTVVQRHPSHAVTFVDNHDSQPEEALESFVEEWFKPLAYALTLTREQGYPSVFYGDYYGIPTHGVPAMRSKIDPILEARQKYAYGKQNDYLDHHNIIGWTREGNTAHPSSGLATIMSDGAGGSKWMFVGRNKAGQVWSDITGNRTGTVTINADGWGNFSVNGGSVSIWVNK

SEQ ID NO: 23349 - protein, 485 aa, Bacillus sp. 707
HHNGTNGTMMQYFEWYLPNDGNHWNRLNSDASNLKSKGITAVWIPPAWKGASQNDVGYGAYDLYDLGEFDQKGTVRTKYGTRSQLQAAVTSLKNNGIQVYGDVVMNHKGGADATEMVRAVEVNPNNRNQEVTGEYTIEAWTRFDFPGRGNTHSSFKWRWYHFDGVDWDQSRRLNNRIYKFRGHGKAWDWEVDTENGNYDYLMYADIDMDHPEVVNELRNWGVWYTNTLGLDGFRIDAVKHIKYSFTRDWINHVRSATGKNMFAVAEFWKNDLGAIENYLQKTNWNHSVFDVPLHYNLYNASKSGGNYDMRNIFNGTVVQRHPSHAVTFVDNHDSQPEEALESFVEEWFKPLAYALTLTREQGYPSVFYGDYYGIPTHGVPAMRSKIDPILEARQKYAYGKQNDYLDHHNIIGWTREGNTAHPNSGLATIMSDGAGGSKWMFVGRNKAGQVWSDITGNRTGTVTINADGWGNFSVNGGSVSIWVNK

SEQ ID NO: 23350 - protein, 485 aa, Bacillus sp. 707
HHNGTNGTMMQYFEWYLPNDGNHWNRLNSDASNLKSKGITAVWIPPAWKGASQNDVGYGAYDLYDLGEFNQKGTVRTKYGTRSQLQAAVTSLKNNGIQVYGDVVMNHKGGADATEMVRAVEVNPNNRNQEVTGEYTIEAWTRFDFPGRGNTHSSFKWRWYHFDGVDWDQSRRLNNRIYKFRGHGKAWDWEVDTENGNYDYLMYADIDMDHPEVVNELRNWGVWYTNTLGLDGFRIDAVKHIKYSFTRDWINHVRSATGKNMFAVAEFWKNDLGAIENYLQKTNWNHSVFDVPLHYNLYNASKSGGNYDMRNIFNGTVVQRHPSHAVTFVDNHDSQPEEALESFVEEWFKPLAYALTLTREQGYPSVFYGDYYGIPTHGVPAMRSKIDPILEARQKYAYGKQNDYLDHPNIIGWTREGNTAHPNSGLATIMSDGAGGSKWMFVGRNKAGQVWSDITGNRTGTVTINADGWGNFSVNGGSVSIWVNK

SEQ ID NO: 23351 - protein, 485 aa, Bacillus sp. 707
HHNGTNGTMMQYFEWYLPNDGNHWNRLNSDASNLKSKGITAVWIPPAWKGASQNDVGYGAYDLYDLGEFNQKGTVRTKYGTRSQLQAAVTSLKNNGIQVYGDVVMNHKGGADATEMVRAVEVNPNNRNQEVTGEYTIEAWTRFDFPGRGNTHSSFKWRWYHFDGVDWDQSRRLNNRIYKFRGHGKAWDWEVDTENGNYDYLMYADIDMDHPEVVNELRNWGVWYTNTLGLDGFRIDAVKHIKYSFTRDWINHVRSATGKNMFAVAEFWKNDLGAIENYLQKTNWNHSVFDVPLHYNLYNASKSGGNYDMRNIFNGTVVQRHPSHAVTFVDNHDSQPEEALESFVEVWFKPLAYALTLTREQGYPSVFYGDYYGIPTHGVPAMRSKIDPILEARQKYAYGKQNDYLDHHNIIGWTREGNTAHPNSGLATIMSDGAGGSKWMFVGRNKAGQVWSDITGNRTGTVTINADGWGNFSVNGGSVSIWVNK

SEQ ID NO: 23352 - protein, 485 aa, Bacillus sp. 707
HHNGTNGTMMQYFEWYLPNDGNHWNRLNSDASNLKSKGITAVWIPPAWKGASQNDVGYGAYDLYDLGEFNQKGTVRTKYGTRSQLQAAVTSLKNNGIQVYGDVVMNHKGGADATEMVRAVEVNPNNRNQEVTGEYTIEAWTRFDFPGRGNTHSSFKWRWYHFDGVDWDQSRRLNNRIYKFRGHGKAWDWEVDTENGNYDYLMYADIDMDHPEVVNELRNWGVWYTNTLGLDGFRIDAVKHIKYSFTRDWINHVRSATGKNMFAVAEFWKNDLGAIENYLQKTNWNHSVFDVPLHYNLYNASKSGGNYDMRNIFNGTVVQRHPSHAVTFVDNHDSQPEEALESFVEEWFKPLAYALTLTREQGYPSVFYGDYYGIPTHGVPAMRSKIDPILEARQKYAYGKQNDYLDHHNIIGWTREGNTAHPNSGLATIMSDGAGGSKWMFVGRNTAGQVWSDITGNRTGTVTINADGWGNFSVNGGSVSIWVNK

SEQ ID NO: 23353 - protein, 485 aa, Bacillus sp. 707
HHNGTNGTMMQYFEWYLPNDGNHWNRLNSDASNLKSKGITAVWIPPAWKGASQNDVGYGAYDLYDLGEFNQKGTVRTKYGTRSQLQAAVTSLKNNGIQVYGDVVMNHKGGADATEMVRAVEVNPNNRNQEVTGEYTIEAWTRFDFPGRGNTHSSFKWRWYHFDGVDWDQSRRLNNRIYKFRGHGKAWDWEVDTENGNYDYLMYADIDMDHPEVVNELRNWGVWYTNTLGLDGFRIDAVKHIKYSFTRDWINHVRSATGKNMFAVAEFWKNDLGAIENYLQKTNWNHSVFDVPLHYNLYNASKSGGNYDMRNIFNGTVVQRHPSHAVTFVDNHDSQPEEALESFVEEWFKPLAYALTLTREQGYPSVFYGDYYGIPTHGVPAMRSKIDPILEARQKYAYGKQNDYLDHHNIIGWTREGNTAHPNSGLATIMSDGAKGSKWMFVGRNKAGQVWSDITGNRTGTVTINADGWGNFSVNGGSVSIWVNK

SEQ ID NO: 23354 - protein, 485 aa, Bacillus sp. 707
HHNGTNGTMMQYFEWYLPNDGNHWNRLNSDASNLKSKGITAVWIPPAWKGASQNDVGYGAYDLYDLGEFNQKGTVRTKYGTRSQLQAAVTSLKNNGIQVYGDVVMNHKGGADATEMVRAVEVNPNNRNQEVTGEYTIEAWTRFDFPGRGNTHSSFKWRWYHFDGVDWDQSRRLNNRIYKFRGHGKAWDWEVDTENGNYDYLMYADIDMDHPEVVNELRNWGVWYTNTLGLDGFRIDAVKHIKYSFTRDWINHVRSATGKNMFAVAEFWKNDLGAIENYLQKTNWNHSVFDVPLHYNLYNASKSGGNYDMRNIFNGTVVQRHPSHAVTFVDNHDSQPEEALESFVEEWFKPLAYALTLTREQGYPSVFYGDYYGIPTHGVPAMRSKIDPILEARQKYAYGKQNDYLDHHNIIGWTREGNTADPNSGLATIMSDGAGGSKWMFVGRNKAGQVWSDITGNRTGTVTINADGWGNFSVNGGSVSIWVNK

SEQ ID NO: 23355 - protein, 485 aa, Bacillus sp. 707
HHNGTNGTMMQYFEWYLPNDGNHWNRLNSDASNLKSKGITAVWIPPAWKGASQNDVGYGAYDLYDLGEFNQKGTVRTKYGTRSQLQAAVTSLKNNGIQVYGDVVMNHKGGADATEMVRAVEVNPNNRNQEVTGEYTIEAWTRFDFPGRGNTHSSFKWRWYHFDGVDWDQSRRLNNRIYKFRGHGKAWDWEVDTENGNYDYLMYADIDMDHPEVVNELRNWGVWYTNTLGLDGFRIDAVKHIKYSFTRDWINHVRSATGKNMFAVAEFWKNDLGAIENYLQKTNWNHSVFDVPLHYNLYNASKSGGNYDMRNIFNGTVVQRHPSHAVTFVDNHDSQPEEALESFVEEWFKPLAYALTLTREQGYPSVFYGDYYGIPTHGVPAMRSKIDPILCARQKYAYGKQNDYLDHHNIIGWTREGNTAHPNSGLATIMSDGAGGSKWMFVGRNKAGQVWSDITGNRTGTVTINADGWGNFSVNGGSVSIWVNK

SEQ ID NO: 23356 - protein, 485 aa, Bacillus sp. 707
HHNGTNGTMMQYFEWYLPNDGNHWNRLNSDASNLKSKGITAVWIPPAWKGASQNDVGYGAYDLYDLGEFNQKGTVRTKYGTRSQLQAAVTSLKNNGIQVYGDVVMNHKGGADATEMVRAVEVNPNNRNQEVTGEYTIEAWTRFDFPGRGNTHSSFKWRWYHFDGVDWDQSRRLNNRIYKFRGHGKAWDWEVDTENGNYDYLMYADIDMDHPEVVNELRNWGVWYTNTLGLDGFRIDAVKHIKYSFTRDWINHVRSATGKNMFAVAEFWKNDLGAIENYLQKTNWNHSVFDVPLHYNLYNASKSGGNYDMRNIFNGTVVQRHPSHAVTFVDNHDSQPEEALESFVEEWFKPLAYALTLTREQGYPSVFYGDYYGIPTHGVPAMRSKIDPILEARQKYAYGKQNDYLDHHNIIGWTREGATAHPNSGLATIMSDGAGGSKWMFVGRNKAGQVWSDITGNRTGTVTINADGWGNFSVNGGSVSIWVNK

SEQ ID NO: 23357 - protein, 485 aa, Bacillus sp. 707
HHNGTNGTMMQYFEWYLPNDGNHWNRLNSDASNLKSKGITAVWIPPAWKGASQNDVGYGAYDLYDLGEFNQKGTVRTKYGTRSQLQAAVTSLKNNGIQVYGDVVMNHKGGADATEMVRAVEVNPNNRNQEVTGEYTIEAWTRFDFPGRGNTHSSFKWRWYHFDGVDWDQSRRLNNRIYKFRGHGKAWDWEVDTENGNYDYLMYADIDMDRPEVVNELRNWGVWYTNTLGLDGFRIDAVKHIKYSFTRDWINHVRSATGKNMFAVAEFWKNDLGAIENYLQKTNWNHSVFDVPLHYNLYNASKSGGNYDMRNIFNGTVVQRHPSHAVTFVDNHDSQPEEALESFVEEWFKPLAYALTLTREQGYPSVFYGDYYGIPTHGVPAMRSKIDPILEARQKYAYGKQNDYLDHHNIIGWTREGNTAHPNSGLATIMSDGAGGSKWMFVGRNKAGQVWSDITGNRTGTVTINADGWGNFSVNGGSVSIWVNK

SEQ ID NO: 23358 - protein, 485 aa, Bacillus sp. 707
HHNGTNGTMMQYFEWYLPNDGNHWNRLNSDASNLKSKGITAVWIPPAWKGASQNDVGYGAYDLYDLGEFNQKGTVRTKYGTRSQLQAAVTSLKNNGIQVYGDVVMNHKGGADATEMVRAVEVNPNNRNQEVTGEYCIEAWTRFDFPGRGNTHSSFKWRWYHFDGVDWDQSRRLNNRIYKFRGHGKAWDWEVDTENGNYDYLMYADIDMDHPEVVNELRNWGVWYTNTLGLDGFRIDAVKHIKYSFTRDWINHVRSATGKNMFAVAEFWKNDLGAIENYLQKTNWNHSVFDVPLHYNLYNASKSGGNYDMRNIFNGTVVQRHPSHAVTFVDNHDSQPEEALESFVEEWFKPLAYALTLTREQGYPSVFYGDYYGIPTHGVPAMRSKIDPILEARQKYAYGKQNDYLDHHNIIGWTREGNTAHPNSGLATIMSDGAGGSKWMFVGRNKAGQVWSDITGNRTGTVTINADGWGNFSVNGGSVSIWVNK

SEQ ID NO: 23359 - protein, 485 aa, Bacillus sp. 707
HHNGTNGTMMQYFEWYLPNDGNHWNRLNSDASNLKSKGITAVWIPPAWKGASQNDVGYGAYDLYDLGEFNQKGTVRTKYGTRSQLQAAVTSLKNNGIQVYGDVVMNHKGGADATEMVRAVEVNPNNRNQEVTGEYTIEAWTRFDFPGRGNTHSSFKWRWYHFDGVDWDQSRRLNNRIYKFRGHGKAWDWEVDTENGNYDYLMYADIDMDHPEVVNELRNWGVWYTNTLGLDGFRIDAVKHIKYSFTRDWINHVRSATGKNMFAVAEFWKNDLGAIENYLQKTNWNHSVFDVPLHYNLYNASKSGGNYDMRNIFNGTVVQRHPSHAVTFVDNHDSQPEEALESFVEEWFKPLAYALTLTRLQGYPSVFYGDYYGIPTHGVPAMRSKIDPILEARQKYAYGKQNDYLDHHNIIGWTREGNTAHPNSGLATIMSDGAGGSKWMFVGRNKAGQVWSDITGNRTGTVTINADGWGNFSVNGGSVSIWVNK

SEQ ID NO: 23360 - protein, 485 aa, Bacillus sp. 707
HHNGTNGTMMQYFEWYLPNDGNHWNRLNSDASNLKSKGITAVWIPPAWKGASQNDVGYGAYDLYDLGEFNQKGTVRTKYGTRSQLQAAVTSLKNNGIQVYGDVVMNHKGGADATEMVRAVEVNPNNRNQEVTGEYTIEAWTRFDFPGRGNGHSSFKWRWYHFDGVDWDQSRRLNNRIYKFRGHGKAWDWEVDTENGNYDYLMYADIDMDHPEVVNELRNWGVWYTNTLGLDGFRIDAVKHIKYSFTRDWINHVRSATGKNMFAVAEFWKNDLGAIENYLQKTNWNHSVFDVPLHYNLYNASKSGGNYDMRNIFNGTVVQRHPSHAVTFVDNHDSQPEEALESFVEEWFKPLAYALTLTREQGYPSVFYGDYYGIPTHGVPAMRSKIDPILEARQKYAYGKQNDYLDHHNIIGWTREGNTAHPNSGLATIMSDGAGGSKWMFVGRNKAGQVWSDITGNRTGTVTINADGWGNFSVNGGSVSIWVNK

SEQ ID NO: 23361 - protein, 485 aa, Bacillus sp. 707
HHNGTNGTMMQYFEWYLPNDGNHWNRLNSDASNLKSKGITAVWIPPAWKGASQNDVGYGAYDLYDLGEFNQKGTVRTKYGTRSQLQAAVTSLKNNGIQVYGDVVMNHKGGADCTEMVRAVEVNPNNRNQEVTGEYTIEAWTRFDFPGRGNTHSSFKWRWYHFDGVDWDQSRRLNNRIYKFRGHGKAWDWEVDTENGNYDYLMYADIDMDHPEVVNELRNWGVWYTNTLGLDGFRIDAVKHIKYSFTRDWINHVRSATGKNMFAVAEFWKNDLGAIENYLQKTNWNHSVFDVPLHYNLYNASKSGGNYDMRNIFNGTVVQRHPSHAVTFVDNHDSQPEEALESFVEEWFKPLAYALTLTREQGYPSVFYGDYYGIPTHGVPAMRSKIDPILEARQKYAYGKQNDYLDHHNIIGWTREGNTAHPNSGLATIMSDGAGGSKWMFVGRNKAGQVWSDITGNRTGTVTINADGWGNFSVNGGSVSIWVNK

SEQ ID NO: 23362 - protein, 485 aa, Bacillus sp. 707
HHNGTNGTMMQYFEWYLPNDGNHWNRLNSDASNLKSKGITAVWIPPAWKGASQNDVGYGAYDLYDLGEFNQKGTVRTKYGTRSQLQAAVTSLKDNGIQVYGDVVMNHKGGADATEMVRAVEVNPNNRNQEVTGEYTIEAWTRFDFPGRGNTHSSFKWRWYHFDGVDWDQSRRLNNRIYKFRGHGKAWDWEVDTENGNYDYLMYADIDMDHPEVVNELRNWGVWYTNTLGLDGFRIDAVKHIKYSFTRDWINHVRSATGKNMFAVAEFWKNDLGAIENYLQKTNWNHSVFDVPLHYNLYNASKSGGNYDMRNIFNGTVVQRHPSHAVTFVDNHDSQPEEALESFVEEWFKPLAYALTLTREQGYPSVFYGDYYGIPTHGVPAMRSKIDPILEARQKYAYGKQNDYLDHHNIIGWTREGNTAHPNSGLATIMSDGAGGSKWMFVGRNKAGQVWSDITGNRTGTVTINADGWGNFSVNGGSVSIWVNK

SEQ ID NO: 23363 - protein, 485 aa, Bacillus sp. 707
HHNGTNGTMMQYFEWYLPNDGNHWNRLNSDASNLKSKGITAVWIPPAWKGASQNDVGYGAYDLYDLGEFNQKGTVRTKYGTRSQLQAAVTSLKNNGIQVYGDVVMNHKGGADATEMVRAVEVNPNNRNQEVTGEYTIEAWTRFDFPGRGNTHSSFKWRWYHFDGVDWDQSRRLNNRIYKFRGHGKAWDWEVDTENGNYDYLMYADIDMDAPEVVNELRNWGVWYTNTLGLDGFRIDAVKHIKYSFTRDWINHVRSATGKNMFAVAEFWKNDLGAIENYLQKTNWNHSVFDVPLHYNLYNASKSGGNYDMRNIFNGTVVQRHPSHAVTFVDNHDSQPEEALESFVEEWFKPLAYALTLTREQGYPSVFYGDYYGIPTHGVPAMRSKIDPILEARQKYAYGKQNDYLDHHNIIGWTREGNTAHPNSGLATIMSDGAGGSKWMFVGRNKAGQVWSDITGNRTGTVTINADGWGNFSVNGGSVSIWVNK

SEQ ID NO: 23364 - protein, 485 aa, Bacillus sp. 707
HHNGTNGTMMQYFEWYLPNDGNHWNRLNSDASNLKSKGITAVWIPPAWKGASQNDVGYGAYDLYDLGEFLQKGTVRTKYGTRSQLQAAVTSLKNNGIQVYGDVVMNHKGGADATEMVRAVEVNPNNRNQEVTGEYTIEAWTRFDFPGRGNTHSSFKWRWYHFDGVDWDQSRRLNNRIYKFRGHGKAWDWEVDTENGNYDYLMYADIDMDHPEVVNELRNWGVWYTNTLGLDGFRIDAVKHIKYSFTRDWINHVRSATGKNMFAVAEFWKNDLGAIENYLQKTNWNHSVFDVPLHYNLYNASKSGGNYDMRNIFNGTVVQRHPSHAVTFVDNHDSQPEEALESFVEEWFKPLAYALTLTREQGYPSVFYGDYYGIPTHGVPAMRSKIDPILEARQKYAYGKQNDYLDHHNIIGWTREGNTAHPNSGLATIMSDGAGGSKWMFVGRNKAGQVWSDITGNRTGTVTINADGWGNFSVNGGSVSIWVNK

SEQ ID NO: 23365 - protein, 485 aa, Bacillus sp. 707
HHNGTNGTMMQYFEWYLPNDGNHWNRLNSDASNLKSKGITAVWIPPAWKGASQNDVGYGAYDLYDLGEFNQKGTVRTKYGTRSQLQAAVTSLKNNGIQVYGDVVMNHKGGADATEMVRAVEVNPNNRNQEVTGEYTIEAWTRFDFPGRGNTHSSFKWRWYHFDGVDWDQSRRLNNRIYKFIGHGKAWDWEVDTENGNYDYLMYADIDMDHPEVVNELRNWGVWYTNTLGLDGFRIDAVKHIKYSFTRDWINHVRSATGKNMFAVAEFWKNDLGAIENYLQKTNWNHSVFDVPLHYNLYNASKSGGNYDMRNIFNGTVVQRHPSHAVTFVDNHDSQPEEALESFVEEWFKPLAYALTLTREQGYPSVFYGDYYGIPTHGVPAMRSKIDPILEARQKYAYGKQNDYLDHHNIIGWTREGNTAHPNSGLATIMSDGAGGSKWMFVGRNKAGQVWSDITGNRTGTVTINADGWGNFSVNGGSVSIWVNK

SEQ ID NO: 23366 - protein, 485 aa, Bacillus sp. 707
HHNGTNGTMMQYFEWYLPNDGNHWNRLNSDASNLKSKGITAVWIPPAWKGASQNDVGYGAYDLYDLGEFNQKGTVRTKYGTRSQLQAAVTSLKNNGIQVYGDVVMNHKGGADATEMVRAVEVNPNNRNQEVTGEYTIEAWTRFDFPGRGNTHSSFKWRWYHFDGVDWDQSRRLNNRIYKFRGHGKAWDWEVDTENGNYDYLMYADIDMDHPEVVNELRNWGVWYTNTLGLDGFRIDAVKHIKYSFTRDWINHVRSATGKNMFAVAEFWKNDLGAIENYLQKTNWNHSVFDVPLHYNLYNASKSGGNYDMRNIFNGTVVQRHPSHAVTFVDNHDSQPEEALESFVEEWFKPLAYALTLTREQGYPSVFYGDYYGIPTHGVPAMRSKIDPILEARQKYAYGKQNDYLDHHNIIGWTREGNTAHPNSGLATIMSDGAGGSKWMFVGRNKAGQVWSDITGNRTGTVTINADGWGEFSVNGGSVSIWVNK

SEQ ID NO: 23367 - protein, 485 aa, Bacillus sp. 707
HHNGTNGTMMQYFEWYLPNDGNHWNRLNSDASNLKSKGITAVWIPPAWKGASQNDVGYGAYDLYDLGEFNQKGTVRTKYGTRSQLQAAVTSLKNNGIQVYGDVVMNHKGGADATEMVRAVEVNPNNRNQEVTGEYTIEAWTRFDFPGRGNTHSSFKWRWYHFDGVDWDQSRRLNNRIYKFRGHGKAWDWEVDTENGNYDYLMYADIDMDHPEVVNELRNWGVWYTNTLGLDGFRIDAVKHIKYSFTRDWINHVRSATGKNMFAVAEFWKNDLGAIENYLQKTNWNHSVFDVPLHYNLYNASKSGGNYDMRNIFNGTVVQRHPSHAVTFVDNHDSQPEEALESFVEEWFKPLAYALTLTREQGYPSVFYGDYYGIPTHGVPAMRSKIDPILEARQKYAYGKQNDYLDHHNIIGWTREGNTAHPNSGLATIMSDGAGGSKWMFVGRNKAGQAWSDITGNRTGTVTINADGWGNFSVNGGSVSIWVNK

SEQ ID NO: 23368 - protein, 485 aa, Bacillus sp. 707
HHNGTNGTMMQYFEWYLPNDGNHWNRLNSDASNLKSKGITAVWIPPAWKGASQNDVGYGAYDLYDLGEFNQKGTVRTKYGTRSQLQAAVTSLKNYGIQVYGDVVMNHKGGADATEMVRAVEVNPNNRNQEVTGEYTIEAWTRFDFPGRGNTHSSFKWRWYHFDGVDWDQSRRLNNRIYKFRGHGKAWDWEVDTENGNYDYLMYADIDMDHPEVVNELRNWGVWYTNTLGLDGFRIDAVKHIKYSFTRDWINHVRSATGKNMFAVAEFWKNDLGAIENYLQKTNWNHSVFDVPLHYNLYNASKSGGNYDMRNIFNGTVVQRHPSHAVTFVDNHDSQPEEALESFVEEWFKPLAYALTLTREQGYPSVFYGDYYGIPTHGVPAMRSKIDPILEARQKYAYGKQNDYLDHHNIIGWTREGNTAHPNSGLATIMSDGAGGSKWMFVGRNKAGQVWSDITGNRTGTVTINADGWGNFSVNGGSVSIWVNK

SEQ ID NO: 23369 - protein, 485 aa, Bacillus sp. 707
HHNGTNGTMMQYFEWYLPNDGNHWNRLNSDASNLKSKGITAVWIPPAWKGASQNDVGYGAYDLYDLGEFGQKGTVRTKYGTRSQLQAAVTSLKNNGIQVYGDVVMNHKGGADATEMVRAVEVNPNNRNQEVTGEYTIEAWTRFDFPGRGNTHSSFKWRWYHFDGVDWDQSRRLNNRIYKFRGHGKAWDWEVDTENGNYDYLMYADIDMDHPEVVNELRNWGVWYTNTLGLDGFRIDAVKHIKYSFTRDWINHVRSATGKNMFAVAEFWKNDLGAIENYLQKTNWNHSVFDVPLHYNLYNASKSGGNYDMRNIFNGTVVQRHPSHAVTFVDNHDSQPEEALESFVEEWFKPLAYALTLTREQGYPSVFYGDYYGIPTHGVPAMRSKIDPILEARQKYAYGKQNDYLDHHNIIGWTREGNTAHPNSGLATIMSDGAGGSKWMFVGRNKAGQVWSDITGNRTGTVTINADGWGNFSVNGGSVSIWVNK

SEQ ID NO: 23370 - protein, 485 aa, Bacillus sp. 707
HHNGTNGTMMQYFEWYLPNDGNHWNRLNSDASNLKSKGITAVWIPPAWKGASQNDVGYGAYDLYDLGEFNQKGTVRTKYGTRSQLQAAVTSLKNNGIQVYGDVVMNHKGGADATEMVRAVEVNPNNRNQEVTGEYTIEAWTRFDFPGRGNTHSSFKWRWYHFDGVDWDQSRRLNNRIYKFRGHGKAWDWEVDTENGNYDYLMYADIDMDHPEVVNELRNWGVWYTNTLGLDGFRIDAVKHIKYSFTRDWINHVRSATGKNMFAVAEFWKNDLGAIENYLQKTNWNHSVFDVPLHYNLYNASKSGGNYDMRNIFNGTVVQRHPSHAVTFVDNHDSQPEEALESFVEEWFKPLAYALTLTREQGYPSVFYGDYYGIPTHGVPAMRSKIDPILEARQKYAYGKQNDYLDHHNIIGWTREGNTAHPNSGLATIMSDGAGGSKWMFVGRNKAGQVWSDITGNRTGEVTINADGWGNFSVNGGSVSIWVNK

SEQ ID NO: 23371 - protein, 485 aa, Bacillus sp. 707
HHNGTNGTMMQYFEWYLPNDGGHWNRLNSDASNLKSKGITAVWIPPAWKGASQNDVGYGAYDLYDLGEFNQKGTVRTKYGTRSQLQAAVTSLKNNGIQVYGDVVMNHKGGADATEMVRAVEVNPNNRNQEVTGEYTIEAWTRFDFPGRGNTHSSFKWRWYHFDGVDWDQSRRLNNRIYKFRGHGKAWDWEVDTENGNYDYLMYADIDMDHPEVVNELRNWGVWYTNTLGLDGFRIDAVKHIKYSFTRDWINHVRSATGKNMFAVAEFWKNDLGAIENYLQKTNWNHSVFDVPLHYNLYNASKSGGNYDMRNIFNGTVVQRHPSHAVTFVDNHDSQPEEALESFVEEWFKPLAYALTLTREQGYPSVFYGDYYGIPTHGVPAMRSKIDPILEARQKYAYGKQNDYLDHHNIIGWTREGNTAHPNSGLATIMSDGAGGSKWMFVGRNKAGQVWSDITGNRTGTVTINADGWGNFSVNGGSVSIWVNK

SEQ ID NO: 23372 - protein, 485 aa, Bacillus sp. 707
HHNGTNGTMMQYFEWYLPNDGNHWNRLNSDASNLKSKGITAVWIPPAWKGASQNDVGYGAYDLYDLGEFNQKGTVRTKYGTRSQLQAAVTSLKNNGIQVYGDVVMNHKGGADATEMVRAVEVNPNNRNQEVTGEYTIEAWTRFDFDGRGNTHSSFKWRWYHFDGVDWDQSRRLNNRIYKFRGHGKAWDWEVDTENGNYDYLMYADIDMDHPEVVNELRNWGVWYTNTLGLDGFRIDAVKHIKYSFTRDWINHVRSATGKNMFAVAEFWKNDLGAIENYLQKTNWNHSVFDVPLHYNLYNASKSGGNYDMRNIFNGTVVQRHPSHAVTFVDNHDSQPEEALESFVEEWFKPLAYALTLTREQGYPSVFYGDYYGIPTHGVPAMRSKIDPILEARQKYAYGKQNDYLDHHNIIGWTREGNTAHPNSGLATIMSDGAGGSKWMFVGRNKAGQVWSDITGNRTGTVTINADGWGNFSVNGGSVSIWVNK

SEQ ID NO: 23373 - protein, 485 aa, Bacillus sp. 707
HHNGTNGTMMQYFEWYLPNDGNHWNRLNSDASNLKSKGITAVWIPPAWKGASQNDVGYGAYDLYDLGEFNQKGTVRTKYGTRSQLQAAVTSLKNNGIQVYGDVVMNHKGGADATEMVRAVEVNPNNRNQEVTGEYTIEAWTRFDFPGRGNTHSSFKWRWYHFDGVDWDQSRRLNNRIYKFRGHGKAWDWEVDTENGNYDYLMYADIDMDHPEVVNELRNWGVWYTNTLGLDGFRIDAVKHIKYSFTRDWINHVRSATGKNEFAVAEFWKNDLGAIENYLQKTNWNHSVFDVPLHYNLYNASKSGGNYDMRNIFNGTVVQRHPSHAVTFVDNHDSQPEEALESFVEEWFKPLAYALTLTREQGYPSVFYGDYYGIPTHGVPAMRSKIDPILEARQKYAYGKQNDYLDHHNIIGWTREGNTAHPNSGLATIMSDGAGGSKWMFVGRNKAGQVWSDITGNRTGTVTINADGWGNFSVNGGSVSIWVNK

SEQ ID NO: 23374 - protein, 485 aa, Bacillus sp. 707
HHNGTNGTMMQYFEWYLPNDGNHWNRLNSDASNLKSKGITAVWIPPAWKGASQNDVGYGAYDLYDLGEFNQKGTVRTKYGTRSQLQAAVTSLKNNGIQVYGDVVMNHKGGADATEMLRAVEVNPNNRNQEVTGEYTIEAWTRFDFPGRGNTHSSFKWRWYHFDGVDWDQSRRLNNRIYKFRGHGKAWDWEVDTENGNYDYLMYADIDMDHPEVVNELRNWGVWYTNTLGLDGFRIDAVKHIKYSFTRDWINHVRSATGKNMFAVAEFWKNDLGAIENYLQKTNWNHSVFDVPLHYNLYNASKSGGNYDMRNIFNGTVVQRHPSHAVTFVDNHDSQPEEALESFVEEWFKPLAYALTLTREQGYPSVFYGDYYGIPTHGVPAMRSKIDPILEARQKYAYGKQNDYLDHHNIIGWTREGNTAHPNSGLATIMSDGAGGSKWMFVGRNKAGQVWSDITGNRTGTVTINADGWGNFSVNGGSVSIWVNK

SEQ ID NO: 23375 - protein, 485 aa, Bacillus sp. 707
HHNGTNGTMMQYFEWYLPNDGNHWNRLNSDASNLKSKGITAVWIPPAWKGASQNDVGYGAYDLYDLGEFNQKGTVRTKYGTRSQLQAAVTSLKNNGIQVYGDVVMNHKGGADATEMVRAVEVNPNNRNQEVTGEYTIEAWTRFDFPGRGNTHSSFKWRWYHFDGVDWDQSRRLNNRIYKFRGHGKAWDWEVDTENGNYDYLMYADIDMDHPEVVNEERNWGVWYTNTLGLDGFRIDAVKHIKYSFTRDWINHVRSATGKNMFAVAEFWKNDLGAIENYLQKTNWNHSVFDVPLHYNLYNASKSGGNYDMRNIFNGTVVQRHPSHAVTFVDNHDSQPEEALESFVEEWFKPLAYALTLTREQGYPSVFYGDYYGIPTHGVPAMRSKIDPILEARQKYAYGKQNDYLDHHNIIGWTREGNTAHPNSGLATIMSDGAGGSKWMFVGRNKAGQVWSDITGNRTGTVTINADGWGNFSVNGGSVSIWVNK

SEQ ID NO: 23376 - protein, 485 aa, Bacillus sp. 707
HHNGMNGTMMQYFEWYLPNDGNHWNRLNSDASNLKSKGITAVWIPPAWKGASQNDVGYGAYDLYDLGEFNQKGTVRTKYGTRSQLQAAVTSLKNNGIQVYGDVVMNHKGGADATEMVRAVEVNPNNRNQEVTGEYTIEAWTRFDFPGRGNTHSSFKWRWYHFDGVDWDQSRRLNNRIYKFRGHGKAWDWEVDTENGNYDYLMYADIDMDHPEVVNELRNWGVWYTNTLGLDGFRIDAVKHIKYSFTRDWINHVRSATGKNMFAVAEFWKNDLGAIENYLQKTNWNHSVFDVPLHYNLYNASKSGGNYDMRNIFNGTVVQRHPSHAVTFVDNHDSQPEEALESFVEEWFKPLAYALTLTREQGYPSVFYGDYYGIPTHGVPAMRSKIDPILEARQKYAYGKQNDYLDHHNIIGWTREGNTAHPNSGLATIMSDGAGGSKWMFVGRNKAGQVWSDITGNRTGTVTINADGWGNFSVNGGSVSIWVNK

SEQ ID NO: 23377 - protein, 485 aa, Bacillus sp. 707
HHNGTNGTMMQYFEWYLPNDGNHWNRLNSDAYNLKSKGITAVWIPPAWKGASQNDVGYGAYDLYDLGEFNQKGTVRTKYGTRSQLQAAVTSLKNNGIQVYGDVVMNHKGGADATEMVRAVEVNPNNRNQEVTGEYTIEAWTRFDFPGRGNTHSSFKWRWYHFDGVDWDQSRRLNNRIYKFRGHGKAWDWEVDTENGNYDYLMYADIDMDHPEVVNELRNWGVWYTNTLGLDGFRIDAVKHIKYSFTRDWINHVRSATGKNMFAVAEFWKNDLGAIENYLQKTNWNHSVFDVPLHYNLYNASKSGGNYDMRNIFNGTVVQRHPSHAVTFVDNHDSQPEEALESFVEEWFKPLAYALTLTREQGYPSVFYGDYYGIPTHGVPAMRSKIDPILEARQKYAYGKQNDYLDHHNIIGWTREGNTAHPNSGLATIMSDGAGGSKWMFVGRNKAGQVWSDITGNRTGTVTINADGWGNFSVNGGSVSIWVNK

SEQ ID NO: 23378 - protein, 485 aa, Bacillus sp. 707
HHNGTNGTMMQYFEWYLPNDGNHWNRLNSDASNLKSKGITAVWIPPAWKGASQNDVGYGAYDLYDLGEFNQKGTVRTKYGTRSQLQAAVTSLKNNGIQVYGDVVMNHKGGADATEMVRAVEVNPNNRNQEVTGEYTIEAWTRFDFPGRGNTHSSFKWRWYHFDGVDWDQSRRLNNRIYKFRGHGKAWDWEVDTENGNYDYLMYADIDMDHPEVVNELRNWGVWYTNTLGLDGFRIDAVKHIKYSFTRDWINHVRSATGKNMFAVAEFWKNDLGAIENYLQKTNWNHSVFDVPLHYNLYNASKSGGNYDMRNIFNGTVVQRHPSHAVTFVDNHDSQPEEALESFVEEWFKPLAYALTLTREQGYPSVFYGDYYGIPTHGVPAMRSKIDPILEARQKYAYGKQNDYLDHHNIIGWTREGNTAHPNSGLATIMSDNAGGSKWMFVGRNKAGQVWSDITGNRTGTVTINADGWGNFSVNGGSVSIWVNK

SEQ ID NO: 23379 - protein, 485 aa, Bacillus sp. 707
HHNGTNGTMMQYFEWYLPNDGNHWNRLNSDASNLKSKGITAVWIPPAWKGASQNDVGYGAYDLYDLGEFNQKGTVRTKYGTRSQLQAAVTSLKNNGIQVYGDVVMNHKGGADRTEMVRAVEVNPNNRNQEVTGEYTIEAWTRFDFPGRGNTHSSFKWRWYHFDGVDWDQSRRLNNRIYKFRGHGKAWDWEVDTENGNYDYLMYADIDMDHPEVVNELRNWGVWYTNTLGLDGFRIDAVKHIKYSFTRDWINHVRSATGKNMFAVAEFWKNDLGAIENYLQKTNWNHSVFDVPLHYNLYNASKSGGNYDMRNIFNGTVVQRHPSHAVTFVDNHDSQPEEALESFVEEWFKPLAYALTLTREQGYPSVFYGDYYGIPTHGVPAMRSKIDPILEARQKYAYGKQNDYLDHHNIIGWTREGNTAHPNSGLATIMSDGAGGSKWMFVGRNKAGQVWSDITGNRTGTVTINADGWGNFSVNGGSVSIWVNK

SEQ ID NO: 23380 - protein, 485 aa, Bacillus sp. 707
HHNGTNGTMMQYFEWYLPNDGNHWNRLNSDASNLKSKGITAVWIPPAWKGASQNDVGYGAYDLYDLGEFNQKGTVRTKYGTRSQLQAAVTSLKNNGIQVYGDVVMNHKGGADATEMVRAVEVNPNNRNQEVTGEYTIEAWTRFDFPGRGNTHSSFKWRWYHFDGVDWDNSRRLNNRIYKFRGHGKAWDWEVDTENGNYDYLMYADIDMDHPEVVNELRNWGVWYTNTLGLDGFRIDAVKHIKYSFTRDWINHVRSATGKNMFAVAEFWKNDLGAIENYLQKTNWNHSVFDVPLHYNLYNASKSGGNYDMRNIFNGTVVQRHPSHAVTFVDNHDSQPEEALESFVEEWFKPLAYALTLTREQGYPSVFYGDYYGIPTHGVPAMRSKIDPILEARQKYAYGKQNDYLDHHNIIGWTREGNTAHPNSGLATIMSDGAGGSKWMFVGRNKAGQVWSDITGNRTGTVTINADGWGNFSVNGGSVSIWVNK

SEQ ID NO: 23381 - protein, 485 aa, Bacillus sp. 707
HHNGTNGTMMQYFEWYLPNDGNHWNRLNSDASNLKSKGITAVWIPPAWKGASQNDVGYGAYDLYDLGEFNQKGTVRTKYGTRSQLQAAVTSLKNNGIQVYGDVVMNHKGGADATEMVRAVEVNPNNRNQEVTGEYTIEAWTRFDFPGRGNTHSSFKWRWYHFDGVDWDQSRRLNNRIYKFRGHGKAWDWEVDTENGNYDYLMYADIDMDHPEVVNELRNWGVWYTNTLGLDGFRIDAVKHIKYSFTRDWINHVRSATGKNMFAVAEFWKNDLGAIENYLQKTNWNHSVFDVPLHYNLYNASKSGGNYDMRNIFNGTVVQRHPSHAVTFVDNHDSQPEEALESFVEEWFKPLAYALTLTREQGYPSVFYGDYYGIPTHGVPAMRSKIDPILEARQKYAYGKQNDYLDHHNIIGWTREGNTAHPNSGLATIMSDGAGGSKWMFVGRNKAGQVWSDITGNRTGTVTINEDGWGNFSVNGGSVSIWVNK

SEQ ID NO: 23382 - protein, 485 aa, Bacillus sp. 707
HHNGTNGTMMQYFEWYLPNDGNHWNRLNSDASNLKSKGITAVWIPPAWKGASQNDVGYGAYDLYDLGEFNQKGTVRTKYGTRSQLQAAVTSLKNNGIQVYGDVVMNHKGGADATEMVRAVEVNPNNRNQEVTGEYTIEAWTRFDFPGRGNTHSSFKWRWYHFDGVDWDQSRRLNNRIYKFRGHGKAWDWEVDTENGNYDYLMYADIDMDHPEVVNELRNWGVWYTNTLGLDGFRIDAVKHIKYSFTRDWINHVRSATGKNMFAVAEFWKNDLGAIENYLQKTNWNHSVFDVPLHYNLYNASKSGGNYDMRNIFNGTVVQRHPSHAVTFVDNHDSQPEEALESFVEEWFKPLAYALTLTREQGYPSVFYGDYYGIPTHGVPAMRSKIDPILEARQKYAYGKQNDYLDHHNIIGWTREGNTAHPNSGLATIMSDGAGGSKWMFVGRNKAGQVWSDITGNRTGTVTINADGWGNFSVNGNSVSIWVNK

SEQ ID NO: 23383 - protein, 485 aa, Bacillus sp. 707
HHNGTNGTMMQYFEWYLPNDGNHWNRLNSDASNLKSKGITAVWIPPAWKGASQNDVGYGAYDLYDLGEFNQKGTVRTKYGTRSQLQAAVTSLKNNGIQVYGDVVMNHKGGADATEMVRAVEVNPNNRNQEVTGEYTIEAWTRFDFPGRGNTHSSFKWRWYHFDGVDWDQSRRLNNRIYKFRGHGKAWDWEVDTENGNYDYLMYADIDMDSPEVVNELRNWGVWYTNTLGLDGFRIDAVKHIKYSFTRDWINHVRSATGKNMFAVAEFWKNDLGAIENYLQKTNWNHSVFDVPLHYNLYNASKSGGNYDMRNIFNGTVVQRHPSHAVTFVDNHDSQPEEALESFVEEWFKPLAYALTLTREQGYPSVFYGDYYGIPTHGVPAMRSKIDPILEARQKYAYGKQNDYLDHHNIIGWTREGNTAHPNSGLATIMSDGAGGSKWMFVGRNKAGQVWSDITGNRTGTVTINADGWGNFSVNGGSVSIWVNK

SEQ ID NO: 23384 - protein, 485 aa, Bacillus sp. 707
HHEGTNGTMMQYFEWYLPNDGNHWNRLNSDASNLKSKGITAVWIPPAWKGASQNDVGYGAYDLYDLGEFNQKGTVRTKYGTRSQLQAAVTSLKNNGIQVYGDVVMNHKGGADATEMVRAVEVNPNNRNQEVTGEYTIEAWTRFDFPGRGNTHSSFKWRWYHFDGVDWDQSRRLNNRIYKFRGHGKAWDWEVDTENGNYDYLMYADIDMDHPEVVNELRNWGVWYTNTLGLDGFRIDAVKHIKYSFTRDWINHVRSATGKNMFAVAEFWKNDLGAIENYLQKTNWNHSVFDVPLHYNLYNASKSGGNYDMRNIFNGTVVQRHPSHAVTFVDNHDSQPEEALESFVEEWFKPLAYALTLTREQGYPSVFYGDYYGIPTHGVPAMRSKIDPILEARQKYAYGKQNDYLDHHNIIGWTREGNTAHPNSGLATIMSDGAGGSKWMFVGRNKAGQVWSDITGNRTGTVTINADGWGNFSVNGGSVSIWVNK

SEQ ID NO: 23385 - protein, 485 aa, Bacillus sp. 707
HHNGTNGTMMQYFEWYLPNDGNHWNRLNSDASNLKSKGITAVWIPPAWKGASQNDVGYGAYDLYDLGEFNQKGTVRTKYGTRSQLQAAVTSLKNNGIQVYGDVVMNHKGGADATEMVRAVEVNPNNRNQEVTGEYTIEAWTRFDFPGRGNTHSSFKWRWYHFDGVDWDQSRRLNNRIYKFRGHGKAWDWEVDTENGNYDYLMYADIDMDHPEVVNELRNWGVWYTNTLGLDGFRIDAVKHIKYSFTRDWINHVRSATGKNMFAVAEFWKNDLGAIENYLQKTNWNHSVFDVPLHYNLYNASKSGGNYDMRNIFNGTVVQRHPSHAVTFVDNHDSQPEEALESFVEEWFKPLAYALTLTREQGYPSVFYGDYYGIPTHGVPAMRSKIDPILEARQKYAYGKQNDYLDHHNIIGWTRTGNTAHPNSGLATIMSDGAGGSKWMFVGRNKAGQVWSDITGNRTGTVTINADGWGNFSVNGGSVSIWVNK

SEQ ID NO: 23386 - protein, 485 aa, Bacillus sp. 707
HHNGTNGTMMQYFEWYLPNDGNHWNRLNSDASNLKSKGITAVWIPPAWKGASQNDVGYGAYDLYDLGEFNQKGTVRTKYGTRSQLQAAVTSLKQNGIQVYGDVVMNHKGGADATEMVRAVEVNPNNRNQEVTGEYTIEAWTRFDFPGRGNTHSSFKWRWYHFDGVDWDQSRRLNNRIYKFRGHGKAWDWEVDTENGNYDYLMYADIDMDHPEVVNELRNWGVWYTNTLGLDGFRIDAVKHIKYSFTRDWINHVRSATGKNMFAVAEFWKNDLGAIENYLQKTNWNHSVFDVPLHYNLYNASKSGGNYDMRNIFNGTVVQRHPSHAVTFVDNHDSQPEEALESFVEEWFKPLAYALTLTREQGYPSVFYGDYYGIPTHGVPAMRSKIDPILEARQKYAYGKQNDYLDHHNIIGWTREGNTAHPNSGLATIMSDGAGGSKWMFVGRNKAGQVWSDITGNRTGTVTINADGWGNFSVNGGSVSIWVNK

SEQ ID NO: 23387 - protein, 485 aa, Bacillus sp. 707
HHNGTNGTMMQYFEWYLPNDGNHWNRLNSDASNLKSKGITAVWIPPAWKGASQNDVGYGAYDLYDLGEFNQKGTVRTKYGTRSQLQAAVTSLKNNGIQVYGDVVMNHKGGADATEMVRAVEVNPNNRNQEVTGEYTIEAWTRFDFPGRGNTHSSFKWRWYHFDGVDWDQSRRLNNRIYKFRGHGKAWDWEVDTENGNYDYLMYADIDMDHPEVVNEKRNWGVWYTNTLGLDGFRIDAVKHIKYSFTRDWINHVRSATGKNMFAVAEFWKNDLGAIENYLQKTNWNHSVFDVPLHYNLYNASKSGGNYDMRNIFNGTVVQRHPSHAVTFVDNHDSQPEEALESFVEEWFKPLAYALTLTREQGYPSVFYGDYYGIPTHGVPAMRSKIDPILEARQKYAYGKQNDYLDHHNIIGWTREGNTAHPNSGLATIMSDGAGGSKWMFVGRNKAGQVWSDITGNRTGTVTINADGWGNFSVNGGSVSIWVNK

SEQ ID NO: 23388 - protein, 483 aa, Bacillus sp.
HHNGTNGTLMQYFEWYLPNDGNHWNRLRSDASNLKDKGISAVWIPPAWKGTSQNDVGYGAYDLYDLGEFNQKGTIRTKYGTRNQLQAAVNALKSNGIQVYGDVVMNHKGGADATEMVKAVEVNPNNRNQEVSGEYTIEAWTKFDFPGRANTHSNFKWRWYHFDGVDWDQSRKLNNRIYKFRTKAWDWEVDTENGNYDYLMYADIDMDHPEVVNELRNWGVWYTNTLGLDGFRIDAVKHIKYSFTRDWINHVRSAIGKNMFAVAEFWKGDLGAIENYLNKTNWNHSVFDVPLHFNLYYASKSGGNYDMRQIFNGTVVQKHPTHAVTFVDNHDSQPEESLESFVREWFKPLAYALTLTREQGYPSVFYGDYYGIPTHGVPAMKSKIDPILEARQKYAYGRQNDYLDHHNIIGWTREGNTAHPNSGLATIMSDGAGGNKWMFVGRNKAGQVWTDITGNKAGTVTINADGWGNFSVNGGSVSIWVNK

SEQ ID NO: 23389 - protein, 484 aa, Bacillus sp. 707
HHNGTNGTMMQYFEWYLPNDGNHWNRLNSDASNLKSKGITAVWIPPAWKGASQNDVGYGAYDLYDLGEFNQKGTVRTKYGTRSQLQAAVTSLKNNGIQVYGDVVMNHKGGADATEMVRAVEVNPNNRNQEVTGEYTIEAWTRFDFPGRGNTHSSFKWRWYHFDGVDWDQSRRLNNRIYKFGHGKAWDWEVDTENGNYDYLMYADIDMDHPEVVNELRNWGVWYTNTLGLDGFRIDAVKHIKYSFTRDWINHVRSATGKNMFAVAEFWKNDLGAIENYLQKTNWNHSVFDVPLHYNLYNASKSGGNYDMRNIFNGTVVQRHPSHAVTFVDNHDSQPEEALESFVEEWFKPLAYALTLTREQGYPSVFYGDYYGIPTHGVPAMRSKIDPILEARQKYAYGKQNDYLDHHNIIGWTREGNTAHPNSGLATIMSDGAGGSKWMFVGRNKAGQVWSDITGNRTGTVTINADGWGNFSVNGGSVSIWVNK

SEQ ID NO: 23390 - protein, 485 aa, Bacillus sp. 707
HHNGTNGTMMQYFEWYLPNDGNHWNRLNSDASNLKSKGITAVWIPPAWKGASQNDVGYGAYDLYDLGEFNQKGTVRTKYGTRSQLQAAVTSLKNNGIQVYGDVVMNHKGGADATEMVRAVEVNPNNRNQEVTGEYTIEAWTRFDFPGRGNTHSSFKWRWYHFDGVDWDQSRRLNNRIYKFRGHGKAWDWEVDTENGNYDYLMYADIDMDHKEVVNELRNWGVWYTNTLGLDGFRIDAVKHIKYSFTRDWINHVRSATGKNMFAVAEFWKNDLGAIENYLQKTNWNHSVFDVPLHYNLYNASKSGGNYDMRNIFNGTVVQRHPSHAVTFVDNHDSQPEEALESFVEEWFKPLAYALTLTREQGYPSVFYGDYYGIPTHGVPAMRSKIDPILEARQKYAYGKQNDYLDHHNIIGWTREGNTAHPNSGLATIMSDGAGGSKWMFVGRNKAGQVWSDITGNRTGTVTINADGWGNFSVNGGSVSIWVNK

SEQ ID NO: 23391 - protein, 485 aa, Bacillus sp. 707
HHNGTNGTMMQYFEWYLPNDGNHWNRLNSDASNLKSKGITAVWIPPAWKGASQNDVGYGAYDLYDLGEFNQKGTVRTKYGTRSQLQAAVTSLKNNGIQVYGDVVMNHKGGADATEMVRAVEVNPNNRNQEVTGEYTIEAWTRFDFPGRGNTHSSFKWRWYHFDGVDWDQSRRLNNRIYKFRGHGKAWDWEVDTENGNYDYLMYADIDMDHPEVVNELRNWGVWYTNTLGLDGFRIDAVKHIKYSFTRDWINHVRSATGKNMFAVAEFWKNDLGAIENYLQKTNWNHSVFDVPLHYNLYNASKSGGNYDMRNIFNGTVVQRHPSHAVTFVDNHDSQPEEALESFVEEWFKPLAYALTLTREDGYPSVFYGDYYGIPTHGVPAMRSKIDPILEARQKYAYGKQNDYLDHHNIIGWTREGNTAHPNSGLATIMSDGAGGSKWMFVGRNKAGQVWSDITGNRTGTVTINADGWGNFSVNGGSVSIWVNK

SEQ ID NO: 23392 - protein, 485 aa, Bacillus sp. 707
HHNGTNGTMMQYFEWYLPNDGNHWNRLNSDASNLKSKGITAVWIPPAWKGASQNDVGYGAYDLYDLGEFNQKGTVRTKYGTRSQLQAAVTSLKNNGIQVYGDVVMNHKGGADATEMVRAVEVNPNNRNQEVTGEYTIEAWTRFDFPGRGNTHSSFKWRWYHFDGVDWDDSRRLNNRIYKFRGHGKAWDWEVDTENGNYDYLMYADIDMDHPEVVNELRNWGVWYTNTLGLDGFRIDAVKHIKYSFTRDWINHVRSATGKNMFAVAEFWKNDLGAIENYLQKTNWNHSVFDVPLHYNLYNASKSGGNYDMRNIFNGTVVQRHPSHAVTFVDNHDSQPEEALESFVEEWFKPLAYALTLTREQGYPSVFYGDYYGIPTHGVPAMRSKIDPILEARQKYAYGKQNDYLDHHNIIGWTREGNTAHPNSGLATIMSDGAGGSKWMFVGRNKAGQVWSDITGNRTGTVTINADGWGNFSVNGGSVSIWVNK

SEQ ID NO: 23393 - protein, 485 aa, Bacillus sp. 707
HHNGTNGTMMQYFEWYLPNDGNHWNRLNSDASNLKSKGITAVWIPPAWKGASQNDVGYGAYDLYDLGEFNQKGTVRTKYGTRSQLQAAVTSLKNNGIQVYGDVVMNHKGGADATEMVRAVEVNPNNRNQEVTGEYTIEAWTRFDFPGRGNTHSSFKWRWYHFDGVDWDQSRRLNNRIYKFRGHGKAWDWEVDTENGNYDYLMYADIDMDHPEVVNELRNWGVWYTNTLGLDGFRIDAVKHIKYSFTRDWINHVRSATGKNMFAVAEFWKNDLGAIENYLQKTNWNHSVFDVPLHYNLYNASKSGGNYDMRNIFNGTVVQRHPSHAVTFVDNHDSQPEEALESFVEEWFKPLAYALTLTREQGYPSVFYGDYYGIPTHGVPAMRSKIDPILEARQKYAYGKQNDYLDHMNIIGWTREGNTAHPNSGLATIMSDGAGGSKWMFVGRNKAGQVWSDITGNRTGTVTINADGWGNFSVNGGSVSIWVNK

SEQ ID NO: 23394 - protein, 485 aa, Bacillus sp. 707
HHNGTNGTMMQYFEWYLPNDGNHWNRLNSDASNLKSKGITAVWIPPAWKGASQNDVGYGAYDLYDLGEFNQKGTVRTKYGTRSQLQAAVTSLKNNGIQVYGDVVMNHKGGADATEMVRAVEVNPNNRNQEVTGEYTIEAWTRFDFPGRGNTHSSFKWRWYHFDGVDWDQSRRLNNRIYKFRGHGKAWDWEVDTENGNYDYLMYADIDMDHPEVVNELRNWGVWYTNTLGLDGFRIDAVKHIKYSFTRDWINHVRSATGPNMFAVAEFWKNDLGAIENYLQKTNWNHSVFDVPLHYNLYNASKSGGNYDMRNIFNGTVVQRHPSHAVTFVDNHDSQPEEALESFVEEWFKPLAYALTLTREQGYPSVFYGDYYGIPTHGVPAMRSKIDPILEARQKYAYGKQNDYLDHHNIIGWTREGNTAHPNSGLATIMSDGAGGSKWMFVGRNKAGQVWSDITGNRTGTVTINADGWGNFSVNGGSVSIWVNK

SEQ ID NO: 23395 - protein, 485 aa, Bacillus sp. 707
HHNGTNGTMMQYFEWYLPNDGNHWNRLNSDASNLKSKGITKVWIPPAWKGASQNDVGYGAYDLYDLGEFNQKGTVRTKYGTRSQLQAAVTSLKNNGIQVYGDVVMNHKGGADATEMVRAVEVNPNNRNQEVTGEYTIEAWTRFDFPGRGNTHSSFKWRWYHFDGVDWDQSRRLNNRIYKFRGHGKAWDWEVDTENGNYDYLMYADIDMDHPEVVNELRNWGVWYTNTLGLDGFRIDAVKHIKYSFTRDWINHVRSATGKNMFAVAEFWKNDLGAIENYLQKTNWNHSVFDVPLHYNLYNASKSGGNYDMRNIFNGTVVQRHPSHAVTFVDNHDSQPEEALESFVEEWFKPLAYALTLTREQGYPSVFYGDYYGIPTHGVPAMRSKIDPILEARQKYAYGKQNDYLDHHNIIGWTREGNTAHPNSGLATIMSDGAGGSKWMFVGRNKAGQVWSDITGNRTGTVTINADGWGNFSVNGGSVSIWVNK

SEQ ID NO: 23396 - protein, 485 aa, Bacillus sp. 707
HHVGTNGTMMQYFEWYLPNDGNHWNRLNSDASNLKSKGITAVWIPPAWKGASQNDVGYGAYDLYDLGEFNQKGTVRTKYGTRSQLQAAVTSLKNNGIQVYGDVVMNHKGGADATEMVRAVEVNPNNRNQEVTGEYTIEAWTRFDFPGRGNTHSSFKWRWYHFDGVDWDQSRRLNNRIYKFRGHGKAWDWEVDTENGNYDYLMYADIDMDHPEVVNELRNWGVWYTNTLGLDGFRIDAVKHIKYSFTRDWINHVRSATGKNMFAVAEFWKNDLGAIENYLQKTNWNHSVFDVPLHYNLYNASKSGGNYDMRNIFNGTVVQRHPSHAVTFVDNHDSQPEEALESFVEEWFKPLAYALTLTREQGYPSVFYGDYYGIPTHGVPAMRSKIDPILEARQKYAYGKQNDYLDHHNIIGWTREGNTAHPNSGLATIMSDGAGGSKWMFVGRNKAGQVWSDITGNRTGTVTINADGWGNFSVNGGSVSIWVNK

SEQ ID NO: 23397 - protein, 485 aa, Bacillus sp. 707
NHNGTNGTMMQYFEWYLPNDGNHWNRLNSDASNLKSKGITAVWIPPAWKGASQNDVGYGAYDLYDLGEFNQKGTVRTKYGTRSQLQAAVTSLKNNGIQVYGDVVMNHKGGADATEMVRAVEVNPNNRNQEVTGEYTIEAWTRFDFPGRGNTHSSFKWRWYHFDGVDWDQSRRLNNRIYKFRGHGKAWDWEVDTENGNYDYLMYADIDMDHPEVVNELRNWGVWYTNTLGLDGFRIDAVKHIKYSFTRDWINHVRSATGKNMFAVAEFWKNDLGAIENYLQKTNWNHSVFDVPLHYNLYNASKSGGNYDMRNIFNGTVVQRHPSHAVTFVDNHDSQPEEALESFVEEWFKPLAYALTLTREQGYPSVFYGDYYGIPTHGVPAMRSKIDPILEARQKYAYGKQNDYLDHHNIIGWTREGNTAHPNSGLATIMSDGAGGSKWMFVGRNKAGQVWSDITGNRTGTVTINADGWGNFSVNGGSVSIWVNK

SEQ ID NO: 23398 - protein, 485 aa, Bacillus sp. 707
HHNGTNGTMMQYFEWYLPNDGNHWNRLNSDASNLKSKGITAVWIPPAWKGASQNDVGYGAYDLYDLGEFNQKGTVRTKYGTRSQLQAAVTSLKNNGIQVYGDVVMNHKGGADATEMVRAVEVNPNNRNQEVTGEYTIEAWTRFDFPGRGNTHSSFKWRWYHFDGVDWDQSRRLNNRIYKFRGHGKAWDWEVDTENGNYDYLMYADIDMDHPEVVNELRNWGVWYTNTLGLDGFRIDAVKHIKYSFTRDWINHVRSATGKNMFAVAEFWKNDLGAIENYLQKTNWNHSVFDVPLHYNLYNASKSGGNYDMRNIFNGTVVQRHPSHAVTFVDNHDSQPEEALESFVEEWFKPLAYALTLTREQGYPSVFYGDYYGIPTHGVPAMRSKIDPILEARQKYAYGKQNDYLDHHNIIGWTREGNTAHPNSGLATIMSDGAGGSKWMFVGRNKAGQVWSDITGNRTGTVTINKDGWGNFSVNGGSVSIWVNK

SEQ ID NO: 23399 - protein, 485 aa, Bacillus sp. 707
HHNGTNGTMMQYFEWYLPNDGNHWNRLNSDASNLKSKGITAVWIPPAWKGASQNDVGYGAYDLYDLGEFNQKGTVRTKYGTRSQLQAAVTSLKNNGIQVYGDVVMNHKGGADATEMVRAVEVNPNNRNQEVTGEYTIEAWTRFDFPGRGNTHSSFKWRWYHFDGVDWDQSRRLNNRIYKFRGHGKAWDWEVDTENGNYDYLMYADIDMDHPEVVNELANWGVWYTNTLGLDGFRIDAVKHIKYSFTRDWINHVRSATGKNMFAVAEFWKNDLGAIENYLQKTNWNHSVFDVPLHYNLYNASKSGGNYDMRNIFNGTVVQRHPSHAVTFVDNHDSQPEEALESFVEEWFKPLAYALTLTREQGYPSVFYGDYYGIPTHGVPAMRSKIDPILEARQKYAYGKQNDYLDHHNIIGWTREGNTAHPNSGLATIMSDGAGGSKWMFVGRNKAGQVWSDITGNRTGTVTINADGWGNFSVNGGSVSIWVNK

SEQ ID NO: 23400 - protein, 485 aa, Bacillus sp. 707
HHNGTNGTMMQYFEWYLPNNGNHWNRLNSDASNLKSKGITAVWIPPAWKGASQNDVGYGAYDLYDLGEFNQKGTVRTKYGTRSQLQAAVTSLKNNGIQVYGDVVMNHKGGADATEMVRAVEVNPNNRNQEVTGEYTIEAWTRFDFPGRGNTHSSFKWRWYHFDGVDWDQSRRLNNRIYKFRGHGKAWDWEVDTENGNYDYLMYADIDMDHPEVVNELRNWGVWYTNTLGLDGFRIDAVKHIKYSFTRDWINHVRSATGKNMFAVAEFWKNDLGAIENYLQKTNWNHSVFDVPLHYNLYNASKSGGNYDMRNIFNGTVVQRHPSHAVTFVDNHDSQPEEALESFVEEWFKPLAYALTLTREQGYPSVFYGDYYGIPTHGVPAMRSKIDPILEARQKYAYGKQNDYLDHHNIIGWTREGNTAHPNSGLATIMSDGAGGSKWMFVGRNKAGQVWSDITGNRTGTVTINADGWGNFSVNGGSVSIWVNK

SEQ ID NO: 23401 - protein, 485 aa, Bacillus sp. 707
HHNGTNGTMMQYFEWYLPNDGNHWNRLNSDASNLKSKGITAVWIPPAWKGASQNDVGYGAYDLYDLGEFNQKGTVRTKYGTRSQLQAAVTSLKNNGIQVYGDVVMNHKGGADATEMVRAVEVNPNNRNQEVTGEYTIEAWTRFDFPGRGNTHSSFKWRWYHFDGVDWDQSRRLNNRIYKFRGHGKAWDWEVDTENGNYDYLMYADIDMDHPEVVNELRNWGVWYTNTLGLDGFRIDAVKHIKYSFTRDWINHVRSATGKNMFAVAEFWKNDLGAIENYLQKTNWNHSVFDVPLHYNLYNASKSGGNYDMRNIFNGTVVQRHPSHAVTFVDNHDSQPEEALESFVEEWFKPLAYALTLTREQGYPSVFYGDYYGIPTHGVPAMRSKIDPILEARQKYAYGKQNDYLDHRNIIGWTREGNTAHPNSGLATIMSDGAGGSKWMFVGRNKAGQVWSDITGNRTGTVTINADGWGNFSVNGGSVSIWVNK

SEQ ID NO: 23402 - protein, 485 aa, Bacillus sp. 707
HHNGTNGTMMQYFEWYLPNDGNHWNRLNSDASNLKSKGITAVWIPPAWKGASQNDVGYGAYDLYDLGEFNQKGTVRTKYGTRSQLQAAVTSLKNNGIQVYGDVVMNHKGGADATEMVRAVEVNPNNRNQEVTGEYTIEAWTRFDFRGRGNTHSSFKWRWYHFDGVDWDQSRRLNNRIYKFRGHGKAWDWEVDTENGNYDYLMYADIDMDHPEVVNELRNWGVWYTNTLGLDGFRIDAVKHIKYSFTRDWINHVRSATGKNMFAVAEFWKNDLGAIENYLQKTNWNHSVFDVPLHYNLYNASKSGGNYDMRNIFNGTVVQRHPSHAVTFVDNHDSQPEEALESFVEEWFKPLAYALTLTREQGYPSVFYGDYYGIPTHGVPAMRSKIDPILEARQKYAYGKQNDYLDHHNIIGWTREGNTAHPNSGLATIMSDGAGGSKWMFVGRNKAGQVWSDITGNRTGTVTINADGWGNFSVNGGSVSIWVNK

SEQ ID NO: 23403 - protein, 485 aa, Bacillus sp. 707
HHNGTNGTMMQYFEWYLPNDGNHWNRLNSDASNLKSKGITAVWIPPAWKGASQNDVGYGAYDLYDLGEFNQKGTVRTKYGTRSQLQAAVTSLKNNGIQVYGDVVMNHKGGADATEMVRAVEVNPNNRNQEVTGEYTIEAWTRFDFPGRGNTHSSFKWRWYHFDGVDWDQSRRLNNRIYKFRGHGKAWDWEVDTENGNYDYLMYADIDMDHQEVVNELRNWGVWYTNTLGLDGFRIDAVKHIKYSFTRDWINHVRSATGKNMFAVAEFWKNDLGAIENYLQKTNWNHSVFDVPLHYNLYNASKSGGNYDMRNIFNGTVVQRHPSHAVTFVDNHDSQPEEALESFVEEWFKPLAYALTLTREQGYPSVFYGDYYGIPTHGVPAMRSKIDPILEARQKYAYGKQNDYLDHHNIIGWTREGNTAHPNSGLATIMSDGAGGSKWMFVGRNKAGQVWSDITGNRTGTVTINADGWGNFSVNGGSVSIWVNK

SEQ ID NO: 23404 - protein, 485 aa, Bacillus sp. 707
HHNGTNGTMMQYFEWYLPNDGNHWNRLNSDASNLKSKGITAVWIPPAWKGASQNDVGYGAYDLYDLGEFNQKGTVRTKYGTRSQLQAAVTSLKNNGIQVYGDVVMNHKGGADATEMVRAVEVNPNNRNQEVTGEYTIEAWTRFDFPGRGNTHSSFKWRWYHFDGVDWDQSRRLNNRIYKFRGHGKAWDWEVDTENGNYDYLMYADIDMDHPEVVNELRNWGVWYTNTLGLDGFRIDAVKHIKYSFTRDWINHVRSATGKNMFAVAEFWKNDLGAIENYLQKTNWNHSVFDVPLHYNLYNASKSGGNYDMRNIFNGTVVQRHPSHAVTFVDNHDSQPEEALESFVEEWFKPLAYALTLTREQGYPSVFYGDYYGIPTHGVPAMRSKIDPILEARQKYAYGKQNDYLDHHNIIGWTREGLTAHPNSGLATIMSDGAGGSKWMFVGRNKAGQVWSDITGNRTGTVTINADGWGNFSVNGGSVSIWVNK

SEQ ID NO: 23405 - protein, 485 aa, Bacillus subtilis
HHNGTNGTMMQYFEWYLPNDGNHWNRLRSDASNLKDKGISAVWIPPAFKGASQNDVGYGAYDLYDLGEFNQKGTIRTKYGTRNQLQAAVNALKSNGIQVYGDVVMNHKGGADATEMVRAVEVNPNNRNQEVSGEYTIEAWTKFDFPGRGNTHSNFKWRWYHFDGVDWDQSRKLNNRIYKFRGDGKGWDWEVDTENGNYDYLMYADIDMDHPEVVNELRNWGVWYTNTLGLDGFRIDAAKHIKYSFTRDWINHVRSATGKNMFAVAEFWKNDLGAIENYLNKTNWNHSVFDVPLHYNLYNASKSGGNYDMRQIFNGTVVQRHPMHAVTFVDNHDTQPEEALESFVEEWFKPLAYALTLTREQGYPSVFYGDYYGIPTHGVPAMKSKIDPILEARQKYAYGRQNDYLDHHNIIGWTREGNTAHPNSGLATIMSDGAGGNKWMFVGRNKAGQVWTDITGNRAGTVTINADGWGNFSVNGGSVSIWVNK

SEQ ID NO: 23406 - protein, 485 aa, Bacillus sp. 707
HHNGTNGTMMQYFEWYLPNDGNHWNRLNSDASNLKSKGITAVWIPPAWKGASQNDVGYGAYDLYDLGEFNQKGTVRTKYGTRSQLQAAVTSLKNNGIQVYGDVVMNHKGGADATEMVRAVEVNPNNRNQEVTGEYTIEAWTRFDFPGRGNTHSSFKWRWYHFDGVDWDQSRRLNNRIYKFRGHGKAWDWEVDTENGNYDYLMYADIDMDHPEVVNELRNWGVWYTNTLGLDGFRIDAVKHIKYSFTRDWINHVRSATGKNMFAVAEFWKNDLGAIENYLQKTNWNHSVFDVPLHYNLYNASKSGGNYDMRNIFNGTVVQRHPSHAVTFVDNHDSQPEEALESFVEEWFKPLAYALTLTRETGYPSVFYGDYYGIPTHGVPAMRSKIDPILEARQKYAYGKQNDYLDHHNIIGWTREGNTAHPNSGLATIMSDGAGGSKWMFVGRNKAGQVWSDITGNRTGTVTINADGWGNFSVNGGSVSIWVNK

SEQ ID NO: 23407 - protein, 485 aa, Bacillus sp. 707
HHNGTNGTMMQYFEWYLPNDGNHWNRLNSDASNLKSKGITAVWIPPAWKGASQNDVGYGAYDLYDLGEFNQKGTVRTKYGTRSQLQAAVTSLKNNGIQVYGDVVMNHKGGADATEMVRAVEVNPNNRNQEVTGEYTIEAWTRFDFPGRGNTHSSFKWRWYHFDGVDWDQSRRLNNRIYKFRGHGKAWDWEVDTENGNYDYLMYADIDMDHPEVVNELRNWGVWYTNTLGLDGFRIDAVKHIKYSFTRDWINHVRSATGKNMFAVAEFWKNDLGAIENYLQKTNWNHSVFDVPLHYNLYNASKSGGNYDMRNIFNGTVVQRHPSHAVTFVDNHDSQPEEALESFVEEWFKPLAYALTLTREQGYPSVFYGDYYGIPTHGVPAMRSKIDPILEARQKYAYGKQNDYLDHHNIIGWTREGNPAHPNSGLATIMSDGAGGSKWMFVGRNKAGQVWSDITGNRTGTVTINADGWGNFSVNGGSVSIWVNK

SEQ ID NO: 23408 - protein, 485 aa, Bacillus sp. 707
HHNGTNGTMMQYFEWYLPNDGNHWNRLNSDASNLKSKGITAVWIPPAWKGASQNDVGYGAYDLYDLGEFNQKGTVRTKYGTRSQLQAAVTSLKNDGIQVYGDVVMNHKGGADATEMVRAVEVNPNNRNQEVTGEYTIEAWTRFDFPGRGNTHSSFKWRWYHFDGVDWDQSRRLNNRIYKFRGHGKAWDWEVDTENGNYDYLMYADIDMDHPEVVNELRNWGVWYTNTLGLDGFRIDAVKHIKYSFTRDWINHVRSATGKNMFAVAEFWKNDLGAIENYLQKTNWNHSVFDVPLHYNLYNASKSGGNYDMRNIFNGTVVQRHPSHAVTFVDNHDSQPEEALESFVEEWFKPLAYALTLTREQGYPSVFYGDYYGIPTHGVPAMRSKIDPILEARQKYAYGKQNDYLDHHNIIGWTREGNTAHPNSGLATIMSDGAGGSKWMFVGRNKAGQVWSDITGNRTGTVTINADGWGNFSVNGGSVSIWVNK

SEQ ID NO: 23409 - protein, 483 aa, Bacillus sp.
HHNGTNGTLMQYFEWYLPNDGNHWNRLRSDASNLKDKGISAVWIPPAWKGASQNDVGYGAYDLYDLGEFNQKGTIRTKYGTRNQLQAAVNALKSNGIQVYGDVVMNHKGGADATEMVKAVEVNPNNRNQEVSGEYTIEAWTKFDFPGRGNTHSNFKWRWYHFDGVDWDQSRKLNNRIYKFRGKGWDWEVDTEFGNYDYLLYADIDMDHPEVTNELRNWGVWYTNTLGLDGFRIDAVKHIKYSFTRDWINHVRSATGKNMFAVAEFWKNDLGAIENYLNKTNWNHSVFDVPLHYNLYNASKSGGNYDMRQIFNGTVVQKHPTHAVTFVDNHDSQPEEALESFVNEWFKPLAYALTLTREQGYPSVFYGDYYGIPTHGVPAMKSKIDPILEARQKYAYGRQNDYLDHHNIIGWTREGNTAHPNSGLATIMSDGAGGNKWMFVGRNKAGQVWTDITGNKAGTVTINADGWGNFSVNGGSVSIWVNK

SEQ ID NO: 23410 - protein, 485 aa, Bacillus sp. 707
HHNGTNGTMMQYFEWYLPNDGNHWNRLNSDASNLKSKGITAVWIPPAWKGASQNDVGYGAYDLYDLGEFNQKGTVRTKYGTRSQLQAAVTSLKNNGIRVYGDVVMNHKGGADATEMVRAVEVNPNNRNQEVTGEYTIEAWTRFDFPGRGNTHSSFKWRWYHFDGVDWDQSRRLNNRIYKFRGHGKAWDWEVDTENGNYDYLMYADIDMDHPEVVNELRNWGVWYTNTLGLDGFRIDAVKHIKYSFTRDWINHVRSATGKNMFAVAEFWKNDLGAIENYLQKTNWNHSVFDVPLHYNLYNASKSGGNYDMRNIFNGTVVQRHPSHAVTFVDNHDSQPEEALESFVEEWFKPLAYALTLTREQGYPSVFYGDYYGIPTHGVPAMRSKIDPILEARQKYAYGKQNDYLDHHNIIGWTREGNTAHPNSGLATIMSDGAGGSKWMFVGRNKAGQVWSDITGNRTGTVTINADGWGNFSVNGGSVSIWVNK

SEQ ID NO: 23411 - protein, 485 aa, Bacillus sp. 707
HHNGTNGTMMQYFEWYLPNSGNHWNRLNSDASNLKSKGITAVWIPPAWKGASQNDVGYGAYDLYDLGEFNQKGTVRTKYGTRSQLQAAVTSLKNNGIQVYGDVVMNHKGGADATEMVRAVEVNPNNRNQEVTGEYTIEAWTRFDFPGRGNTHSSFKWRWYHFDGVDWDQSRRLNNRIYKFRGHGKAWDWEVDTENGNYDYLMYADIDMDHPEVVNELRNWGVWYTNTLGLDGFRIDAVKHIKYSFTRDWINHVRSATGKNMFAVAEFWKNDLGAIENYLQKTNWNHSVFDVPLHYNLYNASKSGGNYDMRNIFNGTVVQRHPSHAVTFVDNHDSQPEEALESFVEEWFKPLAYALTLTREQGYPSVFYGDYYGIPTHGVPAMRSKIDPILEARQKYAYGKQNDYLDHHNIIGWTREGNTAHPNSGLATIMSDGAGGSKWMFVGRNKAGQVWSDITGNRTGTVTINADGWGNFSVNGGSVSIWVNK

SEQ ID NO: 23412 - protein, 485 aa, Bacillus sp. 707
HHNGTNGTMMQYFEWYLPNDGNHWNRLNSDASNLKSKGITAVWIPPAWKGASQNDVGYGAYDLYDLGEFNQKGTVRTKYGTRSQLQAAVTSLKNNGIQVYGDVVMNHKGGADATEMVRAVEVNPNNRNQEVTGEYTIEAWTRFDFPGRGNTHSSFKWRWYHFDGVDWDQSRRLNERIYKFRGHGKAWDWEVDTENGNYDYLMYADIDMDHPEVVNELRNWGVWYTNTLGLDGFRIDAVKHIKYSFTRDWINHVRSATGKNMFAVAEFWKNDLGAIENYLQKTNWNHSVFDVPLHYNLYNASKSGGNYDMRNIFNGTVVQRHPSHAVTFVDNHDSQPEEALESFVEEWFKPLAYALTLTREQGYPSVFYGDYYGIPTHGVPAMRSKIDPILEARQKYAYGKQNDYLDHHNIIGWTREGNTAHPNSGLATIMSDGAGGSKWMFVGRNKAGQVWSDITGNRTGTVTINADGWGNFSVNGGSVSIWVNK

SEQ ID NO: 23413 - protein, 485 aa, Bacillus sp. 707
HHNGTNGTMMQYFEWYLPNDGNHWNRLNSDASNLKSKGITAVWIPPAWKGASQNDVGYGAYDLYDLGEFNQKGTVRTKYGTRSQLQAAVTSLKNNGIQVYGDVVMNHKGGADATEMVRAVEVNPNNRNQEVTGEYTIEAWTRFDFPGRGNTHSSFKWRWYHFDGVDWDQSRRLNNRIYKFRGHGKAWDWEVDTENGNYDYLMYADIDMDHPEVVNELRNWGVWYTNTLGLDGFRIDAVKHIKYSFTRDWINHVRSATGKNMFAVAEFWKNDLGAIENYLQKTNWNHSVFDVPLHYNLYNASKSGGNYDMRNIFNGTVVQRHPSHAVTFVDNHDSQPEEALESFVEEWFKPLAYALTLTREQGYPSVFYGDYYGIPTHGVPAMRSKIDPILEARQKYAYGKQNDYLDHHNIIGWTRGGNTAHPNSGLATIMSDGAGGSKWMFVGRNKAGQVWSDITGNRTGTVTINADGWGNFSVNGGSVSIWVNK

SEQ ID NO: 23414 - protein, 485 aa, Bacillus sp. 707
HHNGTNGTMMQYFEWYLPNDGNHWNRLNSDASNLKSKGITAVWIPPAWKGASQNDVGYGAYDLYDLGEFNQKGTVRTKYGTRSQLQAAVTSLKNNGIQVYGDVVMNHKGGADATEMVRAVEVNPNNRNQEVTGEYTIEAWTRFDFPGRGNTHSSFKWRWYHFDGVDWDQSRRLNNRIYKFRGHGKAWDWEVDTENGNYDYLMYADIDMDHPEVVNELRNWGVWYTNTLGLDGFRIDAVKHIKYSFTRDWINHVRSATGKNMFAVAEFWKNDLGAIENYLQKTNWNHSVFDVPLHYNLYNASKSGGNYDMRNIFNGTVVQRHPSHAVTFVDNHDSQPEEALESFVEEWFKPLAYALTLTREQGYPSVFYGDYYGIPTHGVPAMRSKIDPILEARQKYAYGKQNDYLDHHNIIGWTRFGNTAHPNSGLATIMSDGAGGSKWMFVGRNKAGQVWSDITGNRTGTVTINADGWGNFSVNGGSVSIWVNK

SEQ ID NO: 23415 - protein, 485 aa, Bacillus sp.
HHNGTNGTMMQYFEWYLPNDGNHWNRLRSDASNLKDKGISAVWIPPAWKGASQNDVGYGAYDLYDLGEFNQKGTIRTKYGTRNQLQAAVNALKSNGIQVYGDVVMNHKGGADATEMVRAVEVNPNNRNQEVSEEYTIEAWTKFDFPGRGNTHSNFKWRWYHFDGVDWDQSRKLNNRIYKFRGDGKGWDWEVDTENGNYDYLTYADIDMDHPEVVNELRNWGVWYTNTLGLDGFRIDAVKHIKYSFTRDWINHVRSATGKNMFAVAEFWKNDLGAIENYLNKTNWNHSVFDVPLHYNLYNASKSGGNYDMRQIFNGTVVQRHPMHAVTFVDNHDSQPEEALESFVEEWFKPLAYALTLTREEGYPSVFYGDYYGIPTHGVPAMKSKIDPILEARQKYAYGRQNDYLDHHNIIGWTREGNTAHPNSGLATIMSDGAGGNKWMFVGRNKAGQVWTDITGNRAGTVTINADGWGNFSVNGGSVSIWVNK

SEQ ID NO: 23416 - protein, 485 aa, Bacillus sp. 707
HHNGTNGTMMQYFEWYLPNDGNHWNRLNSDASNLKSKGITAVWIPPAWKGASQNDVGYGAYDLYDLGEFNQKGTVRTKYGTRSQLQAAVTSLKNNGIQVYGDVVMNHKGGADATEMVRAVEVNPNNRNQEVTGEYTIEAWTRFDFPGRGNTHSSFKWRWYHFDGVDWDQSRRLNNRIYKFRGHGKAWDWEVDTENGNYDYLMYADIDMDEPEVVNELRNWGVWYTNTLGLDGFRIDAVKHIKYSFTRDWINHVRSATGKNMFAVAEFWKNDLGAIENYLQKTNWNHSVFDVPLHYNLYNASKSGGNYDMRNIFNGTVVQRHPSHAVTFVDNHDSQPEEALESFVEEWFKPLAYALTLTREQGYPSVFYGDYYGIPTHGVPAMRSKIDPILEARQKYAYGKQNDYLDHHNIIGWTREGNTAHPNSGLATIMSDGAGGSKWMFVGRNKAGQVWSDITGNRTGTVTINADGWGNFSVNGGSVSIWVNK

SEQ ID NO: 23417 - protein, 485 aa, Bacillus sp. 707
HHNGTNGTMMQYFEWYLPNDGNHWNRLNSDASNLKSKGITAVWIPPAWKGASQNDVGYGAYDLYDLGEFNQKGTVRTKYGTRSQLQAAVTSLKNNGIQVYGDVVMNHKGGADATEMVRAVEVNPNNRNQEVTGEYTIEAWTRFDFPGRGNTHSSFKWRWYHFDGVDWDQSRRLNNRIYKFRGHGKAWDWEVDTENGNYDYLMYADIDMDHPEVVNELENWGVWYTNTLGLDGFRIDAVKHIKYSFTRDWINHVRSATGKNMFAVAEFWKNDLGAIENYLQKTNWNHSVFDVPLHYNLYNASKSGGNYDMRNIFNGTVVQRHPSHAVTFVDNHDSQPEEALESFVEEWFKPLAYALTLTREQGYPSVFYGDYYGIPTHGVPAMRSKIDPILEARQKYAYGKQNDYLDHHNIIGWTREGNTAHPNSGLATIMSDGAGGSKWMFVGRNKAGQVWSDITGNRTGTVTINADGWGNFSVNGGSVSIWVNK

SEQ ID NO: 23418 - protein, 485 aa, Bacillus sp. 707
HHNGTNGTMMQYFEWYLPNDGNHWNRLNSDASNLKSKGITAVWIPPAWKGASQNDVGYGAYDLYDLGEFNQKGTVRTKYGTRSQLQAAVTSLKNNGIQVYGDVVMNHKGGADATEMVRAVEVNPNNRNQEVTGEYTIEAWTRFYFPGRGNTHSSFKWRWYHFDGVDWDQSRRLNNRIYKFRGHGKAWDWEVDTENGNYDYLMYADIDMDHPEVVNELRNWGVWYTNTLGLDGFRIDAVKHIKYSFTRDWINHVRSATGKNMFAVAEFWKNDLGAIENYLQKTNWNHSVFDVPLHYNLYNASKSGGNYDMRNIFNGTVVQRHPSHAVTFVDNHDSQPEEALESFVEEWFKPLAYALTLTREQGYPSVFYGDYYGIPTHGVPAMRSKIDPILEARQKYAYGKQNDYLDHHNIIGWTREGNTAHPNSGLATIMSDGAGGSKWMFVGRNKAGQVWSDITGNRTGTVTINADGWGNFSVNGGSVSIWVNK

SEQ ID NO: 23419 - protein, 485 aa, Bacillus sp. 707
HHNGTNGTMMQYFEWYLPNDGNHWNRLNSDASNLKSKGITAVWIPPAWKGASQNDVGYGAYDLYDLGEFNQKGTVRTKYGTRSQLQAAVTSLKNNGIQVYGDVVMNHKGGADATEMVRAVEVNPNNRNQEVTGEYTIEAWTRFDFPGRGNTHSSFKWRWYHFDGVDWDQSRRLNNRIYKFRGHGKAWDWEVDTENGNYDYLMYADIDMDHPEVVNELRNWGVWYTNTLGLDGFRIDAVKHIKYSFTRDWINHVRSATGDNMFAVAEFWKNDLGAIENYLQKTNWNHSVFDVPLHYNLYNASKSGGNYDMRNIFNGTVVQRHPSHAVTFVDNHDSQPEEALESFVEEWFKPLAYALTLTREQGYPSVFYGDYYGIPTHGVPAMRSKIDPILEARQKYAYGKQNDYLDHHNIIGWTREGNTAHPNSGLATIMSDGAGGSKWMFVGRNKAGQVWSDITGNRTGTVTINADGWGNFSVNGGSVSIWVNK

SEQ ID NO: 23420 - protein, 485 aa, Bacillus sp. 707
HHNGTNGTMMQYFEWYLPNDGNHWNRLNSDASNLKSKGITAVWIPPAWKGASQNDVGYGAYDLYDLGEFNQKGTVRTKYGTRSQLQAAVTSLKNNGIQVYGDVVMNHKGGADATEMVRAVEVNPNNRNQEVTGEYTIEAWTRFDFPGRGNTHSSFKWRWYHFDGVDWDQSRRLNNRIYKFRGHGKAWDWEVDTENGNYDYLMYADIDMDHPEVVNELRNWGVWYTNTLGLDGFRIDAVKHIKYSFTRDWINHVRSATGKNMFAVAEFWKNDLGAIENYLQKTNWNHSVFDVPLHYNLYNASKSGGNYDMRNIFNGTVVQRHPSHAVTFVDNHDSQPEEALESFVEEWFKPLAYALTLTREQGYPSVFYGDYYGIPTHGVPAMRSKIDPILEARQKYAYGKQNDYLDHHNIIGWTREGNTAHENSGLATIMSDGAGGSKWMFVGRNKAGQVWSDITGNRTGTVTINADGWGNFSVNGGSVSIWVNK

SEQ ID NO: 23421 - protein, 485 aa, Bacillus sp. 707
HHNGTNGTMMQYFEWYLPNDGNHWNRLNSDASNLKSKGITAVWIPPAWKGASQNDVGYGAYDLYDLGEFNQKGTVRTKYGTRSQLQAAVTSLKNNGIQVYGDVVMNHKGGADATEMVRAVEVNPNNRNQEVTGEYTIEAWTRFDFPGRGNTHSSFKWRWYHFDGVDWDQSRRLNNRIYKFRGHGKAWDWEVDTENGNYDYLMYADIDMDHPEVVNELRNWGVWYTNTLGLDGFRIDAVKHIKYSFTRDWINHVRSATGKNMFAVAEFWKNDLGAIENYLQKTNWNHSVFDVPLHYNLYNASKSGGNYDMRNIFNGTVVQRHPSHAVTFVDNHDSQPEEALESFVEEWFKPLAYALTLTREQGYPSVFYGDYYGIPTHGIPAMRSKIDPILEARQKYAYGKQNDYLDHHNIIGWTREGNTAHPNSGLATIMSDGAGGSKWMFVGRNKAGQVWSDITGNRTGTVTINADGWGNFSVNGGSVSIWVNK

SEQ ID NO: 23422 - protein, 485 aa, Bacillus sp. 707
HHNGTNGTMMQYFEWYLPNDGNHWNRLNSDASNLKSKGITAVWIPPAWKGASQNDVGYGAYDLYDLGEFNQKGTVRTKYGTRSQLQAAVTSLKNNGIQVYGDVVMNHKGGADATEMVRAVEVNPNNRNQEVTGEYTIEAWTRFDFPGRGNTHSSFKWRWYHFDGVDWDQSRRLNNRIYKFRGHGKAWDWEVDTENGNYDYLMYADIDMDHPEVVNELRNWGVWYTNTLGLDGFRIDAVKHIKYSFTRDWINHVRSATGKNMFAVAEFWKNDLGAIENYLQKTNWNHSVFDVPLHYNLYNASKSGGNYDMRNIFNGTVVQRHPSHAVTFVDNHDSQPEEALESFVEEWFKPLAYALTLTREQGKPSVFYGDYYGIPTHGVPAMRSKIDPILEARQKYAYGKQNDYLDHHNIIGWTREGNTAHPNSGLATIMSDGAGGSKWMFVGRNKAGQVWSDITGNRTGTVTINADGWGNFSVNGGSVSIWVNK

SEQ ID NO: 23423 - protein, 485 aa, Bacillus sp. 707
HHNGTNGTMMQYFEWYLPNDGNHWNRLNSDASNLKSKGITAVWIPPAWKGASQNDVGYGAYDLYDLGEFNQKMTVRTKYGTRSQLQAAVTSLKNNGIQVYGDVVMNHKGGADATEMVRAVEVNPNNRNQEVTGEYTIEAWTRFDFPGRGNTHSSFKWRWYHFDGVDWDQSRRLNNRIYKFRGHGKAWDWEVDTENGNYDYLMYADIDMDHPEVVNELRNWGVWYTNTLGLDGFRIDAVKHIKYSFTRDWINHVRSATGKNMFAVAEFWKNDLGAIENYLQKTNWNHSVFDVPLHYNLYNASKSGGNYDMRNIFNGTVVQRHPSHAVTFVDNHDSQPEEALESFVEEWFKPLAYALTLTREQGYPSVFYGDYYGIPTHGVPAMRSKIDPILEARQKYAYGKQNDYLDHHNIIGWTREGNTAHPNSGLATIMSDGAGGSKWMFVGRNKAGQVWSDITGNRTGTVTINADGWGNFSVNGGSVSIWVNK

SEQ ID NO: 23424 - protein, 485 aa, Bacillus sp. 707
HHNGTNGTMMQYFEWYLPNDGNHWNRLNSDASNLKSKGITAVWIPPAWKGASQNDVGYGAYDLYDLGEFNQKGTVRTKYGTRSQLQAAVTSLKNNGIQVYGDVVMNHKGGADYTEMVRAVEVNPNNRNQEVTGEYTIEAWTRFDFPGRGNTHSSFKWRWYHFDGVDWDQSRRLNNRIYKFRGHGKAWDWEVDTENGNYDYLMYADIDMDHPEVVNELRNWGVWYTNTLGLDGFRIDAVKHIKYSFTRDWINHVRSATGKNMFAVAEFWKNDLGAIENYLQKTNWNHSVFDVPLHYNLYNASKSGGNYDMRNIFNGTVVQRHPSHAVTFVDNHDSQPEEALESFVEEWFKPLAYALTLTREQGYPSVFYGDYYGIPTHGVPAMRSKIDPILEARQKYAYGKQNDYLDHHNIIGWTREGNTAHPNSGLATIMSDGAGGSKWMFVGRNKAGQVWSDITGNRTGTVTINADGWGNFSVNGGSVSIWVNK

SEQ ID NO: 23425 - protein, 485 aa, Bacillus sp. 707
HHNGTNGTMMQYFEWYLPNDGNHWNRLNSDASNLKSKGITAVWIPPAWKGASQNDVGYGAYDLYDLGEFNQKGTVRTKYGTRSQLQAAVTSLKNNGIQVYGDVVMNHKGGADATEMVRAVEVNPNNRNQEVTGEYTIEAWTRFDFPGRGNTHSSFKWRWYHFDGVDWDQSRRLNNRIYKFRGHGKAWDWEVDTENGNYDYLMYADIDMDHPEVVNELRNWGVWYTNTLGLDGFRIDAVKHIKYSFTRDWINHVRSATGKNMFAVAEFWKNDLGAIENYLQKTNWNNSVFDVPLHYNLYNASKSGGNYDMRNIFNGTVVQRHPSHAVTFVDNHDSQPEEALESFVEEWFKPLAYALTLTREQGYPSVFYGDYYGIPTHGVPAMRSKIDPILEARQKYAYGKQNDYLDHHNIIGWTREGNTAHPNSGLATIMSDGAGGSKWMFVGRNKAGQVWSDITGNRTGTVTINADGWGNFSVNGGSVSIWVNK

SEQ ID NO: 23426 - protein, 485 aa, Bacillus sp. 707
HHNGTNGTMMQYFEWYLPNDGNHWNRLNSDASNLKSKGITAVWIPPAWKGASQNDVGYGAYDLYDLGEFNQKGTVRTKYGTRSQLQAAVTSLKNNGIQVYGDVVMNHKGGADATEMVRAVEVNPNNRNQEVTGEYTIEAWTRFDFPGRGNTHSSFKWRWYHFDGVDWDQSRRLNNRIYKFRGHGKAWDWEVDTENGNYDYLSYADIDMDHPEVVNELRNWGVWYTNTLGLDGFRIDAVKHIKYSFTRDWINHVRSATGKNMFAVAEFWKNDLGAIENYLQKTNWNHSVFDVPLHYNLYNASKSGGNYDMRNIFNGTVVQRHPSHAVTFVDNHDSQPEEALESFVEEWFKPLAYALTLTREQGYPSVFYGDYYGIPTHGVPAMRSKIDPILEARQKYAYGKQNDYLDHHNIIGWTREGNTAHPNSGLATIMSDGAGGSKWMFVGRNKAGQVWSDITGNRTGTVTINADGWGNFSVNGGSVSIWVNK

SEQ ID NO: 23427 - protein, 485 aa, Bacillus sp. 707
HHNGTNGTMMQYFEWYLPNDGNHWNRLNSDASNLKSKGITAVWIPPAWKGASQNDVGYGAYDLYDLGEFNQKGTVRTKYGDRSQLQAAVTSLKNNGIQVYGDVVMNHKGGADATEMVRAVEVNPNNRNQEVTGEYTIEAWTRFDFPGRGNTHSSFKWRWYHFDGVDWDQSRRLNNRIYKFRGHGKAWDWEVDTENGNYDYLMYADIDMDHPEVVNELRNWGVWYTNTLGLDGFRIDAVKHIKYSFTRDWINHVRSATGKNMFAVAEFWKNDLGAIENYLQKTNWNHSVFDVPLHYNLYNASKSGGNYDMRNIFNGTVVQRHPSHAVTFVDNHDSQPEEALESFVEEWFKPLAYALTLTREQGYPSVFYGDYYGIPTHGVPAMRSKIDPILEARQKYAYGKQNDYLDHHNIIGWTREGNTAHPNSGLATIMSDGAGGSKWMFVGRNKAGQVWSDITGNRTGTVTINADGWGNFSVNGGSVSIWVNK

SEQ ID NO: 23428 - protein, 485 aa, Bacillus sp. 707
HHNGTNGTMMQYFEWYLPNDGNHWNRLNSDASNLKSKGITAVWIPPAWKGASQNDVGYGAYDLYDLGEFNQKGTVRTKYGTRSQLQAAVTSLKNNGIQVYGDVVMNHKGGADATEMVRAVEVNPNNRNQEVTGEYTIEAWTRFDFPGRGNDHSSFKWRWYHFDGVDWDQSRRLNNRIYKFRGHGKAWDWEVDTENGNYDYLMYADIDMDHPEVVNELRNWGVWYTNTLGLDGFRIDAVKHIKYSFTRDWINHVRSATGKNMFAVAEFWKNDLGAIENYLQKTNWNHSVFDVPLHYNLYNASKSGGNYDMRNIFNGTVVQRHPSHAVTFVDNHDSQPEEALESFVEEWFKPLAYALTLTREQGYPSVFYGDYYGIPTHGVPAMRSKIDPILEARQKYAYGKQNDYLDHHNIIGWTREGNTAHPNSGLATIMSDGAGGSKWMFVGRNKAGQVWSDITGNRTGTVTINADGWGNFSVNGGSVSIWVNK

SEQ ID NO: 23429 - protein, 485 aa, Bacillus sp. 707
HHNGTNGTMMQYFEWYLPNDGNHWNRLNSDASNLKSKGITAVWIPPAWKGASQNDVGYGAYDLYDLGEFNQKGTVRTKYGTRSQLQAAVTSLKNNGIQVYGDVVMNHKGGADATEMVRAVEVNPNNRNQEVTGEYTIEAWTRFDFPGRGNTHSSFKWRWYHFDGVDWDQSRRLNNRIYKFRGHGKAWDWEVDTENGNYDYLMYADIDMDHPEVVNELRNWGVWYTNTLGLDGFRIDAVKHIKYSFTRDWINHVRSATGKNMFAVAEFWKNDLGAIENYLQKTNWNHSVFDVPLHYNLYNASKSGGNYDMRNIFNGTVVQRHPSHAVTFVDNHDSQPEEALESFVEEWFKPLAYALTLTREQGYPSVFYGDYYGIPTHGVPAMRSKIDPILEARQKYAYGKQNDYLDHHNIIGWTREGQTAHPNSGLATIMSDGAGGSKWMFVGRNKAGQVWSDITGNRTGTVTINADGWGNFSVNGGSVSIWVNK

SEQ ID NO: 23430 - protein, 485 aa, Bacillus sp. 707
HHNGTNGTMMQYFEWYLPNDGNHWNRLNSDASNLKSKGITAVWIPPAWKGASQNDVGYGAYDLYDLGEFNQKGTVRTKYGTRSQLQAAVTSLKNNGIQVYGDVVMNHKGGADATEMVRAVEVNPNNRNQEVTGEYTIEAWTRFDFPGRGNTHSSFKWRWYHFDGVDWDQSRRLNNRIYKFQGHGKAWDWEVDTENGNYDYLMYADIDMDHPEVVNELRNWGVWYTNTLGLDGFRIDAVKHIKYSFTRDWINHVRSATGKNMFAVAEFWKNDLGAIENYLQKTNWNHSVFDVPLHYNLYNASKSGGNYDMRNIFNGTVVQRHPSHAVTFVDNHDSQPEEALESFVEEWFKPLAYALTLTREQGYPSVFYGDYYGIPTHGVPAMRSKIDPILEARQKYAYGKQNDYLDHHNIIGWTREGNTAHPNSGLATIMSDGAGGSKWMFVGRNKAGQVWSDITGNRTGTVTINADGWGNFSVNGGSVSIWVNK

SEQ ID NO: 23431 - protein, 485 aa, Bacillus subtilis
HHNGTNGTMMQYFEWYLPNDGNHWNRLRSNASDLKDVGISAVWIPPAWKGASQNDVGYGAYDLYDLGEFNQKGTIRTKYGTRNQLQAAVNALKSNGIQVYGDVVMNHKGGADATEMVRAVEVNPNNRNQEVSGEYTIEAWTKFDFPGRGNTHSNFKWRWYHFDGVDWDQSRKLNNRIYKFRGDGKGWDWEVDTENGNYDYLMYADIDMDHPEVVNELRNWGVWYTNTLGLDGFRIDAVKHIKYSFTRDWINHVRSATGKNMFAVAEFWKNDLGAIENYLNKTNWNHSVFDVPLHYNLYNASKSGGNYDMRQIFNGTVVQRHPMHAVTFVDNHDSQPEEALESFVEEWFKPLAYALTLTREQGYPSVFYGDYYGIPTHGVPAMRSKIDPILEARQKYAYGRQNDYLDHHNIIGWTREGNTAHPNSGLATIMSDGAGGNKWMFVGRNKAGQVWTDITGNRAGTVTINADGWGNFSVNGGSVSIWVNK

SEQ ID NO: 23432 - protein, 485 aa, Bacillus sp. 707
HHNGTNGTMMQYFEWYLPNDGNHWNRLNSDASNLKSKGITAVWIPPAWKGASQNDVGYGAYDLYDLGEFNQKGTVRTKYGTRSQLQAAVTSLKNNGIQVYGDVVMNHKGGADATEMVRAVEVNPNNRNQEVTGEYTIEAWTRFDFPGRGNTHSSFKWRWYHFDGVDWDQSRRLNNRIYKFRGHGKAWDWEVDTENGNYDYLMYADIDMDHPEVVNELFNWGVWYTNTLGLDGFRIDAVKHIKYSFTRDWINHVRSATGKNMFAVAEFWKNDLGAIENYLQKTNWNHSVFDVPLHYNLYNASKSGGNYDMRNIFNGTVVQRHPSHAVTFVDNHDSQPEEALESFVEEWFKPLAYALTLTREQGYPSVFYGDYYGIPTHGVPAMRSKIDPILEARQKYAYGKQNDYLDHHNIIGWTREGNTAHPNSGLATIMSDGAGGSKWMFVGRNKAGQVWSDITGNRTGTVTINADGWGNFSVNGGSVSIWVNK

SEQ ID NO: 23433 - protein, 485 aa, Bacillus sp. 707
HHNGTNGTMMQYFEWYLPNDGNHWNRLNSDASNLKSKGITAVWIPPAWKGASQNDVGYGAYDLYDLGEFNQKGTVRTKYGTRSQLQAAVTSLKNNGIQVYGDVVMNHKGGADATEMVRAVEVNPNNRNQEVTGEYTIEAWTRFDFPGRGNTHSSFKWRWYHFDGVDWDQSRRLNNRIYKFRGHGKAWDWEVDTENGNYDYLMYADIDMDHPEVVNELRNWGVWYTNTLGLDGFRIDAVKHIKYSFTRDWINHVRSATGHNMFAVAEFWKNDLGAIENYLQKTNWNHSVFDVPLHYNLYNASKSGGNYDMRNIFNGTVVQRHPSHAVTFVDNHDSQPEEALESFVEEWFKPLAYALTLTREQGYPSVFYGDYYGIPTHGVPAMRSKIDPILEARQKYAYGKQNDYLDHHNIIGWTREGNTAHPNSGLATIMSDGAGGSKWMFVGRNKAGQVWSDITGNRTGTVTINADGWGNFSVNGGSVSIWVNK

SEQ ID NO: 23434 - protein, 485 aa, Bacillus sp. 707
HHNGTNGTMMQYFEWYLPNDGNHWNRLNSDASNLKSKGITAVWIPPAWKGASQNDVGYGAYDLYDLGEFNQKGTVRTKYGTRSQLQAAVTSLKNNGIQVYGDVVMNHKGGADATEMVRAVEVNPNNRNQEVTGEYTIEAWTRFDFPGRGNTHSSFKWRWYHFDGVDWDQSRRLNNRIYKFRGHGKAWDWEVDTENGNYDYLMYADIDMDHPEVVNELRNWGVWYTNTLGLDGFRIDAVKHIKYSFTRDWINHVRSATGKNMFAVAEFWKNDLGAIENYLQKTNWNHSVFDVPLHYNLYNASKSGGNYDMRNIFNGTVVQRHPSHAVTFVDNHDSQPEEALESFVEEWFKPLAYALTLTREQGYPSVFYGDYYGIPTHGVPAMRSKIDPILEARQKYAYGKQNDYLDHHNIIGWTREGNTAHPNSGLATIMSDGAGGSKWMFVGRNKAGQVWSDITGNRTGTVTINADGWGHFSVNGGSVSIWVNK

SEQ ID NO: 23435 - protein, 485 aa, Bacillus sp. 707
HHNGTNGTMMQYFEWYLPNDGNHWNRLNSDASNLKSKGITAVWIPPAWKGASQNDVGYGAYDLYDLGEFNQKGTVRTKYGTRSQLQAAVTSLKNNGIQVYGDVVMNHKGGADATEMVRAVEVNPNNRNQEVTGEYTIEAWTRFDFPGRGNTHSSFKWRWYHFDGVDWDQSRRLNNRIYKFRGHGKAWDWEVDTENGNYDYLMYADIDMDHPEVVNELHNWGVWYTNTLGLDGFRIDAVKHIKYSFTRDWINHVRSATGKNMFAVAEFWKNDLGAIENYLQKTNWNHSVFDVPLHYNLYNASKSGGNYDMRNIFNGTVVQRHPSHAVTFVDNHDSQPEEALESFVEEWFKPLAYALTLTREQGYPSVFYGDYYGIPTHGVPAMRSKIDPILEARQKYAYGKQNDYLDHHNIIGWTREGNTAHPNSGLATIMSDGAGGSKWMFVGRNKAGQVWSDITGNRTGTVTINADGWGNFSVNGGSVSIWVNK

SEQ ID NO: 23436 - protein, 485 aa, Bacillus sp. 707
HHNGTNGTMMQYFEWYLPNDGNHWNRLNSDACNLKSKGITAVWIPPAWKGASQNDVGYGAYDLYDLGEFNQKGTVRTKYGTRSQLQAAVTSLKNNGIQVYGDVVMNHKGGADATEMVRAVEVNPNNRNQEVTGEYTIEAWTRFDFPGRGNTHSSFKWRWYHFDGVDWDQSRRLNNRIYKFRGHGKAWDWEVDTENGNYDYLMYADIDMDHPEVVNELRNWGVWYTNTLGLDGFRIDAVKHIKYSFTRDWINHVRSATGKNMFAVAEFWKNDLGAIENYLQKTNWNHSVFDVPLHYNLYNASKSGGNYDMRNIFNGTVVQRHPSHAVTFVDNHDSQPEEALESFVEEWFKPLAYALTLTREQGYPSVFYGDYYGIPTHGVPAMRSKIDPILEARQKYAYGKQNDYLDHHNIIGWTREGNTAHPNSGLATIMSDGAGGSKWMFVGRNKAGQVWSDITGNRTGTVTINADGWGNFSVNGGSVSIWVNK

SEQ ID NO: 23437 - protein, 485 aa, Bacillus sp. 707
HHNGTNGTMMQYFEWYLPNDGNHWNRLNSDASNLKSKGITAVWIPPAWKGASQNDVGYGAYDLYDLGEFNQKGTVRTKYGTRSQLQAAVTSLKNNGIQVYGDVVMNHKGGADATEMVRAVEVNPNNRNQEVTGEYTIEAWTRFDFCGRGNTHSSFKWRWYHFDGVDWDQSRRLNNRIYKFRGHGKAWDWEVDTENGNYDYLMYADIDMDHPEVVNELRNWGVWYTNTLGLDGFRIDAVKHIKYSFTRDWINHVRSATGKNMFAVAEFWKNDLGAIENYLQKTNWNHSVFDVPLHYNLYNASKSGGNYDMRNIFNGTVVQRHPSHAVTFVDNHDSQPEEALESFVEEWFKPLAYALTLTREQGYPSVFYGDYYGIPTHGVPAMRSKIDPILEARQKYAYGKQNDYLDHHNIIGWTREGNTAHPNSGLATIMSDGAGGSKWMFVGRNKAGQVWSDITGNRTGTVTINADGWGNFSVNGGSVSIWVNK

SEQ ID NO: 23438 - protein, 485 aa, Bacillus sp. 707
HHNGTNGTMMQYFEWYLPNDGNHWNRLNSDASNLKSKGITAVWIPPAWKGASQNDVGYGAYDLYDLGEFNQKGTVRTKYGTRSQLQAAVTSLKNNGIQVYGDVVMNHKGGADATEMVRAVEVNPNNRNQEVTGEYTIEAWTRFDFPGRGNTHSSFKWRWYHFDGVDWDQSRRLNNRIYKFRGHGKAWDWEVDTENGNYDYLMYADIDMDHPEVVNELRNWGVWYTNTLGLDGFRIDAVKHIKYSFTRDWINHVRSATGKNMFAVAEFWKNDLGAIENYLQKTNWNHSVFDVPLHYNLYNASKSGGNYDMRNIFNGTVVQRHPSHAVTFVDNHDSQPEEALESFVEEWFKPLAYALTLTREQGYPSVFYGDYYGIKTHGVPAMRSKIDPILEARQKYAYGKQNDYLDHHNIIGWTREGNTAHPNSGLATIMSDGAGGSKWMFVGRNKAGQVWSDITGNRTGTVTINADGWGNFSVNGGSVSIWVNK

SEQ ID NO: 23439 - protein, 485 aa, Bacillus sp. 707
HHNGTNGTMMQYFEWYLPNDGNHWNRLNSDASNLKSKGITAVWIPPAWKGASQNDVGYGAYDLYDLGEFNQKGTVRTKYGTRSQLQAAVTSLKNNGIQVYGDVVMNHKGGADATEMVRAVEVNPNNRNQEVTGEYTIEAWTRFDFPGRGNTHSSFKWRWYHFDGVDWDQSRRLNNRIYKFRGHGKAWDWEVDTENGNYDYLMYADIDMDHPEVVNELRNWGVWYTNTLGLDGFRIDAVKHIKYSFTRDWINHVRSATGKNMFAVAEFWKNDLGAIENYLQKTNWNHSVFDVPLHYNLYNASKSGGNYDMRNIFNGTVVQRHPSHAVTFVDNHDSQPEEALESFVEEWFKPLAYALTLTREQGYPSVFYGDYYGIPTHGVPAMRSKIDPVLEARQKYAYGKQNDYLDHHNIIGWTREGNTAHPNSGLATIMSDGAGGSKWMFVGRNKAGQVWSDITGNRTGTVTINADGWGNFSVNGGSVSIWVNK

SEQ ID NO: 23440 - protein, 485 aa, Bacillus sp. 707
HSNGTNGTMMQYFEWYLPNDGNHWNRLNSDASNLKSKGITAVWIPPAWKGASQNDVGYGAYDLYDLGEFNQKGTVRTKYGTRSQLQAAVTSLKNNGIQVYGDVVMNHKGGADATEMVRAVEVNPNNRNQEVTGEYTIEAWTRFDFPGRGNTHSSFKWRWYHFDGVDWDQSRRLNNRIYKFRGHGKAWDWEVDTENGNYDYLMYADIDMDHPEVVNELRNWGVWYTNTLGLDGFRIDAVKHIKYSFTRDWINHVRSATGKNMFAVAEFWKNDLGAIENYLQKTNWNHSVFDVPLHYNLYNASKSGGNYDMRNIFNGTVVQRHPSHAVTFVDNHDSQPEEALESFVEEWFKPLAYALTLTREQGYPSVFYGDYYGIPTHGVPAMRSKIDPILEARQKYAYGKQNDYLDHHNIIGWTREGNTAHPNSGLATIMSDGAGGSKWMFVGRNKAGQVWSDITGNRTGTVTINADGWGNFSVNGGSVSIWVNK

SEQ ID NO: 23441 - protein, 485 aa, Bacillus sp. 707
HHNGTNGTMMQYFEWYLPNDGNHWNRLNSDASNLKSKGITAVWIPPAWKGASQNDVGYGAYDLYDLGEFNQKGTVRTKYGTRSQLQAAVTSLKNNGIQVYGDVVMNHKGGADATEMVRAVEVNPNNRNQEVTGEYTIEAWTRFDFPGRGNTHSSFKWRWYHFDGVDWDESRRLNNRIYKFRGHGKAWDWEVDTENGNYDYLMYADIDMDHPEVVNELRNWGVWYTNTLGLDGFRIDAVKHIKYSFTRDWINHVRSATGKNMFAVAEFWKNDLGAIENYLQKTNWNHSVFDVPLHYNLYNASKSGGNYDMRNIFNGTVVQRHPSHAVTFVDNHDSQPEEALESFVEEWFKPLAYALTLTREQGYPSVFYGDYYGIPTHGVPAMRSKIDPILEARQKYAYGKQNDYLDHHNIIGWTREGNTAHPNSGLATIMSDGAGGSKWMFVGRNKAGQVWSDITGNRTGTVTINADGWGNFSVNGGSVSIWVNK

SEQ ID NO: 23442 - protein, 485 aa, Bacillus sp. 707
HHNGTNGTMMQYFEWYLPNDGNHWNRLNSDASNLKSKGITAVWIPPAWKGASQNDVGYGAYDLYDLGEFNQKGTVRTKYGTRSQLQAAVTSLKNNGIQVYGDVVMNHKGGADATEMVRAVEVNPNNRNQEVTGEYTIEAWTRFDFPGRGNTHSSFKWRWYHFDGVDWDQSRRLNNRIYKFRGHGKAWDWEVDTENGNYDYLMYADIDMDHPEVVNELRNWGVWYTNTLGLDGFRIDAVKHIKYSFTRDWINHVRSATGKNMFAVAEFWKNDLGAIENYLQKTNWNESVFDVPLHYNLYNASKSGGNYDMRNIFNGTVVQRHPSHAVTFVDNHDSQPEEALESFVEEWFKPLAYALTLTREQGYPSVFYGDYYGIPTHGVPAMRSKIDPILEARQKYAYGKQNDYLDHHNIIGWTREGNTAHPNSGLATIMSDGAGGSKWMFVGRNKAGQVWSDITGNRTGTVTINADGWGNFSVNGGSVSIWVNK

SEQ ID NO: 23443 - protein, 485 aa, Bacillus sp. 707
HHNGTNGTMMQYFEWYLPNDGNHWNRLNSDASNLKSKGITAVWIPPAWKGASQNDVGYGAYDLYDLGEFNQKGTVRTKYGTRSQLQAAVTSLKNNGIQVYGDVVMNHKGGADATEMVRAVEVNPNNRNQEVTGEYTIEAWTRFDFPGRGNTHSSFKWRWYHFDGVDWDQSRRLNNRIYKFRGHGKAWDWEVDTENGNYDYLMYADIDMDHPEVVNELRNWGVWYTNTLGLDGFRIDAVKHIKYSFTRDWINHVRSATGKNMFAVAEFWKNDLGAIENYLQKTNWNHSVFDVPLHYNLYNASKSGGNYDMRNIFNGTVVQRHPSHAVTFVDNHDSQPEEALESFVEEWFKPLAYALTLTREQGYPSVFYGDYYGIPTHGVPAMRSKIDPILEARQKYAYGKQNDYLDHHNIIGWTREGNTAHPHSGLATIMSDGAGGSKWMFVGRNKAGQVWSDITGNRTGTVTINADGWGNFSVNGGSVSIWVNK

SEQ ID NO: 23444 - protein, 484 aa, Synthetic construct
HHNGTNGTMMQYFEWYLPNDGNHWNRLNSDASNLKSKGITAVWIPPAWKGASQNDVGYGAYDLYDLGEFNQKGTVRTKYGTRSQLQAAVTSLKNNGIQVYGDVVMNHKAGADATEWVDAVEVNPSNRNQEVSGTYKIQAWTKFDFPGRGNTYSSFKWRWYHFDGTDWDQSRQLNRIYKFRGTGKAWDWEVDTENGNYDYLMFADLDMDHPEVVNELRNWGVWYTNTLGLDGFRIDAVKHIKYSFTRDWINHVRSATGKNMFAVAEFWKNDLGAIENYLQKTNWNHSVFDVPLHYNLYNASKSGGNYDMRNIFNGTVVQRHPSHAVTFVDNHDSQPEEALESFVEEWFKPLAYALTLTREQGYPSVFYGDYYGIPTHGVPAMRSKIDPILEARQKYAYGKQNDYLDHHNIIGWTREGNTAHPNSGLATIMSDGAGGSKWMFVGRNKAGQVWSDITGNRTGTVTINADGWGNFSVNGGSVSIWVNK

SEQ ID NO: 23445 - protein, 484 aa, Bacillus sp. 707
HHNGTNGTMMQYFEWYLPNDGNHWNRLNSDASNLKSKGITAVWIPPAWKGTSQNDVGYGAYDLYDLGEFNQKGTVRTKYGTRSQLQAAVTSLKNNGIQVYGDVVMNHKGGADATEMVRAVEVNPNNRNQEVTGEYTIEAWTRFDFPGRGNTHSSFKWRWYHFDGVDWDQSRRLNNRIYKFRGHGKAWDWEVDTENGNYDYLMYADIDMDHPEVVNELRNWGVWYTNTLGLDGFRIDAVKHIKYSFIRDWINHVRSATGKNMFAVAEFWKNDLGAIENYLQKTNWNHSVFDVPLHYNLYNASKSGGNYDMRNIFNGTVVQRHPSHAVTFVDNHDTQPEEALESFVEEWFKPLAYALTLTREQGYPSVFYGDYYGIPTHGVPAMRSKIDPILEARQKYAYGKQNDYLDHHNIGWTREGNTAHPNSGLATIMSDGAGGSKWMFVGRNKAGQVWSDITGNRTGTVTINADGWGNFSVNGGSVSIWVNK

SEQ ID NO: 23446 - protein, 484 aa, Bacillus sp. 707
HHNGTNGTMMQYFEWYLPNDGNHWNRLNSDASNLKSKGITAVWIPPAWKGASQNDVGYGAYDLYDLGEFNQKGTVRTKYGTRSQLQAAVTSLKNNGIQVYGDVVMNHKGGADATEMVRAVEVNPNNRNQEVTGEYTIEAWTRFDFPGRGNTHSSFKWRWYHFDGVDWDQSRRLNNRIYKFRGHGKDWDWEVDTENGNYDYLMYADIDMDHPEVVNELRNWGVWYTNTLGLDGFRIDAVKHIKYSFTRDWINHVRSATGKNMFAVAEFWKNDLGAIENYLQKTNWNHSVFDVPLHYNLYNASKSGGNYDMRNIFNGTVVQRHPSHAVTFVDNHDSQPEEALESFVEEWFKPLAYALTLTREQGYPSVFYGDYYGIPTHGVPAMRSKIDPILEARQKYAYGKQNDYLDHHNIGWTREGNTAHPNSGLATIMSDGAGGSKWMFVGRNKAGQVWSDITGNRTGTVTINADGWGNFSVNGGSVSIWVNK

SEQ ID NO: 23447 - protein, 484 aa, Bacillus sp. 707
HHNGTNGTMMQYFEWYLPNDGNHWNRLNSDASNLKSKGITAVWIPPAWKGASQNDVGYGAYDLYDLGEFNQKGTVRTKYGTRSQLQAAVTSLKNNGIQVYGDVVMNHKGGADATEMVRAVEVNPNNRNQEVTGEYTIEAWTRFDFPGRGNTHSSFKWRWYHFDGVDWDQSRRLNNRIYKFRGHGKAWDWEVDTENGNYDYLMYADIDMDHPEVVNELRNWGVWYTNTLGLDGFRIDAVKHIKYSFVRDWINHVRSATGKNMFAVAEFWKNDLGAIENYLQKTNWNHSVFDVPLHYNLYNASKSGGNYDMRNIFNGTVVQRHPSHAVTFVDNHDSQPEEALESFVEEWFKPLAYALTLTREQGYPSVFYGDYYGIPTHGVPAMRSKIDPILEARQKYAYGKQNDYLDHHNIGWTREGNTAHPNSGLATIMSDGAGGSKWMFVGRNKAGQVWSDITGNRTGTVTINADGWGNFSVNGGSVSIWVNK

SEQ ID NO: 23448 - protein, 483 aa, Synthetic construct
HHNGTNGTMMQYFEWYLPNDGNHWHRLRSDASNLKDKGITAVWIPPAWKGASQNDVGYGAYDLYDLGEFNQKGTVRTKYGTRNQLQAAVTALKSNGIQVWGDVVMNHKGGADATEWVRAVEVNPSNRNQEVSGDTTIEAWTKFDFPGRGNTHSNFKWRWYHFDGVDWDQSRQLQNKIYKFQGDGKEWDWEVDTENGNYDYLMYADYDMDHPEVVNELRNWGVWYTNTLGLDGFRIDAVKHIKYSFTRDWLTHVRNTTQKNMFAVAEFWKNDIGAIENYLSNTNWNHSVFDVPLHYNLYNASRSGGNYDMRQIFNGTVVQRHPTHAVTFVDNHDSQPEEALESFVEEWFKPLAYALTLTRDQGEPSVFYGDYYGIPTHGVPAMKSKIDPILEARQKYAYGKQNDYLDHHNMIGWTREGNTAHPNSGLATIMSDGPGGNKWMYVGRNKAGQVWRDITGNRSGTVTINADGWGNFSVNGGSVSIWV

SEQ ID NO: 23449 - protein, 482 aa, Synthetic construct
SVPVNGTMMQYFEWYLPDDGTLWTKVANNAQSLANLGITALWLPPAYKGTSSSDVGYGVYDLYDLGEFNQKGTVRTKYGTKTQYIQAIQAAHTAGMQVYADVVFNHKAGADGTEFVDAVEVDPSNRNQETSGTYQIQAWTKFDFPGRGNTYSSFKWRWYHFDGTDWDESRKLNRIYKFSTGKAWDWEVDTENGNYDYLMFADLDMDHPEVVSELKNWGKWYVTTTNIDGFRLDAVKHIKYSFFPDWLSYVRTQTQKPLFAVGEFWSYDISKLHNYITKTNGSMSLFDAPLHNNFYIASKSGGYFDMRTLLNNTLMKDQPTLAVTLVDNHDTEPGQSLQSWVEPWFKPLAYAFILTRQEGYPCVFYGDYYGIPKYNIPALKSKLDPLLIARRDYAYGTQHDYIDSADIIGWTREGVAEKANSGLAALITDGPGGSKWMYVGKQHAGKTFYDLTGNRSDTVTINADGWGEFKVNGGSVSIWVPK

SEQ ID NO: 23450 - protein, 483 aa, Synthetic construct
SVPVNGTMMQYFEWYLPDDGTLWTKVANNAQSLANLGITALWLPPAYKGTSSSDVGYGVYDLYDLGEFNQKGTVRTKYGTKTQYIQAIQAAHTAGMQVYADVVFNHKAGADSTEWVDAVEVNPSNRNQETSGTYQIQAWTKFDFPGRGNTYSSFKWRWYHFDGTDWDESRKLNRIYKFRGTGKAWDWEVDTENGNYDYLMFADLDMDHPEVVSELKNWGKWYVTTTNIDGFRLDAVKHIKYSFFPDWLSYVRTQTQKPLFAVGEFWSYDISKLHNYITKTNGSMSLFDAPLHNNFYIASKSGGYFDMRTLLNNTLMKDQPTLAVTLVDNHDTEPGQSLQSWVEPWFKPLAYAFILTRQEGYPCVFYGDYYGIPKYNIPALKSKLDPLLIARRDYAYGTQHDYIDSADIIGWTREGVAEKANSGLAALITDGPGGSKWMYVGKQHAGKTFYDLTGNRSDTVTINADGWGEFKVNGGSVSIWVPK

SEQ ID NO: 23451 - protein, 483 aa, Synthetic construct
SVPVNGTMMQYFEWYLPDDGTLWTKVANNAQSLANLGITALWLPPAYKGTSSSDVGYGVYDLYDLGEFNQKGTVRTKYGTKTQYIQAIQAAHTAGMQVYADVVFNHKAGADGTEFVDAVEVNPSNRNQETSGTYQIQAWTKFDFPGRGNTYSSFKWRWYHFDGTDWDESRKLNRIYKFRGTGKAWDWEVDTENGNYDYLMFADLDMDHPEVVSELKNWGKWYVTTTNIDGFRLDAVKHIKYSFFPDWLSYVRTQTQKPLFAVGEFWSYDISKLHNYITKTNGSMSLFDAPLHNNFYIASKSGGYFDMRTLLNNTLMKDQPTLAVTLVDNHDTEPGQSLQSWVEPWFKPLAYAFILTRQEGYPCVFYGDYYGIPKYNIPALKSKLDPLLIARRDYAYGTQHDYIDSADIIGWTREGVAEKANSGLAALITDGPGGSKWMYVGKQHAGKTFYDLTGNRSDTVTINADGWGEFKVNGGSVSIWVPK

SEQ ID NO: 23452 - protein, 490 aa, Bacillus sp.
SVPVNGTMMQYFEWYLPDDGTLWTKVANNAQSLANLGITALWLPPAYKGTSSSDVGYGVYDLYDLGEFNQKGTVRTKYGTKTQYIQAIQAAHTAGMQVYADVVFNHKAGADGTELVDAVEVNPSDRNQEISGTYQIQAWTKFDFPGRGNTYSSFKWRWYHFDGTDWDESRKLNRIYKFRGTGKAWDWEVDTENGNYDYLMYADLDMDHPEVVSELKNWGKWYVTTTNIDGFRLDAVKHIKYSFFPDWLSYVRTQTQKPLFAVGEFWSYDISKLHNYITKTNGSMSLFDAPLHNNFYIASKSGGYFDMRTLLNNTLMKDQPTLAVTLVDNHDTEPGQSLQSWVEPWFKPLAYAFILTRQEGYPCVFYGDYYGIPKYNIPALKSKLDPLLIARRDYAYGTQHDYIDSADIIGWTREGVAEKANSGLAALITDGPGGSKWMYVGKQHAGKTFYDLTGNRSDTVTINADGWGEFKVNGGSVSIWVPKISTTSQI

SEQ ID NO: 23453 - protein, 481 aa, Synthetic construct
APVNGTMMQYFEWDLPNDGTLWTKVKNEAANLSSLGITALWLPPAYKGTSQSDVGYGVYDLYDLGEFNQKGTVRTKYGTKDQYIQAIQAAKAAGMQVYADVVFNHKAGADGTEFVDAVEVDPSNRNQETSGTYQIQAWTKFDFPGRGNTYSSFKWRWYHFDGTDWDESRKLNRIYKFSTGKAWDWEVDTENGNYDYLMFADLDMDHPEVVTELKNWGKWYVNTTNVDGFRLDAVKHIKYSFFPDWLASVRSQTGKNLFAVGEFWSYDVNKLHNYITKTNGTMSLFDAPLHNNFYTASKSSGYFDMRYLLNNTLMKDQPVLAVTLVDNHDTQPGQSLQSWVEPWFKPLAYAFILTRQEGYPCVFYGDYYGIPKYNIPGLKSKIDPLLIARRDYAYGTQRDYIDHQDIIGWTREGIDSKPNSGLAALITDGPGGSKWMYVGKKHAGKVFYDLTGNRSDTVTINADGWGEFKVNGGSVSIWVAK

SEQ ID NO: 23454 - protein, 482 aa, Synthetic construct
APINETMMQYFEWDLPNDGTLWTKVKNEAANLSSLGITALWLPPAYKGTSQSDVGYGVYDLYDLGEFNQKGTIRTKYGTKTQYIQAIQAAKAAGMQVYADVVFNHKAGADGTELVDAVEVNPSDRNQEISGTYQIQAWTKFDFPGRGNTYSSFKWRWYHFDGTDWDESRKLNRIYKFRGTGKAWDWEVDTENGNYDYLMYADLDMDHPEVVTELKNWGTWYVNTTNIDGFRLDAVKHIKYSFFPDWLTYVRNQTGKNLFAVGEFWSYDVNKLHNYITKTNGSMSLFDAPLHNNFYTASKSSGYFDMRYLLNNTLMKDQPSLAVTLVDNHDTQPGQSLQSWVEPWFKPLAYAFILTRQEGYPCVFYGDYYGIPKYNIPGLKSKIDPLLIARRDYAYGTQRDYIDHQDIIGWTREGIDTKPNSGLAALITDGPGGSKWMYVGKKHAGKVFYDLTGNRSDTVTINADGWGEFKVNGGSVSIWVAK

SEQ ID NO: 23455 - protein, 482 aa, Synthetic construct
APVNGTMMQYFEWDLPNDGTLWTKVKNEAANLSSLGITALWLPPAYKGTSQSDVGYGVYDLYDLGEFNQKGTVRTKYGTKDQYIQAIQAAKAAGMQVYADVVFNHKAGADSTEWVDAVEVNPSNRNQETSGTYQIQAWTKFDFPGRGNTYSSFKWRWYHFDGTDWDESRKLNRIYKFRGTGKAWDWEVDTENGNYDYLMFADLDMDHPEVVTELKNWGKWYVNTTNVDGFRLDAVKHIKYSFFPDWLASVRSQTGKNLFAVGEFWSYDVNKLHNYITKTNGTMSLFDAPLHNNFYTASKSSGYFDMRYLLNNTLMKDQPVLAVTLVDNHDTQPGQSLQSWVEPWFKPLAYAFILTRQEGYPCVFYGDYYGIPKYNIPGLKSKIDPLLIARRDYAYGTQRDYIDHQDIIGWTREGIDSKPNSGLAALITDGPGGSKWMYVGKKHAGKVFYDLTGNRSDTVTINADGWGEFKVNGGSVSIWVAK

SEQ ID NO: 23456 - protein, 482 aa, Synthetic construct
APVNGTMMQYFEWDLPNDGTLWTKVKNEATNLFSLGITALWLPPAYKGTSQSDVGYGVYDLYDLGEFNQKGTIRTKYGTKTQYIQAIQAAKAAGMQVYADVVFNHKAGADGTELVDAVEVNPSDRNQEISGTYQIQAWTKFDFPGRGNTYSSFKWRWYHFDGTDWDESRKLNRIYKFRGTGKAWDWEVDTENGNYDYLMYADLDMDHPEVVTELKNWGTWYVNTTNIDGFRLDAVKHIKYSFFPDWLTYVRNQTGKNLFAVGEFWSYDVNKLHNYITKTNGSMSLFDAPLHNNFYTASKSSGYFDMRYLLNNTLMKDQPSLAVTLVDNHDTQPGQSLQSWVEPWFKPLAYAFILTRQEGYPCVFYGDYYGIPKYNIPGLKSKIDPLLIARRDYAYGTQRDYIDHQDIIGWTREGIDTKPNSGLAALITDGPGGSKWMYVGKKHAGKVFYDLTGNRSDTVTINADGWGEFKVNGGSVSIWVAK

SEQ ID NO: 23457 - protein, 482 aa, Synthetic construct
APVNGTMMQYFEWDLPNDGTLWTKVKNEAANLSSLGITALWLPPAYKGTSQSDVGYGVYDLYDLGEFNQKGTVRTKYGTKDQYIQAIQAAKAAGMQVYADVVFNHKAGADGTEFVDAVEVNPSNRNQETSGTYQIQAWTKFDFPGRGNTYSSFKWRWYHFDGTDWDESRKLNRIYKFRGTGKAWDWEVDTENGNYDYLMFADLDMDHPEVVTELKNWGKWYVNTTNVDGFRLDAVKHIKYSFFPDWLASVRSQTGKNLFAVGEFWSYDVNKLHNYITKTNGTMSLFDAPLHNNFYTASKSSGYFDMRYLLNNTLMKDQPVLAVTLVDNHDTQPGQSLQSWVEPWFKPLAYAFILTRQEGYPCVFYGDYYGIPKYNIPGLKSKIDPLLIARRDYAYGTQRDYIDHQDIIGWTREGIDSKPNSGLAALITDGPGGSKWMYVGKKHAGKVFYDLTGNRSDTVTINADGWGEFKVNGGSVSIWVAK

SEQ ID NO: 23458 - protein, 485 aa, Bacillus sp.
HHNGTNGTMMQYFEWYLPNDGNHWNRLNSDASNLKSKGITAVWIPPAWKGASQNDVGYGAYDLYDLGEFNQKGTVRTKYGTRSQLQAAVTSLKNNGIQVYGDVVMNHKGGADATEMVRAVEVNPNNRNQEVTGEYTIEAWTRFDFPGRGNTHSSFKWRWYHFDGVDWDQSRRLNNRIYKFRGHGKAWDWEVDTENGNYDYLMYADYDFDHPEVVNEHRNWGVWYTNTLGLDGFRIDAVKHIKYSFTRDWINHVRSATGKNMFAVAEFWKNDLGAIENYLQKTNWNHSVFDVPLHYNLYNASKSGGNYDMRNIFNGTVVQRHPSHAVTFVDNHDSQPEEALESFVEEWFKPLAYALTLTREQGYPSVFYGDYYGIPTHGVPAMRSKIDPILEARQKYAYGKQNDYLDHHNIIGWTREGNTAHPNSGLATIMSDGAGGSKWMFVGRNKAGQVWSDITGNRTGTVTINADGWGNFSVNGGSVSIWVNK

SEQ ID NO: 23459 - protein, 485 aa, Bacillus sp.
HHNGTNGTMMQYFEWYLPNDGNHWNRLNSDASNLKSKGITAVWIPPAWKGASQNDVGYGAYDVYDLGEFNQKGTVRTKYGTRSQLQAAVTSLKNNGIQVYGDVVFNHKGGADATEMVRAVEVNPNNRNQEVTGEYTIEAWTRFDFPGRGNTHSSFKWRWYHFDGVDWDQSRRLNNRIYKFRGHGKAWDWEVDTENGNYDYLMYADYDMDHPEVVNELRNWGVWYTNTLGLDGFRIDAVKHIKYSFTRDWINHVRSATGKNMFAVAEFWKNDLGAIENYLQKTNWNHSVFDVPLHYNLYNASKSGGNYDMRNIFNGTVVQRHPSHAVTFVDNHDSQPEEALESFVEEWFKPLAYALTLTREQGYPSVFYGDYYGIPTHGVPAMRSKIDPILEARQKYAYGKQNDYLDHHNIIGWTREGNTAHPNSGLATIMSDGAGGSKWMFVGRNKAGQVWSDITGNRTGTVTINADGWGNFSVNGGSVSIWVNK

SEQ ID NO: 23460 - protein, 485 aa, Bacillus sp.
HHNGTNGTMMQYFEWYLPNDGNHWNRLNSDASNLKSKGITAVWIPPAWKGASQNDVGYGAYDLYDLGEFNQKGTVRTKYGTRSQLQAAVTSLKNNGIQVYGDVVMNHKGGADATEMVRAVEVNPNNRNQEVTGEYTIEAWTRFDFPGRGNTHSSFKWRWYHFDGVDWDQSRRLNNRIYKFRGHGKAWDWEVDTENGNYDYLMYADIDMDHPEPLNELRNWGVWYTNTLGLDGFRIDAVKHIKYSFTRDWINHVRSATGKNMFAVAEFWKNDLGAIENYLQKTNWNHSVFDVPLHYNLYNASKSGGNYDMRNIFNGTVVQRHPSHAVTFVDNHDSQPEEALESFVEEWFKPLAYALTLTREQGYPSVFYGDYYGIPTHGVPAMRSKIDPILEARQKYAYGKQNDYLDHHNIIGWTREGNTAHPNSGLATIMSDGAGGSKWMFVGRNKAGQVWSDITGNRTGTVTINADGWGNFSVNGGSVSIWVNK

SEQ ID NO: 23461 - protein, 483 aa, Bacillus sp.
HHNGTNGTLMQYFEWYLPNDGNHWNRLRSDASNLKDKGISAVWIPPAWKGTSQNDVGYGAYDLYDLGEFNQKGTIRTKYGTRNQLQAAVNALKSNGIQVYGDVVMNHKGGADATEMVQAVEVNPNNRNQEVSGEYTIEAWTKFDFPGRANTHSNFKWRWYHFDGVDWDQSRKLNNRIYKFRTKAWDWEVDTEFGNYDYLMYADIDMDHPEVVNELRNWGVWYTNTLGLDGFRIDAVKHIKYSFTRDWINHVRSAIGKNMFAVAEFWKGDLGAIENYLNKTNWNHSVFDVPLHFNLYYASKSGGNYDMRQIFNGTVVQKHPTHAVTFVDNHDSQPEESLESFVREWFKPLAYALTLTREQGYPSVFYGDYYGIPTHGVPAMKSKIDPILEARQKYAYGRQNDYLDHHNIIGWTREGNTAHPNSGLATIMSDGAGGNKWMFVGRNKAGQVWTDITGNKAGTVTINADGWGNFSVNGGSVSIWVNK

SEQ ID NO: 23462 - protein, 483 aa, Bacillus sp.
HHNGTNGTLMQYFEWYLPNDGNHWNRLRSDASNLKDKGISAVWIPPAWKGASQNDVGYGAYDLYDLGEFNQKGTIRTKYGTRNQLQAAVNALKSNGIQVYGDVVMNHKGGADATEMVKAVEVNPNNRNQEVSGEYTIEAWTKFDFPGRANTHSNFKWRWYHFDGVDWDQSRKLNNRIYKFRTKAWDWEVDTENGNYDYLLYADIDMDHPEVVNELRNWGVWYTNTLGLDGFRIDAVKHIKYSFTRDWINHVRSAIGKNMFAVAEFWKNDLGAIENYLNKTNWNHSVFDVPLHFNLYYASKSGGNYDMRQIFNGTVVQKHPTHAVTFVDNHDSQPEESLESFVREWFKPLAYALTLTREQGYPSVFYGDYYGIPTHGVPAMKSKIDPILEARQKYAYGRQNDYLDHHNIIGWTREGNTAHPNSGLATIMSDGAGGNKWMFVGRNKAGQVWTDITGNKAGTVTINADGWGNFSVNGGSVSIWVNK

SEQ ID NO: 23463 - protein, 483 aa, Bacillus sp.
HHNGTNGTLMQYFEWYLPNDGNHWNRLRSDASNLKDKGISAVWIPPAWKGTSQNDVGYGAYDLYDLGEFNQKGTIRTKYGTRNQLQAAVNALKSNGIQVYGDVVMNHKGGADATEMVKAVEVNPNNRNQEVSGEYTIEAWTKFDFPGRANTHSNFKWRWYHFDGVDWDQSRKLNNRIYKFRTKAWDWEVDTEFGNYDYLMYADIDMDHPEVVNELRNWGVWYTNTLGLDGFRIDAVKHIKYSFTRDWINHVRSAIGKNMFAVAEFWKGDLGAIENYLNKTNWNHSVFDVPLHFNLYWASKSGGNYDMRQIFNGTVVQKHPTHAVTFVDNHDSQPEESLESFVREWFKPLAYALTLTREQGYPSVFYGDYYGIPTHGVPAMKSKIDPILEARQKYAYGRQNDYLDHHNIIGWTREGNTAHPNSGLATIMSDGAGGNKWMFVGRNKAGQVWTDITGNKAGTVTINADGWGNFSVNGGSVSIWVNK

SEQ ID NO: 23464 - protein, 485 aa, Bacillus sp.
HHNGTNGTMMQYFEWYLPNDGNHWNRLNSDASNLKSKGITAVWIPPAWKGASQNDVGYGAYDLYDLGEFNQKGTVRTKYGTRSQLQAAVTSLKNNGIQVYGDVVMNHKGGADATEMVRAVEVNPNNRNQEVTGEYTIEAWTRFDFPGRGNTHSSFKWRWYHFDGVDWDQSRRLNNRIYKFRGHGKAWDWEVDTENGNYDYLMYADIDMDHPESRNELRNWGVWYTNTLGLDGFRIDAVKHIKYSFTRDWINHVRSATGKNMFAVAEFWKNDLGAIENYLQKTNWNHSVFDVPLHYNLYNASKSGGNYDMRNIFNGTVVQRHPSHAVTFVDNHDSQPEEALESFVEEWFKPLAYALTLTREQGYPSVFYGDYYGIPTHGVPAMRSKIDPILEARQKYAYGKQNDYLDHHNIIGWTREGNTAHPNSGLATIMSDGAGGSKWMFVGRNKAGQVWSDITGNRTGTVTINADGWGNFSVNGGSVSIWVNK

SEQ ID NO: 23465 - protein, 485 aa, Bacillus sp.
HHNGTNGTMMQYFEWYLPNDGNHWNRLRSDASNLKDKGISAVWIPPAWKGASQNDVGYGAYDLYDLGEFNQKGTIRTKYGTRNQLQAAVNALKSNGIQVYGDVVMNHKGGADATEMVRAVEVNPNNRNQEVSGEYTIEAWTKFDFPGRGNTHSNFKWRWYHFNGVDWDQSRKLNNRIYKFRGDGKGWNWEVDTENGNYDYLMYADINMSHPEVVNELRNWGVWYTNTLGLDGFRIDAVKHIKYSFTRDWINHVRSATGKNMFAVAEFWKNDLGAIENYLNKTNWNHSVFDVPLHYNLYNASKSGGNYDMRQIFNGTVVQRHPMHAVTFVDNHDSQPEEALESFVEEWFKPLAYALTLTREQGYPSVFYGDYYGIPTHGVPAMKSKIDPILEARQKYAYGRQNDYLDHHNIIGWTREGNTAHPNSGLATIMSDGAGGNKWMFVGRNKAGQVWTDITGNRAGTVTINADGWGNFSVNGGSVSIWVNK

SEQ ID NO: 23466 - protein, 483 aa, Bacillus sp.
HHNGTNGTLMQYFEWYLPNDGNHWNRLRSDASNLKDKGISAVWIPPAWKGTSQNDVGYGAYDLYDLGEFNQKGTIRTKYGTRNQLQAAVNALKSNGIQVYGDVVMNHKGGADATEMVKAVEVNPNNRNQEVSGEYTIEAWTKFDFPGRANTHSNFKWRWYHFDGVDWDQSRKLNNRIYKFRTKAWDWEVDTEFGNYDYLMYADIDMDHPEVVNELRNWGVWYTNTLGLDGFRIDAVKHIKYSFTRDWINHVRSAIGKNMFAVGEFWKNDLGAIENYLNKTNWNHSVFDVPLHFNLYYASKSGGNYDMRRIFNGTVVQKHPTHAVTFVDNHDSQPEESLESFVREWFKPLAYALTLTREQGYPSVFYGDYYGIPTHGVPAMKSKIDPILEARQKYAYGRQNDYLDHHNIIGWTREGNTAHPNSGLATIMSDGAGGNKWMFVGRNKAGQVWTDITGNKAGTVTINADGWGNFSVNGGSVSIWVNK

SEQ ID NO: 23467 - protein, 483 aa, Bacillus sp. SP70
HHNGTNGTMMQYFEWYLPNDGNHWNRLNSDASNLKSKGITAVWIPPAWKGASQNDVGYGAYDLYDLGEFNQKGTVRTKYGTRSQLQAAVTSLKNNGIQVYGDVVMNHKGGADATEMVRAVEVNPNNRNQEVTGEYTIEAYTRFDFPGRGNTHSSFKWRWYHFDGVDWDQSRRLNNRIYKFRGKAWDEEVDTENGNYDYLMYADIDMDHPEVVNELRNWGVWYTNTLGLDGFRIDAVKHIKYSFTRDWINHVRSATGKNMFAVAEFWKNDLGAIENYLQKTNWNHSVFDVPLHYNLYNASKSGGNYDMRNIFNGTVVQRHPSHAVTFVDNHDSQPEEALESFVEEWFKPLAYALTLTREQGYPSVFYGDYYGIPTHGVPAMRSKIDPILEARQKYAYGKQNDYLDHHNIIGWTREGNTAHPNSGLATIMSDGAGGSKWMFVGRNKAGQVWSDITGNRTGTVTINADGWGNFSVNGGSVSIWVNK

SEQ ID NO: 23468 - protein, 485 aa, Bacillus sp.
HHNGTNGTMMQYFEWYLPNDGNHWNRLNSDASNLKSKGITAVWIPPAWKGASQNDVGYGAYDLYDLGEFNQKGTVRTKYGTRSQLQAAVTSLKNNGIQVYGDVVMNHKGGADATEMVRAVEVNPNNRNQEVTGEYTIEAWTRFDFPGRGNTHSSFKWRWYHFDGVDWDQSRRLNNRIYKFRGHGKAWDWEVDTENGNYDYLMYADIDMDHPEGTNELRNWGVWYTNTLGLDGFRIDAVKHIKYSFTRDWINHVRSATGKNMFAVAEFWKNDLGAIENYLQKTNWNHSVFDVPLHYNLYNASKSGGNYDMRNIFNGTVVQRHPSHAVTFVDNHDSQPEEALESFVEEWFKPLAYALTLTREQGYPSVFYGDYYGIPTHGVPAMRSKIDPILEARQKYAYGKQNDYLDHHNIIGWTREGNTAHPNSGLATIMSDGAGGSKWMFVGRNKAGQVWSDITGNRTGTVTINADGWGNFSVNGGSVSIWVNK

SEQ ID NO: 23469 - protein, 483 aa, Bacillus sp. SP70
HHNGTNGTMMQYFEWYLPNDGNHWNRLNSDASNLKSKGITAVWIPPAWKGASQNDVGYGAYDLYDLGEFNQKGTVRTKYGTRSQLQAAVTSLKNNGIQVYGDVVMNHKGGADATEMVRAVEVNPNNRNQEVTGEYTIEAWTRFDFPGRGNTHSSFKWRWYHFDGVDWDQSRRLNNRIYKFRGKAWDWEVDTENGNYDYLMYADIDMDHPEVVNELRNWGVWYTNTLGLDGFRIDAVKHIKYSFTRDWINHVRSATGKNMFAVAEFWKNDLGAIENYLQKTNWNHSVFDVPLHYNLYNASKSGGNYDMRNIFNGTVVQRHPSHAVTFVDNHDSQPEEALESFVEEWFKPLAYALTLTREQGYPSVFYGDYYGIPTHGVPAMRSKIDPILEARQKYAYGKQNDYLDHHNIIGWTREGNTAHPNSGLATIMSDGAGGSKRMFVGRNKAGQVWSDITGNRTGTVTINADGWGNFSVNRGSVSIWVNK

SEQ ID NO: 23470 - protein, 483 aa, Bacillus sp.
HHNGTNGTLMQYFEWYLPNDGNHWNRLRSDASNLKDKGISAVWIPPAWKGTSQNDVGYGAYDLYDLGEFNQKGTIRTKYGTRNQLQAAVNALKSNGIQVYGDVVMNHKGGADATEMVKAVEVNPNNRNQEVSGEYTIEAWTKFDFPGRANTHSNFKWRWYHFDGVDWDQSRKLNNRIYKFRTKAWDWEVDTEFGNYDYLMYADIDMDHPEVVNELRNWGVWYTNTLGLDGFRIDAVKHIKYSFTRDWINHVRSAIGKNMFAVAEFWKGDLGAIENYLNKTNWNHSVFDVPLHFNLYYASKSGGNYDMRHIFNGTVVQKHPTHAVTFVDNHDSQPEESLESFVREWFKPLAYALTLTREQGYPSVFYGDYYGIPTHGVPAMKSKIDPILEARQKYAYGRQNDYLDHHNIIGWTREGNTAHPNSGLATIMSDGAGGNKWMFVGRNKAGQVWTDITGNKAGTVTINADGWGNFSVNGGSVSIWVNK

SEQ ID NO: 23471 - protein, 485 aa, Bacillus sp.
HHNGTNGTMMQYFEWYLPNDGNHWNRLNSDASNLKSKGITAVWIPPAWKGASQNDVGYGAYDLYDLGEFNQKGTVRTKYGTRSQLQAAVTSLKNNGIQVYGDVVMNHKGGADATEMVRAVEVNPNNRNQEVTGEYTIEAWTRFDFPGRGNTHSSFKWRWYHFDGVDWDQSRRLNNRIYKFRGHGKAWDWEVDTENGNYDYLMYADYDFDHPEVVNEVRNWGVWYTNTLGLDGFRIDAVKHIKYSFTRDWINHVRSATGKNMFAVAEFWKNDLGAIENYLQKTNWNHSVFDVPLHYNLYNASKSGGNYDMRNIFNGTVVQRHPSHAVTFVDNHDSQPEEALESFVEEWFKPLAYALTLTREQGYPSVFYGDYYGIPTHGVPAMRSKIDPILEARQKYAYGKQNDYLDHHNIIGWTREGNTAHPNSGLATIMSDGAGGSKWMFVGRNKAGQVWSDITGNRTGTVTINADGWGNFSVNGGSVSIWVNK

SEQ ID NO: 23472 - protein, 483 aa, Bacillus sp. SP70
HHNGTNGTMMQYFEWYLPNDGNHWNRLNSDASNLKSKGITAVWIPPAWKGASQNDVGYGAYDLYDLGEFNQKGTVRTKYGTRSQLQAAVTSLKNNGIQVYGDVVMNHKGGADATEMVRAVEVNPNNRNQEVTGEYTIEAWTRFDFPGRGNTHSSFKWRWYHFDGVDWDQSRRLNNRIYKFRGKAWDFPVDTENGNYDYLMYADIDMDHPEVVNELRNWGVWYTNTLGLDGFRIDAVKHIKYSFTRDWINHVRSATGKNMFAVAEFWKNDLGAIENYLQKTNWNHSVFDVPLHYNLYNASKSGGNYDMRNIFNGTVVQRHPSHAVTFVDNHDSQPEEALESFVEEWFKPLAYALTLTREQGYPSVFYGDYYGIPTHGVPAMRSKIDPILEARQKYAYGKQNDYLDHHNIIGWTREGNTAHPNSGLATIMSDGAGGSKWMFVGRNKAGQVWSDITGNRTGTVTINADGWGNFSVNGGSVSIWVNK

SEQ ID NO: 23473 - protein, 485 aa, Bacillus sp.
HHNGTNGTMMQYFEWYLPNDGNHWNRLNSDASNLKSKGITAVWIPPAVKGASQNDVGYGVYDLYDLGEFNQKGTVRTKYGTRSQLQAAVTSLKNNGIQVYGDVVMNHKGGADATEMVRAVEVNPNNRNQEVTGEYTIEAWTRFDFPGRGNTHSSFKWRWYHFDGVDWDQSRRLNNRIYKFRGHGKAWDWEVDTENGNYDYLMYADIDMDHPEVVNELRNWGVWYTNTLGLDGFRIDAVKHIKYSFTRDWINHVRSATGKNMFAVAEFWKNDLGAIENYLQKTNWNHSVFDVPLHYNLYNASKSGGNYDMRNIFNGTVVQRHPSHAVTFVDNHDSQPEEALESFVEEWFKPLAYALTLTREQGYPSVFYGDYYGIPTHGVPAMRSKIDPILEARQKYAYGKQNDYLDHHNIIGWTREGNTAHPNSGLATIMSDGAGGSKWMFVGRNKAGQVWSDITGNRTGTVTINADGWGNFSVNGGSVSIWVNK

SEQ ID NO: 23474 - protein, 485 aa, Bacillus sp.
HHNGTNGTMMQYFEWYLPNDGNHWNRLNSDASNLKSKGITAVWIPPAWKGASQNDVGYGAYDLYDLGEFNQKGTVRTKYGTRSQLQAAVTSLKNNGIQVYGDVVMNHKGGADATEMVRAVEVNPNNRNQEVTGEYTIEAWTRFDFPGRGNTHSSFKWRWYHFDGVDWDQSRRLNNRIYKFRGHGKAWDWEVDTENGNYDYLMYADIDMDHPEPTNELRNWGVWYTNTLGLDGFRIDAVKHIKYSFTRDWINHVRSATGKNMFAVAEFWKNDLGAIENYLQKTNWNHSVFDVPLHYNLYNASKSGGNYDMRNIFNGTVVQRHPSHAVTFVDNHDSQPEEALESFVEEWFKPLAYALTLTREQGYPSVFYGDYYGIPTHGVPAMRSKIDPILEARQKYAYGKQNDYLDHHNIIGWTREGNTAHPNSGLATIMSDGAGGSKWMFVGRNKAGQVWSDITGNRTGTVTINADGWGNFSVNGGSVSIWVNK

SEQ ID NO: 23475 - protein, 483 aa, Bacillus sp.
HHNGTNGTLMQYFEWYLPNDGNHWNRLRSDASNLKDKGISAVWIPPAWKGTSQNDVGYGAYDLYDLGEFNQKGTIRTKYGTRNQLQAAVNALKSNGIQVYGDVVMNHKGGADATEMVKAVEVNPNNRNQEVSGEYTIEAWTKFDFPGRANTHSNFKWRWYHFDGVDWDQSRKLQNRIYKFRTKAWDWEVDTEFGNYDYLMYADIDMDHPEVVNELRNWGVWYTNTLGLDGFRIDAVKHIKYSFIRDWINHVRSAIGKNMFAVAEFWKNDLGAIENYLNKTNWNHSVFDVPLHFNLYYASKSGGNYDMRQIFNGTVVQKHPTHAVTFVDNHDTQPEESLESFVREWFKPLAYALTLTREQGYPSVFYGDYYGIPTHGVPAMKSKIDPILEARQKYAYGRQNDYLDHHNIIGWTREGNTAHPNSGLATIMSDGAGGNKWMFVGRNKAGQVWTDITGNKAGTVTINADGWGNFSVNGGSVSIWVNK

SEQ ID NO: 23476 - protein, 485 aa, Bacillus sp.
HHNGTNGTMMQYFEWYLPNDGNHWNRLNSDASNLKSKGITAVWIPPAWKGASQNDVGYGAYDLYDLGEFNQKGTVRTKYGTRSQLQAAVTSLKNNGIQVYGDVVMNHKGGADATEMVRAVEVNPNNRNQEVTGEYTIEAWTRFDFPGRGNTHSSFKWRWYHFDGVDWDQSRRLNNRIYKFRGHGKAWDWEVDTENGNYDYLMYADNDYDHPEVVNEMRNWGVWYTNTLGLDGFRIDAVKHIKYSFTRDWINHVRSATGKNMFAVAEFWKNDLGAIENYLQKTNWNHSVFDVPLHYNLYNASKSGGNYDMRNIFNGTVVQRHPSHAVTFVDNHDSQPEEALESFVEEWFKPLAYALTLTREQGYPSVFYGDYYGIPTHGVPAMRSKIDPILEARQKYAYGKQNDYLDHHNIIGWTREGNTAHPNSGLATIMSDGAGGSKWMFVGRNKAGQVWSDITGNRTGTVTINADGWGNFSVNGGSVSIWVNK

SEQ ID NO: 23477 - protein, 485 aa, Bacillus sp.
HHNGTNGTMMQYFEWYLPNDGNHWNRLNSDASNLKSKGITAVWIPPAWKGASQNDVGYGAYDVYDLGEFNQKGTVRTKYGTRSQLQAAVTSLKNNGIQVYGDVVMNHKGGADATEMVRAVEVNPNNRNQEVTGEYTIEAWTRFDFPGRGNTHSSFKWRWYHFDGVDWDQSRRLNNRIYKFRGHGKAWDWEVDTENGNYDYLMYADLDMDHPEVVNEVRNWGVWYTNTLGLDGFRIDAVKHIKYSFTRDWINHVRSATGKNMFAVAEFWKNDLGAIENYLQKTNWNHSVFDVPLHYNLYNASKSGGNYDMRNIFNGTVVQRHPSHAVTFVDNHDSQPEEALESFVEEWFKPLAYALTLTREQGYPSVFYGDYYGIPTHGVPAMRSKIDPILEARQKYAYGKQNDYLDHHNIIGWTREGNTAHPNSGLATIMSDGAGGSKWMFVGRNKAGQVWSDITGNRTGTVTINADGWGNFSVNGGSVSIWVNK

SEQ ID NO: 23478 - protein, 483 aa, Bacillus sp.
HHNGTNGTLMQYFEWYLPNDGNHWNRLRSDASNLKDKGISAVWIPPAWKGTSQNDVGYGAYDLYDLGEFNQKGTIRTKYGTRNQLQAAVNALKSNGIQVYGDVVMNHKGGADATEMVKAVEVNPNNRNQEVSGEYTIEAWTKFDFPGRANTHSNFKWRWYHFDGVDWDQSRKLNNRIYKFRTKAWDWEVDTEFGNYDYLMYADIDMDHPEVVNELRNWGVWYTNTLGLDGFRIDAVKHIKYSFTRDWINHVRSAIGKNMFAVGEFWKNDLGAIENYLNKTNWNHSVFDVPLHFNLYYASKSGGNYDMRQIFNGTVVQKHPTHAVTFVDNHDSQPEESLESFVREWFKPLAYALTLTREQGYPSVFYGDYYGIPTHGVPAMKSKIDPILEARQKYAYGRQNDYLDHHNIIGWTREGNTAHPNSGLATIMSDGAGGNKWMFVGRNKAGQVWTDITGNKAGTVTINADGWGNFSVNGGSVSIWVNK

SEQ ID NO: 23479 - protein, 485 aa, Bacillus sp.
HHNGTNGTMMQYFEWYLPNDGNHWNRLRSDASNLKDKGISAVWIPPAWKGASQNDVGYGAYDLYDLGEFNQKGTIRTKYGTRNQLQAAVNALKSNGIQVYGDVVMNHKGGADATEMVRAVEVNPNNRNQEVSGEYTIEAWTKFDFPGRGNTHSNFKWRWYHFNGVDWDQSRKLNNRIYKFRGDGKGWNWEVDTENGNYDYLMYANIDMSHPEVVNELRNWGVWYTNTLGLDGFRIDAVKHIKYSFTRDWINHVRSATGKNMFAVAEFWKNDLGAIENYLNKTNWNHSVFDVPLHYNLYNASKSGGNYDMRQIFNGTVVQRHPMHAVTFVDNHDSQPEEALESFVEEWFKPLAYALTLTREQGYPSVFYGDYYGIPTHGVPAMKSKIDPILEARQKYAYGRQNDYLDHHNIIGWTREGNTAHPNSGLATIMSDGAGGNKWMFVGRNKAGQVWTDITGNRAGTVTINADGWGNFSVNGGSVSIWVNK

SEQ ID NO: 23480 - protein, 483 aa, Bacillus sp.
HHNGTNGTLMQYFEWYLPNDGNHWNRLRSDASNLKDHGISAVWIPPAWKGTSQNDVGYGAYDLYDLGEFNQKGTIRTKYGTRNQLQAAVNALKSNGIQVYGDVVMNHKGGADATEMVKAVEVNPNNRNQEVSGEYTIEAWTKFDFPGRANTHSNFKWRWYHFDGVDWDQSRKLNNRIYKFRTKAWDWEVDTEFGNYDYLMYADIDMDHPEVVNELRNWGVWYTNTLGLDGFRIDAVKHIKYSFTRDWINHVRSAIGKNMFAVAEFWKGDLGAIENYLNKTNWNHSVFDVPLHFNLYYASKSGGNYDMRQIFNGTVVQKHPTHAVTFVDNHDSQPEESLESFVREWFKPLAYALTLTREQGYPSVFYGDYYGIPTHGVPAMKSKIDPILEARQKYAYGRQNDYLDHHNIIGWTREGNTAHPNSGLATIMSDGAGGNKWMFVGRNKAGQVWTDITGNKAGTVTINADGWGNFSVNGGSVSIWVNK

SEQ ID NO: 23481 - protein, 483 aa, Bacillus sp.
HHNGTNGTLMQYFEWYLPNDGNHWNRLRSDASNLKDKGISAVWIPPAWKGTSQNDVGYGAYDLYDLGEFNQKGTIRTKYGTRNQLQAAVNALKSNGIQVYGDVVMNHKGGADATEMVKAVEVNPNNRNQEVSGEYTIEAWTKFDFPGRANTHSNFKWRWYHFDGVDWDQSRKLNNRIYKFRTKAWDWEVDTEFGNYDYLMYADIDMDHPEVVNELRNWGVWYTNTLGLDGFRIDAVKHIKYSFTRDWINHVRSAIGKNMFAVAEFWKNDLGAIENYLNKTNWNHSVFDVPLHFNLYYASKSGGNYDMRQIFNGTVVQKHPTHAVTFVDNHDSQPEESLESFVREWFKPLAYALTLTREQGYPSVFYGDYYGIPTHGVPAMKSKIDPILEARQKYAYGRQNDYLDHHNIIGWTREGNTAHPNSGLATIMSDGAGGNKWMFVGRNKAGQVWTDITGNKAETVTINADGWGNFSVNGGSVSIWVNK

SEQ ID NO: 23482 - protein, 485 aa, Bacillus sp.
HHNGTNGTMMQYFEWYLPNDGNHWNRLNSDASNLKSKGITAVWIPPAWKGASQNDVGYGAYDLYDLGEFNQKGTVRTKYGTRSQLQAAVTSLKNNGIQVYGDVVMNHKGGADATEMVRAVEVNPNNRNQEVTGEYTIEAWTRFDFPGRGNTHSSFKWRWYHFDGVDWDQSRRLNNRIYKFRGHGKAWDWEVDTENGNYDYLMYADYDLDHPESVNELRNWGVWYTNTLGLDGFRIDAVKHIKYSFTRDWINHVRSATGKNMFAVAEFWKNDLGAIENYLQKTNWNHSVFDVPLHYNLYNASKSGGNYDMRNIFNGTVVQRHPSHAVTFVDNHDSQPEEALESFVEEWFKPLAYALTLTREQGYPSVFYGDYYGIPTHGVPAMRSKIDPILEARQKYAYGKQNDYLDHHNIIGWTREGNTAHPNSGLATIMSDGAGGSKWMFVGRNKAGQVWSDITGNRTGTVTINADGWGNFSVNGGSVSIWVNK

SEQ ID NO: 23483 - protein, 483 aa, Bacillus sp. SP70
HHNGTNGTMMQYFEWYLPNDGNHWNRLNSDASNLKSKGITAVWIPPAWKGASQNDVGYGAYDLYDLGEFNQKGTVRTKYGTRSQLQAAVTSLKNNGIQVYGDVVMNHKGGADATEMVRAVEVNPNNRNQEVTGEYTIEAWTRFDFPGRGNTHSSFKWRWYHFDGVDWDQSRRLNNRIYKFRGKAWDEEVDTENGNYDYLMYADIDMDHPEVVNELRNWGVWYTNTLGLDGFRIDAVKHIKYSFTRDWINHVRSATGKNMFAVAEFWKNDLGAIENYLQKTNWNHSVFDVPLHYNLYNASKSGGNYDMRNIFNGTVVQRHPSHAVTFVDNHDSQPEEALESFVEEWFKPLAYALTLTREQGYPSVFYGDYYGIPTHGVPAMRSKIDPILEARQKYAYGKQNDYLDHHNIIGWTREGNTAHPNSGLATIMSDGAGGSKRMFVGRNKAGQVWSDITGNRTGTVTINADGWGNFSVNGGSVSIWVNK

SEQ ID NO: 23484 - protein, 483 aa, Bacillus sp. SP70
HHNGTNGTMMQYFEWYLPNDGNHWNRLNSDASNLKSKGITAVWIPPAWKGASQNDVGYGAYDLYDLGEFNQKGTVRTKYGTRSQLQAAVTSLKNNGIQVYGDVVMNHKGGADATEMVRAVEVNPNNRNQEVTGEYTIEAYTRFDFPGRGNTHSSFKWRWYHFDGVDWDQSRRLNNRIYKFRGKAWDWEVDTENGNYDYLMYADIDMDHPEVVNELRNWGVWYTNTLGLDGFRIDAVKHIKYSFTRDWINHVRSATGKNMFAVAEFWKNDLGAIENYLQKTNWNHSVFDVPLHYNLYNASKSGGNYDMRNIFNGTVVQRHPSHAVTFVDNHDSQPEEALESFVEEWFKPLAYALTLTREQGYPSVFYGDYYGIPTHGVPAMRSKIDPILEARQKYAYGKQNDYLDHHNIIGWTREGNTAHPNSGLATIMSDGAGGSKWMFVGRNKAGQVWSDITGNRTGTVTINADGWGNFSVNGESVSIWVNK

SEQ ID NO: 23485 - protein, 485 aa, Bacillus sp.
HHNGTNGTMMQYFEWYLPNDGNHWNRLNSDASNLKSKGITAVWIPPAWKGASQNDVGYGAYDLYDLGEFNQKGTVRTKYGTRSQLQAAVTSLKNNGIQVYGDVVMNHKGGADATEMVRAVEVNPNNRNQEVTGEYTIEAWTRFDFPGRGNTHSSFKWRWYHFDGVDWDQSRRLNNRIYKFRGHGKAWDWEVDTENGNYDYLMYADIDMDHPENQNELRNWGVWYTNTLGLDGFRIDAVKHIKYSFTRDWINHVRSATGKNMFAVAEFWKNDLGAIENYLQKTNWNHSVFDVPLHYNLYNASKSGGNYDMRNIFNGTVVQRHPSHAVTFVDNHDSQPEEALESFVEEWFKPLAYALTLTREQGYPSVFYGDYYGIPTHGVPAMRSKIDPILEARQKYAYGKQNDYLDHHNIIGWTREGNTAHPNSGLATIMSDGAGGSKWMFVGRNKAGQVWSDITGNRTGTVTINADGWGNFSVNGGSVSIWVNK

SEQ ID NO: 23486 - protein, 485 aa, Bacillus sp.
HHNGTNGTLMQYFEWYLPNDGNHWNRLRSDASNLKDKGISAVWIPPAWKGASQNDVGYGAYDLYDLGEFNQKGTIRTKYGTRNQLQAAVNALKSNGIQVYGDVVMNHKGGADATEMVRAVEVNPNNRNQEVSGEYTIEAWTKFDFPGRGNTHSNFKWRWYHFDGVDWDQSRKLNNRIYKFRGDGKGWDWEVDTENGNYDYLLYADIDMDHPEVVNELRNWGVWYTNTLGLDGFRIDAVKHIKYSFTRDWINHVRSATGKNMFAVAEFWKNDLGAIENYLNKTNWNHSVFDVPLHYNLYNASKSGGNYDMRQIFNGTVVQRHPTHAVTFVDNHDSQPEEALESFVEEWFKPLAYALTLTREQGYPSVFYGDYYGIPTHGVPAYKSKIDPILEARQKYAYGRQNDYLDHHNIIGWTREGNTAHPNSGLATIMSDGAGGNKWMFVGRNKAGQVWTDITGNRAGTVTINADGWGNFSVNGGSVSIWVNK

SEQ ID NO: 23487 - protein, 483 aa, Bacillus sp.
HHNGTNGTLMQYFEWYLPNDGNHWNRLRSDASNLKDKGISAVWIPPAWKGTSQNDVGYGAYDLYDLGEFNQKGTIRTKYGTRNQLQAAVNALKSNGIQVYGDVVMNHKGGADATEMVHAVEVNPNNRNQEVSGEYTIEAWTKFDFPGRANTHSNFKWRWYHFDGVDWDQSRKLNNRIYKFRTKAWDWEVDTEFGNYDYLMYADIDMDHPEVVNELRNWGVWYTNTLGLDGFRIDAVKHIKYSFTRDWINHVRSAIGKNMFAVAEFWKGDLGAIENYLNKTNWNHSVFDVPLHFNLYYASKSGGNYDMRQIFNGTVVQKHPTHAVTFVDNHDSQPEESLESFVREWFKPLAYALTLTREQGYPSVFYGDYYGIPTHGVPAMKSKIDPILEARQKYAYGRQNDYLDHHNIIGWTREGNTAHPNSGLATIMSDGAGGNKWMFVGRNKAGQVWTDITGNKAGTVTINADGWGNFSVNGGSVSIWVNK

SEQ ID NO: 23488 - protein, 485 aa, Bacillus sp.
HHNGTNGTMMQYFEWYLPNDGNHWNRLNSDASNLKSKGITAVWIPPAWKGASQNDVGYGAYDLYDLGEFNQKGTVRTKYGTRSQLQAAVTSLKNNGIQVYGDVVMNHKGGADATEMVRAVEVNPNNRNQEVTGEYTIEAWTRFDFPGRGNTHSSFKWRWYHFDGVDWDQSRRLNNRIYKFRGHGKAWDWEVDTEFGNYDYLMYADYDMDHPESVNELRNWGVWYTNTLGLDGFRIDAVKHIKYSFTRDWINHVRSATGKNMFAVAEFWKNDLGAIENYLQKTNWNHSVFDVPLHYNLYNASKSGGNYDMRNIFNGTVVQRHPSHAVTFVDNHDSQPEEALESFVEEWFKPLAYALTLTREQGYPSVFYGDYYGIPTHGVPAMRSKIDPILEARQKYAYGKQNDYLDHHNIIGWTREGNTAHPNSGLATIMSDGAGGSKWMFVGRNKAGQVWSDITGNRTGTVTINADGWGNFSVNGGSVSIWVNK

SEQ ID NO: 23489 - protein, 483 aa, Bacillus sp.
HHNGTNGTLMQYFEWYLPNDGNHWNRLRSDASNLKDKGISAVWIPPAWKGTSQNDVGYGAYDLYDLGEFNQKGTIRTKYGTRNQLQAAVNALKSNGIQVYGDVVMNHKGGADATEMVKAVEVNPNNRNQEVSGEYTIEAWTKFDFPGRANTHSNFKWRWYHFDGVDWDQSRKLNNRIYKFRTKAWDWEVDTEFGNYDYLMYADIDMDHPEVVNELRNWGVWYTNTLGLDGFRIDAVKHIKYSFTRDWINHVRSAIGKNMFAVAEFWKNDLGAIENYLNKTNWNHSVFDVPLHFNLYYASKSGGNYDMRQIFNGTVVHKHPTHAVTFVDNHDSQPEESLESFVREWFKPLAYALTLTREQGYPSVFYGDYYGIPTHGVPAMKSKIDPILEARQKYAYGRQNDYLDHHNIIGWTREGNTAHPNSGLATIMSDGAGGNKWMFVGRNKAGQVWTDITGNKAGTVTINADGWGNFSVNGGSVSIWVNK

SEQ ID NO: 23490 - protein, 485 aa, Bacillus sp.
HHNGTNGTMMQYFEWYLPNDGNHWNRLNSDASNLKSKGITAVWIPPAWKGASQNDVGYGAYDLYDLGEFNQKGTVRTKYGTRSQLQAAVTSLKNNGIQVYGDVVMNHKGGADATEMVRAVEVNPNNRNQEVTGEYTIEAWTRFDFPGRGNTHSSFKWRWYHFDGVDWDQSRRLNNRIYKFRGHGKEWDWEVDTEFGNYDYLMYADYDMDHPEVVNELRNWGVWYTNTLGLDGFRIDAVKHIKYSFTRDWINHVRSATGKNMFAVAEFWKNDLGAIENYLQKTNWNHSVFDVPLHYNLYNASKSGGNYDMRNIFNGTVVQRHPSHAVTFVDNHDSQPEEALESFVEEWFKPLAYALTLTREQGYPSVFYGDYYGIPTHGVPAMRSKIDPILEARQKYAYGKQNDYLDHHNIIGWTREGNTAHPNSGLATIMSDGAGGSKWMFVGRNKAGQVWSDITGNRTGTVTINADGWGNFSVNGGSVSIWVNK

SEQ ID NO: 23491 - protein, 483 aa, Bacillus sp.
HHNGTNGTLMQYFEWYLPNDGNHWNRLRSDASNLKDKGISAVWIPPAWKGTSQNDVGYGAYDLYDLGEFNQKGTIRTKYGTRNQLQAAVNALKSNGIQVYGDVVMNHKGGADATEMVKAVEVNPNNRNQEVSGEYTIEAWTKFDFPGRANTHSNFKWRWYHFDGVDWDQSRKLQNRIYKFRTKAWDWEVDTEFGNYDYLMYADIDMDHPEVVNELRNWGVWYTNTLGLDGFRIDAVKHIKYSFIRDWINHVRSAIGKNMFAVAEFWKNDLGAIENYLNKTNWNHSVFDVPLHFNLYYASKSGGNYDMRRIFNGTVVQKHPTHAVTFVDNHDTQPEESLESFVREWFKPLAYALTLTREQGYPSVFYGDYYGIPTHGVPAMKSKIDPILEARQKYAYGRQNDYLDHHNIIGWTREGNTAHPNSGLATIMSDGAGGNKWMFVGRNKAGQVWTDITGNKAGTVTINADGWGNFSVNGGSVSIWVNK

SEQ ID NO: 23492 - protein, 485 aa, Bacillus sp.
HHNGTNGTMMQYFEWYLPNDGNHWNRLNSDASNLKSKGITAVWIPPAWKGASQNDVGYGAYDLYDLGEFNQKGTVRTKYGTRSQLQAAVTSLKNNGIQVYGDVVMNHKGGADATEMVRAVEVNPNNRNQEVTGEYTIEAWTRFDFPGRGNTHSSFKWRWYHFDGVDWDQSRRLNNRIYKFRGHGKAWDWEVDTEFGNYDYLMYADYDYDHPEVVNELRNWGVWYTNTLGLDGFRIDAVKHIKYSFTRDWINHVRSATGKNMFAVAEFWKNDLGAIENYLQKTNWNHSVFDVPLHYNLYNASKSGGNYDMRNIFNGTVVQRHPSHAVTFVDNHDSQPEEALESFVEEWFKPLAYALTLTREQGYPSVFYGDYYGIPTHGVPAMRSKIDPILEARQKYAYGKQNDYLDHHNIIGWTREGNTAHPNSGLATIMSDGAGGSKWMFVGRNKAGQVWSDITGNRTGTVTINADGWGNFSVNGGSVSIWVNK

SEQ ID NO: 23493 - protein, 485 aa, Bacillus sp.
HHNGTNGTMMQYFEWYLPNDGNHWNRLNSDASNLKSKGITAVWIPPAWKGASQNDVGYGAYDLYDLGEFNQKGTVRTKYGTRSQLQAAVTSLKNNGIQVYGDVVMNHKGGADATEMVRAVEVNPNNRNQEVTGEYTIEAWTRFDFPGRGNTHSSFKWRWYHFDGVDWDQSRRLNNRIYKFRGHGKAWDWEVDTENGNYDYLMYADYDMDHPEVVNEIRNWGVWYTNTLGLDGFRIDAVKHIKYSFIRDWINHVRSATGKNMFAVAEFWKNDLGAIENYLQKTNWNHSVFDVPLHYNLYNASKSGGNYDMRNIFNGTVVQRHPSHAVTFVDNHDSQPEEALESFVEEWFKPLAYALTLTREQGYPSVFYGDYYGIPTHGVPAMRSKIDPILEARQKYAYGKQNDYLDHHNIIGWTREGNTAHPNSGLATIMSDGAGGSKWMFVGRNKAGQVWSDITGNRTGTVTINADGWGNFSVNGGSVSIWVNK

SEQ ID NO: 23494 - protein, 485 aa, Bacillus sp.
HHNGTNGTMMQYFEWYLPNDGNHWNRLNSDASNLKSKGITAVWIPPAWKGASQNDVGYGAYDLYDLGEFNQKGTVRTKYGTRSQLQAAVTSLKNNGIQVYGDVVMNHKGGADATEMVRAVEVNPNNRNQEVTGEYTIEAWTRFDFPGRGNTHSSFKWRWYHFDGVDWDQSRRLNNRIYKFRGHGKAWDWEVDTENGNYDYLMYADIDMDHPENINELRNWGVWYTNTLGLDGFRIDAVKHIKYSFTRDWINHVRSATGKNMFAVAEFWKNDLGAIENYLQKTNWNHSVFDVPLHYNLYNASKSGGNYDMRNIFNGTVVQRHPSHAVTFVDNHDSQPEEALESFVEEWFKPLAYALTLTREQGYPSVFYGDYYGIPTHGVPAMRSKIDPILEARQKYAYGKQNDYLDHHNIIGWTREGNTAHPNSGLATIMSDGAGGSKWMFVGRNKAGQVWSDITGNRTGTVTINADGWGNFSVNGGSVSIWVNK

SEQ ID NO: 23495 - protein, 483 aa, Bacillus sp.
HHNGTNGTLMQYFEWYLPNDGNHWNRLRSDASNLKDKGISAVWIPPAWKGTSQNDVGYGAYDLYDLGEFNQKGTIRTKYGTRNQLQAAVNALKSNGIQVYGDVVMNHKGGADATEMVKAVEVNPNNRNQEVSGEYTIEAWTKFDFPGRANTHSNFKWRWYHFDGVDWDQSRKLNNRIYKFRTKAWDWEVDTEFGNYDYLMYADIDMDHPEVVNELRNWGVWYTNTLGLDGFRIDAVKHIKYSFTRDWINHVRSAIGKNMFAVAEFWKGDLGAIENYLNKTNWNHSVFDVPLHFNLYYASKSGGNYDMRQIFNGTVVQKHPTHAVTFVDNHDSQPEESLESFVREWFKPLAYALTLTREQGYPSVFYGDYYGIPTHGVPAMKSKIDPILEARQKYAYGRQNDYLDHHNIIGWTREGNTAHPNSGLATIMSDGAGGNKWMFVGRNKAGQVWTDITGNKAGTVTINADGWGNFSVNGGSVSIWVNK

SEQ ID NO: 23496 - protein, 485 aa, Bacillus sp.
HHNGTNGTMMQYFEWYLPNDGNHWNRLNSDASNLKSKGITAVWIPPAWKGASQNDVGYGAYDVYDLGEFNQKGTVRTKYGTRSQLQAAVTSLKNNGIQVYGDVVMNHKGGADATEMVRAVEVNPNNRNQEVTGEYTIEAWTRFDFPGRGNTHSSFKWRWYHFDGVDWDQSRRLNNRIYKFRGHGKAWDWEVDTENGNYDYLMYADYDMDHPEVVNEIRNWGVWYTNTLGLDGFRIDAVKHIKYSFTRDWINHVRSATGKNMFAVAEFWKNDLGAIENYLQKTNWNHSVFDVPLHYNLYNASKSGGNYDMRNIFNGTVVQRHPSHAVTFVDNHDSQPEEALESFVEEWFKPLAYALTLTREQGYPSVFYGDYYGIPTHGVPAMRSKIDPILEARQKYAYGKQNDYLDHHNIIGWTREGNTAHPNSGLATIMSDGAGGSKWMFVGRNKAGQVWSDITGNRTGTVTINADGWGNFSVNGGSVSIWVNK

SEQ ID NO: 23497 - protein, 483 aa, Bacillus sp.
HHNGTNGTLMQYFEWYLPNDGNHWNRLRSDASNLKDKGISAVWIPPAWKGTSQNDVGYGAYDLYDLGEFNQKGTIRTKYGTRNQLQAAVNALKSNGIQVYGDVVMNHKGGADATEMVKAVEVNPNNRNQEVSGEYTIEAWTKFDFPGRANTHSNFKWRWYHFDGVDWDQSRKLNNRIYKFRTKAWDWEVDTEFGNYDYLMYADIDMDHPEVVNELRNWGVWYTNTLGLDGFRIDAVKHIKYSFTRDWINHVRSAIGKNMFAVAEFWKNDLGAIENYLNKTNWNHSVFDVPLHFNLYYASKSGGNYDMRQIFNGTVVQKHPTHAVTFVDNHDSQPEEALESFVREWFKPLAYALTLTREQGYPSVFYGDYYGIPTHGVPAMKSKIDPILEARQKYAYGRQNDYLDHHNIIGWTREGNTAHPNSGLATIMSDGAGGNKWMFVGRNKAGQVWTDITGNKAGTVTINADGWGNFSVNGGSVSIWVNK

SEQ ID NO: 23498 - protein, 483 aa, Bacillus sp.
HHNGTNGTLMQYFEWYLPNDGNHWNRLRSDASNLKDHGISAVWIPPAWKGASQNDVGYGAYDLYDLGEFNQKGTIRTKYGTRNQLQAAVNALKSNGIQVYGDVVMNHKGGADATEMVKAVEVNPNNRNQEVSGEYTIEAWTKFDFPGRANTHSNFKWRWYHFDGVDWDQSRKLNNRIYKFRTKAWDWEVDTEFGNYDYLMYADIDMDHPEVVNELRNWGVWYTNTLGLDGFRIDAVKHIKYSFTRDWINHVRSAIGKNMFAVAEFWKNDLGAIENYLNKTNWNHSVFDVPLHFNLYYASKSGGNYDMRQIFNGTVVQKHPTHAVTFVDNHDSQPEESLESFVREWFKPLAYALTLTREQGYPSVFYGDYYGIPTHGVPAMKSKIDPILEARQKYAYGRQNDYLDHHNIIGWTREGNTAHPNSGLATIMSDGAGGNKWMFVGRNKAGQVWTDITGNKAGTVTINADGWGNFSVNGGSVSIWVNK

SEQ ID NO: 23499 - protein, 485 aa, Bacillus sp.
HHNGTNGTMMQYFEWYLPNDGNHWNRLNSDASNLKSKGITAVWIPPAWKGASQNDVGYGAYDLYDLGEFNQKGTVRTKYGTRSQLQAAVTSLKNNGIQVYGDVVMNHKGGADATEMVRAVEVNPNNRNQEVTGEYTIEAWTRFDFPGRGNTHSSFKWRWYHFDGVDWDQSRRLNNRIYKFRGHGKAWDWEVDTENGNYDYLMYADIDMDHPEIPNELRNWGVWYTNTLGLDGFRIDAVKHIKYSFTRDWINHVRSATGKNMFAVAEFWKNDLGAIENYLQKTNWNHSVFDVPLHYNLYNASKSGGNYDMRNIFNGTVVQRHPSHAVTFVDNHDSQPEEALESFVEEWFKPLAYALTLTREQGYPSVFYGDYYGIPTHGVPAMRSKIDPILEARQKYAYGKQNDYLDHHNIIGWTREGNTAHPNSGLATIMSDGAGGSKWMFVGRNKAGQVWSDITGNRTGTVTINADGWGNFSVNGGSVSIWVNK

SEQ ID NO: 23500 - protein, 483 aa, Bacillus sp.
HHNGTNGTLMQYFEWYLPNDGNHWNRLRSDASNLKDKGISAVWIPPAWKGTSQNDVGYGAYDLYDLGEFNQKGTIRTKYGTRNQLHAAVNALKSNGIQVYGDVVMNHKGGADATEMVKAVEVNPNNRNQEVSGEYTIEAWTKFDFPGRANTHSNFKWRWYHFDGVDWDQSRKLNNRIYKFRTKAWDWEVDTEFGNYDYLMYADIDMDHPEVVNELRNWGVWYTNTLGLDGFRIDAVKHIKYSFTRDWINHVRSAIGKNMFAVAEFWKGDLGAIENYLNKTNWNHSVFDVPLHFNLYYASKSGGNYDMRQIFNGTVVQKHPTHAVTFVDNHDSQPEESLESFVREWFKPLAYALTLTREQGYPSVFYGDYYGIPTHGVPAMKSKIDPILEARQKYAYGRQNDYLDHHNIIGWTREGNTAHPNSGLATIMSDGAGGNKWMFVGRNKAGQVWTDITGNKAGTVTINADGWGNFSVNGGSVSIWVNK

SEQ ID NO: 23501 - protein, 483 aa, Bacillus sp.
HHNGTNGTLMQYFEWYLPNDGNHWNRLRSDASNLKDKGISAVWIPPAWKGTSQNDVGYGAYDLYDLGEFNQKGTIRTKYGTRNQLQAAVNALKSNGIQVYGDVVMNHKGGADATEMVKAVEVNPNNRNQEVSGEYTIEAWTKFDFPGRANTHSNFKWRWYHFDGVDWDQSRKLNNRIYKFRTKAWDWEVDTEFGNYDYLMYADIDMDHPEVVNELRNWGVWYTNTLGLDGFRIDAVKHIKYSFTRDWINHVRSAIGKNMFAVAEFWKNDLGAIENYLNKTNWNHSVFDVPLHFNLYYASKSGGNYDMRQIFNGTVVQKHPTHAVTFVDNHDSQPEESLESFVREWFKPLAYALTLTREQGYPCVFYGDYYGIPTHGVPAMKSKIDPILEARQKYAYGRQNDYLDHHNIIGWTREGNTAHPNSGLATIMSDGAGGNKWMFVGRNKAGQVWTDITGNKAGTVTINADGWGNFSVNGGSVSIWVNK

SEQ ID NO: 23502 - protein, 485 aa, Bacillus sp.
HHNGTNGTMMQYFEWYLPNDGNHWNRLNSDASNLKSKGITAVWIPPAWKGASQNDVGYGAYDLYDLGEFNQKGTVRTKYGTRSQLQAAVTSLKNNGIQVYGDVVMNHKGGADATEMVRAVEVNPNNRNQEVTGEYTIEAWTRFDFPGRGNTHSSFKWRWYHFDGVDWDQSRRLNNRIYLFRGHGKAWDWPVDTENGNYDYLMYADIDMDHPEVVNELRNWGVWYTNTLGLDGFRIDAVKHIKYSFTRDWINHVRSATGKNMFAVAEFWKNDLGAIENYLQKTNWNHSVFDVPLHYNLYNASKSGGNYDMRNIFNGTVVQRHPSHAVTFVDNHDSQPEEALESFVEEWFKPLAYALTLTREQGYPSVFYGDYYGIPTHGVPAMRSKIDPILEARQKYAYGKQNDYLDHHNIIGWTREGNTAHPNSGLATIMSDGAGGSKWMFVGRNKAGQVWSDITGNRTGTVTINADGWGNFSVNGGSVSIWVNK

SEQ ID NO: 23503 - protein, 483 aa, Bacillus sp.
HHNGTNGTLMQYFEWYLPNDGNHWNRLRSDASNLKDKGISAVWIPPAWKGASQNDVGYGAYDLYDLGEFNQKGTIRTKYGTRNQLQAAVNALKSNGIQVYGDVVMNHKGGADATEMVKAVEVNPNNRNQEVSGEYTIEAWTKFDFPGRANTHSNFKWRWYHFDGVDWDQSRKLNNRIYKFRTKAWDWEVDTEFGNYDYLLYADIDMDHPEVVNELRNWGVWYTNTLGLDGFRIDAVKHIKYSFTRDWINHVRSAIGKNMFAVAEFWKNDLGAIENYLNKTNWNHSVFDVPLHYNLYYASKSGGNYDMRQIFNGTVVQKHPTHAVTFVDNHDSQPEESLESFVREWFKPLAYALTLTREQGYPSVFYGDYYGIPTHGVPAMKSKIDPILEARQKYAYGRQNDYLDHHNIIGWTREGNTAHPNSGLATIMSDGAGGNKWMFVGRNKAGQVWTDITGNKAGTVTINADGWGNFSVNGGSVSIWVNK

SEQ ID NO: 23504 - protein, 483 aa, Bacillus sp. SP70
HHNGTNGTMMQYFEWYLPNDGNHWNRLNSDASNLKSKGITAVWIPPAWKGASQNDVGYGAYDLYDLGEFNQKGTVRTKYGTRSQLQAAVTSLKNNGIQVYGDVVMNHKGGADATEMVRAVEVNPNNRNQEVTGEYTIEAYTRFDFPGRGNTHSSFKWRWYHFDGVDWDQSRRLNNRIYKFRGKAWDWEVDTENGNYDYLMYADIDMDHPEVVNELRNWGVWYTNTLGLDGFRIDAVKHIKYSFTRDWINHVRSATGKNMFAVAEFWKNDLGAIENYLQKTNDNHSVFDVPLHYNLYNASKSGGNYDMRNIFNGTVVQRHPSHAVTFVDNHDSQPEEALESFVEEWFKPLAYALTLTREQGYPSVFYGDYYGIPTHGVPAMRSKIDPILEARQKYAYGKQNDYLDHHNIIGWTREGNTAHPNSGLATIMSDGAGGSKWMFVGRNKAGQVWSDITGNRTGTVTINADGWGNFSVNGGSVSIWVNK

SEQ ID NO: 23505 - protein, 485 aa, Bacillus sp.
HHNGTNGTLMQYFEWYLPNDGNHWNRLRSDASNLKDKGISAVWIPPAWKGASQNDVGYGAYDLYDLGEFNQKGTIRTKYGTRNQLQAAVNALKSNGIQVYGDVVMNHKGGADATEMVRAVEVNPNNRNQEVSGEYTIEAWTKFDFPGRGNTHSNFKWRWYHFDGVDWDQSRKLNNRIYKFRGDGKGWDWEVDTEFGNYDYLXYADIDMDHPEVVNELRNWGVWYTNTLGLDGFRIDAVKHIKYSFTRDWINHVRSATGKNMFAVAEFWKNDLGAIENYLNKTNWNHSVFDVPLHYNLYNASKSGGNYDMRQIFNGTVVQRHPTHAVTFVDNHDSQPEEALESFVEEWFKPLAYALTLTREQGYPSVFYGDYYGIPTHGVPAMKSKIDPILEARQKYAYGRQNDYLDHHNIIGWTREGNTAHPNSGLATIMSDGAGGNKWMFVGRNKAGQVWTDITGNRAGTVTINADGWGNFSVNGGSVSIWVNK

SEQ ID NO: 23506 - protein, 485 aa, Bacillus sp.
HHNGTNGTLMQYFEWYLPNDGNHWNRLRSDASNLKDKGISAVWIPPAWKGASQNDVGYGAYDLYDLGEFNQKGTIRTKYGTRNQLQAAVNALKSNGIQVYGDVVMNHKGGADATEMVKAVEVNPNNRNQEVSGEYTIEAWTKFDFPGRANTHSNFKWRWYHFDGVDWDQSRKLNNRIYKFRGDTKDWDWEVDTEFGNYDYLMYADIDMDHPEVVNELRNWGVWYTNTLGLDGFRIDAVKHIKYSFTRDWINHVRSAIGKNMFAVAEFWKNDLGAIENYLNKTNWNHSVFDVPLHFNLYYASKSGGNYDMRQIFNGTVVQKHPTHAVTFVDNHDSQPEESLESFVREWFKPLAYALTLTREQGYPSVFYGDYYGIPTHGVPAMKSKIDPILEARQKYAYGRQNDYLDHHNIIGWTREGNTAHPNSGLATIMSDGAGGNKWMFVGRNKAGQVWTDITGNKAGTVTINADGWGNFSVNGGSVSIWVNK

SEQ ID NO: 23507 - protein, 483 aa, Bacillus sp.
HHNGTNGTLMQYFEWYLPNDGNHWNRLRSDASNLKDHGISAVWIPPAWKGTSQNDVGYGAYDLYDLGEFNQKGTIRTKYGTRNQLQAAVNALKSNGIQVYGDVVMNHKGGADATEMVKAVEVNPNNRNQEVSGEYTIEAWTKFDFPGRANTHSNFKWRWYHFDGVDWDQSRKLQNRIYKFRTKAWDWEVDTEFGNYDYLMYADIDMDHPEVVNELRNWGVWYTNTLGLDGFRIDAVKHIKYSFTRDWINHVRSAIGKNMFAVGEFWKNDLGAIENYLNKTNWNHSVFDVPLHFNLYYASKSGGNYDMRRIFNGTVVQKHPTHAVTFVDNHDTQPEESLESFVREWFKPLAYALTLTREQGYPSVFYGDYYGIPTHGVPAMKSKIDPILEARQKYAYGRQNDYLDHHNIIGWTREGNTAHPNSGLATIMSDGAGGNKWMFVGRNKAGQVWTDITGNKAGTVTINADGWGNFSVNGGSVSIWVNK

SEQ ID NO: 23508 - protein, 485 aa, Bacillus sp.
HHNGTNGTMMQYFEWYLPNDGNHWNRLNSDASNLKSKGITAVWIPPAWKGASQNDVGYGAYDLYDLGEFNQKGTVRTKYGTRSQLQAAVTSLKNNGIQVYGDVVMNHKGGADATEMVRAVEVNPNNRNQEVTGEYTIEAWTRFDFPGRGNTHSSFKWRWYHFDGVDWDQSRRLNNRIYKFRGHGKAWDWEVDTEFGNYDYLMYADYDMDHPEVVNEVRNWGVWYTNTLGLDGFRIDAVKHIKYSFTRDWINHVRSATGKNMFAVAEFWKNDLGAIENYLQKTNWNHSVFDVPLHYNLYNASKSGGNYDMRNIFNGTVVQRHPSHAVTFVDNHDSQPEEALESFVEEWFKPLAYALTLTREQGYPSVFYGDYYGIPTHGVPAMRSKIDPILEARQKYAYGKQNDYLDHHNIIGWTREGNTAHPNSGLATIMSDGAGGSKWMFVGRNKAGQVWSDITGNRTGTVTINADGWGNFSVNGGSVSIWVNK

SEQ ID NO: 23509 - protein, 483 aa, Bacillus sp.
HHNGTNGTLMQYFEWYLPNDGNHWNRLRSDASNLKDKGISAVWIPPAWKGASQNDVGYGAYDLYDLGEFNQKGTIRTKYGTRNQLQAAVNALKSNGIQVYGDVVMNHKGGADATEMVKAVEVNPNNRNQEVSGEYTIEAWTKFDFPGRANTHSNFKWRWYHFDGVDWDQSRKLQNRIYKFRTKAWDWEVDTEFGNYDYLLYADIDMDHPEVVNELRNWGVWYTNTLGLDGFRIDAVKHIKYSFTRDWINHVRSAIGKNMFAVAEFWKNDLGAIENYLNKTNWNHSVFDVPLHFNLYYASKSGGNYDMRQIFNGTVVQKHPTHAVTFVDNHDSQPEESLESFVREWFKPLAYALTLTREQGYPSVFYGDYYGIPTHGVPAMKSKIDPILEARQKYAYGRQNDYLDHHNIIGWTREGNTAHPNSGLATIMSDGAGGNKWMFVGRNKAGQVWTDITGNKAGTVTINADGWGNFSVNGGSVSIWVNK

SEQ ID NO: 23510 - protein, 485 aa, Bacillus sp.
HHNGTNGTLMQYFEWYLPNDGNHWNRLRSDASNLKDKGISAVWIPPAWKGASQNDVGYGAYDLYDLGEFNQKGTIRTKYGTRNQLQAAVNALKSNGIQVYGDVVMNHKGGADATEMVRAVEVNPNNRNQEVSGEYTIEAWTKFDFPGRGNTHSNFKWRWYHFDGVDWDQSRKLNNRIYKFRGDGKGWDWEVDTEFGNYDYLIYADIDMDHPEVVNELRNWGVWYTNTLGLDGFRIDAVKHIKYSFTRDWINHVRSATGKNMFAVAEFWKNDLGAIENYLNKTNWNHSVFDVPLHYNLYNASKSGGNYDMRQIFNGTVVQRHPTHAVTFVDNHDSQPEEALESFVEEWFKPLAYALTLTREQGYPSVFYGDYYGIPTHGVPAMKSKIDPILEARQKYAYGRQNDYLDHHNIIGWTREGNTAHPNSGLATIMSDGAGGNKWMFVGRNKAGQVWTDITGNRAGTVTINADGWGNFSVNGGSVSIWVNK

SEQ ID NO: 23511 - protein, 483 aa, Bacillus sp.
HHNGTNGTLMQYFEWYLPNDGNHWNRLRSDASNLKDKGISAVWIPPAWKGTSQNDVGYGAYDLYDLGEFNQKGTIRTKYGTRNQLQAAVNALKSNGIQVYGDVVMNHKGGADATEMVKAVEVNPNNRNQEVSGEYTIEAWTKFDFPGRANTHSNFKWRWYHFDGVDWDQSRKLNNRIYKFRTKAWDWEVDTEFGNYDYLMYADIDMDHPEVVNELRNWGVWYTNTLGLDGFRIDAVKHIKYSFTRDWINHVRSAIGKNMFAVAEFWKGDLGAIENYLNKTNWNHSVFDVPLHFNLYYASKSGGNYDMRQIFNGTVVQKHPTHAVTFVDNHDSQPEESLESFVREWFKPLAYALTLTREQGYPSVFYGDYYGIPTHGVPAMKSKIDPILEARQKYAYGRQYDYLDHHNIIGWTREGNTAHPNSGLATIMSDGAGGNKWMFVGRNKAGQVWTDITGNKAGTVTINADGWGNFSVNGGSVSIWVNK

SEQ ID NO: 23512 - protein, 485 aa, Bacillus sp.
HHNGTNGTMMQYFEWYLPNDGNHWNRLNSDASNLKSKGITAVWIPPAWKGASQNDVGYGAYDLYDLGEFNQKGTVRTKYGTRSQLQAAVTSLKNNGIQVYGDVVMNHKGGADATEMVRAVEVNPNNRNQEVTGEYTIEAWTRFDFPGRGNTHSSFKWRWYHFDGVDWDQSRRLNNRIYKFRGHGKAWDWEVDTEFGNYDYLMYADIDMDHPEPVNELRNWGVWYTNTLGLDGFRIDAVKHIKYSFTRDWINHVRSATGKNMFAVAEFWKNDLGAIENYLQKTNWNHSVFDVPLHYNLYNASKSGGNYDMRNIFNGTVVQRHPSHAVTFVDNHDSQPEEALESFVEEWFKPLAYALTLTREQGYPSVFYGDYYGIPTHGVPAMRSKIDPILEARQKYAYGKQNDYLDHHNIIGWTREGNTAHPNSGLATIMSDGAGGSKWMFVGRNKAGQVWSDITGNRTGTVTINADGWGNFSVNGGSVSIWVNK

SEQ ID NO: 23513 - protein, 485 aa, Bacillus sp.
HHNGTNGTMMQYFEWYLPNDGNHWNRLNSDASNLKSKGITAVWIPPAWKGASQNDVGYGAYDLYDLGEFNQKGTVRTKYGTRSQLQAAVTSLKNNGIQVYGDVVMNHKGGADATEMVRAVEVNPNNRNQEVTGEYTIEAWTRFDFPGRGNTHSSFKWRWYHFDGVDWDQSRRLNNRIYKFRGHGKAWDWEVDTENGNYDYLMYADFDFDHPEVVNEIRNWGVWYTNTLGLDGFRIDAVKHIKYSFTRDWINHVRSATGKNMFAVAEFWKNDLGAIENYLQKTNWNHSVFDVPLHYNLYNASKSGGNYDMRNIFNGTVVQRHPSHAVTFVDNHDSQPEEALESFVEEWFKPLAYALTLTREQGYPSVFYGDYYGIPTHGVPAMRSKIDPILEARQKYAYGKQNDYLDHHNIIGWTREGNTAHPNSGLATIMSDGAGGSKWMFVGRNKAGQVWSDITGNRTGTVTINADGWGNFSVNGGSVSIWVNK

SEQ ID NO: 23514 - protein, 483 aa, Bacillus sp.
HHNGTNGTLMQYFEWYLPNDGNHWNRLRSDASNLKDKGISAVWIPPAWKGASQNDVGYGAYDLYDLGEFNQKGTIRTKYGTRNQLQAAVNALKSNGIQVYGDVVMNHKGGADATEMVKAVEVNPNNRNQEVSGEYTIEAWTKFDFPGRANTHSNFKWRWYHFDGVDWDQSRKLNNRIYKFRTKAWDWEVDTEFGNYDYLMYADIDMDHPEVVNELRNWGVWYTNTLGLDGFRIDAVKHIKYSFTRDWINHVRSAIGKNMFAVAEFWKNDLGAIENYLNKTNWNHSVFDVPLHFNLYYASKSGGNYDMRRIFNGTVVQKHPTHAVTFVDNHDSQPEESLESFVREWFKPLAYALTLTREQGYPSVFYGDYYGIPTHGVPAMKSKIDPILEARQKYAYGRQNDYLDHHNIIGWTREGNTAHPNSGLATIMSDGAGGNKWMFVGRNKAGQVWTDITGNKAGTVTINADGWGNFSVNGGSVSIWVNK

SEQ ID NO: 23515 - protein, 485 aa, Bacillus sp.
HHNGTNGTLMQYFEWYLPNDGNHWNRLRSDASNLKDKGISAVWIPPAWKGASQNDVGYGAYDLYDLGEFNQKGTIRTKYGTRNQLQAAVNALKSNGIQVYGDVVMNHKGGADATEMVRAVEVNPNNRNQEVSGEYTIEAWTKFDFPGRGNTHSNFKWRWYHFDGVDWDQSRKLNNRIYKFRGDGKGWDWEVDTEFGNYDYLLYADIDMDHPEVVNELRNWGVWYTNTLGLDGFRIDAVKHIKYSFTRDWINHVRSATGKNMFAVAEFWKNDLGAIENYLNKTNWNHSVFDVPLHYNLYNASKSGGNYDMRQIFNGTVVQRHPTHAVTFVDNHDSQPEEALESFVEEWFKPLAYALTLTREQGYPSVFYGDYYGIPTHGVPAMKSKIDPILEARQKYAYGRQNDYLDHHNIIGWTREGNTAHPNSGLATIMSDGAGGNKWMFVGRNKAGQVWTDITGNRAGTVTINADGWGNFSVNGGSVSIWVNK

SEQ ID NO: 23516 - protein, 483 aa, Bacillus sp.
HHNGTNGTLMQYFEWYLPNDGNHWNRLRSDASNLKDKGISAVWIPPAWKGTSQNDVGYGAYDLYDLGEFNQKGTIRTKYGTRNQLQAAVNALKSNGIQVYGDVVMNHKGGADATEMVRAVEVNPNNRNQEVSGEYTIEAWTKFDFPGRANTHSNFKWRWYHFDGVDWDQSRKLNNRIYKFRTKAWDWEVDTEFGNYDYLMYADIDMDHPEVVNELRNWGVWYTNTLGLDGFRIDAVKHIKYSFTRDWINHVRSAIGKNMFAVAEFWKGDLGAIENYLNKTNWNHSVFDVPLHFNLYYASKSGGNYDMRQIFNGTVVQKHPTHAVTFVDNHDSQPEESLESFVREWFKPLAYALTLTREQGYPSVFYGDYYGIPTHGVPAMKSKIDPILEARQKYAYGRQNDYLDHHNIIGWTREGNTAHPNSGLATIMSDGAGGNKWMFVGRNKAGQVWTDITGNKAGTVTINADGWGNFSVNGGSVSIWVNK

SEQ ID NO: 23517 - protein, 483 aa, Bacillus sp. SP70
HHNGTNGTMMQYFEWYLPNDGNHWNRLNSDASNLKSKGITAVWIPPAWKGASQNDVGYGAYDLYDLGEFNQKGTVRTKYGTRSQLQAAVTSLKNNGIQVYGDVVMNHKGGADATEMVRAVEVNPNNRNQEVTGEYTIEAWTRFDFPGRGNTHSSFKWRWYHFDGVDWDQSRRLNNRIYKFRGKAWDWEVDTENGNYDYLMYADIDMDHPEVVNELRNWGVWYTNTLGLDGFRIDAVKHIKYSFTRDWINHVRSATGKNMFAVAEFWKNDLGAIENYLQKTNWNHSVFDVPLHYNLYNASKSGGNYDMRNIFNGTVVQRHPSHAVTFVDNHDSQPEEALESFVEEWFKPLAYALTLTREQGYPSVFYGDYYGIPTHGVPAMRSKIDPILEARQKYAYGKQNDYLDHHNIIGWTREGNTAHPNSGLATIMSDGAGGSKRMFVGRNKAGQVWSDITGNRTGTVTINADGWGNFSVNGESVSIWVNK

SEQ ID NO: 23518 - protein, 483 aa, Bacillus sp.
HHNGTNGTLMQYFEWYLPNDGNHWNRLRSDASNLKDRGISAVWIPPAWKGASQNDVGYGAYDLYDLGEFNQKGTIRTKYGTRNQLQAAVNALKSNGIQVYGDVVMNHKGGADATEMVKAVEVNPNNRNQEVSGEYTIEAWTKFDFPGRANTHSNFKWRWYHFDGVDWDQSRKLNNRIYKFRTKAWDWEVDTEFGNYDYLLYADIDMDHPEVVNELRNWGVWYTNTLGLDGFRIDAVKHIKYSFTRDWINHVRSAIGKNMFAVAEFWKNDLGAIENYLNKTNWNHSVFDVPLHFNLYYASKSGGNYDMRQIFNGTVVQKHPTHAVTFVDNHDSQPEESLESFVREWFKPLAYALTLTREQGYPSVFYGDYYGIPTHGVPAMKSKIDPILEARQKYAYGRQNDYLDHHNIIGWTREGNTAHPNSGLATIMSDGAGGNKWMFVGRNKAGQVWTDITGNKAGTVTINADGWGNFSVNGGSVSIWVNK

SEQ ID NO: 23519 - protein, 485 aa, Bacillus sp.
HHNGTNGTMMQYFEWYLPNDGNHWNRLNSDASNLKSKGITAVWIPPAWKGASQNDVGYGAYDLYDLGEFNQKGTVRTKYGTRSQLQAAVTSLKNNGIQVYGDVVMNHKGGADATEMVRAVEVNPNNRNQEVTGEYTIEAWTRFDFPGRGNTHSSFKWRWYHFDGVDWDQSRRLNNRIYKFRGHGKAWDWEVDTENGNYDYLMYADYDYDHPEVVNEIRNWGVWYTNTLGLDGFRIDAVKHIKYSFTRDWINHVRSATGKNMFAVAEFWKNDLGAIENYLQKTNWNHSVFDVPLHYNLYNASKSGGNYDMRNIFNGTVVQRHPSHAVTFVDNHDSQPEEALESFVEEWFKPLAYALTLTREQGYPSVFYGDYYGIPTHGVPAMRSKIDPILEARQKYAYGKQNDYLDHHNIIGWTREGNTAHPNSGLATIMSDGAGGSKWMFVGRNKAGQVWSDITGNRTGTVTINADGWGNFSVNGGSVSIWVNK

SEQ ID NO: 23520 - protein, 483 aa, Bacillus sp.
HHNGTNGTLMQYFEWYLPNDGNHWNRLRSDASNLKDKGISAVWIPPAWKGTSQNDVGYGAYDLYDLGEFNQKGTIRTKYGTRNQLQAAVNALKSNGIQVYGDVVMNHKGGADATEMVKAVEVNPNNRNQEVSGEYTIEAWTKFDFPGRANTHSNFKWRWYHFDGVDWDQSRKLNNRIYKFRTKAWDWEVDTEFGNYDYLMYADIDMDHPEVVNELRNWGVWYTNTLGLDGFRIDAVKHIKYSFTRDWINHVRSAAGKNMFAVAEFWKGDLGAIENYLNKTNWNHSVFDVPLHFNLYYASKSGGNYDMRQIFNGTVVQKHPTHAVTFVDNHDSQPEESLESFVREWFKPLAYALTLTREQGYPSVFYGDYYGIPTHGVPAMKSKIDPILEARQKYAYGRQNDYLDHHNIIGWTREGNTAHPNSGLATIMSDGAGGNKWMFVGRNKAGQVWTDITGNKAGTVTINADGWGNFSVNGGSVSIWVNK

SEQ ID NO: 23521 - protein, 485 aa, Bacillus sp.
HHNGTNGTLMQYFEWYLPNDGNHWNRLRSDASNLKDKGISAVWIPPAWKGTSQNDVGYGAYDLYDLGEFNQKGTIRTKYGTRNQLQAAVNALKSNGIQVYGDVVMNHKGGADATEMVKAVEVNPNNRNQEVSGEYTIEAWTKFDFPGRANTHSNFKWRWYHFDGVDWDQSRKLNNRIYKFRGDTKDWDWEVDTEFGNYDYLMYADIDMDHPEVVNELRNWGVWYTNTLGLDGFRIDAVKHIKYSFTRDWINHVRSAIGKNMFAVAEFWKGDLGAIENYLNKTNWNHSVFDVPLHFNLYYASKSGGNYDMRQIFNGTVVQKHPTHAVTFVDNHDSQPEESLESFVREWFKPLAYALTLTREQGYPSVFYGDYYGIPTHGVPAMKSKIDPILEARQKYAYGRQNDYLDHHNIIGWTREGNTAHPNSGLATIMSDGAGGNKWMFVGRNKAGQVWTDITGNKAGTVTINADGWGNFSVNGGSVSIWVNK

SEQ ID NO: 23522 - protein, 483 aa, Bacillus subtilis
HHNGTNGTLMQYFEWYLPNDGNHWNRLRSDASNLKDKGISAVWIPPAWKGASQNDVGYGAYDLYDLGEFNQKGTIRTKYGTRNQLQAAVNALKSNGIQVYGDVVMNHKGGADATEMVKAVEVNPNNRNQEVSGEYTIEAWTKFDFPGRANTHSNFKWRWYHFDGVDWDQSRKLNNRIYKFRTKAWDWEVDTEFGNYDYLMYADIDMDHPEVVNELRNWGVWYTNTLGLDGFRIDAVKHIKYSFTRDWINHVRSAIGKNMFAVAEFWKNDLGAIENYLNKTNWNHSVFDVPLHFNLYYASKSGGNYDMRQIFNGTVVQKHPTHAVTFVDNHDSQPEESLESFVREWFKPLAYALTLTREQGYPSVFYGDYYGIPTHGVPAMKSKIDPILEARQKYAYGRQNDYLDHHNIIGWTREGNTAHPNSGLATIMSDGAGGNKWMFVGRNKAGQVWTDITGNKAGTVTINADGWGNFSVNGGSVSIWVNK

SEQ ID NO: 23523 - protein, 485 aa, Bacillus sp.
HHNGTNGTMMQYFEWYLPNDGNHWNRLNSDASNLKSKGITAVWIPPAWKGASQNDVGYGAYDLYDLGEFNQKGTVRTKYGTRSQLQAAVTSLKNNGIQVYGDVVMNHKGGADATEMVRAVEVNPNNRNQEVTGEYTIEAWTRFDFPGRGNTHSSFKWRWYHFDGVDWDQSRRLNNRIYKFRGHGKAWDWEVDTENGNYDYLMYADIDMDHPESTNELRNWGVWYTNTLGLDGFRIDAVKHIKYSFTRDWINHVRSATGKNMFAVAEFWKNDLGAIENYLQKTNWNHSVFDVPLHYNLYNASKSGGNYDMRNIFNGTVVQRHPSHAVTFVDNHDSQPEEALESFVEEWFKPLAYALTLTREQGYPSVFYGDYYGIPTHGVPAMRSKIDPILEARQKYAYGKQNDYLDHHNIIGWTREGNTAHPNSGLATIMSDGAGGSKWMFVGRNKAGQVWSDITGNRTGTVTINADGWGNFSVNGGSVSIWVNK

SEQ ID NO: 23524 - protein, 483 aa, Bacillus sp.
HHNGTNGTLMQYFEWYLPNDGNHWNRLRSDASNLKDKGISAVWIPPAWKGTSQNDVGYGAYDLYDLGEFNQKGTIRTKYGTRNQLQAAVNALKSNGIQVYGDVVMNHKGGADATEMVKAVEVNPNNRNQEVSGEYTIEAWTKFDFPGRANTHSNFKWRWYHFDGVDWDQSRKLNNRIYKFRTKAWDWEVDTEFGNYDYLMYADIDMDHPEVVNELRNWGVWYTNTLGLDGFRIDAVKHIKYSFTRDWINHVRSAIGKNMFAVAEYWKNDLGAIENYLNKTNWNHSVFDVPLHFNLYYASKSGGNYDMRQIFNGTVVQKHPTHAVTFVDNHDSQPEESLESFVREWFKPLAYALTLTREQGYPSVFYGDYYGIPTHGVPAMKSKIDPILEARQKYAYGRQNDYLDHHNIIGWTREGNTAHPNSGLATIMSDGAGGNKWMFVGRNKAGQVWTDITGNKAGTVTINADGWGNFSVNGGSVSIWVNK

SEQ ID NO: 23525 - protein, 483 aa, Bacillus sp.
HHNGTNGTLMQYFEWYLPNDGNHWNRLRSDASNLKDKGISAVWIPPAWKGTSQNDVGYGAYDLYDLGEFNQKGTIRTKYGTRNQLIAAVNALKSNGIQVYGDVVMNHKGGADATEMVKAVEVNPNNRNQEVSGEYTIEAWTKFDFPGRANTHSNFKWRWYHFDGVDWDQSRKLNNRIYKFRTKAWDWEVDTEFGNYDYLMYADIDMDHPEVVNELRNWGVWYTNTLGLDGFRIDAVKHIKYSFTRDWINHVRSAIGKNMFAVAEFWKGDLGAIENYLNKTNWNHSVFDVPLHFNLYYASKSGGNYDMRQIFNGTVVQKHPTHAVTFVDNHDSQPEESLESFVREWFKPLAYALTLTREQGYPSVFYGDYYGIPTHGVPAMKSKIDPILEARQKYAYGRQNDYLDHHNIIGWTREGNTAHPNSGLATIMSDGAGGNKWMFVGRNKAGQVWTDITGNKAGTVTINADGWGNFSVNGGSVSIWVNK

SEQ ID NO: 23526 - protein, 483 aa, Bacillus sp.
HHNGTNGTLMQYFEWYLPNDGNHWNRLRSDASNLKDKGISAVWIPPAWKGTSQNDVGYGAYDLYDLGEFNQKGTIRTKYGTRNQLQAAVNALKSNGIQVYGDVVMNHKGGADATEMVKAVEVNPNNRNQEVSGEYTIEAWTKFDFPGRANTHSNFKWRWYHFDGVDWDQSRKLNNRIYKFRTKAWDWEVDTEFGNYDYLMYADIDMDHPEVVNELRNWGVWYTNTLGLDGFRIDAVKHIKYSFTRDWINHVRSAIGKNMFAVAEFWKNDLGAIENYLNKTNWNHSVFDVPLHFNLYYASKSGGNYDMRQIFNGTVVQKHPTHAVTFVDNHDSQPEESLESFVREWFKPLAYALTLTREQGYPSVFYGDYYGIPTHGVPAMKSKIDPILEARQKYAYGRQNDYLDHHNIIGWTREGNTAHPNSGLATIMSDGAGGNKWMFVGRNKAGQVWTDITGNKAGTVTINADGWGNFSCNGGSVSIWVNK

SEQ ID NO: 23527 - protein, 483 aa, Bacillus sp.
HHNGTNGTLMQYFEWYLPNDGNHWNRLRSDASNLKDKGISAVWIPPAWKGTSQNDVGYGAYDLYDLGEFNQKGTIRTKYGTRNQLQAAVNALKSNGIQVYGDVVMNHKGGADATEMVKAVEVNPNNRNQEVSGEYTIEAWTKFDFPGRANTHSNFKWRWYHFDGVDWDQSRKLNNRIYKFRTKAWDWEVDTEFGNYDYLLYADIDMDHPEVVNELRNWGVWYTNTLGLDGFRIDAVKHIKYSFTRDWINHVRSAIGKNMFAVAEFWKNDLGAIENYLNKTNWNHSVFDVPLHFNLYYASKSGGNYDMRQIFNGTVVQKHPTHAVTFVDNHDSQPEESLESFVREWFKPLAYALTLTREQGYPSVFYGDYYGIPTHGVPAMKSKIDPILEARQKYAYGRQNDYLDHHNIIGWTREGNTAHPNSGLATIMSDGAGGNKWMFVGRNKAGQVWTDITGNKAGTVTINADGWGNFSVNGGSVSIWVNK

SEQ ID NO: 23528 - protein, 485 aa, Bacillus sp.
HHNGTNGTMMQYFEWYLPNDGNHWNRLNSDASNLKSKGITAVWIPPAWKGASQNDVGYGAYDLYDLGEFNQKGTVRTKYGTRSQLQAAVTSLKNNGIQVYGDVVMNHKGGADATEMVRAVEVNPNNRNQEVTGEYTIEAWTRFDFPGRGNTHSSFKWRWYHFDGVDWDQSRRLNNRIYKFRGHGKAWDWEVDTEFGNYDYLMYADIDMDHPESVNELRNWGVWYTNTLGLDGFRIDAVKHIKYSFTRDWINHVRSATGKNMFAVAEFWKNDLGAIENYLQKTNWNHSVFDVPLHYNLYNASKSGGNYDMRNIFNGTVVQRHPSHAVTFVDNHDSQPEEALESFVEEWFKPLAYALTLTREQGYPSVFYGDYYGIPTHGVPAMRSKIDPILEARQKYAYGKQNDYLDHHNIIGWTREGNTAHPNSGLATIMSDGAGGSKWMFVGRNKAGQVWSDITGNRTGTVTINADGWGNFSVNGGSVSIWVNK

SEQ ID NO: 23529 - protein, 483 aa, Bacillus sp.
HHNGTNGTLMQYFEWYLPNDGNHWNRLRSDASNLKDKGISAVWIPPAWKGTSQNDVGYGAYDLYDLGEFNQKGTIRTKYGTRNQLQAAVNALKSNGIQVYGDVVMNHKGGADATEMVKAVEVNPNNRNQEVSGEYTIEAWTKFDFPGRANTHSNFKWRWYHFDGVDWDQSRKLNNRIYKFRTKAWDWEVDTEFGNYDYLMYADIDMDHPEVVNELRNWGVWYTNTLGLDGFRIDAVKHIKYSFTRDWINHVRKAIGKNMFAVAEFWKGDLGAIENYLNKTNWNHSVFDVPLHFNLYYASKSGGNYDMRQIFNGTVVQKHPTHAVTFVDNHDSQPEESLESFVREWFKPLAYALTLTREQGYPSVFYGDYYGIPTHGVPAMKSKIDPILEARQKYAYGRQNDYLDHHNIIGWTREGNTAHPNSGLATIMSDGAGGNKWMFVGRNKAGQVWTDITGNKAGTVTINADGWGNFSVNGGSVSIWVNK

SEQ ID NO: 23530 - protein, 485 aa, Bacillus sp.
HHNGTNGTMMQYFEWYLPNDGNHWNRLNSDASNLKSKGITAVWIPPAWKGASQNDVGYGAYDLYDLGEFNQKGTVRTKYGTRSQLQAAVTSLKNNGIQVYGDVVMNHKGGADATEMVRAVEVNPNNRNQEVTGEYTIEAWTRFDFPGRGNTHSSFKWRWYHFDGVDWDQSRRLNNRIYKFRGHGKAWDWEVDTENGNYDYLMYADYDYDHPEVVNEQRNWGVWYTNTLGLDGFRIDAVKHIKYSFTRDWINHVRSATGKNMFAVAEFWKNDLGAIENYLQKTNWNHSVFDVPLHYNLYNASKSGGNYDMRNIFNGTVVQRHPSHAVTFVDNHDSQPEEALESFVEEWFKPLAYALTLTREQGYPSVFYGDYYGIPTHGVPAMRSKIDPILEARQKYAYGKQNDYLDHHNIIGWTREGNTAHPNSGLATIMSDGAGGSKWMFVGRNKAGQVWSDITGNRTGTVTINADGWGNFSVNGGSVSIWVNK

SEQ ID NO: 23531 - protein, 485 aa, Bacillus sp.
HHNGTNGTMMQYFEWYLPNDGNHWNRLNSDASNLKSKGITAVWIPPAWKGASQNDVGYGAYDVYDLGEFNQKGTVRTKYGTRSQLQAAVTSLKNNGIQVYGDVVLNHKGGADATEMVRAVEVNPNNRNQEVTGEYTIEAWTRFDFPGRGNTHSSFKWRWYHFDGVDWDQSRRLNNRIYKFRGHGKAWDWEVDTENGNYDYLMYADYDMDHPEVVNELRNWGVWYTNTLGLDGFRIDAVKHIKYSFTRDWINHVRSATGKNMFAVAEFWKNDLGAIENYLQKTNWNHSVFDVPLHYNLYNASKSGGNYDMRNIFNGTVVQRHPSHAVTFVDNHDSQPEEALESFVEEWFKPLAYALTLTREQGYPSVFYGDYYGIPTHGVPAMRSKIDPILEARQKYAYGKQNDYLDHHNIIGWTREGNTAHPNSGLATIMSDGAGGSKWMFVGRNKAGQVWSDITGNRTGTVTINADGWGNFSVNGGSVSIWVNK

SEQ ID NO: 23532 - protein, 483 aa, Bacillus sp.
HHNGTNGTLMQYFEWYLPNDGNHWNRLRSDASNLKDKGISAVWIPPAWKGTSQNDVGYGAYDLYDLGEFNQKGTIRTKYGTRNQLQAAVNALKSNGIQVYGDVVMNHKGGADATEMVKAVEVNPNNRNQEVSGEYTIEAWTKFDFPGRANTHSNFKWRWYHFDGVDWDQSRKLNNRIYKFRTKAWDWEVDTEFGNYDYLMYADIDMDHPEVVNELRNWGVWYTNTLGLDGFRIDAVKHIKYSFTRDWINHVRSAIGKNMFAVAEFWNNDLGAIENYLNKTNWNHSVFDVPLHFNLYYASKSGGNYDMRQIFNGTVVQKHPTHAVTFVDNHDSQPEESLESFVREWFKPLAYALTLTREQGYPSVFYGDYYGIPTHGVPAMKSKIDPILEARQKYAYGRQNDYLDHHNIIGWTREGNTAHPNSGLATIMSDGAGGNKWMFVGRNKAGQVWTDITGNKAGTVTINADGWGNFSVNGGSVSIWVNK

SEQ ID NO: 23533 - protein, 483 aa, Bacillus sp. SP70
HHNGTNGTMMQYFEWYLPNDGNHWNRLNSDASNLKSKGITAVWIPPAWKGASQNDVGYGAYDLYDLGEFNQKGTVRTKYGTRSQLQAAVTSLKNNGIQVYGDVVMNHKGGADATEMVRAVEVNPNNRNQEVTGEYTIEAWTRFDFPGRGNTHSSFKWRWYHFDGVDWDQSRRLNNRIYKFRGKAWDYPVDTENGNYDYLMYADIDMDHPEVVNELRNWGVWYTNTLGLDGFRIDAVKHIKYSFTRDWINHVRSATGKNMFAVAEFWKNDLGAIENYLQKTNWNHSVFDVPLHYNLYNASKSGGNYDMRNIFNGTVVQRHPSHAVTFVDNHDSQPEEALESFVEEWFKPLAYALTLTREQGYPSVFYGDYYGIPTHGVPAMRSKIDPILEARQKYAYGKQNDYLDHHNIIGWTREGNTAHPNSGLATIMSDGAGGSKWMFVGRNKAGQVWSDITGNRTGTVTINADGWGNFSVNGGSVSIWVNK

SEQ ID NO: 23534 - protein, 483 aa, Bacillus sp.
HHNGTNGTLMQYFEWYLPNDGNHWNRLRSDASNLKDKGISAVWIPPAWKGTSQNDVGYGAYDLYDLGEFNQKGTIRTKYGTRNQLQAAVNALKSNGIQVYGDVVMNHKGGADATEMVKAVEVNPNNRNQEVSGEYTIEAWTKFDFPGRANTHSNFKWRWYHFDGVDWDQSRKLNNRIYKFRTKAWDWEVDTEFGNYDYLMYADIDMDHPEVVNELRNWGVWYTNTLGLDGFRIDAVKHIKYSFTRDWINHVRSAIGKNMFAVAEFWKNDLGAIENYLNKTNWNHSVFDVPLHFNLYYASKSGGNYDMRQIFNGTVVRKHPTHAVTFVDNHDSQPEESLESFVREWFKPLAYALTLTREQGYPSVFYGDYYGIPTHGVPAMKSKIDPILEARQKYAYGRQNDYLDHHNIIGWTREGNTAHPNSGLATIMSDGAGGNKWMFVGRNKAGQVWTDITGNKAGTVTINADGWGNFSVNGGSVSIWVNK

SEQ ID NO: 23535 - protein, 485 aa, Bacillus sp.
HHNGTNGTMMQYFEWYLPNDGNHWNRLNSDASNLKSKGITAVWIPPAWKGASQNDVGYGAYDLYDLGEFNQKGTVRTKYGTRSQLQAAVTSLKNNGIQVYGDVVMNHKGGADATEMVRAVEVNPNNRNQEVTGEYTIEAWTRFEFPGRGNTHSSKKWRWYHFDGVDWDQSRRLNNRIYKFRGHGKAWDWEVDTENGNYDYLMYADIDMDHPEVVNELRNWGVWYTNTLGLDGFRIDAVKHIKYSFTRDWINHVRSATGKNMFAVAEFWKNDLGAIENYLQKTNWNHSVFDVPLHYNLYNASKSGGNYDMRNIFNGTVVQRHPSHAVTFVDNHDSQPEEALESFVEEWFKPLAYALTLTREQGYPSVFYGDYYGIPTHGVPAMRSKIDPILEARQKYAYGKQNDYLDHHNIIGWTREGNTAHPNSGLATIMSDGAGGSKWMFVGRNKAGQVWSDITGNRTGTVTINADGWGNFSVNGGSVSIWVNK

SEQ ID NO: 23536 - protein, 485 aa, Bacillus sp.
HHNGTNGTLMQYFEWYLPNDGNHWNRLRSDASNLKDKGISAVWIPPAWKGASQNDVGYGAYDLYDLGEFNQKGTIRTKYGTRNQLQAAVNALKSNGIQVYGDVVMNHKGGADATEMVRAVEVNPNNRNQEVSGEYTIEAWTKFDFPGRGNTHSNFKWRWYHFDGVDWDQSRKLNNRIYKFRGDGKGWDWEVDTENGNYDYLTYADIDMDHPEVVNELRNWGVWYTNTLGLDGFRIDAVKHIKYSFTRDWINHVRSATGKNMFAVAEFWKNDLGAIENYLNKTNWNHSVFDVPLHYNLYNASKSGGNYDMRQIFNGTVVQRHPTHAVTFVDNHDSQPEEALESFVEEWFKPLAYALTLTREQGYPSVFYGDYYGIPTHGVPAYKSKIDPILEARQKYAYGRQNDYLDHHNIIGWTREGNTAHPNSGLATIMSDGAGGNKWMFVGRNKAGQVWTDITGNRAGTVTINADGWGNFSVNGGSVSIWVNK

SEQ ID NO: 23537 - protein, 483 aa, Bacillus sp.
HHNGTNGTLMQYFEWYLPNDGNHWNRLRSDASNLKDKGISAVWIPPAWKGTSQNDVGYGAYDLYDLGEFNQKGTIRTKYGTRNQLQAAVNALKSNGIQVYGDVVMNHKGGADATEMVKAVEVNPNNRNQEVSGEYTIEAWTKFDFPGRANTHSNFKWRWYHFDGVDWDQSRKLNNRIYKFRTKAWDWEVDTEFGNYDYLMYADIDMDHPEVVNELRNWGVWYTNTLGLDGFRIDAVKHIKFSFTRDWINHVRSAIGKNMFAVAEFWKNDLGAIENYLNKTNWNHSVFDVPLHFNLYYASKSGGNYDMRQIFNGTVVQKHPTHAVTFVDNHDSQPEESLESFVREWFKPLAYALTLTREQGYPSVFYGDYYGIPTHGVPAMKSKIDPILEARQKYAYGRQNDYLDHHNIIGWTREGNTAHPNSGLATIMSDGAGGNKWMFVGRNKAGQVWTDITGNKAGTVTINADGWGNFSVNGGSVSIWVNK

SEQ ID NO: 23538 - protein, 485 aa, Bacillus sp.
HHNGTNGTMMQYFEWYLPNDGNHWNRLNSDASNLKSKGITAVWIPPAWKGASQNDVGYGAYDVYDLGEFNQKGTVRTKYGTRSQLQAAVTSLKNNGIQVYGDVVMNHKGGADATEMVRAVEVNPNNRNQEVTGEYTIEAWTRFDFPGRGNTHSSFKWRWYHFDGVDWDQSRRLNNRIYKFRGHGKAWDWEVDTENGNYDYLMYADYDMDHPEVVNELRNWGVWYTNTLGLDGFRIDAVKHIKYSFVRDWINHVRSATGKNMFAVAEFWKNDLGAIENYLQKTNWNHSVFDVPLHYNLYNASKSGGNYDMRNIFNGTVVQRHPSHAVTFVDNHDSQPEEALESFVEEWFKPLAYALTLTREQGYPSVFYGDYYGIPTHGVPAMRSKIDPILEARQKYAYGKQNDYLDHHNIIGWTREGNTAHPNSGLATIMSDGAGGSKWMFVGRNKAGQVWSDITGNRTGTVTINADGWGNFSVNGGSVSIWVNK

SEQ ID NO: 23539 - protein, 483 aa, Bacillus sp.
HHNGTNGTLMQYFEWYLPNDGNHWNRLRSDASNLKDKGISAVWIPPAWKGTSQNDVGYGAYDLYDLGEFNQKGTIRTKYGTRNQLQAAVNALKSNGIQVYGDVVMNHRGGADATEMVKAVEVNPNNRNQEVSGEYTIEAWTKFDFPGRANTHSNFKWRWYHFDGVDWDQSRKLNNRIYKFRTKAWDWEVDTEFGNYDYLMYADIDMDHPEVVNELRNWGVWYTNTLGLDGFRIDAVKHIKYSFTRDWINHVRSAIGKNMFAVAEFWKNDLGAIENYLNKTNWNHSVFDVPLHFNLYYASKSGGNYDMRQIFNGTVVQKHPTHAVTFVDNHDSQPEESLESFVREWFKPLAYALTLTREQGYPSVFYGDYYGIPTHGVPAMKSKIDPILEARQKYAYGRQNDYLDHHNIIGWTREGNTAHPNSGLATIMSDGAGGNKWMFVGRNKAGQVWTDITGNKAGTVTINADGWGNFSVNGGSVSIWVNK

SEQ ID NO: 23540 - protein, 483 aa, Bacillus sp. SP70
HHNGTNGTMMQYFEWYLPNDGNHWNRLNSDASNLKSKGITAVWIPPAWKGASQNDVGYGAYDLYDLGEFNQKGTVRTKYGTRSQLQAAVTSLKNNGIQVYGDVVMNHKGGADATEMVRAVEVNPNNRNQEVTGEYTIEAYTRFDFPGRGNTHSSFKWRWYHFDGVDWDQSRRLNNRIYKFRGKAWDWEVDTENGNYDYLMYADIDMDHPEVVNELRNWGVWYTNTLGLDGFRIDAVKHIKYSFTRDWINHVRSATGKNMFAVAEFWKNDLGAIENYLQKTNWNHSVFDVPLHYNLYNASKSGGNYDMRNIFNGTVVQRHPSHAVTFVDNHDSQPEEALESFVEEWFKPLAYALTLTREQGYPSVFYGDYYGIPTHGVPAMRSKIDPILEARQKYAYGKQNDYLDHHNIIGWTREGNTAHPNSGLATIMSDGAGGSKWMFVGRNKAGQVWSDITGNRTGTVTINADGWGNFSVNRGSVSIWVNK

SEQ ID NO: 23541 - protein, 485 aa, Bacillus sp.
HHNGTNGTMMQYFEWYLPNDGNHWNRLNSDASNLKSKGITAVWIPPAWKGASQNDVGYGAYDLYDLGEFNQKGTVRTKYGTRSQLQAAVTSLKNNGIQVYGDVVINHKGGADATEMVRAVEVNPNNRNQEVTGEYTIEAWTRFDFPGRGNTHSSFKWRWYHFDGVDWDQSRRLNNRIYKFRGHGKAWDWEVDTENGNYDYLMYADYDMDHPEVVNELRNWGVWYTNTLGLDGFRIDAVKHIKYSFIRDWINHVRSATGKNMFAVAEFWKNDLGAIENYLQKTNWNHSVFDVPLHYNLYNASKSGGNYDMRNIFNGTVVQRHPSHAVTFVDNHDSQPEEALESFVEEWFKPLAYALTLTREQGYPSVFYGDYYGIPTHGVPAMRSKIDPILEARQKYAYGKQNDYLDHHNIIGWTREGNTAHPNSGLATIMSDGAGGSKWMFVGRNKAGQVWSDITGNRTGTVTINADGWGNFSVNGGSVSIWVNK

SEQ ID NO: 23542 - protein, 485 aa, Bacillus sp.
HHNGTNGTMMQYFEWYLPNDGNHWNRLNSDASNLKSKGITAVWIPPAWKGASQNDVGYGAYDLYDLGEFNQKGTVRTKYGTRSQLQAAVTSLKNNGIQVYGDVVLNHKGGADATEMVRAVEVNPNNRNQEVTGEYTIEAWTRFDFPGRGNTHSSFKWRWYHFDGVDWDQSRRLNNRIYKFRGHGKAWDWEVDTENGNYDYLMYADYDMDHPEVVNEIRNWGVWYTNTLGLDGFRIDAVKHIKYSFTRDWINHVRSATGKNMFAVAEFWKNDLGAIENYLQKTNWNHSVFDVPLHYNLYNASKSGGNYDMRNIFNGTVVQRHPSHAVTFVDNHDSQPEEALESFVEEWFKPLAYALTLTREQGYPSVFYGDYYGIPTHGVPAMRSKIDPILEARQKYAYGKQNDYLDHHNIIGWTREGNTAHPNSGLATIMSDGAGGSKWMFVGRNKAGQVWSDITGNRTGTVTINADGWGNFSVNGGSVSIWVNK

SEQ ID NO: 23543 - protein, 483 aa, Bacillus sp.
HHNGTNGTLMQYFEWYLPNDGNHWNRLRSDASNLKDKGISAVWIPPAWKGTSQNDVGYGAYDLYDLGEFNQKGTIRTKYGTRNQLQAAVNALKSNGIQVYGDVVMNHKGGADATEMVKAVEVNPNNRNQEVSGEYTIEAWTKFDFPGRANTHSNFKWRWYHFDGVDWDQSRKLNNRIYKFRTKAWDWEVDTEFGNYDYLMYADIDMDHPEVVNELRNWGVWYTNTLGLDGFRIDAVKHIKYSFTRDWINHVRSAIGKNLFAVAEFWKNDLGAIENYLNKTNWNHSVFDVPLHFNLYYASKSGGNYDMRQIFNGTVVQKHPTHAVTFVDNHDSQPEESLESFVREWFKPLAYALTLTREQGYPSVFYGDYYGIPTHGVPAMKSKIDPILEARQKYAYGRQNDYLDHHNIIGWTREGNTAHPNSGLATIMSDGAGGNKWMFVGRNKAGQVWTDITGNKAGTVTINADGWGNFSVNGGSVSIWVNK

SEQ ID NO: 23544 - protein, 485 aa, Bacillus sp.
HHNGTNGTLMQYFEWYLPNDGNHWNRLRSDASNLKDKGISAVWIPPAWKGASQNDVGYGAYDLYDLGEFNQKGTIRTKYGTRNQLQAAVNALKSNGIQVYGDVVMNHKGGADATEMVRAVEVNPNNRNQEVSGEYTIEAWTKFDFPGRGNTHSNFKWRWYHFDGVDWDQSRKLNNRIYKFRGDGKGWDWEVDTEFGNYDYLVYADIDMDHPEVVNELRNWGVWYTNTLGLDGFRIDAVKHIKYSFTRDWINHVRSATGKNMFAVAEFWKNDLGAIENYLNKTNWNHSVFDVPLHYNLYNASKSGGNYDMRQIFNGTVVQRHPTHAVTFVDNHDSQPEEALESFVEEWFKPLAYALTLTREQGYPSVFYGDYYGIPTHGVPAMKSKIDPILEARQKYAYGRQNDYLDHHNIIGWTREGNTAHPNSGLATIMSDGAGGNKWMFVGRNKAGQVWTDITGNRAGTVTINADGWGNFSVNGGSVSIWVNK

SEQ ID NO: 23545 - protein, 485 aa, Bacillus sp.
HHNGTNGTLMQYFEWYLPNDGNHWNRLRSDASNLKDKGISAVWIPPAWKGASQNDVGYGAYDLYDLGEFNQKGTIRTKYGTRNQLQAAVNALKSNGIQVYGDVVMNHKGGADATEMVRAVEVNPNNRNQEVSGEYTIEAWTKFDFPGRGNTHSNFKWRWYHFDGVDWDQSRKLNNRIYKFRGDGKGWDWEVDTENGNYDYLIYADIDMDHPEVVNELRNWGVWYTNTLGLDGFRIDAVKHIKYSFTRDWINHVRSATGKNMFAVAEFWKNDLGAIENYLNKTNWNHSVFDVPLHYNLYNASKSGGNYDMRQIFNGTVVQRHPTHAVTFVDNHDSQPEEALESFVEEWFKPLAYALTLTREQGYPSVFYGDYYGIPTHGVPAYKSKIDPILEARQKYAYGRQNDYLDHHNIIGWTREGNTAHPNSGLATIMSDGAGGNKWMFVGRNKAGQVWTDITGNRAGTVTINADGWGNFSVNGGSVSIWVNK

SEQ ID NO: 23546 - protein, 483 aa, Bacillus sp.
HHNGTNGTLMQYFEWYLPNDGNHWNRLRSDASNLKDKGISAVWIPPAWKGTSQNDVGYGAYDLYDLGEFNQKGTIRTKYGTRNQLQAAVNALKSNGIQVYGDVVMNHKGGADATEMVKAVEVNPNNRNQEVSGEYTIEAWTKFDFPGRANTHSNFKWRWYHFDGVDWDQSRKLNNRIYKFRTKAWDWEVDTEFGNYDYLMYADIDMDHPEVVNELRNWGVWYTNTLGLDGFRIDAVKHIKYSFTRDWINHVRSAIGKNMFAVAEFWKGDLGAIENYLNKTNWNHSVFDVPLHFNLYYASKSGGNYDMRTIFNGTVVQKHPTHAVTFVDNHDSQPEESLESFVREWFKPLAYALTLTREQGYPSVFYGDYYGIPTHGVPAMKSKIDPILEARQKYAYGRQNDYLDHHNIIGWTREGNTAHPNSGLATIMSDGAGGNKWMFVGRNKAGQVWTDITGNKAGTVTINADGWGNFSVNGGSVSIWVNK

SEQ ID NO: 23547 - protein, 483 aa, Bacillus sp.
HHNGTNGTLMQYFEWYLPNDGNHWNRLRSDASNLKDKGISAVWIPPAWKGTSQNDVGYGAYDLYDLGEFNQKGTIRTKYGTRNQLQAAVNALKSNGIQVYGDVVMNHKGGADATEMVKAVEVNPNNRNQEVSGEYTIEAWTKFDFPGRANTHSNFKWRWYHFDGVDWDQSRKLNNRIYKFRTKAWDWEVDTEFGNYDYLMYADIDMDHPEVVNELRNWGVWYTNTLGLDGFRIDAVKHIKYSFTKDWINHVRSAIGKNMFAVAEFWKNDLGAIENYLNKTNWNHSVFDVPLHFNLYYASKSGGNYDMRQIFNGTVVQKHPTHAVTFVDNHDSQPEESLESFVREWFKPLAYALTLTREQGYPSVFYGDYYGIPTHGVPAMKSKIDPILEARQKYAYGRQNDYLDHHNIIGWTREGNTAHPNSGLATIMSDGAGGNKWMFVGRNKAGQVWTDITGNKAGTVTINADGWGNFSVNGGSVSIWVNK

SEQ ID NO: 23548 - protein, 483 aa, Bacillus sp.
HHNGTNGTLMQYFEWYLPNDGNHWNRLRSDASNLKDKGISAVWIPPAWKGASQNDVGYGAYDLYDLGEFNQKGTIRTKYGTRNQLQAAVNALKSNGIQVYGDVVMNHKGGADATEMVKAVEVNPNNRNQEVSGEYTIEAWTKFDFPGRANTHSNFKWRWYHFDGVDWDQSRKLNNRIYKFRTKAWDWEVDTEFGNYDYLLYADIDMDHPEVVNELRNWGVWYTNTLGLDGFRIDAVKHIKYSFTRDWLNHVRSAIGKNMFAVAEFWKNDLGAIENYLNKTNWNHSVFDVPLHFNLYYASKSGGNYDMRQIFNGTVVQKHPTHAVTFVDNHDSQPEESLESFVREWFKPLAYALTLTREQGYPSVFYGDYYGIPTHGVPAMKSKIDPILEARQKYAYGRQNDYLDHHNIIGWTREGNTAHPNSGLATIMSDGAGGNKWMFVGRNKAGQVWTDITGNKAGTVTINADGWGNFSVNGGSVSIWVNK

SEQ ID NO: 23549 - protein, 485 aa, Bacillus subtilis
HHNGTNGTMMQYFEWYLPNDGNHWNRLRSNASDLKDVGISAVWIPPAWKGASQNDVGYGAYDLYDLGEFNQKGTIRTKYGTRNQLQAAVNALKSNGIQVYGDVVMNHKGGADATEMVRAVEVNPNNRNQEVSGEYTIEAWTKFDFPGRGNTHSNFKWRWYHFDGVDWDQSRKLNNRIYKFRGDGKGWDWEVDTENGNYDYLMYADIDMDHPEVVNELRNWGVWYTNTLGLDGFRIDAVKHIKYSFTRDWINHVRSATGKNMFAVAEFWKNDLGAIENYLNKTNWNHSVFDVPLHYNLYNASKSGGNYDMRQIFNGTVVQRHPMHAVTFVDNHDSQPEEALESFVEEWFKPLAYALTLTREQGYPSVFYGDYYGIPTHGVPAMRSKIDPILEARQKYAYGRQNDYLDHHNIIGWTREGNTAHPNSGLATIMSDGAGGNKWMFVGRNKAGQVWTDITGNRAGTVTINADGWGNFSVNGGSVSIYVNK

SEQ ID NO: 23550 - protein, 483 aa, Bacillus sp.
HHNGTNGTLMQYFEWYLPNDGNHWNRLRSDASNLKDKGITAVWIPPAWKGASQNDVGYGAYDLYDLGEFNQKGTIRTKYGTRNQLQAAVNALKSNGIQVYGDVVMNHKGGADATEMVKAVEVNPNNRNQEVSGEYTIEAWTKFDFPGRANTHSNFKWRWYHFDGVDWDQSRKLNNRIYKFRTKAWDWEVDTEFGNYDYLLYADIDMDHPEVVNELRNWGVWYTNTLGLDGFRIDAVKHIKYSFTRDWINHVRSAIGKNMFAVAEFWKNDLGAIENYLNKTNWNHSVFDVPLHFNLYYASKSGGNYDMRQIFNGTVVQKHPTHAVTFVDNHDSQPEESLESFVREWFKPLAYALTLTREQGYPSVFYGDYYGIPTHGVPAMKSKIDPILEARQKYAYGRQNDYLDHHNIIGWTREGNTAHPNSGLATIMSDGAGGNKWMFVGRNKAGQVWTDITGNKAGTVTINADGWGNFSVNGGSVSIWVNK

SEQ ID NO: 23551 - protein, 485 aa, Bacillus sp.
HHNGTNGTLMQYFEWYLPNDGNHWNRLRSDASNLKDKGISAVWIPPAWKGASQNDVGYGAYDLYDLGEFNQKGTIRTKYGTRNQLQAAVNALKSNGIQVYGDVVMNHKGGADATEMVRAVEVNPNNRNQEVSGEYTIEAWTKFDFPGRGNTHSNFKWRWYHFDGVDWDQSRKLNNRIYKFRGDGKGWDWEVDTEFGNYDYLTYADIDMDHPEVVNELRNWGVWYTNTLGLDGFRIDAVKHIKYSFTRDWINHVRSATGKNMFAVAEFWKNDLGAIENYLNKTNWNHSVFDVPLHYNLYNASKSGGNYDMRQIFNGTVVQRHPTHAVTFVDNHDSQPEEALESFVEEWFKPLAYALTLTREQGYPSVFYGDYYGIPTHGVPAMKSKIDPILEARQKYAYGRQNDYLDHHNIIGWTREGNTAHPNSGLATIMSDGAGGNKWMFVGRNKAGQVWTDITGNRAGTVTINADGWGNFSVNGGSVSIWVNK

SEQ ID NO: 23552 - protein, 485 aa, Bacillus sp.
HHNGTNGTMMQYFEWYLPNDGNHWNRLNSDASNLKSKGITAVWIPPAWKGASQNDVGYGAYDLYDLGEFNQKGTVRTKYGTRSQLQAAVTSLKNNGIQVYGDVVMNHKGGADATEMVRAVEVNPNNRNQEVTGEYTIEAWTRFDFPGRGNTHSSFKWRWYHFDGVDWDQSRRLNNRIYKFRGHGKAWDWEVDTENGNYDYLMYADLDMDHPEVVNEVRNWGVWYTNTLGLDGFRIDAVKHIKYSFLRDWINHVRSATGKNMFAVAEFWKNDLGAIENYLQKTNWNHSVFDVPLHYNLYNASKSGGNYDMRNIFNGTVVQRHPSHAVTFVDNHDSQPEEALESFVEEWFKPLAYALTLTREQGYPSVFYGDYYGIPTHGVPAMRSKIDPILEARQKYAYGKQNDYLDHHNIIGWTREGNTAHPNSGLATIMSDGAGGSKWMFVGRNKAGQVWSDITGNRTGTVTINADGWGNFSVNGGSVSIWVNK

SEQ ID NO: 23553 - protein, 483 aa, Bacillus sp.
HHNGTNGTLMQYFEWYLPNDGNHWNRLRSDASNLKDKGISAVWIPPAWKGTSQNDVGYGAYDLYDLGEFNQKGTIRTKYGTRNQLQAAVNALKSNGIQVYGDVVMNHKGGADATEMVKAVEVNPNNRNQEVSGEYTIEAWTKFDFPGRANTHSNFKWRWYHFDGVDWDQSRKLNNRIYKFRTKAWDWEVDTEFGNYDYLMYADIDMDHPEVVNELRNWGVWYTNTLGLDGFRIDAVKHIKYSFTRDWINHVRSAIGKNMFAVAEFWKNDLGAIENYLNKTNWNHSVFDVPLHFNLYYASKSGGNYDMRQIFNGTVVQKHPTHAVTFVDNHDSQPEESLESFVREWFKPLAYALTLTREQGYPSVFYGDYYGIPTHGVPAMKSKIDPILEARQKYAWGRQNDYLDHHNIIGWTREGNTAHPNSGLATIMSDGAGGNKWMFVGRNKAGQVWTDITGNKAGTVTINADGWGNFSVNGGSVSIWVNK

SEQ ID NO: 23554 - protein, 485 aa, Bacillus sp.
HHNGTNGTMMQYFEWYLPNDGNHWNRLNSDASNLKSKGITAVWIPPAWKGASQNDVGYGAYDIYDLGEFNQKGTVRTKYGTRSQLQAAVTSLKNNGIQVYGDVVMNHKGGADATEMVRAVEVNPNNRNQEVTGEYTIEAWTRFDFPGRGNTHSSFKWRWYHFDGVDWDQSRRLNNRIYKFRGHGKAWDWEVDTENGNYDYLMYADYDMDHPEVVNELRNWGVWYTNTLGLDGFRIDAVKHVKYSFTRDWINHVRSATGKNMFAVAEFWKNDLGAIENYLQKTNWNHSVFDVPLHYNLYNASKSGGNYDMRNIFNGTVVQRHPSHAVTFVDNHDSQPEEALESFVEEWFKPLAYALTLTREQGYPSVFYGDYYGIPTHGVPAMRSKIDPILEARQKYAYGKQNDYLDHHNIIGWTREGNTAHPNSGLATIMSDGAGGSKWMFVGRNKAGQVWSDITGNRTGTVTINADGWGNFSVNGGSVSIWVNK

SEQ ID NO: 23555 - protein, 485 aa, Synthetic construct
HHNGTNGTMMQYFEWYLPNDGNHWNRLRSDASNLKDKGISAVWIPPAWKGASQNDVGYGAYDLYDLGEFNQKGTIRTKYGTRNQLQAAVNALKSNGIQVYGDVVMNHKGGADFTERVQAVEVNPQNRNQEVSGTYQIEAWTGFNFPGRGNQHSSFKWRWYHFDGTDWDQSRQLANRIYKFRGDGKAWDWEVDTENGNYDYLMYADVDMDHPEVVNELRNWGVWYTNTLGLDGFRIDAVKHIKYSFTRDWINHVRSATGKNMFAVAEFWKNDLGAIENYLNKTNWNHSVFDVPLHYNLYNASKSGGNYDMRQIFNGTVVQRHPMHAVTFVDNHDSQPEEALESFVEEWFKPLAYALTLTREQGYPSVFYGDYYGIPTHGVPAMKSKIDPILEARQKYAYGRQNDYLDHHNIIGWTREGNTAHPNSGLATIMSDGAGGNKWMFVGRNKAGQVWTDITGNRAGTVTINADGWGNFSVNGGSVSIWVNK

SEQ ID NO: 23556 - protein, 483 aa, Bacillus sp.
HHNGTNGTLMQYFEWYLPNDGNHWNRLRSDASNLKDKGISAVWIPPAWKGASQNDVGYGAYDLYDLGEFNQKGTIRTKYGTRNQLQAAVNALKSNGIQVYGDVVMNHKGGADATEMVKAVEVNPNNRNQEVSGEYTIEAWTKFDFPGRGHTHSNFKWRWYHFDGVDWDQSRKLNNRIYKFRGKGWDWEVDTEFGNYDYLLYADIDMDHPEVTNELRNWGVWYTNTLGLDGFRIDAVKHIKYSFTRDWINHVRSATGKNMFAVAEFWKNDLGAIENYLNKTNWNHSVFDVPLHYNLYNASKSGGNYDMRQIFNGTVVQKHPTHAVTFVDNHDSQPEEALESFVEEWFKPLAYALTLTREQGYPSVFYGDYYGIPTHGVPAMKSKIDPILEARQKYAYGRQNDYLDHHNIIGWTREGNTAHPNSGLATIMSDGAGGNKWMFVGRNKAGQVWTDITGNKAGTVTINADGWGNFSVNGGSVSIWVNK

SEQ ID NO: 23557 - protein, 485 aa, Bacillus sp.
HHNGTNGTLMQYFEWYLPNDGNHWNRLRSDASNLKDKGISAVWIPPAWKGTSQNDVGYGAYDLYDLGEFNQKGTIRTKYGTRNQLQAAVNALKSNGIQVYGDVVMNHKGGADATEMVKAVEVNPNNRNQEVSGEYTIEAWTKFDFPGRANTHSNFKWRWYHFDGVDWDQSRKLNNRIYKFRGDTKDWDWEVDTEFGNYDYLMYADIDMDHPEVVNELRNWGVWYTNTLGLDGFRIDAVKHIKYSFTRDWINHVRSAIGKNMFAVAEFWKGDLGAIENYLNKTNWNHSVFDVPLHFNLYYASKSGGNYDMRQIFNGTVVQKHPTHAVTFVDNHDSQPEESLESFVREWFKPLAYALTLTREQGYPSVFYGDYYGIPTHGVPAMKSKIDPILEARQKYAYGRQYDYLDHHNIIGWTREGNTAHPNSGLATIMSDGAGGNKWMFVGRNKAGQVWTDITGNKAGTVTINADGWGNFSVNGGSVSIWVNK

SEQ ID NO: 23558 - protein, 483 aa, Bacillus sp. SP70
HHNGTNGTMMQYFEWYLPNDGNHWNRLNSDASNLKSKGITAVWIPPAWKGASQNDVGYGAYDLYDLGEFNQKGTVRTKYGTRSQLQAAVTSLKNNGIQVYGDVVMNHKGGADATEMVRAVEVNPNNRNQEVTGEYTIEAWTRFDFPGRGNTHSSFKWRWYHFDGVDWDQSRRLNNRIYKFRGKAWDEPVDTENGNYDYLMYADIDMDHPEVVNELRNWGVWYTNTLGLDGFRIDAVKHIKYSFTRDWINHVRSATGKNMFAVAEFWKNDLGAIENYLQKTNWNHSVFDVPLHYNLYNASKSGGNYDMRNIFNGTVVQRHPSHAVTFVDNHDSQPEEALESFVEEWFKPLAYALTLTREQGYPSVFYGDYYGIPTHGVPAMRSKIDPILEARQKYAYGKQNDYLDHHNIIGWTREGNTAHPNSGLATIMSDGAGGSKWMFVGRNKAGQVWSDITGNRTGTVTINADGWGNFSVNGGSVSIWVNK

SEQ ID NO: 23559 - protein, 483 aa, Bacillus sp.
HHNGTNGTMMQYFEWYLPNDGNHWNRLNSDASNLKSKGITAVWIPPAWKGASQNDVGYGAYDLYDLGEFNQKGTVRTKYGTRSQLQAAVTSLKNNGIQVYGDVVMNHKGGADATEMVRAVEVNPNNRNQEVTGEYTIEAWTRFDFPGRGNTHSSFKWRWYHFDGVDWDQSRRLNNRIYKFGHKAWDWEVDTENGNYDYLMYADIDMDHPEVVNELRNWGVWYTNTLGLDGFRIDAVKHIKYSFTRDWINHVRSATGKNMFAVAEFWKNDLGAIENYLQKTNWNHSVFDVPLHYNLYNASKSGGNYDMRNIFNGTVVQRHPSHAVTFVDNHDSQPEEALESFVEEWFKPLAYALTLTREQGYPSVFYGDYYGIPTHGVPAMRSKIDPILEARQKYAYGKQNDYLDHHNIIGWTREGNTAHPNSGLATIMSDGAGGSKWMFVGRNKAGQVWSDITGNRTGTVTINADGWGNFSVNGGSVSIWVNK

SEQ ID NO: 23560 - protein, 485 aa, Bacillus sp.
HHNGTNGTMMQYFEWYLPNDGNHWNRLNSDASNLKSKGITAVWIPPAWKGASQNDVGYGAYDLYDLGEFNQKGTVRTKYGTRSQLQAAVTSLKNNGIQVYGDVVMNHKGGADATEMVRAVEVNPNNRNQEVTGEYTIEAWTRFDFPGRGNTHSSFKWRWYHFDGVDWDQSRRLNNRIYKFRGHGKAWDWEVDTENGNYDYLMYADFDYDHPEVVNEVRNWGVWYTNTLGLDGFRIDAVKHIKYSFTRDWINHVRSATGKNMFAVAEFWKNDLGAIENYLQKTNWNHSVFDVPLHYNLYNASKSGGNYDMRNIFNGTVVQRHPSHAVTFVDNHDSQPEEALESFVEEWFKPLAYALTLTREQGYPSVFYGDYYGIPTHGVPAMRSKIDPILEARQKYAYGKQNDYLDHHNIIGWTREGNTAHPNSGLATIMSDGAGGSKWMFVGRNKAGQVWSDITGNRTGTVTINADGWGNFSVNGGSVSIWVNK

SEQ ID NO: 23561 - protein, 485 aa, Bacillus sp.
HHNGTNGTMMQYFEWYLPNDGNHWNRLNSDASNLKSKGITAVWIPPAWKGASQNDVGYGAYDLYDLGEFNQKGTVRTKYGTRSQLQAAVTSLKNNGIQVYGDVVMNHKGGADATEMVRAVEVNPNNRNQEVTGEYTIEAWTRFDFPGRGNTHSSFKWRWYHFDGVDWDQSRRLNNRIYKFRGHGKAWDWEVDTENGNYDYLMYADFDYDHPEVVNEMRNWGVWYTNTLGLDGFRIDAVKHIKYSFTRDWINHVRSATGKNMFAVAEFWKNDLGAIENYLQKTNWNHSVFDVPLHYNLYNASKSGGNYDMRNIFNGTVVQRHPSHAVTFVDNHDSQPEEALESFVEEWFKPLAYALTLTREQGYPSVFYGDYYGIPTHGVPAMRSKIDPILEARQKYAYGKQNDYLDHHNIIGWTREGNTAHPNSGLATIMSDGAGGSKWMFVGRNKAGQVWSDITGNRTGTVTINADGWGNFSVNGGSVSIWVNK

SEQ ID NO: 23562 - protein, 483 aa, Bacillus sp.
HHNGTNGTLMQYFEWYLPNDGNHWNRLRSDASNLKDKGISAVWIPPAWKGTSQNDVGYGAYDLYDLGEFNQKGTIRTKYGTRNQLQAAVNALKSNGIQVYGDVVMNHKGGADATEMVKAVEVNPNNRNQEVSGEYTIEAWTKFDFPGRANTHSNFKWRWYHFDGVDWDQSRKLNNRIYKFRTKAWDWEVDTEFGNYDYLMYADIDMDNPEVVNELRNWGVWYTNTLGLDGFRIDAVKHIKYSFTRDWINHVRSAIGKNMFAVAEFWKNDLGAIENYLNKTNWNHSVFDVPLHFNLYYASKSGGNYDMRQIFNGTVVQKHPTHAVTFVDNHDSQPEESLESFVREWFKPLAYALTLTREQGYPSVFYGDYYGIPTHGVPAMKSKIDPILEARQKYAYGRQNDYLDHHNIIGWTREGNTAHPNSGLATIMSDGAGGNKWMFVGRNKAGQVWTDITGNKAGTVTINADGWGNFSVNGGSVSIWVNK

SEQ ID NO: 23563 - protein, 485 aa, Bacillus sp.
HHNGTNGTMMQYFEWYLPNDGNHWNRLNSDASNLKSKGITAVWIPPAWKGASQNDVGYGAYDLYDLGEFNQKGTVRTKYGTRSQLQAAVTSLKNNGIQVYGDVVMNHKGGADATEMVRAVEVNPNNRNQEVTGEYTIEAWTRFDFPGRGNTHSSFKWRWYHFDGVDWDQSRRLNNRIYKFRGHGKAWDWEVDTENGNYDYLMYADFDYDHPEVVNEQRNWGVWYTNTLGLDGFRIDAVKHIKYSFTRDWINHVRSATGKNMFAVAEFWKNDLGAIENYLQKTNWNHSVFDVPLHYNLYNASKSGGNYDMRNIFNGTVVQRHPSHAVTFVDNHDSQPEEALESFVEEWFKPLAYALTLTREQGYPSVFYGDYYGIPTHGVPAMRSKIDPILEARQKYAYGKQNDYLDHHNIIGWTREGNTAHPNSGLATIMSDGAGGSKWMFVGRNKAGQVWSDITGNRTGTVTINADGWGNFSVNGGSVSIWVNK

SEQ ID NO: 23564 - protein, 485 aa, Bacillus sp.
HHNGTNGTMMQYFEWYLPNDGNHWNRLNSDASNLKSKGITAVWIPPAWKGASQNDVGYGAYDLYDLGEFNQKGTVRTKYGTRSQLQAAVTSLKNNGIQVYGDVVMNHKGGADATEMVRAVEVNPNNRNQEVTGEYTIEAWTRFDFPGRGNTHSSFKWRWYHFDGVDWDQSRRLNNRIYKFRGHGKAWDWEVDTENGNYDYLMYADIDMDHPEAQNELRNWGVWYTNTLGLDGFRIDAVKHIKYSFTRDWINHVRSATGKNMFAVAEFWKNDLGAIENYLQKTNWNHSVFDVPLHYNLYNASKSGGNYDMRNIFNGTVVQRHPSHAVTFVDNHDSQPEEALESFVEEWFKPLAYALTLTREQGYPSVFYGDYYGIPTHGVPAMRSKIDPILEARQKYAYGKQNDYLDHHNIIGWTREGNTAHPNSGLATIMSDGAGGSKWMFVGRNKAGQVWSDITGNRTGTVTINADGWGNFSVNGGSVSIWVNK

SEQ ID NO: 23565 - protein, 483 aa, Bacillus sp. SP70
HHNGTNGTMMQYFEWYLPNDGNHWNRLNSDASNLKSKGITAVWIPPAWKGASQNDVGYGAYDLYDLGEFNQKGTVRTKYGTRSQLQAAVTSLKNNGIQVYGDVVMNHKGGADATEMVRAVEVNPNNRNQEVTGEYTIEAWTRFDFPGRGNTHSSFKWRWYHFDGVDWDQSRRLNNRIYKFRGKAWDWEVDTENGNYDYLMYADIDMDHPEVVNELRNWGVWYTNTLGLDGFRIDAVKHIKYSFTRDWINHVRSATGKNMFAVAEFWKNDLGAIENYLQKTNDNHSVFDVPLHYNLYNASKSGGNYDMRNIFNGTVVQRHPSHAVTFVDNHDSQPEEALESFVEEWFKPLAYALTLTREQGYPSVFYGDYYGIPTHGVPAMRSKIDPILEARQKYAYGKQNDYLDHHNIIGWTREGNTAHPNSGLATIMSDGAGGSKWMFVGRNKAGQVWSDITGNRTGTVTINADGWGNFSVNGESVSIWVNK

SEQ ID NO: 23566 - protein, 483 aa, Bacillus sp. SP70
HHNGTNGTMMQYFEWYLPNDGNHWNRLNSDASNLKSKGITAVWIPPAWKGASQNDVGYGAYDLYDLGEFNQKGTVRTKYGTRSQLQAAVTSLKNNGIQVYGDVVMNHKGGADATEMVRAVEVNPNNRNQEVTGEYTIEAWTRFDFPGRGNTHSSFKWRWYHFDGVDWDQSRRLNNRIYKFRGKAWDWEVDTENGNYDYLMYADIDMDHPEVVNELRNWGVWYTNTLGLDGFRIDAVKHIKYSFTRDWINHVRSATGKNMFAVAEFWKNDLGAIENYLQKTNWNHSVFDVPLHYNLYNASKSGGNYDMRNIFNGTVVQRHPSHAVTFVDNHDSQPEEALESFVEEWFKPLAYALTLTREQGYPSVFYGDYYGIPTHGVPAMRSKIDPILEARQKYAYGKQNDYLDHHNIIGWTREGNTAHPNSGLATIMSDGAGGSKRMFVGRNKAGQVWSDITGNRTGTVTINAKGWGNFSVNGGSVSIWVNK

SEQ ID NO: 23567 - protein, 484 aa, Bacillus sp.
HHNGTNGTLMQYFEWYLPNDGNHWNRLRSDASNLKDKGISAVWIPPAWKGASQNDVGYGAYDLYDLGEFNQKGTIRTKYGTRNQLQAAVNALKSNGIQVYGDVVMNHKGGADATEMVKAVEVNPNNRNQEVSGEYTIEAWTKFDFPGRGHTHSNFKWRWYHFDGVDWDQSRKLNNRIYKFRGGKGWDWEVDTEFGNYDYLLYADIDMDHPEVTNELRNWGVWYTNTLGLDGFRIDAVKHIKYSFTRDWINHVRSATGKNMFAVAEFWKNDLGAIENYLNKTNWNHSVFDVPLHYNLYNASKSGGNYDMRQIFNGTVVQKHPTHAVTFVDNHDSQPEEALESFVEEWFKPLAYALTLTREQGYPSVFYGDYYGIPTHGVPAMKSKIDPILEARQKYAYGRQNDYLDHHNIIGWTREGNTAHPNSGLATIMSDGAGGNKWMFVGRNKAGQVWTDITGNKAGTVTINADGWGNFSVNGGSVSIWVNK

SEQ ID NO: 23568 - protein, 483 aa, Bacillus sp. SP70
HHNGTNGTMMQYFEWYLPNDGNHWNRLNSDASNLKSKGITAVWIPPAWKGASQNDVGYGAYDLYDLGEFNQSGTVRTKYGTRSQLQAAVTSLKNNGIQVYGDVVMNHKGGADATEMVRAVEVNPNNRNQEVTGEYTIEAYTRFDFPGRGNTHSSFKWRWYHFDGVDWDQSRRLNNRIYKFRGKAWDWEVDTENGNYDYLMYADIDMDHPEVVNELRNWGVWYTNTLGLDGFRIDAVKHIKYSFTRDWINHVRSATGKNMFAVAEFWKNDLGAIENYLQKTNWNHSVFDVPLHYNLYNASKSGGNYDMRNIFNGTVVQRHPSHAVTFVDNHDSQPEEALESFVEEWFKPLAYALTLTREQGYPSVFYGDYYGIPTHGVPAMRSKIDPILEARQKYAYGKQNDYLDHHNIIGWTREGNTAHPNSGLATIMSDGAGGSKWMFVGRNKAGQVWSDITGNRTGTVTINADGWGNFSVNGGSVSIWVNK

SEQ ID NO: 23569 - protein, 483 aa, Bacillus sp.
HHNGTNGTLMQYFEWYLPNDGNHWNRLRSDASNLKDKGISAVWIPPAWKGTSQNDVGYGAYDLYDLGEFNQKGTIRTKYGTRNQLQAAVNALKSNGIQVYGDVVMNHKGGADATEMVNAVEVNPNNRNQEVSGEYTIEAWTKFDFPGRANTHSNFKWRWYHFDGVDWDQSRKLNNRIYKFRTKAWDWEVDTEFGNYDYLMYADIDMDHPEVVNELRNWGVWYTNTLGLDGFRIDAVKHIKYSFTRDWINHVRSAIGKNMFAVAEFWKGDLGAIENYLNKTNWNHSVFDVPLHFNLYYASKSGGNYDMRQIFNGTVVQKHPTHAVTFVDNHDSQPEESLESFVREWFKPLAYALTLTREQGYPSVFYGDYYGIPTHGVPAMKSKIDPILEARQKYAYGRQNDYLDHHNIIGWTREGNTAHPNSGLATIMSDGAGGNKWMFVGRNKAGQVWTDITGNKAGTVTINADGWGNFSVNGGSVSIWVNK

SEQ ID NO: 23570 - protein, 483 aa, Bacillus sp.
HHNGTNGTLMQYFEWYLPNDGNHWNRLRSDASNLKDKGISAVWIPPAWKGASQNDVGYGAYDLYDLGEFNQKGTIRTKYGTRNQLQAAVNALKSNGIQVYGDVVMNHKGGADATEMVKAVEVNPNNRNQEVSGEYTIEAWTKFDFPGRANTHSNFKWRWYHFDGVDWDQSRKLNNRIYKFRTKAWDWEVDTENGNYDYLIYADIDMDHPEVVNELRNWGVWYTNTLGLDGFRIDAVKHIKYSFTRDWINHVRSAIGKNMFAVAEFWKNDLGAIENYLNKTNWNHSVFDVPLHFNLYYASKSGGNYDMRQIFNGTVVQKHPTHAVTFVDNHDSQPEESLESFVREWFKPLAYALTLTREQGYPSVFYGDYYGIPTHGVPAMKSKIDPILEARQKYAYGRQNDYLDHHNIIGWTREGNTAHPNSGLATIMSDGAGGNKWMFVGRNKAGQVWTDITGNKAGTVTINADGWGNFSVNGGSVSIWVNK

SEQ ID NO: 23571 - protein, 483 aa, Bacillus sp.
HHNGTNGTLMQYFEWYLPNDGNHWNRLRSDASNLKDVGISAVWIPPAWKGASQNDVGYGAYDLYDLGEFNQKGTIRTKYGTRNQLQAAVNALKSNGIQVYGDVVMNHKGGADATEMVKAVEVNPNNRNQEVSGEYTIEAWTKFDFPGRANTHSNFKWRWYHFDGVDWDQSRKLNNRIYKFRTKAWDWEVDTEFGNYDYLMYADIDMDHPEVVNELRNWGVWYTNTLGLDGFRIDAVKHIKYSFTRDWINHVRSAIGKNMFAVAEFWKNDLGAIENYLNKTNWNHSVFDVPLHFNLYYASKSGGNYDMRQIFNGTVVQKHPTHAVTFVDNHDSQPEESLESFVREWFKPLAYALTLTREQGYPSVFYGDYYGIPTHGVPAMKSKIDPILEARQKYAYGRQNDYLDHHNIIGWTREGNTAHPNSGLATIMSDGAGGNKWMFVGRNKAGQVWTDITGNKAGTVTINADGWGNFSVNGGSVSIWVNK

SEQ ID NO: 23572 - protein, 483 aa, Bacillus sp.
HHNGTNGTLMQYFEWYLPNDGNHWNRLRSDASNLKDKGISAVWIPPAWKGTSQNDVGYGAYDLYDLGEFNQKGTIRTKYGTRNQLLAAVNALKSNGIQVYGDVVMNHKGGADATEMVKAVEVNPNNRNQEVSGEYTIEAWTKFDFPGRANTHSNFKWRWYHFDGVDWDQSRKLNNRIYKFRTKAWDWEVDTEFGNYDYLMYADIDMDHPEVVNELRNWGVWYTNTLGLDGFRIDAVKHIKYSFTRDWINHVRSAIGKNMFAVAEFWKGDLGAIENYLNKTNWNHSVFDVPLHFNLYYASKSGGNYDMRQIFNGTVVQKHPTHAVTFVDNHDSQPEESLESFVREWFKPLAYALTLTREQGYPSVFYGDYYGIPTHGVPAMKSKIDPILEARQKYAYGRQNDYLDHHNIIGWTREGNTAHPNSGLATIMSDGAGGNKWMFVGRNKAGQVWTDITGNKAGTVTINADGWGNFSVNGGSVSIWVNK

SEQ ID NO: 23573 - protein, 485 aa, Bacillus sp.
HHNGTNGTMMQYFEWYLPNDGNHWNRLNSDASNLKSKGITAVWIPPAWKGASQNDVGYGAYDLYDLGEFNQKGTVRTKYGTRSQLQAAVTSLKNNGIQVYGDVVMNHKGGADATEMVRAVEVNPNNRNQEVTGEYTIEAWTRFDFPGRGNTHSSFKWRWYHFDGVDWDQSRRLNNRIYKFRGHGKAWDWEVDTENGNYDYLMYADLDFDHPEVVNEIRNWGVWYTNTLGLDGFRIDAVKHIKYSFTRDWINHVRSATGKNMFAVAEFWKNDLGAIENYLQKTNWNHSVFDVPLHYNLYNASKSGGNYDMRNIFNGTVVQRHPSHAVTFVDNHDSQPEEALESFVEEWFKPLAYALTLTREQGYPSVFYGDYYGIPTHGVPAMRSKIDPILEARQKYAYGKQNDYLDHHNIIGWTREGNTAHPNSGLATIMSDGAGGSKWMFVGRNKAGQVWSDITGNRTGTVTINADGWGNFSVNGGSVSIWVNK

SEQ ID NO: 23574 - protein, 482 aa, Bacillus sp.
HHNGTNGTLMQYFEWYLPNDGNHWNRLRSDASNLKDKGISAVWIPPAWKGASQNDVGYGAYDLYDLGEFNQKGTIRTKYGTRNQLQAAVNALKSNGIQVYGDVVMNHKGGADATEMVKAVEVNPNNRNQEVSGEYTIEAWTKFDFPGRANTHSNFKWRWYHFDGVDWDQSRKLQRIYKFRTKAWDWEVDTEFGNYDYLLYADIDMDHPEVVNELRNWGVWYTNTLGLDGFRIDAVKHIKYSFTRDWINHVRSAIGKNMFAVAEFWKNDLGAIENYLNKTNWNHSVFDVPLHFNLYYASKSGGNYDMRQIFNGTVVQKHPTHAVTFVDNHDSQPEESLESFVREWFKPLAYALTLTREQGYPSVFYGDYYGIPTHGVPAMKSKIDPILEARQKYAYGRQNDYLDHHNIIGWTREGNTAHPNSGLATIMSDGAGGNKWMFVGRNKAGQVWTDITGNKAGTVTINADGWGNFSVNGGSVSIWVNK

SEQ ID NO: 23575 - protein, 482 aa, Bacillus sp.
HHNGTNGTLMQYFEWYLPNDGNHWNRLRSDASNLKDKGISAVWIPPAWKGASQNDVGYGAYDLYDLGEFNQKGTIRTKYGTRNQLQAAVNALKSNGIQVYGDVVMNHKGGADATEMVKAVEVNPNNRNQEVSGEYTIEAWTKFDFPGRANTHSNFKWRWYHFDGVDWDQSRKLNRIYKFRTKAWDWEVDTEFGNYDYLLYADIDMDHPEVVNELRNWGVWYTNTLGLDGFRIDAVKHIKYSFTRDWINHVRSAIGKNMFAVAEFWKNDLGAIENYLNKTNWNHSVFDVPLHFNLYYASKSGGNYDMRQIFNGTVVQKHPTHAVTFVDNHDSQPEESLESFVREWFKPLAYALTLTREQGYPSVFYGDYYGIPTHGVPAMKSKIDPILEARQKYAYGRQNDYLDHHNIIGWTREGNTAHPNSGLATIMSDGAGGNKWMFVGRNKAGQVWTDITGNKAGTVTINADGWGNFSVNGGSVSIWVNK

SEQ ID NO: 23576 - protein, 484 aa, Bacillus sp. 707
HHNGTNGTMMQYFEWYLPNDGNHWNRLNSDASNLKSKGITAVWIPPAWKGASQNDVGYGAYDLYDLGEFNQKGTVRTKYGTRSQLQAAVTSLKNNGIQVYGDVVMNHKGGADATEMVRAVEVNPNNRNQEVTGEYTIEAWTRFDFPGRGNTHSSFKWRWYHFDGVDWDQSRRLNNRIYKFRGHGKAWDWEVDTENGNYDYLMYADIDMDHPEVVNELRNWGVWYTNTLGLDGFRIDAVKHIKYSFIRDWINHVRSATGKNMFAVAEFWKNDLGAIENYLQKTNWNHSVFDVPLHYNLYNASKSGGNYDMRNIFNGTVVQRHPSHAVTFVDNHDTQPEEALESFVEEWFKPLAYALTLTREQGYPSVFYGDYYGIPTHGVPAMRSKIDPILEARQKYAYGKQNDYLDHHNIGWTREGNTAHPNSGLATIMSDGAGGSKWMFVGRNKAGQVWSDITGNRTGTVTINADGWGNFSVNGGSVSIWVNK

SEQ ID NO: 23577 - protein, 484 aa, Bacillus sp. 707
HHNGTNGTMMQYFEWYLPNDGNHWNRLNSDASNLKSKGITAVWIPPAWKGASQNDVGYGAYDLYDLGEFNQKGTVRTKYGTRSQLQAAVTSLKNNGIQVYGDVVMNHKGGADATEMVRAVEVNPNNRNQEVTGEYTIEAWTRFDFPGRGNTHSSFKWRWYHFDGVDWDQSRRLNNRIYKFRGHGKAWDWEVDTENGNYDYLMYADIDMDHPEVVNELRNWGVWYTNTLGLDGFRIDAVKHIKYSFVRDWINHVRSATGKNMFAVAEFWKNDLGAIENYLQKTNWNHSVFDVPLHYNLYNASKSGGNYDMRNIFNGTVVQRHPSHAVTFVDNHDTQPEEALESFVEEWFKPLAYALTLTREQGYPSVFYGDYYGIPTHGVPAMRSKIDPILEARQKYAYGKQNDYLDHHNIGWTREGNTAHPNSGLATIMSDGAGGSKWMFVGRNKAGQVWSDITGNRTGTVTINADGWGNFSVNGGSVSIWVNK

SEQ ID NO: 23578 - protein, 484 aa, Synthetic construct
HHNGTNGTMMQYFEWYLPNDGNHWNRLRSDASNLKDKGISAVWIPPAWKGASQNDVGYGAYDLYDLGEFNQKGTIRTKYGTRNQLQAAVNALKSNGIQVYGDVVMNHKAGADGTELVDAVEVNPSDRNQEISGTYQIQAWTKFDFPGRGNTYSSFKWRWYHFDGTDWDESRKLNRIYKFRGTGKAWDWEVDTENGNYDYLMYADLDMDHPEVVNELRNWGVWYTNTLGLDGFRIDAVKHIKYSFTRDWINHVRSATGKNMFAVAEFWKNDLGAIENYLNKTNWNHSVFDVPLHYNLYNASKSGGNYDMRQIFNGTVVQRHPMHAVTFVDNHDSQPEEALESFVEEWFKPLAYALTLTREQGYPSVFYGDYYGIPTHGVPAMKSKIDPILEARQKYAYGRQNDYLDHHNIIGWTREGNTAHPNSGLATIMSDGAGGNKWMFVGRNKAGQVWTDITGNRAGTVTINADGWGNFSVNGGSVSIWVNK

SEQ ID NO: 23579 - protein, 484 aa, Bacillus sp. 707
HHNGTNGTMMQYFEWYLPNDGNHWNRLNSDASNLKSKGITAVWIPPAWKGASQNDVGYGAYDLYDLGEFNQKGTVRTKYGTRSQLQAAVTSLKNNGIQVYGDVVMNHKGGADATEMVRAVEVNPNNRNQEVTGEYTIEAWTRFDFPGRGNTHSSFKWRWYHFDGVDWDQSRRLNNRIYKFRGHGKAWDWEVDTENGNYDYLMYADIDMDHPEVVNELRNWGVWYTNTLGLDGFRIDAVKHIKYSFLRDWINHVRSATGKNMFAVAEFWKNDLGAIENYLQKTNWNHSVFDVPLHYNLYNASKSGGNYDMRNIFNGTVVQRHPSHAVTFVDNHDTQPEEALESFVEEWFKPLAYALTLTREQGYPSVFYGDYYGIPTHGVPAMRSKIDPILEARQKYAYGKQNDYLDHHNIGWTREGNTAHPNSGLATIMSDGAGGSKWMFVGRNKAGQVWSDITGNRTGTVTINADGWGNFSVNGGSVSIWVNK

SEQ ID NO: 23580 - protein, 484 aa, Synthetic construct
HHNGTNGTMMQYFEWYLPNDGNHWNRLRSDASNLKDKGISAVWIPPAWKGASQNDVGYGAYDLYDLGEFNQKGTIRTKYGTRNQLQAAVNALKSNGIQVYGDVVMDHKGGADGTEWVDAVEVNPSDRNQEISGTYQIQAWTKFDFPGRGNTYSSFKWRWYHFDGVDWDESRKLSRIYKFRGIGKAWDWEVDTENGNYDYLMYADLDMDHPEVVNELRNWGVWYTNTLGLDGFRIDAVKHIKYSFTRDWINHVRSATGKNMFAVAEFWKNDLGAIENYLNKTNWNHSVFDVPLHYNLYNASKSGGNYDMRQIFNGTVVQRHPMHAVTFVDNHDSQPEEALESFVEEWFKPLAYALTLTREQGYPSVFYGDYYGIPTHGVPAMKSKIDPILEARQKYAYGRQNDYLDHHNIIGWTREGNTAHPNSGLATIMSDGAGGNKWMFVGRNKAGQVWTDITGNRAGTVTINADGWGNFSVNGGSVSIWVNK

SEQ ID NO: 23581 - protein, 483 aa, Synthetic construct
SVPVNGTMMQYFEWYLPDDGTLWTKVANNAQSLANLGITALWLPPAYKGTSSSDVGYGVYDLYDLGEFNQKGTVRTKYGTKTQYIQAIQAAHTAGMQVYADVVFNHKAGADGTEFVDAVEVNPSNRNQETSGTYQIQAWTKFDFPGRGNTYSSFKWRWYHFDGTDWDESRKLNRVYKFRGTGKAWDWEVDTENGNYDYLMFADLDMDHPEVVSELKNWGKWYVTTTNIDGFRLDAVKHIKYSFFPDWLSYVRTQTQKPLFAVGEFWSYDISKLHNYITKTNGSMSLFDAPLHNNFYIASKSGGYFDMRTLLNNTLMKDQPTLAVTLVDNHDTEPGQSLQSWVEPWFKPLAYAFILTRQEGYPCVFYGDYYGIPKYNIPALKSKLDPLLIARRDYAYGTQHDYIDSADIIGWTREGVAEKANSGLAALITDGPGGSKWMYVGKQHAGKTFYDLTGNRSDTVTINADGWGEFKVNGGSVSIWVPK

SEQ ID NO: 23582 - protein, 485 aa, Bacillus sp.
HHNGTNGTMMQYFEWYLPNDGNHWNRLNSDASNLKSKGITAVWIPPAWKGASQNDVGYGAYDLYDLGEFNQKGTVRTKYGTRSQLQAAVTSLKNNGIQVYGDVVMNHKGGADATEMVRAVEVNPNNRNQEVTGEYTIEAWTRFDFPGRGNTHSSFKWRWYHFDGVDWDQSRRLNNRIYKFRGHGKAWDWEVDTENGNYDYLMYADYDYDHPEAVNEMRNWGVWYTNTLGLDGFRIDAVKHIKYSFTRDWINHVRSATGKNMFAVAEFWKNDLGAIENYLQKTNWNHSVFDVPLHYNLYNASKSGGNYDMRNIFNGTVVQRHPSHAVTFVDNHDSQPEEALESFVEEWFKPLAYALTLTREQGYPSVFYGDYYGIPTHGVPAMRSKIDPILEARQKYAYGKQNDYLDHHNIIGWTREGNTAHPNSGLATIMSDGAGGSKWMFVGRNKAGQVWSDITGNRTGTVTINADGWGNFSVNGGSVSIWVNK

SEQ ID NO: 23583 - protein, 485 aa, Bacillus sp.
HHNGTNGTLMQYFEWYLPNDGNHWNRLRSDASNLKDKGISAVWIPPAWKGASQNDVGYGAYDLYDLGEFNQKGTIRTKYGTRNQLQAAVNALKSNGIQVYGDVVMNHKGGADATEMVRAVEVNPNNRNQEVSGEYTIEAWTKFDFPGRANTHSNFKWRWYHFDGVDWDQSRKLNNRIYKFRTDGKAWDWEVDTENGNYDYLLYADIDMDHPEVVNELRNWGVWYTNTLGLDGFRIDAVKHIKYSFTRDWINHVRSAIGKNMFAVAEFWKNDLGAIENYLNKTNWNHSVFDVPLHFNLYYASKSGGNYDMRQIFNGTVVQRHPTHAVTFVDNHDSQPEESLESFVREWFKPLAYALTLTREQGYPSVFYGDYYGIPTHGVPAMKSKIDPILEARQKYAYGRQNDYLDHHNIIGWTREGNTAHPNSGLATIMSDGAGGNKWMFVGRNKAGQVWTDITGNRAGTVTINADGWGNFSVNGGSVSIWVNK

SEQ ID NO: 23584 - protein, 483 aa, Bacillus sp.
HHNGTNGTLMQYFEWYLPNDGNHWNRLRSDASNLKDKGISAVWIPPAWKGTSQNDVGYGAYDLYDLGEFNQKGTIRTKYGTRNQLQAAVNALKSNGIQVYGDVVMNHKGGADATEMVKAVEVNPNNRNQEVSGEYTIEAWTKFDFPGRANTHSNFKWRWYHFDGVDWDQSRKLNNRIYKFRTKAWDWEVDTEFGNYDYLMYADIDMDHPEVVNELRNWGVWYTNTLGLDGFRIDAVKHIKYSFTKDWINHVRSAIGKNMFAVAEFWKGDLGAIENYLNKTNWNHSVFDVPLHFNLYYASKSGGNYDMRQIFNGTVVQKHPTHAVTFVDNHDSQPEESLESFVREWFKPLAYALTLTREQGYPSVFYGDYYGIPTHGVPAMKSKIDPILEARQKYAYGRQNDYLDHHNIIGWTREGNTAHPNSGLATIMSDGAGGNKWMFVGRNKAGQVWTDITGNKAGTVTINADGWGNFSVNGGSVSIWVNK

SEQ ID NO: 23585 - protein, 483 aa, Bacillus sp.
HHNGTNGTLMQYFEWYLPNDGNHWNRLRSDASNLKDKGISAVWIPPAWKGTSQNDVGYGAYDLYDLGEFNQKGTIRTKYGTRNQLQAAVNALKSNGIQVYGDVVMNHKGGADATEMVKAVEVNPNNRNQEVSGEYTIEAWTKFDFPGRANTHSNFKWRWYHFDGVDWDQSRKLNNRIYKFRTKAWDWEVDTEFGNYDYLMYADIDMDHPEVVNELRNWGVWYTNTLGLDGFRIDAVKHIKYSFVRDWINHVRSAIGKNMFAVAEFWKGDLGAIENYLNKTNWNHSVFDVPLHFNLYYASKSGGNYDMRQIFNGTVVQKHPTHAVTFVDNHDSQPEESLESFVREWFKPLAYALTLTREQGYPSVFYGDYYGIPTHGVPAMKSKIDPILEARQKYAYGRQNDYLDHHNIIGWTREGNTAHPNSGLATIMSDGAGGNKWMFVGRNKAGQVWTDITGNKAGTVTINADGWGNFSVNGGSVSIWVNK

SEQ ID NO: 23586 - protein, 485 aa, Bacillus sp.
HHNGTNGTMMQYFEWYLPNDGNHWNRLNSDASNLKSKGITAVWIPPAWKGASQNDVGYGAYDLYDLGEFNQKGTVRTKYGTRSQLQAAVTSLKNNGIQVYGDVVMNHKGGADATEMVRAVEVNPNNRNQEVTGEYTIEAWTRFDFPGRGNTHSSFKWRWYHFDGVDWDQSRRLNNRIYKFRGHGKAWDWEVDTEFGNYDYLMYADYDMDHPEPTNELRNWGVWYTNTLGLDGFRIDAVKHIKYSFTRDWINHVRSATGKNMFAVAEFWKNDLGAIENYLQKTNWNHSVFDVPLHYNLYNASKSGGNYDMRNIFNGTVVQRHPSHAVTFVDNHDSQPEEALESFVEEWFKPLAYALTLTREQGYPSVFYGDYYGIPTHGVPAMRSKIDPILEARQKYAYGKQNDYLDHHNIIGWTREGNTAHPNSGLATIMSDGAGGSKWMFVGRNKAGQVWSDITGNRTGTVTINADGWGNFSVNGGSVSIWVNK

SEQ ID NO: 23587 - protein, 485 aa, Bacillus sp.
HHNGTNGTLMQYFEWYLPNDGNHWNRLRSDASNLKDKGISAVWIPPAWKGASQNDVGYGAYDLYDLGEFNQKGTIRTKYGTRNQLQAAVNALKSNGIQVYGDVVMNHKGGADATEMVRAVEVNPNNRNQEVSGEYTIEAWTKFDFPGRANTHSNFKWRWYHFDGVDWDQSRKLNNRIYKFRTDGKAWDWEVDTENGNYDYLIYADIDMDHPEVVNELRNWGVWYTNTLGLDGFRIDAVKHIKYSFTRDWINHVRSAIGKNMFAVAEFWKNDLGAIENYLNKTNWNHSVFDVPLHFNLYYASKSGGNYDMRQIFNGTVVQRHPTHAVTFVDNHDSQPEESLESFVREWFKPLAYALTLTREQGYPSVFYGDYYGIPTHGVPAMKSKIDPILEARQKYAYGRQNDYLDHHNIIGWTREGNTAHPNSGLATIMSDGAGGNKWMFVGRNKAGQVWTDITGNRAGTVTINADGWGNFSVNGGSVSIWVNK

SEQ ID NO: 23588 - protein, 483 aa, unidentified
HHNGTNGTLMQYFEWYLPNDGNHWNRLRSDASNLKDKGISAVWIPPAWKGASQNDVGYGAYDLYDLGEFNQKGTIRTKYGTRNQLQAAVNALKSNGIQVYGDVVMNHKGGADATEMVKAVEVNPNNRNQEVSGEYTIEAWTKFDFPGRANTHSNFKWRWYHFDGVDWDQSRKLNNRIYKFRTKAWDWEVDTEFGNYDYLLYADIDMDHPEVVNELRNWGVWYTNTLGLDGFRIDAVKHIKYSFTRDWINHVRSAIGKNMFAVAEFWKNDLGAIENYLNKTNWNHSVFDVPLHFNLYYASKSGGNYDMRQIFNGTVVQKHPTHAVTFVDNHDSQPEESLESFVREWFKPLAYALTLTREQGYPSVFYGDYYGIPTHGVPAMKSKIDPILEARQKYAYGRQNDYLDHHNIIGWTREGNTAHPNSGLATIMSDGAGGNKWMFVGRNKAGQVWTDITGNKAGTVTINADGWGNFSVNGGSVSIWVNK

SEQ ID NO: 23589 - protein, 483 aa, Bacillus sp.
HHNGTNGTLMQYFEWYLPNDGNHWNRLRSDASNLKDKGISAVWIPPAWKGASQNDVGYGAYDLYDLGEFNQKGTIRTKYGTRNQLQAAVNALKSNGIQVYGDVVMNHKGGADATEMVHAVEVNPNNRNQEVSGEYTIEAWTKFDFPGRANTHSNFKWRWYHFDGVDWDQSRKLNNRIYKFRTKAWDWEVDTEFGNYDYLLYADIDMDHPEVVNELRNWGVWYTNTLGLDGFRIDAVKHIKYSFTRDWINHVRSAIGKNMFAVAEFWKNDLGAIENYLNKTNWNHSVFDVPLHFNLYYASKSGGNYDMRQIFNGTVVQKHPTHAVTFVDNHDSQPEESLESFVREWFKPLAYALTLTREQGYPSVFYGDYYGIPTHGVPAMKSKIDPILEARQKYAYGRQNDYLDHHNIIGWTREGNTAHPNSGLATIMSDGAGGNKWMFVGRNKAGQVWTDITGNKAGTVTINADGWGNFSVNGGSVSIWVNK

SEQ ID NO: 23590 - protein, 485 aa, Bacillus sp.
HHNGTNGTMMQYFEWYLPNDGNHWNRLNSDASNLKSKGITAVWIPPAWKGASQNDVGYGAYDLYDLGEFNQKGTVRTKYGTRSQLQAAVTSLKNNGIQVYGDVVMNHKGGADATEMVRAVEVNPNNRNQEVTGEYTIEAWTRFDFPGRGNTHSSFKWRWYHFDGVDWDQSRRLNNRIYKFRGHGKAWDWEVDTENGNYDYLMYADIDYDHPESVNEMRNWGVWYTNTLGLDGFRIDAVKHIKYSFTRDWINHVRSATGKNMFAVAEFWKNDLGAIENYLQKTNWNHSVFDVPLHYNLYNASKSGGNYDMRNIFNGTVVQRHPSHAVTFVDNHDSQPEEALESFVEEWFKPLAYALTLTREQGYPSVFYGDYYGIPTHGVPAMRSKIDPILEARQKYAYGKQNDYLDHHNIIGWTREGNTAHPNSGLATIMSDGAGGSKWMFVGRNKAGQVWSDITGNRTGTVTINADGWGNFSVNGGSVSIWVNK

SEQ ID NO: 23591 - protein, 485 aa, Bacillus sp.
HHNGTNGTLMQYFEWYLPNDGNHWNRLRSDASNLKDKGISAVWIPPAWKGASQNDVGYGAYDLYDLGEFNQKGTIRTKYGTRNQLQAAVNALKSNGIQVYGDVVMNHKGGADATEMVKAVEVNPNNRNQEVSGEYTIEAWTKFDFPGRANTHSNFKWRWYHFDGVDWDQSRKLNNRIYKFRGDTKAWDHEVDTEFGNYDYLLYADIDMDHPEVVNELRNWGVWYTNTLGLDGFRIDAVKHIKYSFTRDWINHVRSAIGKNMFAVAEFWKNDLGAIENYLNKTNWNHSVFDVPLHFNLYYASKSGGNYDMRQIFNGTVVQKHPTHAVTFVDNHDSQPEESLESFVREWFKPLAYALTLTREQGYPSVFYGDYYGIPTHGVPAMKSKIDPILEARQKYAYGRQNDYLDHHNIIGWTREGNTAHPNSGLATIMSDGAGGNKWMFVGRNKAGQVWTDITGNKAGTVTINADGWGNFSVNGGSVSIWVNK

SEQ ID NO: 23592 - protein, 483 aa, Bacillus sp.
HHNGTNGTLMQYFEWYLPNDGNHWNRLRSDASNLKDKGISAVWIPPAWKGASQNDVGYGAYDLYDLGEFNQKGTIRTKYGTRNQLQAAVNALKSNGIQVYGDVVMNHKGGADATEMVKAVEVNPNNRNQEVSGEYTIEAWTKFDFPGRANTHSNFKWRWYHFDGVDWDQSRKLNNRIYKFRTKAWDWEVDTEFGNYDYLLYADLDMDHPEVVNELRNWGVWYTNTLGLDGFRIDAVKHIKYSFTRDWINHVRSAIGKNMFAVAEFWKNDLGAIENYLNKTNWNHSVFDVPLHFNLYYASKSGGNYDMRQIFNGTVVQKHPTHAVTFVDNHDSQPEESLESFVREWFKPLAYALTLTREQGYPSVFYGDYYGIPTHGVPAMKSKIDPILEARQKYAYGRQNDYLDHHNIIGWTREGNTAHPNSGLATIMSDGAGGNKWMFVGRNKAGQVWTDITGNKAGTVTINADGWGNFSVNGGSVSIWVNK

SEQ ID NO: 23593 - protein, 485 aa, Bacillus sp.
HHNGTNGTLMQYFEWYLPNDGNHWNRLRSDASNLKDKGISAVWIPPAWKGASQNDVGYGAYDLYDLGEFNQKGTIRTKYGTRNQLQAAVNALKSNGIQVYGDVVMNHKGGADATEMVKAVEVNPNNRNQEVSGEYTIEAWTKFDFPGRANTHSNFKWRWYHFDGVDWDQSRKLNNRIYKFRGDTKDWDWEVDTEFGNYDYLMYADIDMDHPEVVNELRNWGVWYTNTLGLDGFRIDAVKHIKYSFTRDWINHVRSAIGKNMFAVAEFWKGDLGAIENYLNKTNWNHSVFDVPLHFNLYYASKSGGNYDMRQIFNGTVVQKHPTHAVTFVDNHDSQPEESLESFVREWFKPLAYALTLTREQGYPSVFYGDYYGIPTHGVPAMKSKIDPILEARQKYAYGRQYDYLDHHNIIGWTREGNTAHPNSGLATIMSDGAGGNKWMFVGRNKAGQVWTDITGNKAGTVTINADGWGNFSVNGGSVSIWVNK

SEQ ID NO: 23594 - protein, 485 aa, Bacillus sp.
HHNGTNGTMMQYFEWYLPNDGNHWNRLNSDASNLKSKGITAVWIPPAWKGASQNDVGYGAYDLYDLGEFNQKGTVRTKYGTRSQLQAAVTSLKNNGIQVYGDVVMNHKGGADATEMVRAVEVNPNNRNQEVTGEYTIEAWTRFDFPGRGNTHSSFKWRWYHFDGVDWDQSRRLNNRIYLFRGHGKHWDWPVDTENGNYDYLMYADIDMDHPEVVNELRNWGVWYTNTLGLDGFRIDAVKHIKYSFTRDWINHVRSATGKNMFAVAEFWKNDLGAIENYLQKTNWNHSVFDVPLHYNLYNASKSGGNYDMRNIFNGTVVQRHPSHAVTFVDNHDSQPEEALESFVEEWFKPLAYALTLTREQGYPSVFYGDYYGIPTHGVPAMRSKIDPILEARQKYAYGKQNDYLDHHNIIGWTREGNTAHPNSGLATIMSDGAGGSKWMFVGRNKAGQVWSDITGNRTGTVTINADGWGNFSVNGGSVSIWVNK

SEQ ID NO: 23595 - protein, 485 aa, Bacillus sp.
HHNGTNGTMMQYFEWYLPNDGNHWNRLRSDASNLKDKGISAVWIPPAWKGASQNDVGYGAYDLYDLGEFNQKGTIRTKYGTRNQLQAAVNALKSNGIQVYGDVVMNHKGGADATEMVRAVEVNPNNRNQEVSGEYTIEAWTKFDFPGRGNTHSNFKWRWYHFNGVDWDQSRKLNNRIYKFRGDGKGWNWEVDTENGNYDYLMYANIDFSHPEVVNELRNWGVWYTNTLGLDGFRIDAVKHIKYSFTRDWINHVRSATGKNMFAVAEFWKNDLGAIENYLNKTNWNHSVFDVPLHYNLYNASKSGGNYDMRQIFNGTVVQRHPMHAVTFVDNHDSQPEEALESFVEEWFKPLAYALTLTREQGYPSVFYGDYYGIPTHGVPAMKSKIDPILEARQKYAYGRQNDYLDHHNIIGWTREGNTAHPNSGLATIMSDGAGGNKWMFVGRNKAGQVWTDITGNRAGTVTINADGWGNFSVNGGSVSIWVNK

SEQ ID NO: 23596 - protein, 484 aa, Bacillus sp.
HHNGTNGTLMQYFEWYLPNDGNHWNRLRSDASNLKDKGISAVWIPPAWKGASQNDVGYGAYDLYDLGEFNQKGTIRTKYGTRNQLQAAVNALKSNGIQVYGDVVMNHKGGADATEMVKAVEVNPNNRNQEVSGEYTIEAWTKFDFPGRANTHSNFKWRWYHFDGVDWDQSRKLNNRIYKFRTGKAWDWEVDTEFGNYDYLMYADIDMDHPEVVNELRNWGVWYTNTLGLDGFRIDAVKHIKYSFVRDWINHVRSAIGKNMFAVAEFWKNDLGAIENYLNKTNWNHSVFDVPLHFNLYYASKSGGNYDMRQIFNGTVVQRHPTHAVTFVDNHDSQPEESLESFVREWFKPLAYALTLTREQGYPSVFYGDYYGIPTHGVPAMKSKIDPILEARQKYAYGRQNDYLDHHNIIGWTREGNTAHPNSGLATIMSDGAGGNKWMFVGRNKAGQVWTDITGNKAGTVTINADGWGNFSVNGGSVSIWVNK

SEQ ID NO: 23597 - protein, 485 aa, Bacillus sp.
HHNGTNGTMMQYFEWYLPNDGNHWNRLNSDASNLKSKGITAVWIPPAWKGASQNDVGYGAYDLYDLGEFNQKGTVRTKYGTRSQLQAAVTSLKNNGIQVYGDVVMNHKGGADATEMVRAVEVNPNNRNQEVTGEYTIEAWTRFDFPGRGNTHSSFKWRWYHFDGVDWDQSRRLNNRIYKFRGHGKAWDWEVDTENGNYDYLMYADIDYDHPEAVNEQRNWGVWYTNTLGLDGFRIDAVKHIKYSFTRDWINHVRSATGKNMFAVAEFWKNDLGAIENYLQKTNWNHSVFDVPLHYNLYNASKSGGNYDMRNIFNGTVVQRHPSHAVTFVDNHDSQPEEALESFVEEWFKPLAYALTLTREQGYPSVFYGDYYGIPTHGVPAMRSKIDPILEARQKYAYGKQNDYLDHHNIIGWTREGNTAHPNSGLATIMSDGAGGSKWMFVGRNKAGQVWSDITGNRTGTVTINADGWGNFSVNGGSVSIWVNK

SEQ ID NO: 23598 - protein, 483 aa, Bacillus sp.
HHNGTNGTLMQYFEWYLPNDGNHWNRLRSDASNLKDKGISAVWIPPAWKGTSQSDVGYGAYDLYDLGEFNQKGTIRTKYGTRNQLQAAVNALKSNGIQVYGDVVMNHKGGADATEMVKAVEVNPNNRNQEVSGEYTIEAWTKFDFPGRANTHSNFKWRWYHFDGVDWDQSRKLNNRIYKFRTKAWDWEVDTEFGNYDYLLYADIDMDHPEVVNELRNWGVWYTNTLGLDGFRIDAVKHIKYSFTRDWINHVRSAIGKNMFAVAEFWKNDLGAIENYLNKTNWNHSVFDVPLHFNLYYASKSGGNYDMRQIFNGTVVQKHPTHAVTFVDNHDSQPEESLESFVREWFKPLAYALTLTREQGYPSVFYGDYYGIPTHGVPAMKSKIDPILEARQKYAYGRQNDYLDHHNIIGWTREGNTAHPNSGLATIMSDGAGGNKWMFVGRNKAGQVWTDITGNKAGTVTINADGWGNFSVNGGSVSIWVNK

SEQ ID NO: 23599 - protein, 485 aa, Bacillus sp.
HHNGTNGTLMQYFEWYLPNDGNHWNRLRSDASNLKDKGISAVWIPPAWKGASQNDVGYGAYDLYDLGEFNQKGTIRTKYGTRNQLQAAVNALKSNGIQVYGDVVMNHKGGADATEMVKAVEVNPNNRNQEVSGEYTIEAWTKFDFPGRANTHSNFKWRWYHFDGVDWDQSRKLNNRIYKFRGDTKDWDWEVDTEFGNYDYLMYADIDMDHPEVVNELRNWGVWYTNTLGLDGFRIDAVKHIKYSFTRDWINHVRSAIGKNMFAVAEFWKNDLGAIENYLNKTNWNHSVFDVPLHFNLYYASKSGGNYDMRQIFNGTVVQKHPTHAVTFVDNHDSQPEEALESFVREWFKPLAYALTLTREQGYPSVFYGDYYGIPTHGVPAMKSKIDPILEARQKYAYGRQNDYLDHHNIIGWTREGNTAHPNSGLATIMSDGAGGNKWMFVGRNKAGQVWTDITGNKAGTVTINADGWGNFSVNGGSVSIWVNK

SEQ ID NO: 23600 - protein, 483 aa, Bacillus sp.
HHNGTNGTLMQYFEWYLPNDGNHWNRLRSDASNLKDKGISAVWIPPAWKGASQNDVGYGAYDLYDLGEFNQKGTIRTKYGTRNQLQAAVNALKSNGIQVYGDVVMNHKGGADATEMVKAVEVNPNNRNQEVSGEYTIEAWTKFDFPGRANTHSNFKWRWYHFDGVDWDQSRKLNNRIYKFRTKAWDWEVDTEFGNYDYLLYADIDMDHPEVVNELRNWGVWYTNTLGLDGFRIDAVKHIKYSFTRDWVNHVRSAIGKNMFAVAEFWKNDLGAIENYLNKTNWNHSVFDVPLHFNLYYASKSGGNYDMRQIFNGTVVQKHPTHAVTFVDNHDSQPEESLESFVREWFKPLAYALTLTREQGYPSVFYGDYYGIPTHGVPAMKSKIDPILEARQKYAYGRQNDYLDHHNIIGWTREGNTAHPNSGLATIMSDGAGGNKWMFVGRNKAGQVWTDITGNKAGTVTINADGWGNFSVNGGSVSIWVNK

SEQ ID NO: 23601 - protein, 483 aa, Bacillus sp.
HHNGTNGTLMQYFEWYLPNDGNHWNRLRSDASNLKDKGISAVWIPPAWKGASQNDVGYGAYDLYDLGEFNQKGTIRTKYGTRNQLQAAVNALKSNGIQVYGDVVMNHKGGADATEMVKAVEVNPNNRNQEVSGEYTIEAWTKFDFPGRANTHSNFKWRWYHFDGVDWDQSRKLNNRIYKFRTKAWDWEVDTEFGNYDYLLYADIDMDHPEVVNELRNWGVWYTNTLGLDGFRIDAVKHIKYSFTRDWINHVRSAIGKNMFAVAEFWKNDLGAIENYLNKTNWNHSVFDVPLHFNLYWASKSGGNYDMRQIFNGTVVQKHPTHAVTFVDNHDSQPEESLESFVREWFKPLAYALTLTREQGYPSVFYGDYYGIPTHGVPAMKSKIDPILEARQKYAYGRQNDYLDHHNIIGWTREGNTAHPNSGLATIMSDGAGGNKWMFVGRNKAGQVWTDITGNKAGTVTINADGWGNFSVNGGSVSIWVNK

SEQ ID NO: 23602 - protein, 483 aa, Bacillus sp.
HHNGTNGTLMQYFEWYLPNDGNHWNRLRSDASNLKDKGISAVWIPPAWKGTSQNDVGYGAYDLYDLGEFNQKGTIRTKYGTRNQLQAAVNALKSNGIQVYGDVVMNHKGGADATEMVKAVEVNPNNRNQEVSGEYTIEAWTKFDFPGRANTHSNFKWRWYHFDGVDWDQSRKLNNRIYKFRTKAWDWEVDTEFGNYDYLMYADIDMDHPEVVNELRNWGVWYTNTLGLDGFRIDAVKHIKYSFLRDWINHVRSAIGKNMFAVAEFWKGDLGAIENYLNKTNWNHSVFDVPLHFNLYYASKSGGNYDMRQIFNGTVVQKHPTHAVTFVDNHDSQPEESLESFVREWFKPLAYALTLTREQGYPSVFYGDYYGIPTHGVPAMKSKIDPILEARQKYAYGRQNDYLDHHNIIGWTREGNTAHPNSGLATIMSDGAGGNKWMFVGRNKAGQVWTDITGNKAGTVTINADGWGNFSVNGGSVSIWVNK

SEQ ID NO: 23603 - protein, 483 aa, Bacillus sp.
HHNGTNGTLMQYFEWYLPNDGNHWNRLRSDASNLKDKGISAVWIPPAWKGTSQNDVGYGAYDLYDLGEFNQKGTIRTKYGTRNQLQAAVNALKSNGIQVYGDVVMNHKGGADATEMVKAVEVNPNNRNQEVSGEYTIEAWTKFDFPGRANTHSNFKWRWYHFDGVDWDQSRKLNNRIYKFRTKAWDWEVDTEFGNYDYLMYADIDMDHPEVVNELRNWGVWYTNTLGLDGFRIDAVKHIKYSFTRDWINHVRSAIGKNMFAVAEFWKGDLGAIENYLNKTNWNHSVFDVPLHFNLYYASKSGGNYDMRQIFNGTVVQKHPTHAVTFVDNHDSQPEESLESFVREWFKPLAYALTLTREQGYPCVFYGDYYGIPTHGVPAMKSKIDPILEARQKYAYGRQNDYLDHHNIIGWTREGNTAHPNSGLATIMSDGAGGNKWMFVGRNKAGQVWTDITGNKAGTVTINADGWGNFSVNGGSVSIWVNK

SEQ ID NO: 23604 - protein, 483 aa, Bacillus sp.
HHNGTNGTLMQYFEWYLPNDGNHWNRLRSDASNLKDKGISAVWIPPAWKGASQNDVGYGAYDLYDLGEFNQKGTIRTKYGTRNQLQAAVNALKSNGIQVYGDVVMNHKGGADATEMVKAVEVNPNNRNQEVSGEYTIEAWTKFDFPGRANTHSNFKWRWYHFDGVDWDQSRKLNNRIYKFRTKAWDWEVDTEFGNYDYLLYADIDMDHPEVVNELRNWGVWYTNTLGLDGFRIDAVKHIKYSFTRDWINHVRSAIGKNMFAVAEFWKNDLGAIENYLNKTNWNHSVFDVPLHFNLYYASKSGGNYDMRTIFNGTVVQKHPTHAVTFVDNHDSQPEESLESFVREWFKPLAYALTLTREQGYPSVFYGDYYGIPTHGVPAMKSKIDPILEARQKYAYGRQNDYLDHHNIIGWTREGNTAHPNSGLATIMSDGAGGNKWMFVGRNKAGQVWTDITGNKAGTVTINADGWGNFSVNGGSVSIWVNK

SEQ ID NO: 23605 - protein, 483 aa, Bacillus sp.
HHNGTNGTLMQYFEWYLPNDGNHWNRLRSDASNLKDKGISAVWIPPAWKGGSQNDVGYGAYDLYDLGEFNQKGTIRTKYGTRNQLQAAVNALKSNGIQVYGDVVMNHKGGADATEMVKAVEVNPNNRNQEVSGEYTIEAWTKFDFPGRANTHSNFKWRWYHFDGVDWDQSRKLNNRIYKFRTKAWDWEVDTEFGNYDYLMYADIDMDHPEVVNELRNWGVWYTNTLGLDGFRIDAVKHIKYSFTRDWINHVRSAIGKNMFAVAEFWKNDLGAIENYLNKTNWNHSVFDVPLHFNLYYASKSGGNYDMRRIFNGTVVQKHPTHAVTFVDNHDTQPEESLESFVREWFKPLAYALTLTREQGYPSVFYGDYYGIPTHGVPAMKSKIDPILEARQKYAYGRQNDYLDHHNIIGWTREGNTAHPNSGLATIMSDGAGGNKWMFVGRNKAGQVWTDITGNKAGTVTINADGWGNFSVNGGSVSIWVNK

SEQ ID NO: 23606 - protein, 483 aa, Bacillus sp.
HHNGTNGTLMQYFEWYLPNDGNHWNRLRSDASNLKDKGISAVWIPPAWKGTSQNDVGYGAYDLYDLGEFNQKGTIRTKYGTRNQLQAAVNALKSNGIQVYGDVVMNHKGGADATEMVKAVEVNPNNRNQEVSGEYTIQAWTKFDFPGRANTHSNFKWRWYHFDGVDWDQSRKLNNRIYKFRTKAWDWEVDTEFGNYDYLMYADIDMDHPEVVNELRNWGVWYTNTLGLDGFRIDAVKHIKYSFTRDWINHVRSAIGKNMFAVAEFWKGDLGAIENYLNKTNWNHSVFDVPLHFNLYYASKSGGNYDMRQIFNGTVVQKHPTHAVTFVDNHDSQPEESLESFVREWFKPLAYALTLTREQGYPSVFYGDYYGIPTHGVPAMKSKIDPILEARQKYAYGRQNDYLDHHNIIGWTREGNTAHPNSGLATIMSDGAGGNKWMFVGRNKAGQVWTDITGNKAGTVTINADGWGNFSVNGGSVSIWVNK

SEQ ID NO: 23607 - protein, 483 aa, Bacillus sp.
HHNGTNGTLMQYFEWYLPNDGNHWNRLRSDASNLKDKGISAVWIPPAWKGTSQNDVGYGAYDLYDLGEFNQKGTIRTKYGTRNQLQAAVNALKSNGIQVYGDVVMNHKGGADATEMVKAVEVNPNNRNQEVSGEYTIEAWTKFDFPGRANTHSNFKWRWYHFDGVDWDQSRKLNNRIYKFRTKAWDWEVDTEFGNYDYLLYADIDMDHPEVVNELRNWGVWYTNTLGLDGFRIDAVKHIKYSFTRDWINHVRSAIGKNMFAVAEFWKNDLGAIENYLNKTNWNHSVFDVPLHFNLYYASKSGGNYDMRQIFNGTVVQKHPTHAVTFVDNHDSQPEESLESFVREWFKPLAYALTLTREQGYPCVFYGDYYGIPTHGVPAMKSKIDPILEARQKYAYGRQNDYLDHHNIIGWTREGNTAHPNSGLATIMSDGAGGNKWMFVGRNKAGQVWTDITGNKAGTVTINADGWGNFSVNGGSVSIWVNK

SEQ ID NO: 23608 - protein, 483 aa, Bacillus sp.
HHNGTNGTLMQYFEWYLPNDGNHWNRLRSDASNLKDKGISAVWIPPAWKGASQNDVGYGAYDLYDLGEFNQKGTIRTKYGTRNQLQAAVNALKSNGIQVYGDVVMNHKGGADATEMVKAVEVNPNNRNQEVSGEYTIEAWTKFDFPGRANTHSNFKWRWYHFDGVDYDQSRKLNNRIYKFRTKAWDWEVDTEFGNYDYLMYADIDMDHPEVVNELRNWGVWYTNTLGLDGFRIDAVKHIKYSFTRDWINHVRSAIGKNMFAVAEFWKNDLGAIENYLNKTNWNHSVFDVPLHFNLYFASKSGGNYDMRQIFNGTVVQKHPTHAVTFVDNHDSQPEESLESFVREWFKPLAYALTLTREQGYPSVFYGDYYGIPTHGVPAMKSKIDPILEARQKYAYGRQNDYLDHHNIIGWTREGNTAHPNSGLATIMSDGAGGNKWMFVGRNKAGQVWTDITGNKAGTVTINADGWGNFSVNGGSVSIWVNK

SEQ ID NO: 23609 - protein, 485 aa, Bacillus sp.
HHNGTNGTMMQYFEWYLPNDGNHWNRLNSDASNLKSKGITAVWIPPAWKGASQNDVGYGAYDLYDLGEFNQKGTVRTKYGTRSQLQAAVTSLKNNGIQVYGDVVMNHKGGADATEMVRAVEVNPNNRNQEVTGEYTIEAWTRFDFPGRGNTHSSFKWRWYHFDGVDWDQSRRLNNRIYKFRGHGKAWDWEVDTEFGNYDYLMYADYDMDHPEGTNELRNWGVWYTNTLGLDGFRIDAVKHIKYSFTRDWINHVRSATGKNMFAVAEFWKNDLGAIENYLQKTNWNHSVFDVPLHYNLYNASKSGGNYDMRNIFNGTVVQRHPSHAVTFVDNHDSQPEEALESFVEEWFKPLAYALTLTREQGYPSVFYGDYYGIPTHGVPAMRSKIDPILEARQKYAYGKQNDYLDHHNIIGWTREGNTAHPNSGLATIMSDGAGGSKWMFVGRNKAGQVWSDITGNRTGTVTINADGWGNFSVNGGSVSIWVNK

SEQ ID NO: 23610 - protein, 483 aa, Bacillus sp.
HHNGTNGTLMQYFEWYLPNDGNHWNRLRSDASNLKDKGISAVWIPPAWKGASQNDVGYGAYDLYDLGEFNQKGTIRTKYGTRNQLQAAVNALKSNGIQVYGDVVMNHKGGADATEMVKAVEVNPNNRNQEVSGEYTIEAWTKFDFPGRANTHSNFKWRWYHFDGVDYDQSRKLNNRIYKFRTKAWDWEVDTEFGNYDYLMYADIDMDHPEVVNELRNWGVWYTNTLGLDGFRIDAVKHIKYSFTRDWINHVRSAIGKNMFAVAEFWKNDLGAIENYLNKTNWNHSVFDVPLHFNLYYASKSGGNYDMRQIFNGTVVQKHPTHAVTFVDNHDSQPEESLESFVREWFKPLAYALTLTREQGYPSVFYGDYYGIPTHGVPAMKSKIDPILEARQKYAYGRQNDYLDHHNIIGWTREGNTAHPNSGLATIMSDGAGGNKWMFVGRNKAGQVWTDITGNKAGTVTINADGWGNFSVNGGSVSIWVNK

SEQ ID NO: 23611 - protein, 485 aa, Bacillus sp.
HHNGTNGTMMQYFEWYLPNDGNHWNRLNSDASNLKSKGITAVWIPPAWKGASQNDVGYGAYDIYDLGEFNQKGTVRTKYGTRSQLQAAVTSLKNNGIQVYGDVVMNHKGGADATEMVRAVEVNPNNRNQEVTGEYTIEAWTRFDFPGRGNTHSSFKWRWYHFDGVDWDQSRRLNNRIYKFRGHGKAWDWEVDTEFGNYDYLMYADYDMDSPEVVNELRNWGVWYTNTLGLDGFRIDAVKHIKYSFTRDWINHVRSATGKNMFAVAEFWKNDLGAIENYLQKTNWNHSVFDVPLHYNLYNASKSGGNYDMRNIFNGTVVQRHPSHAVTFVDNHDSQPEEALESFVEEWFKPLAYALTLTREQGYPSVFYGDYYGIPTHGVPAMRSKIDPILEARQKYAYGKQNDYLDHHNIIGWTREGNTAHPNSGLATIMSDGAGGSKWMFVGRNKAGQVWSDITGNRTGTVTINADGWGNFSVNGGSVSIWVNK

SEQ ID NO: 23612 - protein, 483 aa, Bacillus sp.
HHNGTNGTLMQYFEWYLPNDGNHWNRLRSDASNLKDKGISAVWIPPAWKGTSQNDVGYGAYDLYDLGEFNQKGTIRTKYGTRNQLQAAVNALKSNGIQVYGDVVMNHKGGADATEMVKAVEVNPNNRNQEVSGEYTIEAWTKFDFPGRANTHSNFKWRWYHFDGVDWDQSRKLNNRIYKFRTKAWDWEVDTEFGNYDYLMYADIDMDHPEVVNELRNWGVWYTNTLGLDGFRIDAVKHIKYSFVRDWINHVRSAIGKNMFAVGEFWKNDLGAIENYLNKTNWNHSVFDVPLHFNLYYASKSGGNYDMRRIFNGTVVQKHPTHAVTFVDNHDSQPEESLESFVREWFKPLAYALTLTREQGYPSVFYGDYYGIPTHGVPAMKSKIDPILEARQKYAYGRQNDYLDHHNIIGWTREGNTAHPNSGLATIMSDGAGGNKWMFVGRNKAGQVWTDITGNKAGTVTINADGWGNFSVNGGSVSIWVNK

SEQ ID NO: 23613 - protein, 483 aa, Bacillus sp.
HHNGTNGTLMQYFEWYLPNDGNHWNRLRSDASNLKDKGISAVWIPPAWKGASQNDVGYGAYDLYDLGEFNQKGTIRTKYGTRNQLQAAVNALKSNGIQVYGDVVMNHKGGADATEMVKAVEVNPNNRNQEVSGEYTIEAWTKFDFPGRANTHSNFKWRWYHFDGVDWDQSRKLQNRIYKFRTKAWDWEVDTEFGNYDYLMYADIDMDHPEVVNELRNWGVWYTNTLGLDGFRIDAVKHIKYSFTRDWINHVRSAIGKNMFAVGEFWKNDLGAIENYLNKTNWNHSVFDVPLHFNLYYASKSGGNYDMRRIFNGTVVQKHPTHAVTFVDNHDTQPEESLESFVREWFKPLAYALTLTREQGYPSVFYGDYYGIPTHGVPAMKSKIDPILEARQKYAYGRQNDYLDHHNIIGWTREGNTAHPNSGLATIMSDGAGGNKWMFVGRNKAGQVWTDITGNKAGTVTINADGWGNFSVNGGSVSIWVNK

SEQ ID NO: 23614 - protein, 485 aa, Bacillus sp.
HHNGTNGTLMQYFEWYLPNDGNHWNRLRSDASNLKDKGISAVWIPPAWKGASQNDVGYGAYDLYDLGEFNQKGTIRTKYGTRNQLQAAVNALKSNGIQVYGDVVMNHKGGADATEMVRAVEVNPNNRNQEVSGEYTIEAWTKFDFPGRANTHSNFKWRWYHFDGVDWDQSRKLNNRIYKFRTDGKAWDWEVDTENGNYDYLLYADIDMDHPEVINELRNWGVWYTNTLGLDGFRIDAVKHIKYSFTRDWINHVRSATGKNMFAVAEFWKNDLGAIENYLNKTNWNHSVFDVPLHFNLYYASKSGGNYDMRQIFNGTVVQRHPTHAVTFVDNHDSQPEESLESFVEEWFKPLAYALTLTREQGYPSVFYGDYYGIPTHGVPAMKSKIDPILEARQKYAYGRQNDYLDHHNIIGWTREGNTAHPNSGLATIMSDGAGGNKWMFVGRNKAGQVWTDITGNRAGTVTINADGWGNFSVNGGSVSIWVNK

SEQ ID NO: 23615 - protein, 483 aa, Bacillus sp.
HHNGTNGTLMQYFEWYLPNDGNHWNRLRSDASNLKDKGISAVWIPPAWKGASQNDVGYGAYDLYDLGEFNQKGTIRTKYGTRNQLQAAVNALKSNGIQVYGDVVMNHKGGADATEVVKAVEVNPNNRNQEVSGEYTIEAWTKFDFPGRANTHSNFKWRWYHFDGVDWDQSRKLNNRIYKFRTKAWDWEVDTEFGNYDYLLYADIDMDHPEVVNELRNWGVWYTNTLGLDGFRIDAVKHIKYSFTRDWINHVRSAIGKNMFAVAEFWKNDLGAIENYLNKTNWNHSVFDVPLHFNLYYASKSGGNYDMRQIFNGTVVQKHPTHAVTFVDNHDSQPEESLESFVREWFKPLAYALTLTREQGYPSVFYGDYYGIPTHGVPAMKSKIDPILEARQKYAYGRQNDYLDHHNIIGWTREGNTAHPNSGLATIMSDGAGGNKWMFVGRNKAGQVWTDITGNKAGTVTINADGWGNFSVNGGSVSIWVNK

SEQ ID NO: 23616 - protein, 483 aa, Bacillus sp.
HHNGTNGTLMQYFEWYLPNDGNHWNRLRSDASNLKDKGISAVWIPPAWKGTSQNDVGYGAYDLYDLGEFNQKGTIRTKYGTRNQLQAAVNALKSNGIQVYGDVVMNHKGGADATEMVKAVEVNPNNRNQEVSGEYTIEAWTKFDFPGRANTHSNFKWRWYHFDGVDWDQSRKLNNRIYKFRTKAWDWEVDTEFGNYDYLMYADIDMDHPEVVNELRNWGVWYTNTLGLDGFRIDAVKHIKYSFTRDWINHVRSAIGKNMFAVAEFWKGDLGAIENYLNKTNWNHSVFDVPLHFNLYYASKSGGNYDMRQIFNGTVVQKHPTHAVTFVDNHDSQPEESLESFVREWFKPLAYALTLTREQGYPSVFYGDYYGIPTHGVPAMRSKIDPILEARQKYAYGRQNDYLDHHNIIGWTREGNTAHPNSGLATIMSDGAGGNKWMFVGRNKAGQVWTDITGNKAGTVTINADGWGNFSVNGGSVSIWVNK

SEQ ID NO: 23617 - protein, 483 aa, Bacillus sp.
HHNGTNGTLMQYFEWYLPNDGNHWNRLRSDASNLKDKGISAVWIPPAWKGASQNDVGYGAYDLYDLGEFNQKGTIRTKYGTRNQLQAAVNALKSNGIQVYGDVVMNHKGGADATEMVKAVEVNPNNRNQEVSGEYTIEAWTKFDFPGRANTHSNFKWRWYHFDGVDWDQSRKLNNRIYKFRTKAWDWEVDTENGNYDYLMYADIDMDHPEVVNELRNWGVWYTNTLGLDGFRIDAVKHIKYSFVRDWINHVRSAIGKNMFAVAEFWKNDLGAIENYLNKTNWNHSVFDVPLHFNLYYASKSGGNYDMRQIFNGTVVQKHPTHAVTFVDNHDTQPEESLESFVREWFKPLAYALTLTREQGYPSVFYGDYYGIPTHGVPAMKSKIDPILEARQKYAYGRQNDYLDHHNIIGWTREGNTAHPNSGLATIMSDGAGGNKWMFVGRNKAGQVWTDITGNKAGTVTINADGWGNFSVNGGSVSIWVNK

SEQ ID NO: 23618 - protein, 483 aa, Bacillus sp.
HHNGTNGTLMQYFEWYLPNDGNHWNRLRSDASNLKDKGISAVWIPPAWKGASQNDVGYGAYDLYDLGEFNQKGTIRTKYGTRNQLQAAVNALKSNGIQVYGDVVMNHKGGADATEFVKAVEVNPNNRNQEVSGEYTIEAWTKFDFPGRANTHSNFKWRWYHFDGVDWDQSRKLNNRIYKFRTKAWDWEVDTEFGNYDYLLYADIDMDHPEVVNELRNWGVWYTNTLGLDGFRIDAVKHIKYSFTRDWINHVRSAIGKNMFAVAEFWKNDLGAIENYLNKTNWNHSVFDVPLHFNLYYASKSGGNYDMRQIFNGTVVQKHPTHAVTFVDNHDSQPEESLESFVREWFKPLAYALTLTREQGYPSVFYGDYYGIPTHGVPAMKSKIDPILEARQKYAYGRQNDYLDHHNIIGWTREGNTAHPNSGLATIMSDGAGGNKWMFVGRNKAGQVWTDITGNKAGTVTINADGWGNFSVNGGSVSIWVNK

SEQ ID NO: 23619 - protein, 485 aa, Bacillus sp.
HHNGTNGTMMQYFEWYLPNDGNHWNRLNSDASNLKSKGITAVWIPPAWKGASQNDVGYGAYDLYDLGEFNQKGTVRTKYGTRSQLQAAVTSLKNNGIQVYGDVVMNHKGGADATEMVRAVEVNPNNRNQEVTGEYTIEAWTRFDFPGRGNTHSSFKWRWYHFDGVDWDQSRRLNNRIYKFRGHGKAWDWEVDTEFGNYDYLMYADYDMDHPESTNELRNWGVWYTNTLGLDGFRIDAVKHIKYSFTRDWINHVRSATGKNMFAVAEFWKNDLGAIENYLQKTNWNHSVFDVPLHYNLYNASKSGGNYDMRNIFNGTVVQRHPSHAVTFVDNHDSQPEEALESFVEEWFKPLAYALTLTREQGYPSVFYGDYYGIPTHGVPAMRSKIDPILEARQKYAYGKQNDYLDHHNIIGWTREGNTAHPNSGLATIMSDGAGGSKWMFVGRNKAGQVWSDITGNRTGTVTINADGWGNFSVNGGSVSIWVNK

SEQ ID NO: 23620 - protein, 485 aa, Bacillus sp.
HHNGTNGTMMQYFEWYLPNDGNHWNRLNSDASNLKSKGITAVWIPPAWKGASQNDVGYGAYDLYDLGEFNQKGTVRTKYGTRSQLQAAVTSLKNNGIQVYGDVVMNHKGGADATEMVRAVEVNPNNRNQEVTGEYTIEAWTRFDFPGRGNTHSSFKWRWYHFDGVDWDQSRRLNNRIYKFRGHGKAWDWEVDTENGNYDYLMYADYDYDHPEVVNEVRNWGVWYTNTLGLDGFRIDAVKHIKYSFVRDWINHVRSATGKNMFAVAEFWKNDLGAIENYLQKTNWNHSVFDVPLHYNLYNASKSGGNYDMRNIFNGTVVQRHPSHAVTFVDNHDSQPEEALESFVEEWFKPLAYALTLTREQGYPSVFYGDYYGIPTHGVPAMRSKIDPILEARQKYAYGKQNDYLDHHNIIGWTREGNTAHPNSGLATIMSDGAGGSKWMFVGRNKAGQVWSDITGNRTGTVTINADGWGNFSVNGGSVSIWVNK

SEQ ID NO: 23621 - protein, 483 aa, Bacillus sp.
HHNGTNGTLMQYFEWYLPNDGNHWNRLRSDASNLKDKGISAVWIPPAWKGASQNDVGYGAYDLYDLGEFNQKGTIRTKYGTRNQLQAAVNALKSNGIQVYGDVVMNHKGGADATEMVKAVEVNPNNRNQEVSGEYTIEAWTKFDFPGRANTHSNFKWRWYHFDGVDWDQSRKLNNRIYKFRTKAWDWEVDTEFGNYDYLMYADIDMDHPEVVNELRNWGVWYTNTLGLDGFRIDAVKHIKYSFLRDWINHVRSAIGKNMFAVAEFWKNDLGAIENYLNKTNWNHSVFDVPLHFNLYYASKSGGNYDMRQIFNGTVVQKHPTHAVTFVDNHDSQPEESLESFVREWFKPLAYALTLTREQGYPSVFYGDYYGIPTHGVPAMKSKIDPILEARQKYAYGRQNDYLDHHNIIGWTREGNTAHPNSGLATIMSDGAGGNKWMFVGRNKAGQVWTDITGNKAGTVTINADGWGNFSVNGGSVSIWVNK

SEQ ID NO: 23622 - protein, 483 aa, Bacillus sp.
HHNGTNGTLMQYFEWYLPNDGNHWNRLRSDASNLKDKGISAVWIPPAWKGTSQNDVGYGAYDLYDLGEFNQKGTIRTKYGTRNQLQAAVNALKSNGIQVYGDVVMNHKGGADATEMVKAVEVNPNNRNQEVSGEYTIEAWTKFDFPGRANTHSNFKWRWYHFDGVDWDQSRKLNNRIYKFRTKAWDWEVDTEFGNYDYLMYADIDMDHPEVVNELRNWGVWYTNTLGLDGFRIDAVKHIKYSFTRDWINHVRSAIGKNMFAVAEFWKGDLGAIENYLNKTNWNHSVFDVPLHFNLYYASKSGGNYDMRQIFNGTVVQRHPTHAVTFVDNHDSQPEESLESFVREWFKPLAYALTLTREQGYPSVFYGDYYGIPTHGVPAMKSKIDPILEARQKYAYGRQNDYLDHHNIIGWTREGNTAHPNSGLATIMSDGAGGNKWMFVGRNKAGQVWTDITGNKAGTVTINADGWGNFSVNGGSVSIWVNK

SEQ ID NO: 23623 - protein, 483 aa, Bacillus sp.
HHNGTNGTLMQYFEWYLPNDGNHWNRLRSDASNLKDKGISAVWIPPAWKGASQNDVGYGAYDLYDLGEFNQKGTIRTKYGTRNQLQAAVNALKSNGIQVYGDVVMNHKGGADATEMVNAVEVNPNNRNQEVSGEYTIEAWTKFDFPGRANTHSNFKWRWYHFDGVDWDQSRKLNNRIYKFRTKAWDWEVDTEFGNYDYLLYADIDMDHPEVVNELRNWGVWYTNTLGLDGFRIDAVKHIKYSFTRDWINHVRSAIGKNMFAVAEFWKNDLGAIENYLNKTNWNHSVFDVPLHFNLYYASKSGGNYDMRQIFNGTVVQKHPTHAVTFVDNHDSQPEESLESFVREWFKPLAYALTLTREQGYPSVFYGDYYGIPTHGVPAMKSKIDPILEARQKYAYGRQNDYLDHHNIIGWTREGNTAHPNSGLATIMSDGAGGNKWMFVGRNKAGQVWTDITGNKAGTVTINADGWGNFSVNGGSVSIWVNK

SEQ ID NO: 23624 - protein, 485 aa, Bacillus sp.
HHNGTNGTMMQYFEWYLPNDGNHWNRLNSDASNLKSKGITAVWIPPAWKGASQNDVGYGAYDLYDLGEFNQKGTVRTKYGTRSQLQAAVTSLKNNGIQVYGDVVMNHKGGADATEMVRAVEVNPNNRNQEVTGEYTIEAWTRFDFPGRGNTHSSFKWRWYHFDGVDWDQSRRLNNRIYLFRSHGKQWDWPVDTENGNYDYLMYADIDMDHPEVVNELRNWGVWYTNTLGLDGFRIDAVKHIKYSFTRDWINHVRSATGKNMFAVAEFWKNDLGAIENYLQKTNWNHSVFDVPLHYNLYNASKSGGNYDMRNIFNGTVVQRHPSHAVTFVDNHDSQPEEALESFVEEWFKPLAYALTLTREQGYPSVFYGDYYGIPTHGVPAMRSKIDPILEARQKYAYGKQNDYLDHHNIIGWTREGNTAHPNSGLATIMSDGAGGSKWMFVGRNKAGQVWSDITGNRTGTVTINADGWGNFSVNGGSVSIWVNK

SEQ ID NO: 23625 - protein, 483 aa, Bacillus sp.
HHNGTNGTLMQYFEWYLPNDGNHWNRLRSDASNLKDKGISAVWIPPAWKGASQNDVGYGAYDLYDLGEFNQKGTIRTKYGTRNQLQAAVNALKSNGIQVYGDVVMNHKGGADATEMVKAVEVNPNNRNQEVSGEYTIEAWTKFDFPGRANTHSNFKWRWYHFDGVDWDQSRKLNNRIYKFRTKAWDWEVDTEFGNYDYLLYADIDMDHPEVVNELRNWGVWYTNTLGLDGFRIDAVKHIKYSFTRDWINHVRKAIGKNMFAVAEFWKNDLGAIENYLNKTNWNHSVFDVPLHFNLYYASKSGGNYDMRQIFNGTVVQKHPTHAVTFVDNHDSQPEESLESFVREWFKPLAYALTLTREQGYPSVFYGDYYGIPTHGVPAMKSKIDPILEARQKYAYGRQNDYLDHHNIIGWTREGNTAHPNSGLATIMSDGAGGNKWMFVGRNKAGQVWTDITGNKAGTVTINADGWGNFSVNGGSVSIWVNK

SEQ ID NO: 23626 - protein, 483 aa, Bacillus sp.
HHNGTNGTLMQYFEWYLPNDGNHWNRLRSDASNLKDKGISAVWIPPAWKGTSQNDVGYGAYDLYDLGEFNQKGTIRTKYGTRNQLQAAVNALKSNGIQVYGDVVMNHKGGADATEMVKAVEVNPNNRNQEVSGEYTIEAWTKFDFPGRANTHSNFKWRWYHFDGVDWDQSRKLNNRIYKFRTKAWDWEVDTEFGNYDYLMYADIDMDHPEVVNELRNWGVWYTNTLGLDGFRIDAVKHIKYSFTRDWINHVRSAIGKNMFAVAEFWKGDLGAIENYLNKTNWNHSVFDVPLHFNLYYASKSGGNYDMRQIFNGTVVQHHPTHAVTFVDNHDSQPEESLESFVREWFKPLAYALTLTREQGYPSVFYGDYYGIPTHGVPAMKSKIDPILEARQKYAYGRQNDYLDHHNIIGWTREGNTAHPNSGLATIMSDGAGGNKWMFVGRNKAGQVWTDITGNKAGTVTINADGWGNFSVNGGSVSIWVNK

SEQ ID NO: 23627 - protein, 483 aa, Bacillus sp.
HHNGTNGTLMQYFEWYLPNDGNHWNRLRSDASNLKDKGISAVWIPPAWKGTSQNDVGYGAYDLYDLGEFNQKGTIRTKYGTRNQLQAAVNALKSNGIQVYGDVVMNHKGGADATEMVKAVEVNPNNRNQEVSGEYTIEAWTKFDFPGRANTHSNFKWRWYHFDGVDWDQSRKLNNRIYKFRTKAWDWEVDTEFGNYDYLMYADIDMDHPEVVNELRNWGVWYTNTLGLDGFRIDAVKHIKYSFTRDWINHVRSAIGKNMFAVAEFWKGDLGAIENYLNKTNWNHSVFDVPLHFNLYYASKSGGNYDMRQIFNGTVVQKHPTHAVTFVDNHDSQPEESLESFVREWFKPLAYALTLTREQGYPSVFYGDYYGIPTHGVPAMKSKIDPILEARQKYAYGRQNDYLDHHNIIGWTREGNTAHPNSGLATIMSDGAGGNKWMFVGRNKAGQVWTDITGNKAGTVTINADGWGNFSCNGGSVSIWVNK

SEQ ID NO: 23628 - protein, 483 aa, Bacillus sp.
HHNGTNGTLMQYFEWYLPNDGNHWNRLRSDASNLKDKGISAVWIPPAWKGTSQNDVGYGAYDLYDLGEFNQKGTIRTKYGTRNQLQAAVNALKSNGIQVYGDVVMNHKGGADATEMVKAVHVNPNNRNQEVSGEYTIEAWTKFDFPGRANTHSNFKWRWYHFDGVDWDQSRKLNNRIYKFRTKAWDWEVDTEFGNYDYLMYADIDMDHPEVVNELRNWGVWYTNTLGLDGFRIDAVKHIKYSFTRDWINHVRSAIGKNMFAVAEFWKGDLGAIENYLNKTNWNHSVFDVPLHFNLYYASKSGGNYDMRQIFNGTVVQKHPTHAVTFVDNHDSQPEESLESFVREWFKPLAYALTLTREQGYPSVFYGDYYGIPTHGVPAMKSKIDPILEARQKYAYGRQNDYLDHHNIIGWTREGNTAHPNSGLATIMSDGAGGNKWMFVGRNKAGQVWTDITGNKAGTVTINADGWGNFSVNGGSVSIWVNK

SEQ ID NO: 23629 - protein, 483 aa, Bacillus sp. SP70
HHNGTNGTMMQYFEWYLPNDGNHWNRLNSDASNLKSKGITAVWIPPAWKGASQNDVGYGAYDLYDLGEFNQKGTVRTKYGTRSQLQAAVTSLKNNGIQVYGDVVMNHKAGADATEMVRAVEVNPNNRNQEVTGEYTIEAWTRFDFPGRGNTHSSFKWRWYHFDGVDWDQSRRLNNRIYKFRGKAWDWEVDTENGNYDYLLGADIDMDHPEVVNELRNWGVWYTNTLGLDGFRIDAVKHIKYSFTRDWINHVRSATGKNMFAVAEFWKNDLGAIENYLQKTNWNHSVFDVPLHYNLYNASKSGGNYDMRNIFNGTVVQRHPSHAVTFVDNHDSQPEEALESFVEEWFKPLAYALTLTREQGYPSVFYGDYYGIPTHGVPAMRSKIDPILEARQKYAYGKQNDYLDHHNIIGWTREGNTAHPNSGLATIMSDGAGGSKWMFVGRNKAGQVWSDITGNRTGTVTINADGWGNFSVNGGSVSIWVNK

SEQ ID NO: 23630 - protein, 483 aa, Bacillus sp.
HHNGTNGTLMQYFEWYLPNDGNHWNRLRSDASNLKDVGISAVWIPPAWKGASQNDVGYGAYDLYDLGEFNQKGTIRTKYGTRNQLQAAVNALKSNGIQVYGDVVMNHKGGADATEMVKAVEVNPNNRNQEVSGEYTIEAWTKFDFPGRANTHSNFKWRWYHFDGVDWDQSRKLNNRIYKFRTKAWDWEVDTEFGNYDYLLYADIDMDHPEVVNELRNWGVWYTNTLGLDGFRIDAVKHIKYSFTRDWINHVRSAIGKNMFAVAEFWKNDLGAIENYLNKTNWNHSVFDVPLHFNLYYASKSGGNYDMRQIFNGTVVQKHPTHAVTFVDNHDSQPEESLESFVREWFKPLAYALTLTREQGYPSVFYGDYYGIPTHGVPAMKSKIDPILEARQKYAYGRQNDYLDHHNIIGWTREGNTAHPNSGLATIMSDGAGGNKWMFVGRNKAGQVWTDITGNKAGTVTINADGWGNFSVNGGSVSIWVNK

SEQ ID NO: 23631 - protein, 485 aa, Bacillus sp.
HHNGTNGTMMQYFEWYLPNDGNHWNRLNSDASNLKSKGITAVWIPPAWKGASQNDVGYGAYDLYDLGEFNQKGTVRTKYGTRSQLQAAVTSLKNNGIQVYGDVVMNHKGGADATEMVRAVEVNPNNRNQEVTGEYTIEAWTRFDFPGRGNTHSSFKWRWYHFDGVDWDQSRRLNNRIYLFRPHGKSWDWPVDTENGNYDYLMYADIDMDHPEVVNELRNWGVWYTNTLGLDGFRIDAVKHIKYSFTRDWINHVRSATGKNMFAVAEFWKNDLGAIENYLQKTNWNHSVFDVPLHYNLYNASKSGGNYDMRNIFNGTVVQRHPSHAVTFVDNHDSQPEEALESFVEEWFKPLAYALTLTREQGYPSVFYGDYYGIPTHGVPAMRSKIDPILEARQKYAYGKQNDYLDHHNIIGWTREGNTAHPNSGLATIMSDGAGGSKWMFVGRNKAGQVWSDITGNRTGTVTINADGWGNFSVNGGSVSIWVNK

SEQ ID NO: 23632 - protein, 483 aa, Bacillus sp.
HHNGTNGTLMQYFEWYLPNDGNHWNRLRSDASNLKDKGISAVWIPPAWKGTSQNDVGYGAYDLYDLGEFNQKGTIRTKYGTRNQLQAAVNALKSNGIQVYGDVVMNHKGGADATEMVKAVEVNPNNRNQEVSGEYTIEAWTKFDFPGRANTHSNFKWRWYHFDGVDWDQSRKLNNRIYKFRTKAWDWEVDTEFGNYDYLMYADIDMDHPEVVNELNNWGVWYTNTLGLDGFRIDAVKHIKYSFTRDWINHVRSAIGKNMFAVAEFWKGDLGAIENYLNKTNWNHSVFDVPLHFNLYYASKSGGNYDMRQIFNGTVVQKHPTHAVTFVDNHDSQPEESLESFVREWFKPLAYALTLTREQGYPSVFYGDYYGIPTHGVPAMKSKIDPILEARQKYAYGRQNDYLDHHNIIGWTREGNTAHPNSGLATIMSDGAGGNKWMFVGRNKAGQVWTDITGNKAGTVTINADGWGNFSVNGGSVSIWVNK

SEQ ID NO: 23633 - protein, 483 aa, Bacillus sp.
HHNGTNGTLMQYFEWYLPNDGNHWNRLRSDASNLKDKGISAVWIPPAWKGASQNDVGYGAYDLYDLGEFNQKGTIRTKYGTRNQLQAAVNALKSNGIQVYGDVVMNHKGGADATEMVKAVEVNPNNRNQEVSGEYTIEAWTKFDFPGRANTHSNFKWRWYHFDGVDWDQSRKLNNRIYKFRTKAWDWEVDTEFGNYDYLLYADIDMDHPEVVNELRNWGVWYTNTLGLDGFRIDAVKHIKYSFTRDWINHVRSAIGKNMFAVAEFWKNDLGAIENYLNKTNWNHSVFDVPLHWNLYYASKSGGNYDMRQIFNGTVVQKHPTHAVTFVDNHDSQPEESLESFVREWFKPLAYALTLTREQGYPSVFYGDYYGIPTHGVPAMKSKIDPILEARQKYAYGRQNDYLDHHNIIGWTREGNTAHPNSGLATIMSDGAGGNKWMFVGRNKAGQVWTDITGNKAGTVTINADGWGNFSVNGGSVSIWVNK

SEQ ID NO: 23634 - protein, 483 aa, Bacillus sp.
HHNGTNGTLMQYFEWYLPNDGNHWNRLRSDASNLKDKGISAVWIPPAWKGTSQNDVGYGAYDLYDLGEFNQKGTIRTKYGTRNQLQAAVNALKSNGIQVYGDVVMNHKGGADATEMVKAVEVNPNNRNQEVSGEYTIEAWTKFDFPGRANTHSNFKWRWYHFDGVDWDQSRKLNNRIYKFRTKAWDWEVDTEFGNYDYLMYADIDMDHPEVVNELRNWGVWYTNTLGLDGFRIDAVKHIKYSFTRDWINHVRSAIGKNMFAVAEFWKGDLGAIENYLNKTNWNHSVFDVPLHFNLYYASKSGGNYDMRQIFNGTVVQKHPTHAVTFVDNHDSQPEESLESFVREWFKPLAYALTLTREQGYPSVFYGDYYGIPTHGVPAMQSKIDPILEARQKYAYGRQNDYLDHHNIIGWTREGNTAHPNSGLATIMSDGAGGNKWMFVGRNKAGQVWTDITGNKAGTVTINADGWGNFSVNGGSVSIWVNK

SEQ ID NO: 23635 - protein, 485 aa, Bacillus sp.
HHNGTNGTLMQYFEWYLPNDGNHWNRLRSDASNLKDKGISAVWIPPAWKGTSQNDVGYGAYDLYDLGEFNQKGTIRTKYGTRNQLQAAVNALKSNGIQVYGDVVMNHKGGADATEMVKAVEVNPNNRNQEVSGEYTIEAWTKFDFPGRANTHSNFKWRWYHFDGVDWDQSRKLNNRIYKFRGDTKNWDWEVDTEFGNYDYLMYADIDMDHPEVVNELRNWGVWYTNTLGLDGFRIDAVKHIKYSFTRDWINHVRSAIGKNMFAVAEFWKGDLGAIENYLNKTNWNHSVFDVPLHFNLYYASKSGGNYDMRQIFNGTVVQKHPTHAVTFVDNHDSQPEESLESFVREWFKPLAYALTLTREQGYPCVFYGDYYGIPTHGVPAMKSKIDPILEARQKYAYGRQNDYLDHHNIIGWTREGNTAHPNSGLATIMSDGAGGNKWMFVGRNKAGQVWTDITGNKAGTVTINADGWGNFSVNGGSVSIWVNK

SEQ ID NO: 23636 - protein, 485 aa, Bacillus sp.
HHNGTNGTMMQYFEWYLPNDGNHWNRLNSDASNLKSKGITAVWIPPAWKGASQNDVGYGAYDLYDLGEFNQKGTVRTKYGTRSQLQAAVTSLKNNGIQVYGDVVMNHKGGADATEMVRAVEVNPNNRNQEVTGEYTIEAWTRFDFPGRGNTHSSFKWRWYHFDGVDWDQSRRLNNRIYLFRGHGKKWDWPVDTENGNYDYLMYADIDMDHPEVVNELRNWGVWYTNTLGLDGFRIDAVKHIKYSFTRDWINHVRSATGKNMFAVAEFWKNDLGAIENYLQKTNWNHSVFDVPLHYNLYNASKSGGNYDMRNIFNGTVVQRHPSHAVTFVDNHDSQPEEALESFVEEWFKPLAYALTLTREQGYPSVFYGDYYGIPTHGVPAMRSKIDPILEARQKYAYGKQNDYLDHHNIIGWTREGNTAHPNSGLATIMSDGAGGSKWMFVGRNKAGQVWSDITGNRTGTVTINADGWGNFSVNGGSVSIWVNK

SEQ ID NO: 23637 - protein, 483 aa, Bacillus sp. SP70
HHNGTNGTMMQYFEWYLPNDGNHWNRLNSDASNLKSKGITAVWIPPAWKGASQNDVGYGAYDLYDLGEFNQKGTVRTKYGTRSQLQAAVTSLKNNGIQVYGDVVMNHKGGADATEMVRAVEVNPNNRNQEVTGEYTIEAWTRFDFPGRGNTHSSFKWRWYHFDGVDYDQSRRLNNRIYKFRGKAWDWEVDTENGNYDYLMYADIDMDHPEVVNELRNWGVWYTNTLGIDGFRIDAVKHIKYSFTRDWINHVRSATGKPMFAVAEFWKNDLGAIENYLQKTNWNHSVFDVPLHYNLYNASKSGGNYDMRNIFNGTVVQRHPSHAVTFVDNHDSQPEEALESFVEEWFKPLAYALTLTREQGYPSVFYGDYYGIPTHGVPAMRSKIDPILEARQKYAYGKQNDYLDHHNIIGWTREGNTAHPNSGLATIMSDGAGGSKWMFVGRNKAGQVWSDITGNRTGTVTINADGYGNFSVNGGSVSIWVNK

SEQ ID NO: 23638 - protein, 485 aa, Bacillus sp.
HHNGTNGTMMQYFEWYLPNDGNHWNRLNSDASNLKSKGITAVWIPPAWKGASQNDVGYGAYDLYDLGEFNQKGTVRTKYGTRSQLQAAVTSLKNNGIQVYGDVVMNHKGGADATEMVRAVEVNPNNRNQEVTGEYTIEAWTRFDFPGRGNTHSSFKWRWYHFDGVDWDQSRRLNNRIYKFRGHGKEWDWEVDTEFGNYDYLMYADYDMDSPEVVNELRNWGVWYTNTLGLDGFRIDAVKHIKYSFTRDWINHVRSATGKNMFAVAEFWKNDLGAIENYLQKTNWNHSVFDVPLHYNLYNASKSGGNYDMRNIFNGTVVQRHPSHAVTFVDNHDSQPEEALESFVEEWFKPLAYALTLTREQGYPSVFYGDYYGIPTHGVPAMRSKIDPILEARQKYAYGKQNDYLDHHNIIGWTREGNTAHPNSGLATIMSDGAGGSKWMFVGRNKAGQVWSDITGNRTGTVTINADGWGNFSVNGGSVSIWVNK

SEQ ID NO: 23639 - protein, 483 aa, Bacillus sp.
HHNGTNGTLMQYFEWYLPNDGNHWNRLRSDASNLKDMGISAVWIPPAWKGASQNDVGYGAYDLYDLGEFNQKGTIRTKYGTRNQLQAAVNALKSNGIQVYGDVVMNHKGGADATEMVKAVEVNPNNRNQEVSGEYTIEAWTKFDFPGRANTHSNFKWRWYHFDGVDWDQSRKLNNRIYKFRTKAWDWEVDTEFGNYDYLLYADIDMDHPEVVNELRNWGVWYTNTLGLDGFRIDAVKHIKYSFTRDWINHVRSAIGKNMFAVAEFWKNDLGAIENYLNKTNWNHSVFDVPLHFNLYYASKSGGNYDMRQIFNGTVVQKHPTHAVTFVDNHDSQPEESLESFVREWFKPLAYALTLTREQGYPSVFYGDYYGIPTHGVPAMKSKIDPILEARQKYAYGRQNDYLDHHNIIGWTREGNTAHPNSGLATIMSDGAGGNKWMFVGRNKAGQVWTDITGNKAGTVTINADGWGNFSVNGGSVSIWVNK

SEQ ID NO: 23640 - protein, 485 aa, Bacillus sp.
HHNGTNGTLMQYFEWYLPNDGNHWNRLRSDASNLKDKGISAVWIPPAWKGASQNDVGYGAYDLYDLGEFNQKGTIRTKYGTRNQLQAAVNALKSNGIQVYGDVVMNHKGGADATEMVKAVEVNPNNRNQEVSGEYTIEAWTKFDFPGRANTHSNFKWRWYHFDGVDWDQSRKLNNRIYKFRGDTKAYDWEVDTEFGNYDYLLYADIDMDHPEVVNELRNWGVWYTNTLGLDGFRIDAVKHIKYSFTRDWINHVRSAIGKNMFAVAEFWKNDLGAIENYLNKTNWNHSVFDVPLHFNLYYASKSGGNYDMRQIFNGTVVQKHPTHAVTFVDNHDSQPEESLESFVREWFKPLAYALTLTREQGYPSVFYGDYYGIPTHGVPAMKSKIDPILEARQKYAYGRQNDYLDHHNIIGWTREGNTAHPNSGLATIMSDGAGGNKWMFVGRNKAGQVWTDITGNKAGTVTINADGWGNFSVNGGSVSIWVNK

SEQ ID NO: 23641 - protein, 485 aa, Bacillus sp.
HHNGTNGTMMQYFEWYLPNDGNHWNRLNSDASNLKSKGITAVWIPPAWKGASQNDVGYGAYDLYDLGEFNQKGTVRTKYGTRSQLQAAVTSLKNNGIQVYGDVVMNHKGGADATEMVRAVEVNPNNRNQEVTGEYTIEAWTRFDFPGRGNTHSSFKWRWYHFDGVDWDQSRRLNNRIYLFRGHGKRWDWPVDTENGNYDYLMYADIDMDHPEVVNELRNWGVWYTNTLGLDGFRIDAVKHIKYSFTRDWINHVRSATGKNMFAVAEFWKNDLGAIENYLQKTNWNHSVFDVPLHYNLYNASKSGGNYDMRNIFNGTVVQRHPSHAVTFVDNHDSQPEEALESFVEEWFKPLAYALTLTREQGYPSVFYGDYYGIPTHGVPAMRSKIDPILEARQKYAYGKQNDYLDHHNIIGWTREGNTAHPNSGLATIMSDGAGGSKWMFVGRNKAGQVWSDITGNRTGTVTINADGWGNFSVNGGSVSIWVNK

SEQ ID NO: 23642 - protein, 485 aa, Synthetic construct
HHNGTNGTMMQYFEWYLPNDGNHWNRLNSDASNLKSKGITAVWIPPAWKGASQNDVGYGAYDLYDLGEFNQKGTVRTKYGTRSQLQAAVTSLKNNGIQVYGDVVMNHKGGADFTERVQAVEVNPQNRNQEVSGTYQIEAWTGFNFPGRGNQHSSFKWRWYHFDGTDWDQSRQLANRIYKFRGDGKAWDWEVDTENGNYDYLMYADVDMDHPEVVNELRNWGVWYTNTLGLDGFRIDAVKHIKYSFTRDWINHVRSATGKNMFAVAEFWKNDLGAIENYLQKTNWNHSVFDVPLHYNLYNASKSGGNYDMRNIFNGTVVQRHPSHAVTFVDNHDSQPEEALESFVEEWFKPLAYALTLTREQGYPSVFYGDYYGIPTHGVPAMRSKIDPILEARQKYAYGKQNDYLDHHNIIGWTREGNTAHPNSGLATIMSDGAGGSKWMFVGRNKAGQVWSDITGNRTGTVTINADGWGNFSVNGGSVSIWVNK

SEQ ID NO: 23643 - protein, 483 aa, Bacillus sp.
HHNGTNGTLMQYFEWYLPNDGNHWNRLRSDASNLKDKGISAVWIPPAWKGTSQNDVGYGAYDLYDLGEFNQKGTIRTKYGTRNQLQAAVNALKSNGIQVYGDVVMNHKGGADATEMVKAVEVNPNNRNQEVSGEYTIEAWTRFDFPGRANTHSNFKWRWYHFDGVDWDQSRKLNNRIYKFRTKAWDWEVDTEFGNYDYLMYADIDMDHPEVVNELRNWGVWYTNTLGLDGFRIDAVKHIKYSFTRDWINHVRSAIGKNMFAVAEFWKGDLGAIENYLNKTNWNHSVFDVPLHFNLYYASKSGGNYDMRQIFNGTVVQKHPTHAVTFVDNHDSQPEESLESFVREWFKPLAYALTLTREQGYPSVFYGDYYGIPTHGVPAMKSKIDPILEARQKYAYGRQNDYLDHHNIIGWTREGNTAHPNSGLATIMSDGAGGNKWMFVGRNKAGQVWTDITGNKAGTVTINADGWGNFSVNGGSVSIWVNK

SEQ ID NO: 23644 - protein, 483 aa, Bacillus sp.
HHNGTNGTLMQYFEWYLPNDGNHWNRLRSDASNLKDKGISAVWIPPAWKGASQNDVGYGAYDLYDLGEFNQKGTIRTKYGTRNQLQAAVNALKSNGIQVYGDVVMNHKGGADATEMVKAVEVNPNNRNQEVSGEYTIEAWTKFDFPGRANTHSNFKWRWYHFDGVDWDQSRKLNNRIYKFRTKAWDWEVDTEFGNYDYLLYADIDMDHPEVVNELRNWGVWYTNTLGLDGFRIDAVKHIKYSFTRDWINHVRSAIGKDMFAVAEFWKNDLGAIENYLNKTNWNHSVFDVPLHFNLYYASKSGGNYDMRQIFNGTVVQKHPTHAVTFVDNHDSQPEESLESFVREWFKPLAYALTLTREQGYPSVFYGDYYGIPTHGVPAMKSKIDPILEARQKYAYGRQNDYLDHHNIIGWTREGNTAHPNSGLATIMSDGAGGNKWMFVGRNKAGQVWTDITGNKAGTVTINADGWGNFSVNGGSVSIWVNK

SEQ ID NO: 23645 - protein, 483 aa, Bacillus sp.
HHNGTNGTLMQYFEWYLPNDGNHWNRLRSDASNLKDKGISAVWIPPAWKGASQNDVGYGAYDLYDLGEFNQKGTIRTKYGTRNQLQAAVNALKSNGIQVYGDVVMNHKGGADATELVKAVEVNPNNRNQEVSGEYTIEAWTKFDFPGRANTHSNFKWRWYHFDGVDWDQSRKLNNRIYKFRTKAWDWEVDTEFGNYDYLLYADIDMDHPEVVNELRNWGVWYTNTLGLDGFRIDAVKHIKYSFTRDWINHVRSAIGKNMFAVAEFWKNDLGAIENYLNKTNWNHSVFDVPLHFNLYYASKSGGNYDMRQIFNGTVVQKHPTHAVTFVDNHDSQPEESLESFVREWFKPLAYALTLTREQGYPSVFYGDYYGIPTHGVPAMKSKIDPILEARQKYAYGRQNDYLDHHNIIGWTREGNTAHPNSGLATIMSDGAGGNKWMFVGRNKAGQVWTDITGNKAGTVTINADGWGNFSVNGGSVSIWVNK

SEQ ID NO: 23646 - protein, 483 aa, Bacillus sp.
HHNGTNGTLMQYFEWYLPNDGNHWNRLRSDASNLKDKGISAVWIPPAWKGTSQNDVGYGAYDLYDLGEFNQKGTIRTKYGTRNQLQAAVNALHSNGIQVYGDVVMNHKGGADATEMVKAVEVNPNNRNQEVSGEYTIEAWTKFDFPGRANTHSNFKWRWYHFDGVDWDQSRKLNNRIYKFRTKAWDWEVDTEFGNYDYLMYADIDMDHPEVVNELRNWGVWYTNTLGLDGFRIDAVKHIKYSFTRDWINHVRSAIGKNMFAVAEFWKGDLGAIENYLNKTNWNHSVFDVPLHFNLYYASKSGGNYDMRQIFNGTVVQKHPTHAVTFVDNHDSQPEESLESFVREWFKPLAYALTLTREQGYPSVFYGDYYGIPTHGVPAMKSKIDPILEARQKYAYGRQNDYLDHHNIIGWTREGNTAHPNSGLATIMSDGAGGNKWMFVGRNKAGQVWTDITGNKAGTVTINADGWGNFSVNGGSVSIWVNK

SEQ ID NO: 23647 - protein, 483 aa, Bacillus sp.
HHNGTNGTLMQYFEWYLPNDGNHWNRLRSDASNLKDKGISAVWIPPAWKGTSQNDVGYGAYDLYDLGEFNQKGTIRTKYGTRNQLQAAVNALKSNGIQVYGDVVMNHKGGADATEMVKAVEVNPNNRNQEVSGEYTIEAWTKFDFPGRANTHSNFKWRWYHFDGVDWDQSRKLNNRIYKFRTKAWDWEVDTEFGNYDYLMYADIDMDHPEVVNELRNWGVWYTNTLGLDGFRIDAVKHIKYSFTRDWINHVRSAIGKNMFAVAEFWKGDLGAIENYLNKTNWNHSVFDVPLHFNLYYASKSGGNYDMRQIFNGTVVQKHPTHAVTFVDNHDSQPEESLESFVREWFKPLAYALTLTREQGYPSVFYGDYYGIPTHGVPAMKSKIDPILEARQKYAYGRQNDYLDHHNIIGWTREGNTAHPNSGLATIMSDGAGGNKWMFVGRNKAGQVWTDITGNKAETVTINADGWGNFSVNGGSVSIWVNK

SEQ ID NO: 23648 - protein, 483 aa, Bacillus sp.
HHNGTNGTLMQYFEWYLPNDGNHWNRLRSDASNLKDHGISAVWIPPAWKGASQNDVGYGAYDLYDLGEFNQKGTIRTKYGTRNQLQAAVNALKSNGIQVYGDVVMNHKGGADATEMVKAVEVNPNNRNQEVSGEYTIEAWTKFDFPGRANTHSNFKWRWYHFDGVDWDQSRKLNNRIYKFRTKAWDWEVDTEFGNYDYLLYADIDMDHPEVVNELRNWGVWYTNTLGLDGFRIDAVKHIKYSFTRDWINHVRSAIGKNMFAVAEFWKNDLGAIENYLNKTNWNHSVFDVPLHFNLYYASKSGGNYDMRQIFNGTVVQKHPTHAVTFVDNHDSQPEESLESFVREWFKPLAYALTLTREQGYPSVFYGDYYGIPTHGVPAMKSKIDPILEARQKYAYGRQNDYLDHHNIIGWTREGNTAHPNSGLATIMSDGAGGNKWMFVGRNKAGQVWTDITGNKAGTVTINADGWGNFSVNGGSVSIWVNK

SEQ ID NO: 23649 - protein, 483 aa, Bacillus sp.
HHNGTNGTLMQYFEWYLPNDGNHWNRLRSDASNLKDKGISAVWIPPAWKGASQNDVGYGAYDLYDLGEFNQKGTIRTKYGTRNQLQAAVNALKSNGIQVYGDVVMNHKGGADATEMVHAVEVNPNNRNQEVSGEYTIEAWTKFDFPGRANTHSNFKWRWYHFDGVDYDQSRKLNNRIYKFRTKAWDWEVDTEFGNYDYLMYADIDMDHPEVVNELRNWGVWYTNTLGLDGFRIDAVKHIKYSFTRDWINHVRSAIGKNMFAVAEFWKNDLGAIENYLNKTNWNHSVFDVPLHFNLYYASKSGGNYDMRQIFNGTVVQKHPTHAVTFVDNHDSQPEESLESFVREWFKPLAYALTLTREQGYPSVFYGDYYGIPTHGVPAMKSKIDPILEARQKYAYGRQNDYLDHHNIIGWTREGNTAHPNSGLATIMSDGAGGNKWMFVGRNKAGQVWTDITGNKAGTVTINADGWGNFSVNGGSVSIWVNK

SEQ ID NO: 23650 - protein, 483 aa, Bacillus sp.
HHNGTNGTLMQYFEWYLPNDGNHWNRLRSDASNLKDKGISAVWIPPAWKGASQNDVGYGAYDLYDLGEFNQKGTIRTKYGTRNQLQAAVNALKSNGIQVYGDVVMNHKGGADATEMVKAVEVNPNNRNQEVSGEYTIEAWTKFDFPGRANTHSNFKWRWYHFDGVDWDQSRKLNNRIYKFRTKAWDWEVDTEFGNYDYLLYADIDMDHPEVVNELRNWGVWYTNTLGLDGFRIDAVKHIKYSFTRDWINHVRSAIGKNMFAVAEFWKNDLGAIENYLNKTNWNHSVFDVPLHFNLYYASKSGGNYDMRQIFNGTVVQKHPTHAVTFVDNHDSQPEESLESFVREWFKPLAYALTLTREQGYPSVFYGDYYGIPTHGVPAMKSKIDPILEARQKYAYGRQNDYLDHHNIIGWTREGNTAHPNSGLATIMSDGDGGNKWMFVGRNKAGQVWTDITGNKAGTVTINADGWGNFSVNGGSVSIWVNK

SEQ ID NO: 23651 - protein, 483 aa, Bacillus sp.
HHNGTNGTLMQYFEWYLPNDGNHWNRLRSDASNLKDKGISAVWIPPAWKGASQNDVGYGAYDLYDLGEFNQKGTIRTKYGTRNQLQAAVNALKSNGIQVYGDVVMNHKGGADATEMVKAVEVNPNNRNQEVSGEYTIEAWTKFDFPGRANTHSNFKWRWYHFDGVDWDQSRKLNNRIYKFRTKAWDWEVDTEFGNYDYLLYADIDMDHPEVVNELRNWGVWYTNTLGLDGFRIDAVKHIKYSFTRDWINHVRSAIGKNMFAVAEFWKNDLGAIENYLNKTNWNHSVFDVPLHFNLYYASKSGGNYDMRHIFNGTVVQKHPTHAVTFVDNHDSQPEESLESFVREWFKPLAYALTLTREQGYPSVFYGDYYGIPTHGVPAMKSKIDPILEARQKYAYGRQNDYLDHHNIIGWTREGNTAHPNSGLATIMSDGAGGNKWMFVGRNKAGQVWTDITGNKAGTVTINADGWGNFSVNGGSVSIWVNK

SEQ ID NO: 23652 - protein, 485 aa, Bacillus sp.
HHNGTNGTMMQYFEWYLPNDGNHWNRLRSDASNLKDKGISAVWIPPAWKGASQNDVGYGAYDLYDLGEFNQKGTIRTKYGTRNQLQAAVNALKSNGIQVYGDVVMNHKGGADATEMVRAVEVNPNNRNQEVSGEYTIEAWTKFDFPGRGNTHSNFKWRWYHFNGVDWDQSRKLNNRIYKFANDGKNWNWEVDTENGNYDYLMYANIDMSHPEVVNELRNWGVWYTNTLGLDGFRIDAVKHIKYSFTRDWINHVRSATGKNMFAVAEFWKNDLGAIENYLNKTNWNHSVFDVPLHYNLYNASKSGGNYDMRQIFNGTVVQRHPMHAVTFVDNHDSQPEEALESFVEEWFKPLAYALTLTREQGYPSVFYGDYYGIPTHGVPAMKSKIDPILEARQKYAYGRQNDYLDHHNIIGWTREGNTAHPNSGLATIMSDGAGGNKWMFVGRNKAGQVWTDITGNRAGTVTINADGWGNFSVNGGSVSIWVNK

SEQ ID NO: 23653 - protein, 483 aa, Bacillus sp.
HHNGTNGTLMQYFEWYLPNDGNHWNRLRSDASNLKDKGISAVWIPPAWKGASQNDVGYGAYDLYDLGEFNQKGTIRTKYGTRNQLQAAVNALKSNGIQVYGDVVMNHKGGADATEIVKAVEVNPNNRNQEVSGEYTIEAWTKFDFPGRANTHSNFKWRWYHFDGVDWDQSRKLNNRIYKFRTKAWDWEVDTEFGNYDYLLYADIDMDHPEVVNELRNWGVWYTNTLGLDGFRIDAVKHIKYSFTRDWINHVRSAIGKNMFAVAEFWKNDLGAIENYLNKTNWNHSVFDVPLHFNLYYASKSGGNYDMRQIFNGTVVQKHPTHAVTFVDNHDSQPEESLESFVREWFKPLAYALTLTREQGYPSVFYGDYYGIPTHGVPAMKSKIDPILEARQKYAYGRQNDYLDHHNIIGWTREGNTAHPNSGLATIMSDGAGGNKWMFVGRNKAGQVWTDITGNKAGTVTINADGWGNFSVNGGSVSIWVNK

SEQ ID NO: 23654 - protein, 485 aa, Bacillus sp.
HHNGTNGTMMQYFEWYLPNDGNHWNRLNSDASNLKSKGITAVWIPPAWKGASQNDVGYGAYDLYDLGEFNQKGTVRTKYGTRSQLQAAVTSLKNNGIQVYGDVVMNHKGGADATEMVRAVEVNPNNRNQEVTGEYTIEAWTRFDFPGRGNTHSSFKWRWYHFDGVDWDQSRRLNNRIYKFRGHGKAWDWEVDTEFGNYDYLMYADIDMDHPESTNELRNWGVWYTNTLGLDGFRIDAVKHIKYSFTRDWINHVRSATGKNMFAVAEFWKNDLGAIENYLQKTNWNHSVFDVPLHYNLYNASKSGGNYDMRNIFNGTVVQRHPSHAVTFVDNHDSQPEEALESFVEEWFKPLAYALTLTREQGYPSVFYGDYYGIPTHGVPAMRSKIDPILEARQKYAYGKQNDYLDHHNIIGWTREGNTAHPNSGLATIMSDGAGGSKWMFVGRNKAGQVWSDITGNRTGTVTINADGWGNFSVNGGSVSIWVNK

SEQ ID NO: 23655 - protein, 483 aa, Bacillus sp.
HHNGTNGTLMQYFEWYLPNDGNHWNRLRSDASNLKDKGISAVWIPPAWKGTSQNDVGYGAYDLYDLGEFNQKGTIRTKYGTRNQLQAAVNALKSNGIQVYGDVVMNHKGGADATEMVKAVEVNPNNRNQEVSGEYTIEAWTKFDFPGRANTHSNFKWRWYHFDGVDWDQSRKLNNRIYKFRTKAWDWEVDTEFGNYDYLMYADIDMDHPEVVNELRNWGVWYTNTLGLDGFRIDAVKHIKFSFTRDWINHVRSAIGKNMFAVAEFWKGDLGAIENYLNKTNWNHSVFDVPLHFNLYYASKSGGNYDMRQIFNGTVVQKHPTHAVTFVDNHDSQPEESLESFVREWFKPLAYALTLTREQGYPSVFYGDYYGIPTHGVPAMKSKIDPILEARQKYAYGRQNDYLDHHNIIGWTREGNTAHPNSGLATIMSDGAGGNKWMFVGRNKAGQVWTDITGNKAGTVTINADGWGNFSVNGGSVSIWVNK

SEQ ID NO: 23656 - protein, 485 aa, Bacillus sp.
HHNGTNGTMMQYFEWYLPNDGNHWNRLNSDASNLKSKGITAVWIPPAWKGASQNDVGYGAYDLYDLGEFNQKGTVRTKYGTRSQLQAAVTSLKNNGIQVYGDVVMNHKGGADATEMVRAVEVNPNNRNQEVTGEYTIEAWTRFDFPGRGNTHSSFKWRWYHFDGVDWDQSRRLNNRIYLFRCHGKKWDWPVDTENGNYDYLMYADIDMDHPEVVNELRNWGVWYTNTLGLDGFRIDAVKHIKYSFTRDWINHVRSATGKNMFAVAEFWKNDLGAIENYLQKTNWNHSVFDVPLHYNLYNASKSGGNYDMRNIFNGTVVQRHPSHAVTFVDNHDSQPEEALESFVEEWFKPLAYALTLTREQGYPSVFYGDYYGIPTHGVPAMRSKIDPILEARQKYAYGKQNDYLDHHNIIGWTREGNTAHPNSGLATIMSDGAGGSKWMFVGRNKAGQVWSDITGNRTGTVTINADGWGNFSVNGGSVSIWVNK

SEQ ID NO: 23657 - protein, 485 aa, Bacillus sp.
HHNGTNGTMMQYFEWYLPNDGNHWNRLNSDASNLKSKGITAVWIPPAWKGASQNDVGYGAYDLYDLGEFNQKGTVRTKYGTRSQLQAAVTSLKNNGIQVYGDVVMNHKGGADATEMVRAVEVNPNNRNQEVTGEYTIEAWTRFDFPGRGNTHSSFKWRWYHFDGVDWDQSRRLNNRIYKFRGHGKAWDWEVDTEFGNYDYLMYADIDMDHPEGTNELRNWGVWYTNTLGLDGFRIDAVKHIKYSFTRDWINHVRSATGKNMFAVAEFWKNDLGAIENYLQKTNWNHSVFDVPLHYNLYNASKSGGNYDMRNIFNGTVVQRHPSHAVTFVDNHDSQPEEALESFVEEWFKPLAYALTLTREQGYPSVFYGDYYGIPTHGVPAMRSKIDPILEARQKYAYGKQNDYLDHHNIIGWTREGNTAHPNSGLATIMSDGAGGSKWMFVGRNKAGQVWSDITGNRTGTVTINADGWGNFSVNGGSVSIWVNK

SEQ ID NO: 23658 - protein, 483 aa, Bacillus sp.
HHNGTNGTLMQYFEWYLPNDGNHWNRLRSDASNLKDKGISAVWIPPAWKGTSQNDVGYGAYDLYDLGEFNQKGTIRTKYGTRNQLQAAVNALKSNGIQVYGDVVMNHKGGADATEMVKAVEVNPNNRNQEVSGEYTIEAWTKFDFPGRANTHSNFKWRWYHFDGVDWDQSRKLNNRIYKFRTKAWDWEVDTEFGNYDYLMYADIDMDHPEVVNELRNWGVWYTNTLGLDGFRIDAVKHIKYSFTRDWINHVRSAIGKNLFAVAEFWKGDLGAIENYLNKTNWNHSVFDVPLHFNLYYASKSGGNYDMRQIFNGTVVQKHPTHAVTFVDNHDSQPEESLESFVREWFKPLAYALTLTREQGYPSVFYGDYYGIPTHGVPAMKSKIDPILEARQKYAYGRQNDYLDHHNIIGWTREGNTAHPNSGLATIMSDGAGGNKWMFVGRNKAGQVWTDITGNKAGTVTINADGWGNFSVNGGSVSIWVNK

SEQ ID NO: 23659 - protein, 483 aa, Bacillus sp.
HHNGTNGTLMQYFEWYLPNDGNHWNRLRSDASNLKDKGISAVWIPPAWKGASQNDVGYGAYDLYDLGEFNQKGTIRTKYGTRNQLQAAVNALKSNGIQVYGDVVMNHKGGADATEMVKAVEVNPNNRNQEVSGEYTIEAWTKFDFPGRANTHSNFKWRWYHFDGVDWDQSRKLNNRIYKFRTKAWDWEVDTEFGNYDYLLYADIDMDHPEVVNELRNWGVWYTNTLGLDGFRIDAVKHIKYSFTRDWINHVRSAIGKNMFAVAEFWKNDLGAIENYLNKTNWNHSVFDVPLHFNLYFASKSGGNYDMRQIFNGTVVQKHPTHAVTFVDNHDSQPEESLESFVREWFKPLAYALTLTREQGYPSVFYGDYYGIPTHGVPAMKSKIDPILEARQKYAYGRQNDYLDHHNIIGWTREGNTAHPNSGLATIMSDGAGGNKWMFVGRNKAGQVWTDITGNKAGTVTINADGWGNFSVNGGSVSIWVNK

SEQ ID NO: 23660 - protein, 485 aa, Bacillus sp.
HHNGTNGTMMQYFEWYLPNDGNHWNRLNSDASNLKSKGITAVWIPPAWKGASQNDVGYGAYDLYDLGEFNQKGTVRTKYGTRSQLQAAVTSLKNNGIQVYGDVVMNHKGGADATEMVRAVEVNPNNRNQEVTGEYTIEAWTRFDFPGRGNTHSSFKWRWYHFDGVDWDQSRRLNNRIYKFRGHGKAWDWEVDTEFGNYDYLMYADIDMDHPEIPNELRNWGVWYTNTLGLDGFRIDAVKHIKYSFTRDWINHVRSATGKNMFAVAEFWKNDLGAIENYLQKTNWNHSVFDVPLHYNLYNASKSGGNYDMRNIFNGTVVQRHPSHAVTFVDNHDSQPEEALESFVEEWFKPLAYALTLTREQGYPSVFYGDYYGIPTHGVPAMRSKIDPILEARQKYAYGKQNDYLDHHNIIGWTREGNTAHPNSGLATIMSDGAGGSKWMFVGRNKAGQVWSDITGNRTGTVTINADGWGNFSVNGGSVSIWVNK

SEQ ID NO: 23661 - protein, 483 aa, Bacillus sp.
HHNGTNGTLMQYFEWYLPNDGNHWNRLRSDASNLKDKGISAVWIPPAWKGTSQNDVGYGAYDLYDLGEFNQKGTIRTKYGTRNQLQAAVNALKSNGIQVYGDVVMNHKGGADATEMVKAVEVNPNNRNQEVSGEYTIEAWTKFDFPGRANTHSNFKWRWYHFDGVDWDQSRKLNNRIYKFRTKAWDWEVDTEFGNYDYLMYADIDMDHPEVVNELRNWGVWYTNTLGLDGFRIDAVKHIKYSFTRDWINHVRSAIGKNMFAVAEFWKGDLGAIENYLNKTNWNHSVFDVPLHFNLYYASKSGGNYDMRQIFNGTVVQKHPTHAVTFVDNHDSQPEESLESFVREWFKPLAYALTLTREQGYPSVFYGDYYGIPTHGVPAMKSKIDPILEARQKYAYGRQNDYLDHHNIIGWTRLGNTAHPNSGLATIMSDGAGGNKWMFVGRNKAGQVWTDITGNKAGTVTINADGWGNFSVNGGSVSIWVNK

SEQ ID NO: 23662 - protein, 485 aa, Bacillus sp.
HHNGTNGTMMQYFEWYLPNDGNHWNRLRSDASNLKDKGISAVWIPPAWKGASQNDVGYGAYDLYDLGEFNQKGTIRTKYGTRNQLQAAVNALKSNGIQVYGDVVMNHKGGADATEMVRAVEVNPNNRNQEVSGEYTIEAWTKFDFPGRGNTHSNFKWRWYHFNGVDWDQSRKLNNRIYKFRGDGKGWNWEVDTENGNYNYLMYADINMSHPEVVNELRNWGVWYTNTLGLDGFRIDAVKHIKYSFTRDWINHVRSATGKNMFAVAEFWKNDLGAIENYLNKTNWNHSVFDVPLHYNLYNASKSGGNYDMRQIFNGTVVQRHPMHAVTFVDNHDSQPEEALESFVEEWFKPLAYALTLTREQGYPSVFYGDYYGIPTHGVPAMKSKIDPILEARQKYAYGRQNDYLDHHNIIGWTREGNTAHPNSGLATIMSDGAGGNKWMFVGRNKAGQVWTDITGNRAGTVTINADGWGNFSVNGGSVSIWVNK

SEQ ID NO: 23663 - protein, 483 aa, Bacillus sp.
HHNGTNGTLMQYFEWYLPNDGNHWNRLRSDASNLKDKGISAVWIPPAWKGTSQNDVGYGAYDLYDLGEFNQKGTIRTKYGTRNQLQAAVNALKSNGIQVYGDVVMNHKGGADETEMVKAVEVNPNNRNQEVSGEYTIEAWTKFDFPGRANTHSNFKWRWYHFDGVDWDQSRKLNNRIYKFRTKAWDWEVDTEFGNYDYLMYADIDMDHPEVVNELRNWGVWYTNTLGLDGFRIDAVKHIKYSFTRDWINHVRSAIGKNMFAVAEFWKGDLGAIENYLNKTNWNHSVFDVPLHFNLYYASKSGGNYDMRQIFNGTVVQKHPTHAVTFVDNHDSQPEESLESFVREWFKPLAYALTLTREQGYPSVFYGDYYGIPTHGVPAMKSKIDPILEARQKYAYGRQNDYLDHHNIIGWTREGNTAHPNSGLATIMSDGAGGNKWMFVGRNKAGQVWTDITGNKAGTVTINADGWGNFSVNGGSVSIWVNK

SEQ ID NO: 23664 - protein, 483 aa, Bacillus sp.
HHNGTNGTLMQYFEWYLPNDGNHWNRLRSDASNLKDKGISAVWIPPAWKGASQNDVGYGAYDLYDLGEFNQKGTIRTKYGTRNQLQAAVNALKSNGIQVYGDVVMNHKGGADATEMVKAVEVNPNNRNQEVSGEYTIEAWTKFDFPGRANTHSNFKWRWYHFDGVDWDQSRKLNNRIYKFRTKAWDWEVDTEFGNYDYLMYADIDMDHPEVVNELRNWGVWYTNTLGLDGFRIDAVKHIKYSFVRDWINHVRSAIGKNMFAVAEFWKNDLGAIENYLNKTNWNHSVFDVPLHFNLYYASKSGGNYDMRQIFNGTVVQKHPTHAVTFVDNHDSQPEESLESFVREWFKPLAYALTLTREQGYPSVFYGDYYGIPTHGVPAMKSKIDPILEARQKYAYGRQNDYLDHHNIIGWTREGNTAHPNSGLATIMSDGAGGNKWMFVGRNKAGQVWTDITGNKAGTVTINADGWGNFSVNGGSVSIWVNK

SEQ ID NO: 23665 - protein, 483 aa, Bacillus sp.
HHNGTNGTLMQYFEWYLPNDGNHWNRLRSDASNLKDKGISAVWIPPAWKGTSQNDVGYGAYDLYDLGEFNQKGTIRTKYGTRNQLQAAVNALKSNGIQVYGDVVMNHRGGADATEMVKAVEVNPNNRNQEVSGEYTIEAWTKFDFPGRANTHSNFKWRWYHFDGVDWDQSRKLNNRIYKFRTKAWDWEVDTEFGNYDYLLYADIDMDHPEVVNELRNWGVWYTNTLGLDGFRIDAVKHIKYSFTRDWINHVRSAIGKNMFAVAEFWKNDLGAIENYLNKTNWNHSVFDVPLHFNLYYASKSGGNYDMRQIFNGTVVQKHPTHAVTFVDNHDSQPEESLESFVREWFKPLAYALTLTREQGYPSVFYGDYYGIPTHGVPAMKSKIDPILEARQKYAYGRQNDYLDHHNIIGWTREGNTAHPNSGLATIMSDGAGGNKWMFVGRNKAGQVWTDITGNKAGTVTINADGWGNFSVNGGSVSIWVNK

SEQ ID NO: 23666 - protein, 483 aa, Bacillus sp.
HHNGTNGTLMQYFEWYLPNDGNHWNRLRSDASNLKDKGISAVWIPPAWKGASQNDVGYGAYDLYDLGEFNQKGTIRTKYGTRNQLQAAVNALKSNGIQVYGDVVMNHKGGADATEMVKAVEVNPNNRNQEVSGEYTIEAWTKFDFPGRANTHSNFKWRWYHFDGVDWDQSRKLNNRIYKFRTKAWDWEVDTEFGNYDYLLYADIDMDHPEVVNELRNWGVWYTNTLGLDGFRIDAVKHIKYSFTRDWINHVRSAIGKNMFAVAEFWKNDLGAIENYLNKTNWNHSVFDVPLHFNLYYASKSGGNYDMRRIFNGTVVQKHPTHAVTFVDNHDSQPEESLESFVREWFKPLAYALTLTREQGYPSVFYGDYYGIPTHGVPAMKSKIDPILEARQKYAYGRQNDYLDHHNIIGWTREGNTAHPNSGLATIMSDGAGGNKWMFVGRNKAGQVWTDITGNKAGTVTINADGWGNFSVNGGSVSIWVNK

SEQ ID NO: 23667 - protein, 485 aa, Bacillus sp.
HHNGTNGTMMQYFEWYLPNDGNHWNRLNSDASNLKSKGITAVWIPPAWKGASQNDVGYGAYDVYDLGEFNQKGTVRTKYGTRSQLQAAVTSLKNNGIQVYGDVVMNHKGGADATEMVRAVEVNPNNRNQEVTGEYTIEAWTRFDFPGRGNTHSSFKWRWYHFDGVDWDQSRRLNNRIYKFRGHGKAWDWEVDTENGNYDYLMYADYDMDHPEVVNELRNWGVWYTNTLGLDGFRIDAVKHVKYSFLRDWINHVRSATGKNMFAVAEFWKNDLGAIENYLQKTNWNHSVFDVPLHYNLYNASKSGGNYDMRNIFNGTVVQRHPSHAVTFVDNHDSQPEEALESFVEEWFKPLAYALTLTREQGYPSVFYGDYYGIPTHGVPAMRSKIDPILEARQKYAYGKQNDYLDHHNIIGWTREGNTAHPNSGLATIMSDGAGGSKWMFVGRNKAGQVWSDITGNRTGTVTINADGWGNFSVNGGSVSIWVNK

SEQ ID NO: 23668 - protein, 483 aa, Bacillus sp.
HHNGTNGTLMQYFEWYLPNDGNHWNRLRSDASNLKDKGISAVWIPPAWKGTSQNDVGYGAYDLYDLGEFNQKGTIRTKYGTRNQLQAAVNALKSNGIQVYGDVVMNHKGGADATEMVKAVEVNPNNRNQEVSGEYTIEAWTKFDFPGRANTHSNFKWRWYHFDGVDWDQSRKLQNRIYKFRTKAWDWEVDTEFGNYDYLMYADIDMDHPEVVNELRNWGVWYTNTLGLDGFRIDAVKHIKYSFTRDWINHVRSAIGKNMFAVGEYWKNDLGAIENYLNKTNWNHSVFDVPLHFNLYYASKSGGNYDMRRIFNGTVVQKHPTHAVTFVDNHDTQPEESLESFVREWFKPLAYALTLTREQGYPSVFYGDYYGIPTHGVPAMKSKIDPILEARQKYAYGRQNDYLDHHNIIGWTREGNTAHPNSGLATIMSDGAGGNKWMFVGRNKAGQVWTDITGNKAGTVTINADGWGNFSVNGGSVSIWVNK

SEQ ID NO: 23669 - protein, 483 aa, Bacillus sp.
HHNGTNGTLMQYFEWYLPNDGNHWNRLRSDASNLKDKGISAVWIPPAWKGASQNDVGYGAYDLYDLGEFNQKGTIRTKYGTRNQLQAAVNALKSNGIQVYGDVVMNHKGGADATEMVQAVEVNPNNRNQEVSGEYTIEAWTKFDFPGRANTHSNFKWRWYHFDGVDWDQSRKLNNRIYKFRTKAWDWEVDTEFGNYDYLLYADIDMDHPEVVNELRNWGVWYTNTLGLDGFRIDAVKHIKYSFTRDWINHVRSAIGKNMFAVAEFWKNDLGAIENYLNKTNWNHSVFDVPLHFNLYYASKSGGNYDMRQIFNGTVVQKHPTHAVTFVDNHDSQPEESLESFVREWFKPLAYALTLTREQGYPSVFYGDYYGIPTHGVPAMKSKIDPILEARQKYAYGRQNDYLDHHNIIGWTREGNTAHPNSGLATIMSDGAGGNKWMFVGRNKAGQVWTDITGNKAGTVTINADGWGNFSVNGGSVSIWVNK

SEQ ID NO: 23670 - protein, 483 aa, Bacillus sp.
HHNGTNGTLMQYFEWYLPNDGNHWNRLRSDASNLKDKGISAVWIPPAWKGTSQNDVGYGAYDLYDLGEFNQKGTIRTKYGTRNQLQAAVNALKSNGIQVYGDVVMNHKGGADATEMVKAVEVNPNNRNQQVSGEYTIEAWTKFDFPGRANTHSNFKWRWYHFDGVDWDQSRKLNNRIYKFRTKAWDWEVDTEFGNYDYLMYADIDMDHPEVVNELRNWGVWYTNTLGLDGFRIDAVKHIKYSFTRDWINHVRSAIGKNMFAVAEFWKGDLGAIENYLNKTNWNHSVFDVPLHFNLYYASKSGGNYDMRQIFNGTVVQKHPTHAVTFVDNHDSQPEESLESFVREWFKPLAYALTLTREQGYPSVFYGDYYGIPTHGVPAMKSKIDPILEARQKYAYGRQNDYLDHHNIIGWTREGNTAHPNSGLATIMSDGAGGNKWMFVGRNKAGQVWTDITGNKAGTVTINADGWGNFSVNGGSVSIWVNK

SEQ ID NO: 23671 - protein, 485 aa, Bacillus sp.
HHNGTNGTLMQYFEWYLPNDGNHWNRLRSDASNLKDKGISAVWIPPAWKGASQNDVGYGAYDLYDLGEFNQKGTIRTKYGTRNQLQAAVNALKSNGIQVYGDVVMNHKGGADATEMVKAVEVNPNNRNQEVSGEYTIEAWTKFDFPGRANTHSNFKWRWYHFDGVDWDQSRKLNNRIYKFRGDTKGWDWEVDTEFGNYDYLLYADIDMDHPEVVNELRNWGVWYTNTLGLDGFRIDAVKHIKYSFTRDWINHVRSAIGKNMFAVAEFWKNDLGAIENYLNKTNWNHSVFDVPLHFNLYYASKSGGNYDMRQIFNGTVVQKHPTHAVTFVDNHDSQPEESLESFVREWFKPLAYALTLTREQGYPSVFYGDYYGIPTHGVPAMKSKIDPILEARQKYAYGRQNDYLDHHNIIGWTREGNTAHPNSGLATIMSDGAGGNKWMFVGRNKAGQVWTDITGNKAGTVTINADGWGNFSVNGGSVSIWVNK

SEQ ID NO: 23672 - protein, 485 aa, Bacillus sp.
HHNGTNGTMMQYFEWYLPNDGNHWNRLNSDASNLKSKGITAVWIPPAWKGASQNDVGYGAYDLYDLGEFNQKGTVRTKYGTRSQLQAAVTSLKNNGIQVYGDVVMNHKGGADATEMVRAVEVNPNNRNQEVTGEYTIEAWTRFDFPGRGNTHSSFKWRWYHFDGVDWDQSRRLNNRIYLFRGHGKSWDWPVDTENGNYDYLMYADIDMDHPEVVNELRNWGVWYTNTLGLDGFRIDAVKHIKYSFTRDWINHVRSATGKNMFAVAEFWKNDLGAIENYLQKTNWNHSVFDVPLHYNLYNASKSGGNYDMRNIFNGTVVQRHPSHAVTFVDNHDSQPEEALESFVEEWFKPLAYALTLTREQGYPSVFYGDYYGIPTHGVPAMRSKIDPILEARQKYAYGKQNDYLDHHNIIGWTREGNTAHPNSGLATIMSDGAGGSKWMFVGRNKAGQVWSDITGNRTGTVTINADGWGNFSVNGGSVSIWVNK

SEQ ID NO: 23673 - protein, 483 aa, Bacillus sp.
HHNGTNGTLMQYFEWYLPNDGNHWNRLRSDASNLKDLGISAVWIPPAWKGASQNDVGYGAYDLYDLGEFNQKGTIRTKYGTRNQLQAAVNALKSNGIQVYGDVVMNHKGGADATEMVKAVEVNPNNRNQEVSGEYTIEAWTKFDFPGRANTHSNFKWRWYHFDGVDWDQSRKLNNRIYKFRTKAWDWEVDTEFGNYDYLLYADIDMDHPEVVNELRNWGVWYTNTLGLDGFRIDAVKHIKYSFTRDWINHVRSAIGKNMFAVAEFWKNDLGAIENYLNKTNWNHSVFDVPLHFNLYYASKSGGNYDMRQIFNGTVVQKHPTHAVTFVDNHDSQPEESLESFVREWFKPLAYALTLTREQGYPSVFYGDYYGIPTHGVPAMKSKIDPILEARQKYAYGRQNDYLDHHNIIGWTREGNTAHPNSGLATIMSDGAGGNKWMFVGRNKAGQVWTDITGNKAGTVTINADGWGNFSVNGGSVSIWVNK

SEQ ID NO: 23674 - protein, 485 aa, Bacillus sp.
HHNGTNGTLMQYFEWYLPNDGNHWNRLRSDASNLKDKGISAVWIPPAWKGASQNDVGYGAYDLYDLGEFNQKGTIRTKYGTRNQLQAAVNALKSNGIQVYGDVVMNHKGGADATEMVRAVEVNPNNRNQEVSGEYTIEAWTKFDFPGRANTHSNFKWRWYHFDGVDWDQSRKLNNRIYKFRTDGKAWDWEVDTENGNYDYLIYADIDMDHPEVINELRNWGVWYTNTLGLDGFRIDAVKHIKYSFTRDWINHVRSATGKNMFAVAEFWKNDLGAIENYLNKTNWNHSVFDVPLHFNLYYASKSGGNYDMRQIFNGTVVQRHPTHAVTFVDNHDSQPEESLESFVEEWFKPLAYALTLTREQGYPSVFYGDYYGIPTHGVPAMKSKIDPILEARQKYAYGRQNDYLDHHNIIGWTREGNTAHPNSGLATIMSDGAGGNKWMFVGRNKAGQVWTDITGNRAGTVTINADGWGNFSVNGGSVSIWVNK

SEQ ID NO: 23675 - protein, 483 aa, Bacillus sp.
HHNGTNGTLMQYFEWYLPNDGNHWNRLRSDASNLKDKGISAVWIPPAWKGASQNDVGYGAYDLYDLGEFNQKGTIRTKYGTRNQLQAAVNALKSNGIQVYGDVVMNHKGGADATEAVKAVEVNPNNRNQEVSGEYTIEAWTKFDFPGRANTHSNFKWRWYHFDGVDWDQSRKLNNRIYKFRTKAWDWEVDTEFGNYDYLLYADIDMDHPEVVNELRNWGVWYTNTLGLDGFRIDAVKHIKYSFTRDWINHVRSAIGKNMFAVAEFWKNDLGAIENYLNKTNWNHSVFDVPLHFNLYYASKSGGNYDMRQIFNGTVVQKHPTHAVTFVDNHDSQPEESLESFVREWFKPLAYALTLTREQGYPSVFYGDYYGIPTHGVPAMKSKIDPILEARQKYAYGRQNDYLDHHNIIGWTREGNTAHPNSGLATIMSDGAGGNKWMFVGRNKAGQVWTDITGNKAGTVTINADGWGNFSVNGGSVSIWVNK

SEQ ID NO: 23676 - protein, 483 aa, Bacillus sp.
HHNGTNGTLMQYFEWYLPNDGNHWNRLRSDASNLKDKGISAVWIPPAWKGASQNDVGYGAYDLYDLGEFNQKGTIRTKYGTRNQLQAAVNALKSNGIQVYGDVVMNHKGGADATEMVKAVEVNPNNRNQEVSGEYTIEAWTKFDFPGRANTHSNFKWRWYHFDGVDWDQSRKLNNRIYKFRTKAWDWEVDTEFGNYDYLLYADIDMDHPEVVNELRNWGVWYTNTLGLDGFRIDAVKHIKYSFTRDWINHVRSAIGKNMFAVAEFWKNDLGAIENYLNKTNWNHSVFDVPLHFNLYYASKSGGNYDMRQIFNGTVVQKHPTHAVTFVDNHDSQPEESLESFVREWFKPLAYALTLTREQGYPSVFYGDYYGIPTHGVPAMKEKIDPILEARQKYAYGRQNDYLDHHNIIGWTREGNTAHPNSGLATIMSDGAGGNKWMFVGRNKAGQVWTDITGNKAGTVTINADGWGNFSVNGGSVSIWVNK

SEQ ID NO: 23677 - protein, 483 aa, Bacillus sp.
HHNGTNGTLMQYFEWYLPNDGNHWNRLRSDASNLKDKGISAVWIPPAWKGTSQNDVGYGAYDLYDLGEFNQKGTIRTKYGTRNQLQAAVNALKSNGIQVYGDVVMNHRGGADATEMVKAVEVNPNNRNQEVSGEYTIEAWTKFDFPGRANTHSNFKWRWYHFDGVDWDQSRKLNNRIYKFRTKAWDWEVDTEFGNYDYLMYADIDMDHPEVVNELRNWGVWYTNTLGLDGFRIDAVKHIKYSFTRDWINHVRSAIGKNMFAVAEFWKGDLGAIENYLNKTNWNHSVFDVPLHFNLYYASKSGGNYDMRQIFNGTVVQKHPTHAVTFVDNHDSQPEESLESFVREWFKPLAYALTLTREQGYPSVFYGDYYGIPTHGVPAMKSKIDPILEARQKYAYGRQNDYLDHHNIIGWTREGNTAHPNSGLATIMSDGAGGNKWMFVGRNKAGQVWTDITGNKAGTVTINADGWGNFSVNGGSVSIWVNK

SEQ ID NO: 23678 - protein, 483 aa, Bacillus sp.
HHNGTNGTLMQYFEWYLPNDGNHWNRLRSDASNLKDKGISAVWIPPAWKGTSQNDVGYGAYDLYDLGEFNQKGTIRTKYGTRNQLQAAVNALKSNGIQVYGDVVMNHKGGADATEMVKAVEVNPNNRNQEVSGEYTIEAWTKFDFPGRANTHSNFKWRWYHFDGVDWDQSRKLNNRIYKFRTKAWDWEVDTEFGNYDYLMYADIDMDHPEVVNELRNWGVWYTNTLGLDGFRIDAAKHIKYSFTRDWINHVRSAIGKNMFAVAEFWKGDLGAIENYLNKTNWNHSVFDVPLHFNLYYASKSGGNYDMRQIFNGTVVQKHPTHAVTFVDNHDSQPEESLESFVREWFKPLAYALTLTREQGYPSVFYGDYYGIPTHGVPAMKSKIDPILEARQKYAYGRQNDYLDHHNIIGWTREGNTAHPNSGLATIMSDGAGGNKWMFVGRNKAGQVWTDITGNKAGTVTINADGWGNFSVNGGSVSIWVNK

SEQ ID NO: 23679 - protein, 485 aa, Bacillus sp.
HHNGTNGTMMQYFEWYLPNDGNHWNRLNSDASNLKSKGITAVWIPPAWKGASQNDVGYGAYDLYDLGEFNQKGTVRTKYGTRSQLQAAVTSLKNNGIQVYGDVVMNHKGGADATEMVRAVEVNPNNRNQEVTGEYTIEAWTRFDFPGRGNTHSSFKWRWYHFDGVDWDQSRRLNNRIYLFRPHGKVWDWPVDTENGNYDYLMYADIDMDHPEVVNELRNWGVWYTNTLGLDGFRIDAVKHIKYSFTRDWINHVRSATGKNMFAVAEFWKNDLGAIENYLQKTNWNHSVFDVPLHYNLYNASKSGGNYDMRNIFNGTVVQRHPSHAVTFVDNHDSQPEEALESFVEEWFKPLAYALTLTREQGYPSVFYGDYYGIPTHGVPAMRSKIDPILEARQKYAYGKQNDYLDHHNIIGWTREGNTAHPNSGLATIMSDGAGGSKWMFVGRNKAGQVWSDITGNRTGTVTINADGWGNFSVNGGSVSIWVNK

SEQ ID NO: 23680 - protein, 483 aa, Bacillus sp.
HHNGTNGTLMQYFEWYLPNDGNHWNRLRSDASNLKDKGISAVWIPPAWKGASQNDVGYGAYDLYDLGEFNQKGTIRTKYGTRNQLQAAVNALKSNGIQVYGDVVMNHKGGADATEMVKAVEVNPNNRNQEVSGEYTIEAWTKFDFPGRANTHSNFKWRWYHFDGVDWDQSRKLNNRIYKFRTKAWDWEVDTEFGNYDYLLYADIDMDHPEVVNELRNWGVWYTNTLGLDGFRIDAVKHIKYSFTRDWINHVRSAAGKNMFAVAEFWKNDLGAIENYLNKTNWNHSVFDVPLHFNLYYASKSGGNYDMRQIFNGTVVQKHPTHAVTFVDNHDSQPEESLESFVREWFKPLAYALTLTREQGYPSVFYGDYYGIPTHGVPAMKSKIDPILEARQKYAYGRQNDYLDHHNIIGWTREGNTAHPNSGLATIMSDGAGGNKWMFVGRNKAGQVWTDITGNKAGTVTINADGWGNFSVNGGSVSIWVNK

SEQ ID NO: 23681 - protein, 483 aa, Bacillus sp.
HHNGTNGTLMQYFEWYLPNDGNHWNRLRSDASNLKDKGISAVWIPPAWKGTSQNDVGYGAYDLYDLGEFNQKGTIRTKYGTRNQLQAAVNALKSNGIQVYGDVVMNHKGGADATEMVKAVEVNPNNRNQEVSGEYTIEAWTKFDFPGRANTHSNFKWRWYHFDGVDWDQSRKLNNRIYKFRTKAWDWEVDTEFGNYDYLMYADIDMDHPEVVNELRNWGVWYTNTLGLDGFRIDAVKHIKYSFTRDWINHVRSAIGKNMFAVAEFWKGDLGAIENYLNKTNWNHSVFDVPLHFNLYYASKSGGNYDMRQIFNGTVVQKHPTHAVTFVDNHDSQPEESLESFVREWFKPLAYALTLTREQGYPMVFYGDYYGIPTHGVPAMKSKIDPILEARQKYAYGRQNDYLDHHNIIGWTREGNTAHPNSGLATIMSDGAGGNKWMFVGRNKAGQVWTDITGNKAGTVTINADGWGNFSVNGGSVSIWVNK

SEQ ID NO: 23682 - protein, 482 aa, Bacillus subtilis
HHNGTNGTLMQYFEWYLPNDGNHWNRLRSDASNLKDKGISAVWIPPAWKGASQNDVGYGAYDLYDLGEFNQKGTIRTKYGTRNQLQAAVNALKSNGIQVYGDVVMNHKGGADATEMVKAVEVNPNNRNQEVSGEYTIEAWTKFDFPGRANTHSNFKWRWYHFDGVDWDQSRKLNNRIYKFRTKAWDWEVDTEFGNYDYLLYADIDMDHPEVVNELRNWGVWYTNTLGLDGFRIDAVKHIKYSFTRDWINHVRSAGKNMFAVAEFWKNDLGAIENYLNKTNWNHSVFDVPLHFNLYYASKSGGNYDMRQIFNGTVVQRHPTHAVTFVDNHDSQPEESLESFVREWFKPLAYALTLTREQGYPSVFYGDYYGIPTHGVPAMKSKIDPILEARQKYAYGRQNDYLDHHNIIGWTREGNTAHPNSGLATIMSDGAGGNKWMFVGRNKAGQVWTDITGNKAGTVTINADGWGNFSVNGGSVSIWVNK

SEQ ID NO: 23683 - protein, 482 aa, Bacillus subtilis
HHNGTNGTLMQYFEWYLPNDGNHWNRLRSDASNLKDKGISAVWIPPAWKGASQNDVGYGAYDLYDLGEFNQKGTIRTKYGTRNQLQAAVNALKSNGIQVYGDVVMNHKGGADATEMVKAVEVNPNNRNQEVSGEYTIEAWTKFDFPGRANTHSNFKWRWYHFDGVDWDQSRKLNNRIYKFRTKAWDWEVDTEFGNYDYLMYADIDMDHPEVVNELRNWGVWYTNTLGLDGFRIDAVKHIKYSFVRDWINHVRSAGKNMFAVAEFWKNDLGAIENYLNKTNWNHSVFDVPLHFNLYYASKSGGNYDMRQIFNGTVVQRHPTHAVTFVDNHDSQPEESLESFVREWFKPLAYALTLTREQGYPSVFYGDYYGIPTHGVPAMKSKIDPILEARQKYAYGRQNDYLDHHNIIGWTREGNTAHPNSGLATIMSDGAGGNKWMFVGRNKAGQVWTDITGNKAGTVTINADGWGNFSVNGGSVSIWVNK

SEQ ID NO: 23684 - protein, 484 aa, Synthetic construct
HHNGTNGTMMQYFEWYLPNDGNHWNRLRSDASNLKDKGISAVWIPPAWKGASQNDVGYGAYDLYDLGEFNQKGTIRTKYGTRNQLQAAVNALKSNGIQVYGDVVMNHKAGADGTEFVDAVEVNPSNRNQETSGTYQIQAWTKFDFPGRGNTYSSFKWRWYHFDGTDWDESRKLNRIYKFRGTGKAWDWEVDTENGNYDYLMFADLDMDHPEVVNELRNWGVWYTNTLGLDGFRIDAVKHIKYSFTRDWINHVRSATGKNMFAVAEFWKNDLGAIENYLNKTNWNHSVFDVPLHYNLYNASKSGGNYDMRQIFNGTVVQRHPMHAVTFVDNHDSQPEEALESFVEEWFKPLAYALTLTREQGYPSVFYGDYYGIPTHGVPAMKSKIDPILEARQKYAYGRQNDYLDHHNIIGWTREGNTAHPNSGLATIMSDGAGGNKWMFVGRNKAGQVWTDITGNRAGTVTINADGWGNFSVNGGSVSIWVNK

SEQ ID NO: 23685 - protein, 484 aa, Synthetic construct
HHNGTNGTMMQYFEWYLPNDGNHWNRLNSDASNLKSKGITAVWIPPAWKGASQNDVGYGAYDLYDLGEFNQKGTVRTKYGTRSQLQAAVTSLKNNGIQVYGDVVMNHKAGADGTELVDAVEVNPSDRNQEISGTYQIQAWTKFDFPGRGNTYSSFKWRWYHFDGTDWDESRKLNRIYKFRGTGKAWDWEVDTENGNYDYLMYADLDMDHPEVVNELRNWGVWYTNTLGLDGFRIDAVKHIKYSFTRDWINHVRSATGKNMFAVAEFWKNDLGAIENYLQKTNWNHSVFDVPLHYNLYNASKSGGNYDMRNIFNGTVVQRHPSHAVTFVDNHDSQPEEALESFVEEWFKPLAYALTLTREQGYPSVFYGDYYGIPTHGVPAMRSKIDPILEARQKYAYGKQNDYLDHHNIIGWTREGNTAHPNSGLATIMSDGAGGSKWMFVGRNKAGQVWSDITGNRTGTVTINADGWGNFSVNGGSVSIWVNK

SEQ ID NO: 23686 - protein, 484 aa, Synthetic construct
HHNGTNGTMMQYFEWYLPNDGNHWNRLNSDASNLKSKGITAVWIPPAWKGASQNDVGYGAYDLYDLGEFNQKGTVRTKYGTRSQLQAAVTSLKNNGIQVYGDVVMDHKGGADGTEWVDAVEVNPSDRNQEISGTYQIQAWTKFDFPGRGNTYSSFKWRWYHFDGVDWDESRKLSRIYKFRGIGKAWDWEVDTENGNYDYLMYADLDMDHPEVVNELRNWGVWYTNTLGLDGFRIDAVKHIKYSFTRDWINHVRSATGKNMFAVAEFWKNDLGAIENYLQKTNWNHSVFDVPLHYNLYNASKSGGNYDMRNIFNGTVVQRHPSHAVTFVDNHDSQPEEALESFVEEWFKPLAYALTLTREQGYPSVFYGDYYGIPTHGVPAMRSKIDPILEARQKYAYGKQNDYLDHHNIIGWTREGNTAHPNSGLATIMSDGAGGSKWMFVGRNKAGQVWSDITGNRTGTVTINADGWGNFSVNGGSVSIWVNK

SEQ ID NO: 23687 - protein, 484 aa, Synthetic construct
HHNGTNGTMMQYFEWYLPNDGNHWNRLRSDASNLKDKGISAVWIPPAWKGASQNDVGYGAYDLYDLGEFNQKGTIRTKYGTRNQLQAAVNALKSNGIQVYGDVVMNHKAGADSTEWVDAVEVNPSNRNQETSGTYQIQAWTKFDFPGRGNTYSSFKWRWYHFDGTDWDESRKLNRIYKFRGTGKAWDWEVDTENGNYDYLMFADLDMDHPEVVNELRNWGVWYTNTLGLDGFRIDAVKHIKYSFTRDWINHVRSATGKNMFAVAEFWKNDLGAIENYLNKTNWNHSVFDVPLHYNLYNASKSGGNYDMRQIFNGTVVQRHPMHAVTFVDNHDSQPEEALESFVEEWFKPLAYALTLTREQGYPSVFYGDYYGIPTHGVPAMKSKIDPILEARQKYAYGRQNDYLDHHNIIGWTREGNTAHPNSGLATIMSDGAGGNKWMFVGRNKAGQVWTDITGNRAGTVTINADGWGNFSVNGGSVSIWVNK

SEQ ID NO: 23688 - protein, 490 aa, Bacillus sp. TS22
SVPVNGTMMQYFEWYLPDDGTLWTKVANNAQSLANLGITALWLPPAYKGTSSSDVGYGVYDLYDLGEFNQKGTVRTKYGTKTQYIQAIQAAHTAGMQVYADVVFNHKAGADGTELVDAVEVNPSDRNQEISGTYQIQAWTKFDFPGRGNTYSSFKWRWYHFDGTDWDESRKLNRIYKFRGTGKAWDWEVDTENGNYDYLMYADLDMDHPEVVSELKNWGKWYVITTNIDGFRLDAVKHIKYSFFPDWLSYLRTQTQKPLFAVGEFWSYDINKLHNYITKTNGSMSLFDAPLHNNFYIASKSGGYFDMRTLLNNTLMKEQPTLSVTLVDNHDTEPGQSLQSWVEPWFKPLAYAFILTRQEGYPCVFYGDYYGIPKYNIPALKSKLDPLLIARRDYAYGTQHDYIDNADIIGWTREGVAEKANSGLAALITDGPGGSKWMYVGKQHAGKTFYDLTGNRSDTVTINADGWGEFKVNGGSVSIWVPKTSTTSQI

SEQ ID NO: 23689 - protein, 482 aa, unidentified
APVNGTMMQYFEWDLPNDGTLWTKVKNEATNLSSLGITALWLPPAYKGTSQSDVGYGVYDLYDLGEFNQKGTIRTKYGTKAQYIQAIQAAKAAGMQVYADVVFNHKAGADGTEFVDAVEVNPSNRNQETSGTYQIQAWTKFDFPGRGNTYSSFKWRWYHFDGTDWDESRKLNRIYKFRGTGKAWDWEVDTENGNYDYLMFADLDMDHPEVVTELKNWGKWYVNTTNVDGFRLDAVKHIKYSFFPDWLTYVRNQTGKNLFAVGEFWSYDVNKLHNYITKTNGSMSLFDAPLHNNFYIASKSSGYFDMRYLLNNTLMKDQPSLAVTLVDNHDTQPGQSLQSWVEAWFKPLAYAFILTRQEGYPCVFYGDYYGIPKYNIPGLKSKIDPLLIARRDYAYGTQRDYIDHQDIIGWTREGIDAKPNSGLAALITDGPGGSKWMYVGKKHAGKVFYDLTGNRSDTVTINADGWGEFKVNGGSVSIWVAK

SEQ ID NO: 23690 - protein, 480 aa, Bacillus subtilis
APINETMMQYFEWDLPNDGTLWTKVKNEAANLSSLGITALWLPPAYKGTSQSDVGYGVYDLYDLGEFNQKGTIRTKYGTKTQYIQAIQAAKAAGMQVYADVVFNHKAGADGTEFVDAVEVDPSNRNQETSGTYQIQAWTKFDFPGRGNTYSSFKWRWYHFDGTDWDESRKLNRIYKFTGKAWDWPVDTENGNYDYLMFADLDMDHPEVVTELKNWGTWYVNTTNIDGFRLDAVKHIKYYFFPDWLTYVRNQTGKNLFAVGEFWSYDVNKLHNYITHTNGSMSLFDAPLHNNFYTASKSSGYFDMRYLLNNTLMKDQPSLAVTLVDNHDTQPGQSLQSWVEPWFKPLAYAFILTRQEGYPCVFYGDYYGIPKYNIPGLKSKIDPLLIARRDYAYGTQRDYIDHQDIIGWTREGIDTKPNSGLAALITDGPGGSKWMYVGKKHAGKVFYDLTGNRSDTVTINADGWGEFKVNGGSVSIWVAK

SEQ ID NO: 23691 - protein, 480 aa, Bacillus subtilis
APINETMMQYFEWDLPNDGTLWTKVKNEAANLSSLGITALWLPPAYKGTSQSDVGYGVYDLYDLGEFNQKGTIRTKYGTKTQYIQAIQAAKAAGMQVYADVVFNHKAGADGTEFVDAVEVDPSNRNQETSGTYQIQAWTKFDFPGRGNTYSSFKWRWYHFDGTDWDESRKLNRIYKFTGKAWDWPVDTENGNYDYLMFADLDMDHPEVVTELKNWGTWYVNTTNIDGFRLDAVKHIKYYFFPDWLTYVRNQTGKNLFAVGEFWSYDVNKLHNYITYTNGSMSLFDAPLHNNFYTASKSSGYFDMRYLLNNTLMKDQPSLAVTLVDNHDTQPGQSLQSWVEPWFKPLAYAFILTRQEGYPCVFYGDYYGIPKYNIPGLKSKIDPLLIARRDYAYGTQRDYIDHQDIIGWTREGIDTKPNSGLAALITDGPGGSKWMYVGKKHAGKVFYDLTGNRSDTVTINADGWGEFKVNGGSVSIWVAK

SEQ ID NO: 23692 - protein, 480 aa, Bacillus subtilis
APINETMMQYFEWDLPNDGTLWTKVKNEAANLSSLGITALWLPPAYKGTSQSDVGYGVYDLYDLGEFNQKGTIRTKYGTKTQYIQAIQAAKAAGMQVYADVVFNHKAGADGTEFVDAVEVDPSNRNQETSGTYQIQAWTKFDFPGRGNTYSSFKWRWYHFDGTDWDESRKLNRIYKFTGKAWDWPVDTENGNYDYLMFADLDMDHPEVVTELKNWGTWYVNTTNIDGFRLDAVKHIKYYFFPDWLTYVRNQTGKNLFAVGEFWSYDVNKLHNYITFTNGSMSLFDAPLHNNFYTASKSSGYFDMRYLLNNTLMKDQPSLAVTLVDNHDTQPGQSLQSWVEPWFKPLAYAFILTRQEGYPCVFYGDYYGIPKYNIPGLKSKIDPLLIARRDYAYGTQRDYIDHQDIIGWTREGIDTKPNSGLAALITDGPGGSKWMYVGKKHAGKVFYDLTGNRSDTVTINADGWGEFKVNGGSVSIWVAK

SEQ ID NO: 23693 - protein, 480 aa, Bacillus subtilis
APINETMMQYFEWDLPNDGTLWTKVKNEAANLSSLGITALWLPPAYKGTSQSDVGYGVYDLYDLGEFNQKGTIRTKYGTKTQYIQAIQAAKAAGMQVYADVVFNHKAGADGTEFVDAVEVDPSNRNQETSGTYQIQAWTKFDFPGRGNTYSSFKWRWYHFDGTDWDESRKLNRIYKFTGKAWDWPVDTENGNYDYLMFADLDMDHPEVVTELKNWGTWYVNTTNIDGFRLDAVKHIKYYFFPDWLTYVRNQTGKNLFAVGEFWSYDVNKLHNYITKTNGSMSLFDAPLHNNFYTASKSSGYFDMRYLLNNTLMKDQPSLAVTLVDNHDTQPGQSLQSWVEPWFKPLAYAFILTRQEGYPCVFYGDYYGIPKYNIPGLKSKIDPLLIARRDYAYGTQRDYIDHQDIIGWTREGIDTKPNSGLAALITDGPGGSKWMYVGKKHAGKVFYDLTGNRSDTVTINADGWGEFKVNGGSVSIWVAK

SEQ ID NO: 23694 - protein, 480 aa, Bacillus subtilis
APINETMMQYFEWDLPNDGTLWTKVKNEAANLSSLGITALWLPPAYKGTSQSDVGYGVYDLYDLGEFNQKGTIRTKYGTKTQYIQAIQAAKAAGMQVYADVVFNHKAGADGTEFVDAVEVDPSNRNQETSGTYQIQAWTKFDFPGRGNTYSSFKWRWYHFDGTDWDESRKLNRIYKFTGKAWDWPVDTENGNYDYLMFADLDMDHPEVVTELKNWGTWYVNTTNIDGFRLDAVKHIKYYFFPDWLTYVRNQTGKNLFAVGEFWSYDVNKLHNYITWTNGSMSLFDAPLHNNFYTASKSSGYFDMRYLLNNTLMKDQPSLAVTLVDNHDTQPGQSLQSWVEPWFKPLAYAFILTRQEGYPCVFYGDYYGIPKYNIPGLKSKIDPLLIARRDYAYGTQRDYIDHQDIIGWTREGIDTKPNSGLAALITDGPGGSKWMYVGKKHAGKVFYDLTGNRSDTVTINADGWGEFKVNGGSVSIWVAK

SEQ ID NO: 23695 - protein, 480 aa, Geobacillus stearothermophilus
NGTLMQYFEWYTPNDGQHWKRLQNDSAYLAEHGITAVWIPPAYKGTSQADVGYGAYDLYDLGEFHQKGTVRTKYGTKGELQSAIKSLHSRDINVYGDVVINHKGGADATEDVTAVEVDPADRNRVISGEYLIKAWTHFHFPGRGSTYSDFKWHWYHFDGTDWDESRKLNRIYKFQGKAWDWEVDTENGNYDYLMYADLDMDHPEVVTELKNWGKWYVNTTNIDGFRLDAVKHIKFSFFPDWLSYVRSQTGKPLFTVGEYWSYDINKLHNYITKTNGTMSLFDAPLHNKFYTASKSGGAFDMRTLMTNTLMKDQPTLAVTFVDNHDTEPGQALQSWVDPWFKPLAYAFILTRQEGYPCVFYGDYYGIPQYNIPSLKSKIDPLLIARRDYAYGTQHDYLDHSDIIGWTREGVTEKPGSGLAALITDGPGGSKWMYVGKQHAGKVFYDLTGNRSDTVTINSDGWGEFKVNGGSVSVWVPRKTT

SEQ ID NO: 23696 - protein, 481 aa, Synthetic construct
APVNGTMMQYFEWDLPNDGTLWTKVKNEAANLSSLGITALWLPPAYKGTSQSDVGYGVYDLYDLGEFNQKGTIRTKYGTKTQYIQAIQAAKAAGMQVYADVVFNHKAGADGTEFVDAVEVDPSNRNQETSGTYQIQAWTKFDFPGRGNTYSSFKWRWYHFDGTDWDESRKLNRIYKFSTGKAWDWEVDTENGNYDYLMFADLDMDHPEVVAELKNWGKWYVNTTNVDGFRLDAVKHIKYSFFPDWLSYVRNQTGKNLFAVGEFWSYDVNKLHNYITKTNGTMSLFDAPLHNNFYIASKSSGYFDMRYLLNNTLMKDQPALAVTLVDNHDTQPGQSLQSWVEPWFKPLAYAFILTRQEGYPCVFYGDYYGIPKYNIPGLKSKIDPLLIARRDYAYGTQRDYIDHPDIIGWTREGIDAKPNSGLAALITDGPGGSKWMYVGKKHAGKVFYDLTGNRSDTVTINADGWGQFKVNGGSVSIWVAK

SEQ ID NO: 23697 - protein, 482 aa, Synthetic construct
APVNGTMMQYFEWDLPNDGTLWTKVKNEAANLSSLGITALWLPPAYKGTSQSDVGYGVYDLYDLGEFNQKGTIRTKYGTKTQYIQAIQAAKAAGMQVYADVVFNHKAGADGTEFVDAVEVNPSNRNQETSGTYQIQAWTKFDFPGRGNTYSSFKWRWYHFDGTDWDESRKLNRIYKFRGTGKAWDWEVDTENGNYDYLMFADLDMDHPEVVAELKNWGKWYVNTTNVDGFRLDAVKHIKYSFFPDWLSYVRNQTGKNLFAVGEFWSYDVNKLHNYITKTNGTMSLFDAPLHNNFYIASKSSGYFDMRYLLNNTLMKDQPALAVTLVDNHDTQPGQSLQSWVEPWFKPLAYAFILTRQEGYPCVFYGDYYGIPKYNIPGLKSKIDPLLIARRDYAYGTQRDYIDHPDIIGWTREGIDAKPNSGLAALITDGPGGSKWMYVGKKHAGKVFYDLTGNRSDTVTINADGWGQFKVNGGSVSIWVAK

SEQ ID NO: 23698 - protein, 482 aa, Synthetic construct
APVNGTMMQYFEWDLPNDGTLWTKVKNEAANLSSLGITALWLPPAYKGTSQSDVGYGVYDLYDLGEFNQKGTIRTKYGTKTQYIQAIQAAKAAGMQVYADVVFNHKAGADSTEWVDAVEVNPSNRNQETSGTYQIQAWTKFDFPGRGNTYSSFKWRWYHFDGTDWDESRKLNRIYKFRGTGKAWDWEVDTENGNYDYLMFADLDMDHPEVVAELKNWGKWYVNTTNVDGFRLDAVKHIKYSFFPDWLSYVRNQTGKNLFAVGEFWSYDVNKLHNYITKTNGTMSLFDAPLHNNFYIASKSSGYFDMRYLLNNTLMKDQPALAVTLVDNHDTQPGQSLQSWVEPWFKPLAYAFILTRQEGYPCVFYGDYYGIPKYNIPGLKSKIDPLLIARRDYAYGTQRDYIDHPDIIGWTREGIDAKPNSGLAALITDGPGGSKWMYVGKKHAGKVFYDLTGNRSDTVTINADGWGQFKVNGGSVSIWVAK

SEQ ID NO: 23699 - protein, 491 aa, Geobacillus thermoleovorans
AAAPFNGTMMQYFEWYLPDDGTLWTKVANEANNLSSLGITALWLPPAYKGTSRSDVGYGVYDLYDLGEFNQKGTVRTKYGTKAQYLQAIQAAHAAGMQVYADVVFDHKGGADGTEWVDAVEVNPSDRNQEISGTYQIQAWTKFDFPGRGNTYSSFKWRWYHFDGVDWDESRKLSRIYKFRGIGKAWDWEVDTENGNYDYLMYADLDMDHPEVVTELKNWGKWYVNTTNIDGFRLDAVKHIKFSFFPDWLSYVRSQTGKPLFTVGEYWSYDINKLHNYITKTNGTMSLFDAPLHSKFYTASKSGGAFDMRTLMTNTLMKDQPTLAVTFVDNHDTEPVQALQSWVDPWFKPLAYAFILTRQEGYPCVFYGDYYGIPQYNIPSLKSKIDPLLIARRDSDGWGEFKVNGGSVSVWVPRKTTVSTIAWPITTRPWTGEFVRWTEPRLVAWPYAYGTQHDYLDHSDIIGWTREGVTEKPGSGLAALITDGPGGSKWM

SEQ ID NO: 23700 - protein, 490 aa, Geobacillus thermoleovorans
AAPFNGTMMQYFEWYLPDDGTLWTKVANEANNLSSLGITALWLPPAYKGTSRSDVGYGVYDLYDLGEFNQKGTVRTKYGTKAQYLQAIQAAHAAGMQVYADVVFDHKGGADGTEWVDAVEVNPSDRNQEISGTYQIQAWTKFDFPGRGNTYSSFKWRWYHFDGVDWDESRKLSRIYKFRGIGKAWDWEVDTENGNYDYLMYADLDMDHPEVVTELKNWGKWYVNTTNIDGFRLDAVKHIKFSFFPDWLSYVRSQTGKPLFTVGEYWSYDINKLHNYITKTNGTMSLFDAPLHSKFYTASKSGGAFDMRTLMTNTLMKDQPTLAVTFVDNHDTEPVQALQSWVDPWFKPLAYAFILTRQEGYPCVFYGDYYGIPQYNIPSLKSKIDPLLIARRDSDGWGEFKVNGGSVSVWVPRKTTVSTIAWPITTRPWTGEFVRWTEPRLVAWPYAYGTQHDYLDHSDIIGWTREGVTEKPGSGLAALITDGPGGSKWM

SEQ ID NO: 23701 - protein, 483 aa, Bacillus sp.
HHNGTNGTLMQYFEWYLPNDGNHWNRLRSDASNLKDKGISAVWIPPAWKGASQNDVGYGAYDLYDLGEFNQKGTIRTKYGTRNQLQAAVNALKSNGIQVYGDVVMNHKGGADATEMVKAVEVNPNNRNQEVSGEYTIEAWTKFDFPGRANTHSNFKWRWYHFDGVDWDQSRKLNNRIYKFRTKAWDWEVDTEFGNYDYLLYADIDMDHPEVRNELRNWGVWYTNTLGLDGFRIDAVKHIKYSFTRDWINHVRSAIGKNMFAVAEFWKNDLGAIENYLNKTNWNHSVFDVPLHFNLYYASKSGGNYDMRQIFNGTVVQKHPTHAVTFVDNHDSQPEESLESFVREWFKPLAYALTLTREQGYPSVFYGDYYGIPTHGVPAMKSKIDPILEARQKYAYGRQNDYLDHHNIIGWTREGNTAHPNSGLATIMSDGAGGNKWMFVGRNKAGQVWTDITGNKAGTVTINADGWGNFSVNGGSVSIWVNK

SEQ ID NO: 23702 - protein, 483 aa, Bacillus sp.
HHNGTNGTLMQYFEWYLPNDGNHWNRLRSDASNLKDKGISAVWIPPAWKGASQNDVGYGAYDLYDLGEFNQKGTIRTKYGTRNQLQAAVNALKSNGIQVYGDVVMNHKAGADATEMVKAVEVNPNNRNQEVSGEYTIEAWTKFDFPGRANTHSNFKWRWYHFDGVDWDQSRKLNNRIYKFRTKAWDWEVDTEFGNYDYLLYADIDMDHPEVVNELRNWGVWYTNTLGLDGFRIDAVKHIKYSFTRDWINHVRSAIGKNMFAVAEFWKNDLGAIENYLNKTNWNHSVFDVPLHFNLYYASKSGGNYDMRQIFNGTVVQKHPTHAVTFVDNHDSQPEESLESFVREWFKPLAYALTLTREQGYPSVFYGDYYGIPTHGVPAMKSKIDPILEARQKYAYGRQNDYLDHHNIIGWTREGNTAHPNSGLATIMSDGAGGNKWMFVGRNKAGQVWTDITGNKAGTVTINADGWGNFSVNGGSVSIWVNK

SEQ ID NO: 23703 - protein, 483 aa, Bacillus subtilis
HHNGTNGTLMQYFEWYLPNDGNHWNRLRSDASNLKDKGISAVWIPPAWKGASQNDVGYGAYDLYDLGEFNQKGTIRTKYGTRNQLQAAVNALKSNGIQVYGDVVMNHKGGADATEMVKAVEVNPNNRNQEVSGEYTIEAWTKFDFPGRANTHSNFKWRWYHFDGVDWDQSRKLNNRIYKFRTKAWDWEVDTEFGNYDYLMYADIDMDHPEVVNELRNWGVWYTNTLGLDGFRIDAVKHIKYSFVRDWINHVRSAIGKNMFAVAEFWKNDLGAIENYLNKTNWNHSVFDVPLHFNLYYASKSGGNYDMRQIFNGTVVQRHPTHAVTFVDNHDSQPEESLESFVREWFKPLAYALTLTREQGYPSVFYGDYYGIPTHGVPAMKSKIDPILEARQKYAYGRQNDYLDHHNIIGWTREGNTAHPNSGLATIMSDGAGGNKWMFVGRNKAGQVWTDITGNKAGTVTINADGWGNFSVNGGSVSIWVNK

SEQ ID NO: 23704 - protein, 483 aa, Bacillus sp.
HHNGTNGTLMQYFEWYLPNDGNHWNRLRSDASNLKDKGISAVWIPPAWKGASQNDVGYGAYDLYDLGEFNQKGTIRTKYGTRNQLQAAVNALKSNGIQVYGDVVMNHKGGADATEMVKAVEVNPNNRNQEVSGEYTIEAWTKFDFPGRANTHSNFKWRWYHFDGVDWDQSRKLNNRIYKFRTKAWDWEVDTEFGNYDYLLYADIDMDHPEVVNELRNWGVWYTNTLGLDGFRVDAVKHIKYSFTRDWINHVRSAIGKNMFAVAEFWKNDLGAIENYLNKTNWNHSVFDVPLHFNLYYASKSGGNYDMRQIFNGTVVQKHPTHAVTFVDNHDSQPEESLESFVREWFKPLAYALTLTREQGYPSVFYGDYYGIPTHGVPAMKSKIDPILEARQKYAYGRQNDYLDHHNIIGWTREGNTAHPNSGLATIMSDGAGGNKWMFVGRNKAGQVWTDITGNKAGTVTINADGWGNFSVNGGSVSIWVNK

SEQ ID NO: 23705 - protein, 485 aa, Bacillus sp.
HHNGTNGTLMQYFEWYLPNDGNHWNRLRSDASNLKDKGISAVWIPPAWKGASQNDVGYGAYDLYDLGEFNQKGTIRTKYGTRNQLQAAVNALKSNGIQVYGDVVMNHKGGADATEMVRAVEVNPNNRNQEVSGEYTIEAWTKFDFPGRANTHSNFKWRWYHFDGVDWDQSRKLNNRIYKFRGDGKGWDWEVDTENGNYDYLLYADIDMDHPEVTNELRNWGVWYTNTLGLDGFRIDAVKHIKYSFTRDWINHVRSATGKNMFAVAEFWKNDLGAIENYLNKTNWNHSVFDVPLHFNLYYASKSGGNYDMRQIFNGTVVQRHPTHAVTFVDNHDSQPEESLESFVREWFKPLAYALTLTREQGYPSVFYGDYYGIPTHGVPAMKSKIDPILEARQKYAYGRQNDYLDHHNIIGWTREGNTAHPNSGLATIMSDGAGGNKWMFVGRNKAGQVWTDITGNRAGTVTINADGWGNFSVNGGSVSIWVNK

SEQ ID NO: 23706 - protein, 483 aa, Bacillus sp.
HHNGTNGTLMQYFEWYLPNDGNHWNRLRSDASNLKDKGISAVWIPPAWKGASQNDVGYGAYDLYDLGEFNQKGTIRTKYGTRNQLQAAVNALKSNGIRVYGDVVMNHKGGADATEMVKAVEVNPNNRNQEVSGEYTIEAWTKFDFPGRANTHSNFKWRWYHFDGVDWDQSRKLNNRIYKFRTKAWDWEVDTEFGNYDYLLYADIDMDHPEVVNELRNWGVWYTNTLGLDGFRIDAVKHIKYSFTRDWINHVRSAIGKNMFAVAEFWKNDLGAIENYLNKTNWNHSVFDVPLHFNLYYASKSGGNYDMRQIFNGTVVQKHPTHAVTFVDNHDSQPEESLESFVREWFKPLAYALTLTREQGYPSVFYGDYYGIPTHGVPAMKSKIDPILEARQKYAYGRQNDYLDHHNIIGWTREGNTAHPNSGLATIMSDGAGGNKWMFVGRNKAGQVWTDITGNKAGTVTINADGWGNFSVNGGSVSIWVNK

SEQ ID NO: 23707 - protein, 485 aa, Bacillus sp.
HHNGTNGTLMQYFEWYLPNDGNHWNRLRSDASNLKDKGISAVWIPPAWKGASQNDVGYGAYDLYDLGEFNQKGTIRTKYGTRNQLQAAVNALKSNGIQVYGDVVMNHKGGADATEMVRAVEVNPNNRNQEVSGEYTIEAWTKFDFPGRANTHSNFKWRWYHFDGVDWDQSRKLNNRIYKFRGDGKGWDWEVDTENGNYDYLIYADIDMDHPEVTNELRNWGVWYTNTLGLDGFRIDAVKHIKYSFTRDWINHVRSATGKNMFAVAEFWKNDLGAIENYLNKTNWNHSVFDVPLHFNLYYASKSGGNYDMRQIFNGTVVQRHPTHAVTFVDNHDSQPEESLESFVREWFKPLAYALTLTREQGYPSVFYGDYYGIPTHGVPAMKSKIDPILEARQKYAYGRQNDYLDHHNIIGWTREGNTAHPNSGLATIMSDGAGGNKWMFVGRNKAGQVWTDITGNRAGTVTINADGWGNFSVNGGSVSIWVNK

SEQ ID NO: 23708 - protein, 483 aa, Bacillus sp.
HHNGTNGTLMQYFEWYLPNDGNHWNRLRSDASNLKDKGISAVWIPPAFKGASQNDVGYGAYDLYDLGEFNQKGTIRTKYGTRNQLQAAVNALKSNGIQVYGDVVMNHKGGADATEMVKAVEVNPNNRNQEVSGEYTIEAWTKFDFPGRANTHSNFKWRWYHFDGVDYDQSRKLNNRIYKFRTKAWDWEVDTEFGNYDYLMYADIDMDHPEVVNELRNWGVWYTNTLGLDGFRIDAVKHIKYSFTRDWINHVRSAIGKNMFAVAEFWKNDLGAIENYLNKTNWNHSVFDVPLHFNLYYASKSGGNYDMRQIFNGTVVQKHPTHAVTFVDNHDSQPEESLESFVREWFKPLAYALTLTREQGYPSVFYGDYYGIPTHGVPAMKSKIDPILEARQKYAYGRQNDYLDHHNIIGWTREGNTAHPNSGLATIMSDGAGGNKWMFVGRNKAGQVWTDITGNKAGTVTINADGWGNFSVNGGSVSIWVNK

SEQ ID NO: 23709 - protein, 483 aa, Bacillus sp.
HHNGTNGTLMQYFEWYLPNDGNHWNRLRSDASNLKDKGISAVWIPPAWKGASQNDVGYGAYDLWDLGEFNQKGTIRTKYGTRNQLQAAVNALKSNGIQVYGDVVMNHKGGADATEMVKAVEVNPNNRNQEVSGEYTIEAWTKFDFPGRANTHSNFKWRWYHFDGVDWDQSRKLNNRIYKFRTKAWDWEVDTEFGNYDYLLYADIDMDHPEVVNELRNWGVWYTNTLGLDGFRIDAVKHIKYSFTRDWINHVRSAIGKNMFAVAEFWKNDLGAIENYLNKTNWNHSVFDVPLHFNLYYASKSGGNYDMRQIFNGTVVQKHPTHAVTFVDNHDSQPEESLESFVREWFKPLAYALTLTREQGYPSVFYGDYYGIPTHGVPAMKSKIDPILEARQKYAYGRQNDYLDHHNIIGWTREGNTAHPNSGLATIMSDGAGGNKWMFVGRNKAGQVWTDITGNKAGTVTINADGWGNFSVNGGSVSIWVNK

SEQ ID NO: 23710 - protein, 483 aa, Bacillus sp.
HHNGTNGTLMQYFEWYLPNDGNHWNRLRSDASNLKDKGISAVWIPPAWKGASQNDVGYGAYDLYDLGEFNQKGTIRTKYGTRNQLQAAVNALKSNGIQVYGDVVMNHKGGADATEMVKAVEVNPNNRNQEVSGEHTIEAWTKFDFPGRANTHSNFKWRWYHFDGVDWDQSRKLNNRIYKFRTKAWDWEVDTEFGNYDYLLYADIDMDHPEVVNELRNWGVWYTNTLGLDGFRIDAVKHIKYSFTRDWINHVRSAIGKNMFAVAEFWKNDLGAIENYLNKTNWNHSVFDVPLHFNLYYASKSGGNYDMRQIFNGTVVQKHPTHAVTFVDNHDSQPEESLESFVREWFKPLAYALTLTREQGYPSVFYGDYYGIPTHGVPAMKSKIDPILEARQKYAYGRQNDYLDHHNIIGWTREGNTAHPNSGLATIMSDGAGGNKWMFVGRNKAGQVWTDITGNKAGTVTINADGWGNFSVNGGSVSIWVNK

SEQ ID NO: 23711 - protein, 483 aa, Bacillus sp.
HHNGTNGTLMQYFEWYLPNDGNHWNRLRSDASNLKDKGISAVWIPPAWKGASQNDVGYGAYDLYDLGEFNQKGTIRTKYGTRNQLQAAVNALKSNGIQVYGDVVMNHKGGADATEMVKAVEVNPNNRNQEVSGEYTIEAWTKFDFPGRANTHSNFKWRWYHFDGVDWDQSRKLNNRIYKFRTKAWDWEVDTEFGNYDYLLYADIDMDHPEVVNELRNWGVWYTNTLGLDGFRIDAVKHIKYSFTRDWINHVRSAIGKNMFAVAEFWKNDLGAIENYLNKTNWNHSVFDVPLHFNLYYASKSGGNYDMRQIFNGTVVQKHPTHAVTFVDNHDSQPEESLESFVREWFKPLAYALTLTREQGYPSVFYGDYYGIPTHGVPAMKSQIDPILEARQKYAYGRQNDYLDHHNIIGWTREGNTAHPNSGLATIMSDGAGGNKWMFVGRNKAGQVWTDITGNKAGTVTINADGWGNFSVNGGSVSIWVNK

SEQ ID NO: 23712 - protein, 485 aa, Bacillus sp.
HHNGTNGTMMQYFEWYLPNDGNHWNRLRSDASNLKDKGISAVWIPPAWKGASQNDVGYGAYDLYDLGEFNQKGTIRTKYGTRNQLQAAVNALKSNGIQVYGDVVMNHKGGADATEMVRAVEVNPNNRNQEVSGEYTIEAWTKFDFPGRGNTHSNFKWRWYHFNGVDWDQSRKLNNRIYKFRGDGKGWNWEVDTENGNYNYLMYANINMSHPEVVNELRNWGVWYTNTLGLDGFRIDAVKHIKYSFTRDWINHVRSATGKNMFAVAEFWKNDLGAIENYLNKTNWNHSVFDVPLHYNLYNASKSGGNYDMRQIFNGTVVQRHPMHAVTFVDNHDSQPEEALESFVEEWFKPLAYALTLTREQGYPSVFYGDYYGIPTHGVPAMKSKIDPILEARQKYAYGRQNDYLDHHNIIGWTREGNTAHPNSGLATIMSDGAGGNKWMFVGRNKAGQVWTDITGNRAGTVTINADGWGNFSVNGGSVSIWVNK

SEQ ID NO: 23713 - protein, 485 aa, Bacillus sp.
HHNGTNGTMMQYFEWYLPNDGNHWNRLNSDASNLKSKGITAVWIPPAWKGASQNDVGYGAYDVYDLGEFNQKGTVRTKYGTRSQLQAAVTSLKNNGIQVYGDVVFNHKGGADATEMVRAVEVNPNNRNQEVTGEYTIEAWTRFDFPGRGNTHSSFKWRWYHFDGVDWDQSRRLNNRIYKFRGHGKAWDWEVDTENGNYDYLMYADYDFDHPEVVNEIRNWGVWYTNTLGLDGFRIDAVKHIKYSFTRDWINHVRSATGKNMFAVAEFWKNDLGAIENYLQKTNWNHSVFDVPLHYNLYNASKSGGNYDMRNIFNGTVVQRHPSHAVTFVDNHDSQPEEALESFVEEWFKPLAYALTLTREQGYPSVFYGDYYGIPTHGVPAMRSKIDPILEARQKYAYGKQNDYLDHHNIIGWTREGNTAHPNSGLATIMSDGAGGSKWMFVGRNKAGQVWSDITGNRTGTVTINADGWGNFSVNGGSVSIWVNK

SEQ ID NO: 23714 - protein, 483 aa, Bacillus sp.
HHNGTNGTLMQYFEWYLPNDGNHWNRLRSDASNLKDKGISAVWIPPAWKGASQNDVGYGAYDLYDLGEFNQKGTIRTKYGTRNQLQAAVNALKSNGIQVYGDVVMNHKGGADATEMVKAVEVNPNNRNQEVSGEYTIEAWTKFDFPGRANTHSNFKWRWYHFDGVDWDQSRKLNNRIYKFRTKAWDWEVDTEFGNYDYLLYADIDMDHPEVVNELRNWGVWYTNTLGLDGFRIDAVKHIKYSFTRDWINHVRSAIGKNMFAVAEFWNNDLGAIENYLNKTNWNHSVFDVPLHFNLYYASKSGGNYDMRQIFNGTVVQKHPTHAVTFVDNHDSQPEESLESFVREWFKPLAYALTLTREQGYPSVFYGDYYGIPTHGVPAMKSKIDPILEARQKYAYGRQNDYLDHHNIIGWTREGNTAHPNSGLATIMSDGAGGNKWMFVGRNKAGQVWTDITGNKAGTVTINADGWGNFSVNGGSVSIWVNK

SEQ ID NO: 23715 - protein, 483 aa, Bacillus sp.
HHNGTNGTLMQYFEWYLPNDGNHWNRLRSDASNLKDKGISAVWIPPAWKGTSQNDVGYGAYDLYDLGEFNQKGTIRTKYGTRNQLQAAVNALKSNGIQVYGDVVMNHKGGADATEMVKAVEVNPNNRNQEVSGEYTIEAWTKFDFPGRANTHSNFKWRWYHFDGVDWDQSRKLNNRIYKFRTKAWDWEVDTEFGNYDYLMYADIDMDHPEVINELNNWGVWYTNTLGLDGFRIDAVKHIKYSFTRDWINHVRSAIGKNMFAVAEFWKGDLGAIENYLNKTNWNHSVFDVPLHFNLYYASKSGGNYDMRQIFNGTVVQKHPTHAVTFVDNHDSQPEESLESFVREWFKPLAYALTLTREQGYPSVFYGDYYGIPTHGVPAMKSKIDPILEARQKYAYGRQNDYLDHHNIIGWTREGNTAHPNSGLATIMSDGAGGNKWMFVGRNKAGQVWTDITGNKAGTVTINADGWGNFSVNGGSVSIWVNK

SEQ ID NO: 23716 - protein, 483 aa, Bacillus subtilis
HHNGTNGTLMQYFEWYLPNDGNHWNRLRSDASNLKDKGISAVWIPPAWKGASQNDVGYGAYDLYDLGEFNQKGTIRTKYGTRNQLQAAVNALKSNGIQVYGDVVMNHKGGADATEMVKAVEVNPNNRNQEVSGEYTIEAWTKFDFPGRANTHSNFKWRWYHFDGVDWDQSRKLNNRIYKFRTKAWDWEVDTEFGNYDYLLYADIDMDHPEVVNELRNWGVWYTNTLGLDGFRIDAVKHIKYSFTRDWINHVRSAIGKNMFAVAEFWKNDLGAIENYLNKTNWNHSVFDVPLHFNLYYASKSGGNYDMRQIFNGTVVQRHPTHAVTFVDNHDSQPEESLESFVREWFKPLAYALTLTREQGYPSVFYGDYYGIPTHGVPAMKSKIDPILEARQKYAYGRQNDYLDHHNIIGWTREGNTAHPNSGLATIMSDGAGGNKWMFVGRNKAGQVWTDITGNKAGTVTINADGWGNFSVNGGSVSIWVNK

SEQ ID NO: 23717 - protein, 485 aa, Bacillus sp.
HHNGTNGTMMQYFEWYLPNDGNHWNRLNSDASNLKSKGITAVWIPPAWKGASQNDVGYGAYDLYDLGEFNQKGTVRTKYGTRSQLQAAVTSLKNNGIQVYGDVVMNHKGGADATEMVRAVEVNPNNRNQEVTGEYTIEAWTRFDFPGRGNTHSSFKWRWYHFDGVDWDQSRRLNNRIYKFRGHGKAWDWEVDTEFGNYDYLMYADYDYDHPESTNELRNWGVWYTNTLGLDGFRIDAVKHIKYSFTRDWINHVRSATGKNMFAVAEFWKNDLGAIENYLQKTNWNHSVFDVPLHYNLYNASKSGGNYDMRNIFNGTVVQRHPSHAVTFVDNHDSQPEEALESFVEEWFKPLAYALTLTREQGYPSVFYGDYYGIPTHGVPAMRSKIDPILEARQKYAYGKQNDYLDHHNIIGWTREGNTAHPNSGLATIMSDGAGGSKWMFVGRNKAGQVWSDITGNRTGTVTINADGWGNFSVNGGSVSIWVNK

SEQ ID NO: 23718 - protein, 485 aa, Bacillus sp.
HHNGTNGTMMQYFEWYLPNDGNHWNRLNSDASNLKSKGITAVWIPPAWKGASQNDVGYGAYDLYDLGEFNQKGTVRTKYGTRSQLQAAVTSLKNNGIQVYGDVVMNHKGGADATEMVRAVEVNPNNRNQEVTGEYTIEAWTRFDFPGRGNTHSSFKWRWYHFDGVDWDQSRRLNNRIYKFRGHGKAWDWEVDTENGNYDYLMYADYDYDHPETTNEVRNWGVWYTNTLGLDGFRIDAVKHIKYSFTRDWINHVRSATGKNMFAVAEFWKNDLGAIENYLQKTNWNHSVFDVPLHYNLYNASKSGGNYDMRNIFNGTVVQRHPSHAVTFVDNHDSQPEEALESFVEEWFKPLAYALTLTREQGYPSVFYGDYYGIPTHGVPAMRSKIDPILEARQKYAYGKQNDYLDHHNIIGWTREGNTAHPNSGLATIMSDGAGGSKWMFVGRNKAGQVWSDITGNRTGTVTINADGWGNFSVNGGSVSIWVNK

SEQ ID NO: 23719 - protein, 485 aa, Bacillus sp.
HHNGTNGTMMQYFEWYLPNDGNHWNRLNSDASNLKSKGITAVWIPPAWKGASQNDVGYGAYDLYDLGEFNQKGTVRTKYGTRSQLQAAVTSLKNNGIQVYGDVVMNHKGGADATEMVRAVEVNPNNRNQEVTGEYTIEAWTRFDFPGRGNTHSSFKWRWYHFDGVDWDQSRRLNNRIYKFRGHGKAWDWEVDTEFGNYDYLMYADYDYDHPETTNELRNWGVWYTNTLGLDGFRIDAVKHIKYSFTRDWINHVRSATGKNMFAVAEFWKNDLGAIENYLQKTNWNHSVFDVPLHYNLYNASKSGGNYDMRNIFNGTVVQRHPSHAVTFVDNHDSQPEEALESFVEEWFKPLAYALTLTREQGYPSVFYGDYYGIPTHGVPAMRSKIDPILEARQKYAYGKQNDYLDHHNIIGWTREGNTAHPNSGLATIMSDGAGGSKWMFVGRNKAGQVWSDITGNRTGTVTINADGWGNFSVNGGSVSIWVNK

SEQ ID NO: 23720 - protein, 483 aa, Bacillus sp.
HHNGTNGTLMQYFEWYLPNDGNHWNRLRSDASNLKDKGISAVWIPPAWKGASQNDVGYGAYDLYDLGEFNQKGTIRTKYGTRNQLQAAVNALKSNGIQVYGDVVYNHKGGADATEMVKAVEVNPNNRNQEVSGEYTIEAWTKFDFPGRANTHSNFKWRWYHFDGVDWDQSRKLNNRIYKFRTKAWDWEVDTEFGNYDYLLYADIDMDHPEVVNELRNWGVWYTNTLGLDGFRIDAVKHIKYSFTRDWINHVRSAIGKNMFAVAEFWKNDLGAIENYLNKTNWNHSVFDVPLHFNLYYASKSGGNYDMRQIFNGTVVQKHPTHAVTFVDNHDSQPEESLESFVREWFKPLAYALTLTREQGYPSVFYGDYYGIPTHGVPAMKSKIDPILEARQKYAYGRQNDYLDHHNIIGWTREGNTAHPNSGLATIMSDGAGGNKWMFVGRNKAGQVWTDITGNKAGTVTINADGWGNFSVNGGSVSIWVNK

SEQ ID NO: 23721 - protein, 483 aa, Bacillus sp.
HHNGTNGTLMQYFEWYLPNDGNHWNRLRSDASNLKDKGISAVWIPPAWKGASQNDVGYGAYDLYDLGEFNQKGTIRTKYGTRNQLQAAVNALKSNGIQVYGDVVMNHKGGADATEMVKAVEVNPNNRNQEVSGEYTIEAWTKFDFPGRANTHSNFKWRWYHFDGVDWDQSRKLNNRIWKFRTKAWDWEVDTEFGNYDYLLYADIDMDHPEVVNELRNWGVWYTNTLGLDGFRIDAVKHIKYSFTRDWINHVRSAIGKNMFAVAEFWKNDLGAIENYLNKTNWNHSVFDVPLHFNLYYASKSGGNYDMRQIFNGTVVQKHPTHAVTFVDNHDSQPEESLESFVREWFKPLAYALTLTREQGYPSVFYGDYYGIPTHGVPAMKSKIDPILEARQKYAYGRQNDYLDHHNIIGWTREGNTAHPNSGLATIMSDGAGGNKWMFVGRNKAGQVWTDITGNKAGTVTINADGWGNFSVNGGSVSIWVNK

SEQ ID NO: 23722 - protein, 483 aa, Bacillus sp.
HHNGTNGTLMQYFEWYLPNDGNHWNRLRSDASNLKDKGISAVWIPPAWKGASQNDVGYGAYDLYDLGEFNQKGTIRTKYGTRNQLQAAVNALKSNGIQVYGDVVMNHKGGADATEMVKAVEVNPNNRNQEVSGEYTIEAWTKFDFPGRANTHSNFKWRWYHFDGVDWDQSRKLNNRIYKFRTKAWDWEVDTEFGNYDYLLYADIDMDHPEVVNELRNWGVWYTNTLGLDGFRIDAVKHIKYSFTRDWINHVRSAIGKNMFAVAEFWKNDLGAIENYLNKTNWNHSVFDVPLHFNLYYASKSGGNYDMRQIFNGTVVQKHPTHAVTFVDNHDSQPEESLESFVREWFKPLAYALTLTREQGYPSVFYGDYYGIPTHGVPAMKSHIDPILEARQKYAYGRQNDYLDHHNIIGWTREGNTAHPNSGLATIMSDGAGGNKWMFVGRNKAGQVWTDITGNKAGTVTINADGWGNFSVNGGSVSIWVNK

SEQ ID NO: 23723 - protein, 483 aa, Bacillus sp.
HHNGTNGTLMQYFEWYLPNDGNHWNRLRSDASNLKDKGISAVWIPPAWKGASQNDVGYGAYDLYDLGEFNQKGTIRTKYGTRNQLQAAVNALKSNGIQVYGDVVMNHKGGADATEMVKAVEVNPNNRNQEVSGEYTIEAWTQFDFPGRANTHSNFKWRWYHFDGVDWDQSRKLNNRIYKFRTKAWDWEVDTEFGNYDYLLYADIDMDHPEVVNELRNWGVWYTNTLGLDGFRIDAVKHIKYSFTRDWINHVRSAIGKNMFAVAEFWKNDLGAIENYLNKTNWNHSVFDVPLHFNLYYASKSGGNYDMRQIFNGTVVQKHPTHAVTFVDNHDSQPEESLESFVREWFKPLAYALTLTREQGYPSVFYGDYYGIPTHGVPAMKSKIDPILEARQKYAYGRQNDYLDHHNIIGWTREGNTAHPNSGLATIMSDGAGGNKWMFVGRNKAGQVWTDITGNKAGTVTINADGWGNFSVNGGSVSIWVNK

SEQ ID NO: 23724 - protein, 483 aa, Bacillus sp.
HHNGTNGTLMQYFEWYLPNDGNHWNRLRSDASNLKDKGISAVWIPPAWKGASQNDVGYGAYDLYDLGEFNQKGTIRTKYGTRNQLQAAVNALKSNGIQVYGDVVMNHKGGADATEMVKAVEVNPNNRNQEVSGEYTIEAWTKFDFPGRANTHSNFKWRWYHFDGVDWDQSRKLNNRIYKFRTKAWDWEVDTEFGNYDYLLYADIDMDHPEVVNELRNWGVWYTNTLGLDGFRIDAVKHIKYSFTRDWINHVRSAIGKNMFAVGEFWKNDLGAIENYLNKTNWNHSVFDVPLHFNLYYASKSGGNYDMRQIFNGTVVQKHPTHAVTFVDNHDSQPEESLESFVREWFKPLAYALTLTREQGYPSVFYGDYYGIPTHGVPAMKSKIDPILEARQKYAYGRQNDYLDHHNIIGWTREGNTAHPNSGLATIMSDGAGGNKWMFVGRNKAGQVWTDITGNKAGTVTINADGWGNFSVNGGSVSIWVNK

SEQ ID NO: 23725 - protein, 483 aa, Bacillus sp.
HHNGTNGTLMQYFEWYLPNDGNHWNRLRSDASNLKDKGISAVWIPPAWKGASQNDVGYGAYDLYDLGEFNQKGTIRTKYGTRNQLQAAVNALKSNGIQVYGDVVMNHKGGADATEMVKAVEVNPNNRNQEVSGEYTIEAWTKFDFPGRANTHSNFKWRWYHFDGVDWDQSRKLNNRIYKFRTKAWDWEVDTEFGNYDYLMYADIDMDHPEVVNELRNWGVWYTNTLGLDGFRIDAVKHIKFSFTRDWINHVRSAIGKNMFAVAEFWKNDLGAIENYLNKTNWNHSVFDVPLHFNLYYASKSGGNYDMRQIFNGTVVQKHPTHAVTFVDNHDTQPEESLESFVREWFKPLAYALTLTREQGYPSVFYGDYYGIPTHGVPAMKSKIDPILEARQKYAYGRQNDYLDHHNIIGWTREGNTAHPNSGLATIMSDGAGGNKWMFVGRNKAGQVWTDITGNKAGTVTINADGWGNFSVNGGSVSIWVNK

SEQ ID NO: 23726 - protein, 483 aa, Bacillus sp. SP70
HHNGTNGTMMQYFEWYLPNDGNHWNRLNSDASNLKSKGITAVWIPPAWKGASQNDVGYGAYDLYDLGEFNQKGTVRTKYGTRSQLQAAVTSLKNNGIQVYGDVVMNHKGGADATEMVRAVEVNPNNRNQEVTGEYTIEAWTRFDFPGRGNTHSSFKWRYYHFDGVDYDQSRRLNNRIYKFRGKAWDWEVDTENGNYDYLMYADIDMDHPEVVNELRNWGVWYTNTLGLDGFRIDAVKHIKYSFTRDWINHVRSATGKDMPAVAEFWKNDLGAIENYLQKTNWNHSVFDVPLHYNLYNASKSGGNYDMRNIFNGTVVQRHPSHAVTFVDNHDSQPEEALESFVEEWFKPLAYALTLTREQGYPSVFYGDYYGIPTHGVPAMRSKIDPILEARQKYAYGKQNDYLDHHNIIGWTREGNTAHPNSGLATIMSDGAGGSKYMFVGRNKAGQVWSDITGNRTGTVTINADGWGNFSVNGGSVSIWVNK

SEQ ID NO: 23727 - protein, 483 aa, Bacillus sp.
HHNGTNGTLMQYFEWYLPNDGNHWNRLRSDASNLKDKGISAVWIPPAWKGASQNDVGYGAYDLYDLGEFNQKGTIRTKYGTRNQLQAAVNALKSNGIQVYGDVVMNHKGGADATEMVKAVEVNPNNRNQEVSGEYTIEAWTKFDFPGRANTHSNFKWRWYHFDGVDWDQSRKLNNRIYKFRTKAWDWEVDTEFGNYDYLLYADIDMDHPEVVNELRNWGVWYTNTLGLDGFRMDAVKHIKYSFTRDWINHVRSAIGKNMFAVAEFWKNDLGAIENYLNKTNWNHSVFDVPLHFNLYYASKSGGNYDMRQIFNGTVVQKHPTHAVTFVDNHDSQPEESLESFVREWFKPLAYALTLTREQGYPSVFYGDYYGIPTHGVPAMKSKIDPILEARQKYAYGRQNDYLDHHNIIGWTREGNTAHPNSGLATIMSDGAGGNKWMFVGRNKAGQVWTDITGNKAGTVTINADGWGNFSVNGGSVSIWVNK

SEQ ID NO: 23728 - protein, 483 aa, Bacillus sp.
HHNGTNGTLMQYFEWYLPNDGNHWNRLRSDASNLKDKGISAVWIPPAWKGASQNDVGYGAYDLYDLGEFNQKGTIRTKYGTRNQLQAAVNALKSNGIQVYGDVVFNHKGGADATEMVKAVEVNPNNRNQEVSGEYTIEAWTKFDFPGRANTHSNFKWRWYHFDGVDWDQSRKLNNRIYKFRTKAWDWEVDTEFGNYDYLLYADIDMDHPEVVNELRNWGVWYTNTLGLDGFRIDAVKHIKYSFTRDWINHVRSAIGKNMFAVAEFWKNDLGAIENYLNKTNWNHSVFDVPLHFNLYYASKSGGNYDMRQIFNGTVVQKHPTHAVTFVDNHDSQPEESLESFVREWFKPLAYALTLTREQGYPSVFYGDYYGIPTHGVPAMKSKIDPILEARQKYAYGRQNDYLDHHNIIGWTREGNTAHPNSGLATIMSDGAGGNKWMFVGRNKAGQVWTDITGNKAGTVTINADGWGNFSVNGGSVSIWVNK

SEQ ID NO: 23729 - protein, 483 aa, Bacillus sp.
HHNGTNGTLMQYFEWYLPNDGNHWNRLRSDASNLKDKGISAVWIPPAWKGASQNDVGYGAYDLYDLGEFNQKGTIRTKYGTRNQLQAAVNALKSNGIQVYGDVVMNHKGGADATEMVKAVEVNPNNRNQEVSGEYTIEAWTKFDFPGRANTHSNFKWRWYHFDGVDWDQSRKLNNRIYKFRTKAWDWEVDTEFGNYDYLLYADIDMDHPEVVNELRNWGVWYTNTLGLDGFRIDAVKHIKYSFLRDWINHVRSAIGKNMFAVAEFWKNDLGAIENYLNKTNWNHSVFDVPLHFNLYYASKSGGNYDMRQIFNGTVVQKHPTHAVTFVDNHDSQPEESLESFVREWFKPLAYALTLTREQGYPSVFYGDYYGIPTHGVPAMKSKIDPILEARQKYAYGRQNDYLDHHNIIGWTREGNTAHPNSGLATIMSDGAGGNKWMFVGRNKAGQVWTDITGNKAGTVTINADGWGNFSVNGGSVSIWVNK

SEQ ID NO: 23730 - protein, 483 aa, Bacillus subtilis
HHNGTNGTLMQYFEWYLPNDGNHWNRLRSDASNLKDKGISAVWIPPAWKGASQNDVGYGAYDLYDLGEFNQKGTIRTKYGTRNQLQAAVNALKSNGIQVYGDVVMNHKGGADATEMVKAVEVNPNNRNQEVSGEYTIEAWTKFDFPGRANTHSNFKWRWYHFDGVDWDQSRKLNNRIYKFRTKAWDWEVDTEFGNYDYLMYADIDMDHPEVVNELRNWGVWYTNTLGLDGFRIDAVKHIKYSFTRDWINHVRSAIGKNMFALAEFWKNDLGAIENYLNKTNWNHSVFDVPLHFNLYYASKSGGNYDMRQIFNGTVVQKHPTHAVTFVDNHDTQPEESLESFVREWFKPLAYALTLTREQGYPSVFYGDYYGIPTHGVPAMKSKIDPILEARQKYAYGRQNDYLDHHNIIGWTREGNTAHPNSGLATIMSDGAGGNKWMFVGRNKAGQVWTDITGNKAGTVTINADGWGNFSVNGGSVSIWVNK

SEQ ID NO: 23731 - protein, 483 aa, Bacillus sp.
HHNGTNGTLMQYFEWYLPNDGNHWNRLRSDASNLKDKGISAVWIPPAWKGASQNDVGYGAYDLYDLGEFNQKGTIRTKYGTRNQLQAAVNALKSNGIQVYGDVVMNHKGGADATEMVKAVEVNPNNRNQEVSGEYTIEAWTKFDFPGRANTHSNFKWRWYHFDGVDWDQSRKLNNRIYKFRTKAWDWEVDTEFGNYDYLLYADIDMDHPEVVNELRNWGVWYTNTLGLDGFRIDAVKHIKYSFTRDWINHVRSAIGKNLFAVAEFWKNDLGAIENYLNKTNWNHSVFDVPLHFNLYYASKSGGNYDMRQIFNGTVVQKHPTHAVTFVDNHDSQPEESLESFVREWFKPLAYALTLTREQGYPSVFYGDYYGIPTHGVPAMKSKIDPILEARQKYAYGRQNDYLDHHNIIGWTREGNTAHPNSGLATIMSDGAGGNKWMFVGRNKAGQVWTDITGNKAGTVTINADGWGNFSVNGGSVSIWVNK

SEQ ID NO: 23732 - protein, 483 aa, Bacillus sp.
HHNGTNGTLMQYFEWYLPNDGNHWNRLRSDASNLKDKGISAVWIPPAWKGASQNDVGYGAYDLYDLGEFNQKGTIRTKYGTRNQLQAAVNALKSNGIQVYGDVVMNHKGGADATEMVKAVEVNPNNRNQHVSGEYTIEAWTKFDFPGRANTHSNFKWRWYHFDGVDWDQSRKLNNRIYKFRTKAWDWEVDTEFGNYDYLLYADIDMDHPEVVNELRNWGVWYTNTLGLDGFRIDAVKHIKYSFTRDWINHVRSAIGKNMFAVAEFWKNDLGAIENYLNKTNWNHSVFDVPLHFNLYYASKSGGNYDMRQIFNGTVVQKHPTHAVTFVDNHDSQPEESLESFVREWFKPLAYALTLTREQGYPSVFYGDYYGIPTHGVPAMKSKIDPILEARQKYAYGRQNDYLDHHNIIGWTREGNTAHPNSGLATIMSDGAGGNKWMFVGRNKAGQVWTDITGNKAGTVTINADGWGNFSVNGGSVSIWVNK

SEQ ID NO: 23733 - protein, 483 aa, Bacillus sp.
HHNGTNGTLMQYFEWYLPNDGNHWNRLRSDASNLKDKGISAVWIPPAWKGASQNDVGYGAYDLYDLGEFNQKGTIRTKYGTRNQLQAAVNALKSNGIQVYGDVVMNHKGGADATEMVKAVEVNPNNRNQEVSGEYTIEAWTKFDFPGRANTHSNFKWRWYHFDGVDWDQSRKLNNRIYKFRTKAWDWEVDTEFGNYDYLLYADIDMDHPEVVNELRNWGVWYTNTLGLDGFRIDAVKHIKYSFTRDWINHVRSAIGKNMFAVAEFWKNDLGAIENYLNKTNWNHSVFDVPLHFNLFYASKSGGNYDMRQIFNGTVVQKHPTHAVTFVDNHDSQPEESLESFVREWFKPLAYALTLTREQGYPSVFYGDYYGIPTHGVPAMKSKIDPILEARQKYAYGRQNDYLDHHNIIGWTREGNTAHPNSGLATIMSDGAGGNKWMFVGRNKAGQVWTDITGNKAGTVTINADGWGNFSVNGGSVSIWVNK

SEQ ID NO: 23734 - protein, 485 aa, Bacillus sp.
HHNGTNGTMMQYFEWYLPNDGNHWNRLNSDASNLKSKGITAVWIPPAWKGASQNDVGYGAYDLYDLGEFNQKGTVRTKYGTRSQLQAAVTSLKNNGIQVYGDVVMNHKGGADATEMVRAVEVNPNNRNQEVTGEYTIEAWTRFDFPGRGNTHSSFKWRWYHFDGVDWDQSRRLNNRIYKFRGHGKAWDWEVDTEFGNYDYLMYADYDYDHPEVTNEVRNWGVWYTNTLGLDGFRIDAVKHIKYSFTRDWINHVRSATGKNMFAVAEFWKNDLGAIENYLQKTNWNHSVFDVPLHYNLYNASKSGGNYDMRNIFNGTVVQRHPSHAVTFVDNHDSQPEEALESFVEEWFKPLAYALTLTREQGYPSVFYGDYYGIPTHGVPAMRSKIDPILEARQKYAYGKQNDYLDHHNIIGWTREGNTAHPNSGLATIMSDGAGGSKWMFVGRNKAGQVWSDITGNRTGTVTINADGWGNFSVNGGSVSIWVNK

SEQ ID NO: 23735 - protein, 483 aa, Bacillus sp. SP70
HHNGTNGTMMQYFEWYLPNDGNHWNRLNSDASNLKSKGITAVWIPPAWKGASQNDVGYGAYDLYDLGEFNQKGTVRTKYGTRSQLQAAVTSLKNNGIQVYGDVVMNHKGGADATEMVRAVEVNPNNRNQEVTGEYTIEAWTRFDFPGRGNTHSSFKWRYYHFDGVDYDQSRRLNNRIYKFRGKAWDWEVDTENGNYDYLMYADIDMDHPEVVNELRNWGVWYTNTLGLDGFRIDAVKHIKYSFTRDWINHVRSATGKDMFAVAEFWKNDLGAIENYLQKTNWNHSVFDVPLHYNLYNASKSGGNYDMRNIFNGTVVQRHPSHAVTFVDNHDSQPEEALESFVEEWFKPLAYALTLTREQGYPSVFYGDYYGIPTHGVPAMRSKIDPILEARQKYAYGKQNDYLDHHNIIGWTREGNTAHPNSGLATIMSDGAGGSKWMFVGRNKAGQVWSDITGNRTGTVTINADGWGNFSVNEQSVSIWVNK

SEQ ID NO: 23736 - protein, 483 aa, Bacillus sp.
HHNGTNGTLMQYFEWYLPNDGNHWNRLRSDASNLKDKGISAVWIPPAWKGASQNDVGYGAYDLYDLGEFNQKGTIRTKYGTRNQLQAAVNALKSNGIQVYGDVVMNHKGGADATEMVKAVEVNPNNRNQEVSGEYTIQAWTKFDFPGRANTHSNFKWRWYHFDGVDWDQSRKLNNRIYKFRTKAWDWEVDTEFGNYDYLLYADIDMDHPEVVNELRNWGVWYTNTLGLDGFRIDAVKHIKYSFTRDWINHVRSAIGKNMFAVAEFWKNDLGAIENYLNKTNWNHSVFDVPLHFNLYYASKSGGNYDMRQIFNGTVVQKHPTHAVTFVDNHDSQPEESLESFVREWFKPLAYALTLTREQGYPSVFYGDYYGIPTHGVPAMKSKIDPILEARQKYAYGRQNDYLDHHNIIGWTREGNTAHPNSGLATIMSDGAGGNKWMFVGRNKAGQVWTDITGNKAGTVTINADGWGNFSVNGGSVSIWVNK

SEQ ID NO: 23737 - protein, 483 aa, Bacillus sp.
HHNGTNGTLMQYFEWYLPNDGNHWNRLRSDASNLKDKGISAVWIPPAWKGASQNDVGYGAYDLYDLGEFNQKGTIRTKYGTRNQLQAAVNALKSNGIQVYGDVVMNHKGGADATEFVKAVEVNPNNRNQEVSGEYTIEAWTKFDFPGRANTHSNFKWRWYHFDGVDYDQSRKLNNRIYKFRTKAWDWEVDTEFGNYDYLLYADIDMDHPEVVNELRNWGVWYTNTLGLDGFRIDAVKHIKYSFTRDWINHVRSAIGKNMFAVAEFWKNDLGAIENYLNKTNWNHSVFDVPLHFNLYYASKSGGNYDMRQIFNGTVVQKHPTHAVTFVDNHDSQPEESLESFVREWFKPLAYALTLTREQGYPSVFYGDYYGIPTHGVPAMKSKIDPILEARQKYAYGRQNDYLDHHNIIGWTREGNTAHPNSGLATIMSDGAGGNKWMFVGRNKAGQVWTDITGNKAGTVTINADGWGNFSVNGGSVSIWVNK

SEQ ID NO: 23738 - protein, 483 aa, Bacillus sp.
HHNGTNGTLMQYFEWYLPNDGNHWNRLRSDASNLKDKGISAVWIPPAWKGASQNDVGYGAYDLYDLGEFNQKGTIRTKYGTRNQLQAAVNALKSNGIQVYGDVVMNHKGGADATEMVKAVEVNPNNRNQEVSGEYTIEAWTKFDFPGRANTHSNFKWRWYHFDGVDWDQSRKLNNRIYKFRTKAWDWEVDTEFGNYDYLLHADIDMDHPEVVNELRNWGVWYTNTLGLDGFRIDAVKHIKYSFTRDWINHVRSAIGKNMFAVAEFWKNDLGAIENYLNKTNWNHSVFDVPLHFNLYYASKSGGNYDMRQIFNGTVVQKHPTHAVTFVDNHDSQPEESLESFVREWFKPLAYALTLTREQGYPSVFYGDYYGIPTHGVPAMKSKIDPILEARQKYAYGRQNDYLDHHNIIGWTREGNTAHPNSGLATIMSDGAGGNKWMFVGRNKAGQVWTDITGNKAGTVTINADGWGNFSVNGGSVSIWVNK

SEQ ID NO: 23739 - protein, 483 aa, Bacillus sp.
HHNGTNGTLMQYFEWYLPNDGNHWNRLRSDASNLKDKGISAVWIPPAWKGASQNDVGYGAYDLYDLGEFNQKGTIRTKYGTRNQLQAAVNALKSNGIQVYGDVVMNHKGGADATEMVKAVEVNPNNRNQEVSGEYTIEAWTKFDFPGRANTHSNFKWRWYHFDGVDWDQSRKLNNRIYKFRTKAWDWEVDTEFGNYDYLMYADIDMDHPEVVNELRNWGVWYTNTLGLDGFRIDAVKHIKYSFVRDWINHVRSAIGKNMFAVAEFWKNDLGAIENYLNKTNWNHSVFDVPLHFNLYYASKSGGNYDMRHIFNGTVVQKHPTHAVTFVDNHDTQPEESLESFVREWFKPLAYALTLTREQGYPSVFYGDYYGIPTHGVPAMKSKIDPILEARQKYAYGRQNDYLDHHNIIGWTREGNTAHPNSGLATIMSDGAGGNKWMFVGRNKAGQVWTDITGNKAGTVTINADGWGNFSVNGGSVSIWVNK

SEQ ID NO: 23740 - protein, 483 aa, Bacillus sp.
HHNGTNGTLMQYFEWYLPNDGNHWNRLRSDASNLKDKGISAVWIPPAWKGASQNDVGYGAYDLYDLGEFNQKGTIRTKYGTRNQLQAAVNALKSNGIQVYGDVVMNHKGGADATEMVKAVEVNPNNRNQEVSGEYTIEAWTKFDFPGRANTHSNFKWRWYHFDGVDWDQSRKLNNRIYKFRTKAWDWEVDTEFGNYDYLLNADIDMDHPEVVNELRNWGVWYTNTLGLDGFRIDAVKHIKYSFTRDWINHVRSAIGKNMFAVAEFWKNDLGAIENYLNKTNWNHSVFDVPLHFNLYYASKSGGNYDMRQIFNGTVVQKHPTHAVTFVDNHDSQPEESLESFVREWFKPLAYALTLTREQGYPSVFYGDYYGIPTHGVPAMKSKIDPILEARQKYAYGRQNDYLDHHNIIGWTREGNTAHPNSGLATIMSDGAGGNKWMFVGRNKAGQVWTDITGNKAGTVTINADGWGNFSVNGGSVSIWVNK

SEQ ID NO: 23741 - protein, 483 aa, Bacillus sp.
HHNGTNGTLMQYFEWYLPNDGNHWNRLRSDASNLKDKGISAVWIPPAWKGASQNDVGYGAYDLYDLGEFNQKGTIRTKYGTRNQLQAAVNALKSNGIQVYGDVVMNHKGGADATEMVKAVEVNPNNRNQEVSGEYTIEAWTKFDFPGRANTHSNFKWRWYHFDGVDWDQSRKLNNRIYKFRTKAWDWEVDTEFGNYDYLLYADIDMDHPEVVNELRNWGVWYTNTLGLDGFRIDAVKHIKYSFTRDWINHVRSAIGKNMFAVAEFWKNDLGAIENYLNKTNWNHSVFDVPLHFNLYYASKSGGNYDMRQIFNGTVVQKHPTHAVTFVDNHDSQPEESLESFVREWFKPLAYALTLTREQGYPSVFYGDYYGIPTHGVPAMKSKIDPILEARQKYAYGRQNDYLDHHNIIGWTREGNTAHPNSGLATIMSDGAGGNKWMFVGRNKAGQVWTDITGNKAETVTINADGWGNFSVNGGSVSIWVNK

SEQ ID NO: 23742 - protein, 483 aa, Bacillus sp.
HHNGTNGTLMQYFEWYLPNDGNHWNRLRSDASNLKDKGISAVWIPPAWKGASQNDVGYGAYDLYDLGEFNQKGTIRTKYGTRNQLQAAVNALKSNGIQVYGDVVMNHKGGADATEMVKAVEVNPNNRNQEVSGEYTIEAWTRFDFPGRANTHSNFKWRWYHFDGVDWDQSRKLNNRIYKFRTKAWDWEVDTEFGNYDYLLYADIDMDHPEVVNELRNWGVWYTNTLGLDGFRIDAVKHIKYSFTRDWINHVRSAIGKNMFAVAEFWKNDLGAIENYLNKTNWNHSVFDVPLHFNLYYASKSGGNYDMRQIFNGTVVQKHPTHAVTFVDNHDSQPEESLESFVREWFKPLAYALTLTREQGYPSVFYGDYYGIPTHGVPAMKSKIDPILEARQKYAYGRQNDYLDHHNIIGWTREGNTAHPNSGLATIMSDGAGGNKWMFVGRNKAGQVWTDITGNKAGTVTINADGWGNFSVNGGSVSIWVNK

SEQ ID NO: 23743 - protein, 483 aa, Bacillus sp.
HHNGTNGTLMQYFEWYLPNDGNHWNRLRSNASNLKDKGISAVWIPPAWKGASQNDVGYGAYDLYDLGEFNQKGTIRTKYGTRNQLQAAVNALKSNGIQVYGDVVMNHKGGADATEMVKAVEVNPNNRNQEVSGEYTIEAWTKFDFPGRANTHSNFKWRWYHFDGVDWDQSRKLNNRIYKFRTKAWDWEVDTEFGNYDYLLYADIDMDHPEVVNELRNWGVWYTNTLGLDGFRIDAVKHIKYSFTRDWINHVRSAIGKNMFAVAEFWKNDLGAIENYLNKTNWNHSVFDVPLHFNLYYASKSGGNYDMRQIFNGTVVQKHPTHAVTFVDNHDSQPEESLESFVREWFKPLAYALTLTREQGYPSVFYGDYYGIPTHGVPAMKSKIDPILEARQKYAYGRQNDYLDHHNIIGWTREGNTAHPNSGLATIMSDGAGGNKWMFVGRNKAGQVWTDITGNKAGTVTINADGWGNFSVNGGSVSIWVNK

SEQ ID NO: 23744 - protein, 483 aa, Bacillus sp.
HHNGTNGTLMQYFEWYLPNDGNHWNRLRSDASNLKDKGISAVWIPPAWKGASQNDVGYGAYDLYDLGEFNQKGTIRTKYGTRNQLQAAVNALKSNGIQVYGDVVMNHKGGADATEMVKAVEVNPNNRNQEVSGEYTIEAWTKFDFPGRANTHSNFKWRWYHFDGVDWDQSRKLNNRIYKFRTKAWDWEVDTEFGNYDYLLYADIDMDHPEVVNELRNWGVWYTNTLGLDGFRIDAVKHIKYSFIRDWINHVRSAIGKNMFAVAEFWKNDLGAIENYLNKTNWNHSVFDVPLHFNLYYASKSGGNYDMRQIFNGTVVQKHPTHAVTFVDNHDSQPEESLESFVREWFKPLAYALTLTREQGYPSVFYGDYYGIPTHGVPAMKSKIDPILEARQKYAYGRQNDYLDHHNIIGWTREGNTAHPNSGLATIMSDGAGGNKWMFVGRNKAGQVWTDITGNKAGTVTINADGWGNFSVNGGSVSIWVNK

SEQ ID NO: 23745 - protein, 483 aa, Bacillus sp.
HHNGTNGTLMQYFEWYLPNDGNHWNRLRSDASNLKDKGISAVWIPPAWKGASQNDVGYGAYDLYDLGEFNQKGTIRTKYGTRNQLQAAVNALKSNGIQVYGDVVMNHKGGADATEMVKAVEVNPNNRNQEVSGEYTIEAWTKFDFPGRANTHSNFKWRWYHFDGVDWDQSRKLNNRIYKFRTKAWDWEVDTEFGNYDYLLYADIDMDHPEVVNELRNWGVWYTNTLGLDGFRIDAVKHIKFSFTRDWINHVRSAIGKNMFAVAEFWKNDLGAIENYLNKTNWNHSVFDVPLHFNLYYASKSGGNYDMRQIFNGTVVQKHPTHAVTFVDNHDSQPEESLESFVREWFKPLAYALTLTREQGYPSVFYGDYYGIPTHGVPAMKSKIDPILEARQKYAYGRQNDYLDHHNIIGWTREGNTAHPNSGLATIMSDGAGGNKWMFVGRNKAGQVWTDITGNKAGTVTINADGWGNFSVNGGSVSIWVNK

SEQ ID NO: 23746 - protein, 483 aa, Bacillus sp. SP70
HHNGTNGTMMQYFEWYLPNDGNHWNRLNSDASNLKSKGITAVWIPPAWKGASQNDVGYGAYDLYDLGEFNQKGTVRTKYGTRSQLQAAVTSLKNNGIQVYGDVVMNHKGGADATEMVRAVEVNPNNRNQEVTGEYTIEAWTRFDFPGRGNTHSSFKWRWYHFDGVDYDQSRRLNNRIYKFRGKAWDWEVDTENGNYDYLMYADIDMDHPEVVNELRNWGVWYTNTLGLDGFRIDAVKHIKYSFTRDWINHVRSATGKDMPAVAEFWKNDLGAIENYLQKTNWNHSVFDVPLHYNLYNASKSGGNYDMRNIFNGTVVQRHPSHAVTFVDNHDSQPEEALESFVEEWFKPLAYALTLTREQGYPSVFYGDYYGIPTHGVPAMRSKIDPILEARQKYAYGKQNDYLDHHNIIGWTREGNTAHPNSGLATIMSDGAGGSKVMFVGRNKAGQVWSDITGNRTGTVTINADGYGNFSVNGGSVSIWVNK

SEQ ID NO: 23747 - protein, 483 aa, Bacillus sp.
HHNGTNGTLMQYFEWYLPNDGNHWNRLRSDASNLKDKGISAVWIPPAWKGASQNDVGYGAYDLYDLGEFNQKGTIRTKYGTRNQLQAAVNALKSNGIQVYGDVVMNHKGGADATEMVKAVEVNPNNRNQEVSGEYTIEAWTKFDFPGRANTHSNFKWRWYHFDGVDWDQSRKLNNRIYKFRTKAWDWEVDTEFGNYDYLMYADIDMDHPEVVNELRNWGVWYTNTLGLDGFRIDAAKHIKYSFTRDWINHVRSAIGKNMFAVAEFWKNDLGAIENYLNKTNWNHSVFDVPLHFNLYFASKSGGNYDMRQIFNGTVVQKHPTHAVTFVDNHDTQPEESLESFVREWFKPLAYALTLTREQGYPSVFYGDYYGIPTHGVPAMKSKIDPILEARQKYAYGRQNDYLDHHNIIGWTREGNTAHPNSGLATIMSDGAGGNKWMFVGRNKAGQVWTDITGNKAGTVTINADGWGNFSVNGGSVSIWVNK

SEQ ID NO: 23748 - protein, 483 aa, Bacillus sp.
HHNGTNGTLMQYFEWYLPNDGNHWNRLRSDASNLKDKGISAVWIPPAWKGASQNDVGYGAYDLYDLGEFNQKGTIRTKYGTRNQLQAAVNALKSNGIQVYGDVVMNHKGGADATEMVKAVEVNPNNRNQEVSGEYTIEAWTKFDFPGRANTHSNFKWRWYHFDGVDWDQSRKLNNRIYKFRTKAWDWEVDTEFGNYDYLLYADIDMDHPEVVNELRNWGVWYTNTLGLDGFRIDAVKHIKYSFTRDWINHVRSAIGKNMFAVAEFWKNDLGAIENYLNHTNWNHSVFDVPLHFNLYYASKSGGNYDMRQIFNGTVVQKHPTHAVTFVDNHDSQPEESLESFVREWFKPLAYALTLTREQGYPSVFYGDYYGIPTHGVPAMKSKIDPILEARQKYAYGRQNDYLDHHNIIGWTREGNTAHPNSGLATIMSDGAGGNKWMFVGRNKAGQVWTDITGNKAGTVTINADGWGNFSVNGGSVSIWVNK

SEQ ID NO: 23749 - protein, 483 aa, Bacillus sp.
HHNGTNGTLMQYFEWYLPNDGNHWNRLRSDASNLKDKGISAVWIPPAWKGASQNDVGYGAYDLYDLGEFNQKGTIRTKYGTRNQLQAAVNALKSNGIQVYGDVVMNHKGGADATEMVKAVEVNPNNRNQEVSGEYTIEAWTKFDFPGRANTHSNFKWRWYHFDGVDWDQSRKLNNRIYKFRTKAWDWEVDTEFGNYDYLLYADIDMDHPEVTNELRNWGVWYTNTLGLDGFRIDAVKHIKYSFTRDWINHVRSAIGKNMFAVAEFWKNDLGAIENYLNKTNWNHSVFDVPLHFNLYYASKSGGNYDMRQIFNGTVVQKHPTHAVTFVDNHDSQPEESLESFVREWFKPLAYALTLTREQGYPSVFYGDYYGIPTHGVPAMKSKIDPILEARQKYAYGRQNDYLDHHNIIGWTREGNTAHPNSGLATIMSDGAGGNKWMFVGRNKAGQVWTDITGNKAGTVTINADGWGNFSVNGGSVSIWVNK

SEQ ID NO: 23750 - protein, 483 aa, Bacillus sp.
HHNGTNGTLMQYFEWYLPNDGNHWNRLRSDASNLKDKGISAVWIPPAWKGASQNDVGYGAYDLYDLGEFNQKGTIRTKYGTRNQLQAAVNALKSNGIQVYGDVVMNHKGGADATEMVKAVEVNPNNRNQEVSGEYTIEAWTKFDFPGRANTHSNFKWRWYHFDGVDYDQSRKLNNRIYKFRTKAWDWEVDTEFGNYDYLLYADIDMDHPEVVNELRNWGVWYTNTLGLDGFRIDAVKHIKYSFTRDWINHVRSAIGKNMFAVAEFWKNDLGAIENYLNKTNWNHSVFDVPLHFNLYFASKSGGNYDMRQIFNGTVVQKHPTHAVTFVDNHDSQPEESLESFVREWFKPLAYALTLTREQGYPSVFYGDYYGIPTHGVPAMKSKIDPILEARQKYAYGRQNDYLDHHNIIGWTREGNTAHPNSGLATIMSDGAGGNKWMFVGRNKAGQVWTDITGNKAGTVTINADGWGNFSVNGGSVSIWVNK

SEQ ID NO: 23751 - protein, 483 aa, Bacillus sp.
HHNGTNGTLMQYFEWYLPNDGNHWNRLRSDASNLKDKGISAVWIPPAWKGASQNDVGYGAYDLYDLGEFNQKGTIRTKYGTRNQLQAAVNALKSNGIQVYGDVVMNHKGGADATEMVKAVEVNPNNRNQEVSGEYTIEAWTKFDFPGRANTHSNFKWRWYHFDGVDWDQSRKLNNRIYKFRTKAWDWEVDTEFGNYDYLLYADIDFDHPEVVNELRNWGVWYTNTLGLDGFRIDAVKHIKYSFTRDWINHVRSAIGKNMFAVAEFWKNDLGAIENYLNKTNWNHSVFDVPLHFNLYYASKSGGNYDMRQIFNGTVVQKHPTHAVTFVDNHDSQPEESLESFVREWFKPLAYALTLTREQGYPSVFYGDYYGIPTHGVPAMKSKIDPILEARQKYAYGRQNDYLDHHNIIGWTREGNTAHPNSGLATIMSDGAGGNKWMFVGRNKAGQVWTDITGNKAGTVTINADGWGNFSVNGGSVSIWVNK

SEQ ID NO: 23752 - protein, 485 aa, Bacillus sp.
HHNGTNGTMMQYFEWYLPNDGNHWNRLNSDASNLKSKGITAVWIPPAWKGASQNDVGYGAYDLYDLGEFNQKGTVRTKYGTRSQLQAAVTSLKNNGIQVYGDVVFNHKGGADATEMVRAVEVNPNNRNQEVTGEYTIEAWTRFDFPGRGNTHSSFKWRWYHFDGVDWDQSRRLNNRIYKFRGHGKAWDWEVDTENGNYDYLMYADYDYDHPEVVNEVRNWGVWYTNTLGLDGFRIDAVKHIKYSFVRDWINHVRSATGKNMFAVAEFWKNDLGAIENYLQKTNWNHSVFDVPLHYNLYNASKSGGNYDMRNIFNGTVVQRHPSHAVTFVDNHDSQPEEALESFVEEWFKPLAYALTLTREQGYPSVFYGDYYGIPTHGVPAMRSKIDPILEARQKYAYGKQNDYLDHHNIIGWTREGNTAHPNSGLATIMSDGAGGSKWMFVGRNKAGQVWSDITGNRTGTVTINADGWGNFSVNGGSVSIWVNK

SEQ ID NO: 23753 - protein, 483 aa, Bacillus sp.
HHNGTNGTLMQYFEWYLPNDGNHWNRLRSDASNLKDKGISAVWIPPAWKGASQNDVGYGAYDLYDLGEFNQKGTIRTKYGTRNQLQAAVNALKSNGIQVYGDVVMNHKGGADATEMVKAVEVNPNNRNQEVSGEYTIEAWTKFDFPGRANTHSNFKWRWYHFDGVDWDQSRKLNNRIYKFRTKAWDWEVDTEFGNYDYLMYADIDMDHPEVVNELRNWGVWYTNTLGLDGFRIDAVKHIKYSFVRDWINHVRSAIGKNMFAVAEFWKNDLGAIENYLNKTNWNHSVFDVPLHFNLYYASKSGGNYDMRRIFNGTVVQKHPTHAVTFVDNHDTQPEESLESFVREWFKPLAYALTLTREQGYPSVFYGDYYGIPTHGVPAMKSKIDPILEARQKYAYGRQNDYLDHHNIIGWTREGNTAHPNSGLATIMSDGAGGNKWMFVGRNKAGQVWTDITGNKAGTVTINADGWGNFSVNGGSVSIWVNK

SEQ ID NO: 23754 - protein, 485 aa, Bacillus sp.
HHNGTNGTLMQYFEWYLPNDGNHWNRLRSDASNLKDKGISAVWIPPAWKGASQNDVGYGAYDLYDLGEFNQKGTIRTKYGTRNQLQAAVNALKSNGIQVYGDVVMNHKGGADATEMVRAVEVNPNNRNQEVSGEYTIEAWTKFDFPGRANTHSNFKWRWYHFDGVDWDQSRKLNNRIYKFRGDGKGWDWEVDTENGNYDYLLYADIDMDHPEVINELRNWGVWYTNTLGLDGFRIDAVKHIKYSFTRDWINHVRSATGKNMFAVAEFWKNDLGAIENYLNKTNWNHSVFDVPLHFNLYNASKSGGNYDMRQIFNGTVVQRHPTHAVTFVDNHDSQPEESLESFVREWFKPLAYALTLTREQGYPSVFYGDYYGIPTHGVPAYKSKIDPILEARQKYAYGRQNDYLDHHNIIGWTREGNTAHPNSGLATIMSDGAGGNKWMFVGRNKAGQVWTDITGNRAGTVTINADGWGNFSVNGGSVSIWVNK

SEQ ID NO: 23755 - protein, 485 aa, Bacillus sp.
HHNGTNGTMMQYFEWYLPNDGNHWNRLNSDASNLKSKGITAVWIPPAWKGASQNDVGYGAYDLYDLGEFNQKGTVRTKYGTRSQLQAAVTSLKNNGIQVYGDVVMNHKGGADATEMVRAVEVNPNNRNQEVTGEYTIEAWTRFDFPGRGNTHSSFKWRWYHFDGVDWDQSRRLNNRIYKFRGHGKEWDWEVDTEFGNYDYLTYADYDMDSPEVVNELRNWGVWYTNTLGLDGFRIDAVKHIKYSFTRDWINHVRSATGKNMFAVAEFWKNDLGAIENYLQKTNWNHSVFDVPLHYNLYNASKSGGNYDMRNIFNGTVVQRHPSHAVTFVDNHDSQPEEALESFVEEWFKPLAYALTLTREQGYPSVFYGDYYGIPTHGVPAMRSKIDPILEARQKYAYGKQNDYLDHHNIIGWTREGNTAHPNSGLATIMSDGAGGSKWMFVGRNKAGQVWSDITGNRTGTVTINADGWGNFSVNGGSVSIWVNK

SEQ ID NO: 23756 - protein, 483 aa, Bacillus sp. SP70
HHNGTNGTMMQYFEWYLPNDGNHWNRLNSDASNLKSKGITAVWIPPAWKGASQNDVGYGAYDLYDLGEFNQKGTVRTKYGTRSQLQAAVTSLKNNGIQVYGDVVMNHKGGADATEMVRAVEVNPNNRNQEVTGEYTIEAWTRFDFPGRGNTHSSFKWRYYHFDGVDYDQSRRLNNRIYKFRGKAWDWEVDTENGNYDYLMYADIDMDHPEVVNELRNWGVWYTNTLGLDGFRIDAVKHIKYSFTRDWINHVRSATGKGMFAVAEFWKNDLGAIENYLQKTNWNHSVFDVPLHYNLYNASKSGGNYDMRNIFNGTVVQRHPSHAVTFVDNHDSQPEEALESFVEEWFKPLAYALTLTREQGYPSVFYGDYYGIPTHGVPAMRSKIDPILEARQKYAYGKQNDYLDHHNIIGWTREGNTAHPNSGLATIMSDGAGGSKRMFVGRNKAGQVWSDITGNRTGTVTINADGYGNFSVNGGSVSIWVNK

SEQ ID NO: 23757 - protein, 485 aa, Bacillus sp.
HHNGTNGTMMQYFEWYLPNDGNHWNRLNSDASNLKSKGITAVWIPPAWKGASQNDVGYGAYDLYDLGEFNQKGTVRTKYGTRSQLQAAVTSLKNNGIQVYGDVVINHKGGADATEMVRAVEVNPNNRNQEVTGEYTIEAWTRFDFPGRGNTHSSFKWRWYHFDGVDWDQSRRLNNRIYKFRGHGKAWDWEVDTENGNYDYLMYADYDYDHPEVVNEIRNWGVWYTNTLGLDGFRIDAVKHIKYSFVRDWINHVRSATGKNMFAVAEFWKNDLGAIENYLQKTNWNHSVFDVPLHYNLYNASKSGGNYDMRNIFNGTVVQRHPSHAVTFVDNHDSQPEEALESFVEEWFKPLAYALTLTREQGYPSVFYGDYYGIPTHGVPAMRSKIDPILEARQKYAYGKQNDYLDHHNIIGWTREGNTAHPNSGLATIMSDGAGGSKWMFVGRNKAGQVWSDITGNRTGTVTINADGWGNFSVNGGSVSIWVNK

SEQ ID NO: 23758 - protein, 483 aa, Bacillus sp.
HHNGTNGTLMQYFEWYLPNDGNHWNRLRSDASNLKDKGISAVWIPPAWKGASQNDVGYGAYDLYDLGEFNQKGTIRTKYGTRNQLQAAVNALKSNGIQVYGDVVINHKGGADATEMVKAVEVNPNNRNQEVSGEYTIEAWTKFDFPGRANTHSNFKWRWYHFDGVDWDQSRKLNNRIYKFRTKAWDWEVDTEFGNYDYLLYADIDMDHPEVVNELRNWGVWYTNTLGLDGFRIDAVKHIKYSFTRDWINHVRSAIGKNMFAVAEFWKNDLGAIENYLNKTNWNHSVFDVPLHFNLYYASKSGGNYDMRQIFNGTVVQKHPTHAVTFVDNHDSQPEESLESFVREWFKPLAYALTLTREQGYPSVFYGDYYGIPTHGVPAMKSKIDPILEARQKYAYGRQNDYLDHHNIIGWTREGNTAHPNSGLATIMSDGAGGNKWMFVGRNKAGQVWTDITGNKAGTVTINADGWGNFSVNGGSVSIWVNK

SEQ ID NO: 23759 - protein, 483 aa, Bacillus sp. SP70
HHNGTNGTMMQYFEWYLPNDGNHWNRLNSDASNLKSKGITAVWIPPAWKGASQNDVGYGAYDLYDLGEFNQKGTVRTKYGTRSQLQAAVTSLKNNGIQVYGDVVMNHKGGADATEMVRAVEVNPNNRNQEVTGEYTIEAWTRFDFPGRGNTHSSFKWRWYHFDGVDFDQSRRLNNRIYKFRGKAWDWEVDTENGNYDYLMYADIDMDHPEVVNELRNWGVWYTNTLGLDGFRIDAVKHIKYSFTRDWINHVRSATGKDMPAVAEFWKNDLGAIENYLQKTNWNHSVFDVPLHYNLYNASKSGGNYDMRNIFNGTVVQRHPSHAVTFVDNHDSQPEEALESFVEEWFKPLAYALTLTREQGYPSVFYGDYYGIPTHGVQAMRSKIDPILEARQKYAYGKQNDYLDHHNIIGWTREGNTAHPNSGLATIMSDGAGGSKWMFVGRNKAGQVWSDITGNRTGTVTINADGWGNFSVNGKSVSIWVNK

SEQ ID NO: 23760 - protein, 483 aa, Bacillus sp.
HHNGTNGTLMQYFEWYLPNDGNHWNRLRSDASNLKDKGISAVWIPPAWKGASQNDVGYGAYDLYDLGEFNQKGTIRTKYGTRNQLQAAVNALKSNGIQVYGDVVMNHKGGADATEMVKAVEVNPNNRNQEVSGEYTIEAWTKFDFPGRANTHSNFKWRWYHFDGVDWDQSRKLNNRIYKFRTKAWDWEVDTEFGNYDYLLYADIDMDHPEVVNELRNWGVWYTNTLGLDGFRIDAVKHIKYSFTRDWINHVRSAIGKNMFAVAEFWKNDLGAIENYLNKTNWNHSVFDVPLHFNLYYASKSGGNYDMRQIFNGTVVQKHPTHAVTFVDNHDSQPEESLESFVREWFKPLAYALTLTREQGYPSVFYGDYYGIPTHGVPAMKSKIDPILEARQKYAYGRQNDYLDHHNIIGWTREGNTAHPNSGLATIMSDGAGGNKWMFVGRNKAGQVWTDITGNKAGTVTINADGWGNFSCNGGSVSIWVNK

SEQ ID NO: 23761 - protein, 483 aa, Bacillus sp.
HHNGTNGTLMQYFEWYLPNDGNHWNRLRSDASNLKDKGISAVWIPPAWKGASQNDVGYGAYDLYDLGEFNQKGTIRTKYGTRNQLQAAVNALKSNGIQVYGDVVMNHKGGADATEMVKAVEVNPNNRNQEVSGEYTIEAWTKFDFPGRANTHSNFKWRWYHFDGVDWDQSRKLNNRIYKFRTKAWDWEVDTEFGNYDYLLYADIDMDHPEVVNELRNWGVWYTNTLGLDGFRIDAVKHIKYSFTRDWINHVRSAIGKNMFAVAEFWKNDLGAIENYLNKTNWNHSVFDVPLHFNLYYASKSGGNYDMRQIFNGTVVQKHPTHAVTFVDNHDSQPEESLESFVREWFKPLAYALTLTREQGYPSIFYGDYYGIPTHGVPAMKSKIDPILEARQKYAYGRQNDYLDHHNIIGWTREGNTAHPNSGLATIMSDGAGGNKWMFVGRNKAGQVWTDITGNKAGTVTINADGWGNFSVNGGSVSIWVNK

SEQ ID NO: 23762 - protein, 483 aa, Bacillus sp.
HHNGTNGTLMQYFEWYLPNDGNHWNRLRSDASNLKDKGISAVWIPPAWKGASQNDVGYGAYDLYDLGEFNQKGTIRTKYGTRNQLQAAVNALKSNGIQVYGDVVMNHKGGADATEMVKAVEVNPNNRNQEVSGEYTIEAWTKFDFPGRANTHSNFKWRWYHFDGVDWDQSRKLNNRIYKFRTKAWDWEVDTEFGNYDYLLYADIDMDHPEVVNELRNWGVWYTNTLGLDGFRLDAVKHIKYSFMRDWLNHVRSAIGKNMFAVAEFWKNDLGAIENYLNKTNWNHSVFDVPLHFNLYYASKSGGNYDMRQIFNGTVVQKHPTHAVTFVDNHDSQPEESLESFVREWFKPLAYALTLTREQGYPSVFYGDYYGIPTHGVPAMKSKIDPILEARQKYAYGRQNDYLDHHNIIGWTREGNTAHPNSGLATIMSDGAGGNKWMFVGRNKAGQVWTDITGNKAGTVTINADGWGNFSVNGGSVSIWVNK

SEQ ID NO: 23763 - protein, 485 aa, Bacillus sp.
HHNGTNGTLMQYFEWYLPNDGNHWNRLRSDASNLKDKGISAVWIPPAWKGASQNDVGYGAYDLYDLGEFNQKGTIRTKYGTRNQLQAAVNALKSNGIQVYGDVVMNHKGGADATEMVRAVEVNPNNRNQEVSGEYTIEAWTKFDFPGRANTHSNFKWRWYHFDGVDWDQSRKLNNRIYKFRTDGKAWDWEVDTENGNYDYLIYADIDMDHPEVINELRNWGVWYTNTLGLDGFRIDAVKHIKYSFTRDWINHVRSATGKNMFAVAEFWKNDLGAIENYLNKTNWNHSVFDVPLHFNLYYASKSGGNYDMRQIFNGTVVQRHPTHAVTFVDNHDSQPEESLESFVEEWFKPLAYALTLTREQGYPSVFYGDYYGIPTHGVPAMKSKIDPILEARQKYAYGRQNDYLDHHNIIGWTREGNTAHPNSGLATIMSDGAGGNKWMFVGRNKAGQVWTDITGNRAGTVTINADGWGEFSVNGGSVSIWVNK

SEQ ID NO: 23764 - protein, 485 aa, Bacillus sp.
HHNGTNGTLMQYFEWYLPNDGNHWNRLRSDASNLKDKGISAVWIPPAWKGASQNDVGYGAYDLYDLGEFNQKGTIRTKYGTRNQLQAAVNALKSNGIQVYGDVVMNHKGGADATEMVRAVEVNPNNRNQEVSGEYTIEAWTKFDFPGRANTHSNFKWRWYHFDGVDWDQSRKLNNRIYKFRTDGKAWDWEVDTENGNYDYLLYADIDMDHPEVVNELRNWGVWYTNTLGLDGFRIDAVKHIKYSFTRDWINHVRSAIGKNMFAVAEFWKNDLGAIENYLNKTNWNHSVFDVPLHFNLYYASKSGGNYDMRQIFNGTVVQRHPTHAVTFVDNHDSQPEESLESFVREWFKPLAYALTLTREQGYPSVFYGDYYGIPTHGVPAMKSKIDPILEARQKYAYGRQNDYLDHHNIIGWTREGNTAHPNSGLATIMSDGAGGNKWMFVGRNKAGQVWTDITGNRAGTVTINADGWGEFSVNGGSVSIWVNK

SEQ ID NO: 23765 - protein, 483 aa, Bacillus sp.
HHNGTNGTLMQYFEWYLPNDGNHWNRLRSDASNLKDKGISAVWIPPAWKGASQNDVGYGAYDLYDLGEFNQKGTIRTKYGTRNQLQAAVNALKSNGIQVYGDVVMNHKGGADATEMVKAVEVNPNNRNQEVSGEYTIEAWTKFDFPGRANTHSNFKWRWYHFDGVDWDQSRKLNNRIYKFRTKAWDWEVDTEFGNYDYLLYADIDMDHPEVVNELRNWGVWYTNTLGLDGFRIDAVKHIKYSFTKDWINHVRSAIGKNMFAVAEFWKNDLGAIENYLNKTNWNHSVFDVPLHFNLYYASKSGGNYDMRQIFNGTVVQKHPTHAVTFVDNHDSQPEESLESFVREWFKPLAYALTLTREQGYPSVFYGDYYGIPTHGVPAMKSKIDPILEARQKYAYGRQNDYLDHHNIIGWTREGNTAHPNSGLATIMSDGAGGNKWMFVGRNKAGQVWTDITGNKAGTVTINADGWGNFSVNGGSVSIWVNK

SEQ ID NO: 23766 - protein, 483 aa, Bacillus sp.
HHNGTNGTLMQYFEWYLPNDGNHWNRLRSDASNLKDKGISAVWIPPAWKGASQNDVGYGAYDLYDLGEFNQKGTIRTKYGSRNQLQAAVNALKSNGIQVYGDVVMNHKGGADATEMVKAVEVNPNNRNQEVSGEYTIEAWTKFDFPGRANTHSNFKWRWYHFDGVDWDQSRKLNNRIYKFRTKAWDWEVDTEFGNYDYLLYADIDMDHPEVVNELRNWGVWYTNTLGLDGFRIDAVKHIKYSFTRDWINHVRSAIGKNMFAVAEFWKNDLGAIENYLNKTNWNHSVFDVPLHFNLYYASKSGGNYDMRQIFNGTVVQKHPTHAVTFVDNHDSQPEESLESFVREWFKPLAYALTLTREQGYPSVFYGDYYGIPTHGVPAMKSKIDPILEARQKYAYGRQNDYLDHHNIIGWTREGNTAHPNSGLATIMSDGAGGNKWMFVGRNKAGQVWTDITGNKAGTVTINADGWGNFSVNGGSVSIWVNK

SEQ ID NO: 23767 - protein, 483 aa, Bacillus sp.
HHNGTNGTLMQYFEWYLPNDGNHWNRLRSDASNLKDKGISAVWIPPAWKGASQNDVGYGAYDLYDLGEFNQKGTIRTKYGTRNQLQAAVNALKSNGIQVYGDVVMNHKGGADATEMVKAVEVNPNNRNQEVSGEYTIEAWTKFDFPGRANTHSNFKWRWYHFDGVDWDQSRKLNQRIYKFRTKAWDWEVDTEFGNYDYLLYADIDMDHPEVVNELRNWGVWYTNTLGLDGFRIDAVKHIKYSFTRDWINHVRSAIGKNMFAVAEFWKNDLGAIENYLNKTNWNHSVFDVPLHFNLYYASKSGGNYDMRQIFNGTVVQKHPTHAVTFVDNHDSQPEESLESFVREWFKPLAYALTLTREQGYPSVFYGDYYGIPTHGVPAMKSKIDPILEARQKYAYGRQNDYLDHHNIIGWTREGNTAHPNSGLATIMSDGAGGNKWMFVGRNKAGQVWTDITGNKAGTVTINADGWGNFSVNGGSVSIWVNK

SEQ ID NO: 23768 - protein, 483 aa, Bacillus sp.
HHNGTNGTLMQYFEWYLPNDGNHWNRLRSDASNLKDKGISAVWIPPAWKGASQNDVGYGAYDLYDLGEFNQKGTIRTKYGTRNQLQAAVNALKSNGIQVYGDVVMNHKGGADATEMVKAVEVNPNNRNQEVSGEYTIEAWTKFDFPGRANTHSNFKWRWYHFDGVDWDQSRKLNNRIYKFRTKAWDWEVDTEFGNYDYLLYADIDMDHPEVVNELRNWGVWYTNTLGLDGFRIDAVKHIKYSFTRDWINHVRSAIGKNMFAVAEFWKNDLGAIENYLNKTNWNHSVFDVPLHFNLYYASKSGGNYDMRQIFNGTVVQKHPTHAVTFVDNHDSQPEESLESFVREWFKPLAYALTLTREQGYPSVFYGDYYGIPTHGVPAMKSRIDPILEARQKYAYGRQNDYLDHHNIIGWTREGNTAHPNSGLATIMSDGAGGNKWMFVGRNKAGQVWTDITGNKAGTVTINADGWGNFSVNGGSVSIWVNK

SEQ ID NO: 23769 - protein, 483 aa, Bacillus sp.
HHNGTNGTLMQYFEWYLPNDGNHWNRLRSDASNLKDKGISAVWIPPAWKGASQNDVGYGAYDLYDLGEFNQKGTIRTKYGTRNQLQAAVNALKSNGIQVYGDVVMNHKGGADATEMVKAVEVNPNNRNQEVSGEYTIEAWTKFDFPGRANTHSNFKWRWYHFDGVDWDQSRKLNNRIYKFRTKAWDWEVDTEFGNYDYLLYADIDMDHPEVVNELRNWGVWYTNTLGLDGFRIDAVKHIKYSFTRDWINHVRSAIGKNMFAVAEFWKNDLGAIENYLNKTNWNHSVFDVPLHFNLYYASKSGGNYDMRQIFNGTVVQKHPTHAVTFVDNHDSQPEESLESFVREWFKPLAYALTLTREQGYPSVFYGDYYGIPTHGVPAMKSKIDPILEARQKYAYGRQNDWLDHHNIIGWTREGNTAHPNSGLATIMSDGAGGNKWMFVGRNKAGQVWTDITGNKAGTVTINADGWGNFSVNGGSVSIWVNK

SEQ ID NO: 23770 - protein, 483 aa, Bacillus sp.
HHNGTNGTLMQYFEWYLPNDGNHWNRLRSDASNLKDVGISAVWIPPAWKGTSQNDVGYGAYDLYDLGEFNQKGTIRTKYGTRNQLQAAVNALKSNGIQVYGDVVMNHKGGADATEMVKAVEVNPNNRNQEVSGEYTIEAWTKFDFPGRANTHSNFKWRWYHFDGVDWDQSRKLNNRIYKFRTKAWDWEVDTEFGNYDYLMYADIDMDHPEVVNELRNWGVWYTNTLGLDGFRIDAVKHIKYSFTRDWINHVRSAIGKNMFAVGEYWKNDLGAIENYLNKTNWNHSVFDVPLHFNLYYASKSGGNYDMRRIFNGTVVQKHPTHAVTFVDNHDTQPEESLESFVREWFKPLAYALTLTREQGYPSVFYGDYYGIPTHGVPAMKSKIDPILEARQKYAYGRQNDYLDHHNIIGWTREGNTAHPNSGLATIMSDGAGGNKWMFVGRNKAGQVWTDITGNKAGTVTINADGWGNFSVNGGSVSIWVNK

SEQ ID NO: 23771 - protein, 483 aa, Bacillus sp.
HHNGTNGTLMQYFEWYLPNDGNHWNRLRSDASNLKDKGISAVWIPPAWKGASQNDVGYGAYDLYDLGEFNQKGTIRTKYGTRNQLQAAVNALKSNGIQVYGDVVMNHKGGADATEMVKAVEVNPNNRNQEVSGEYTIEAWTKFDFPGRANTHSNFKWRWYHFDGVDWDQSRKLNNRIYKFRTKAWDWEVDTEFGNYDYLLYADIDMDHPEVVNELRNWGVWYTNTLGLDGFRIDAVKHIKYSFTRDWINHVRSAIGKNAFAVAEFWKNDLGAIENYLNKTNWNHSVFDVPLHFNLYYASKSGGNYDMRQIFNGTVVQKHPTHAVTFVDNHDSQPEESLESFVREWFKPLAYALTLTREQGYPSVFYGDYYGIPTHGVPAMKSKIDPILEARQKYAYGRQNDYLDHHNIIGWTREGNTAHPNSGLATIMSDGAGGNKWMFVGRNKAGQVWTDITGNKAGTVTINADGWGNFSVNGGSVSIWVNK

SEQ ID NO: 23772 - protein, 483 aa, Bacillus sp.
HHNGTNGTLMQYFEWYLPNDGNHWNRLRSDASNLKDKGISAVWIPPAWKGASQNDVGYGAYDLYDLGEFNQKGTIRTKYGTRNQLQAAVNALKSNGIQVYGDVVLNHKGGADATEMVKAVEVNPNNRNQEVSGEYTIEAWTKFDFPGRANTHSNFKWRWYHFDGVDWDQSRKLNNRIYKFRTKAWDWEVDTEFGNYDYLLYADIDMDHPEVVNELRNWGVWYTNTLGLDGFRIDAVKHIKYSFTRDWINHVRSAIGKNMFAVAEFWKNDLGAIENYLNKTNWNHSVFDVPLHFNLYYASKSGGNYDMRQIFNGTVVQKHPTHAVTFVDNHDSQPEESLESFVREWFKPLAYALTLTREQGYPSVFYGDYYGIPTHGVPAMKSKIDPILEARQKYAYGRQNDYLDHHNIIGWTREGNTAHPNSGLATIMSDGAGGNKWMFVGRNKAGQVWTDITGNKAGTVTINADGWGNFSVNGGSVSIWVNK

SEQ ID NO: 23773 - protein, 483 aa, Bacillus sp. SP70
HHNGTNGTMMQYFEWYLPNDGNHWNRLNSDASNLKSKGITAVWIPPAWKGASQNDVGYGAYDLYDLGEFNQKGTVRTKYGTRSQLQAAVTSLKNNGIQVYGDVVMNHKGGADATEMVRAVEVNPNNRNQEVTGEYTIEAWTRFDFPGRGNTHSSFKWRWYHFDGVDWDQSRRLNNRIYKFRGKAWDWEVDTENGNYDYLMYADIDMDHPEVVNELRNWGVWYTNTLGLDGFRIDAVKHIKYSFTRDWINHVRSATGKDMPAVAEFWKNDLGAIENYLQKTNWNHSVFDVPLHYNLYNASKSGGNYDMRNIFNGTVVQRHPSHAVTFVDNHDSQPEEALESFVEEWFKPLAYALTLTREQGYPSVFYGDYYGIPTHGVPAMRSKIDPILEARQKYAYGKQNDYLDHHNIIGWTREGNTAHPNSGLATIMSDGAGGSKWMFVGRNKAGQVWSDITGNRTGTVTINADGYGNFSVNRQSVSIWVNK

SEQ ID NO: 23774 - protein, 483 aa, Bacillus sp.
HHNGTNGTLMQYFEWYLPNDGNHWNRLRSDASNLKDKGISAVWIPPAWKGASQNDVGYGAYDLYDLGEFNQKGTIRTKYGTRNQLQAAVNALKSNGIQVYGDVVMNHKGGADATEMVKAVEVNPNNRNQEVSGEYTIEAWTKFDFPGRANTHSNFKWRWYHFDGVDWDQSRKLNNRIYKFRTKAWDWEVDTEFGNYDYLLYADIDMDHPEVVNELRNWGVWYTNTLGLDGFRIDAVKHIKYSFTRDWINHVRSAIGKNMFAVAEFWKNDLGAIENYLNKTNWNHSVFDVPLHFNLYYASKSGGNYDMRQIFNGTVVQKHPTHAVTFVDNHDSQPEESLESFVREWFKPLAYALTLTREQGYPSVFYGDYYGIPTHGVPAMKSKIDPILEARQKYAYGRQNDYLDHHNIIGWTREGNTAHPNSGLATIMSDGAGGNKWMFVGRNKAGQVWTDITGNKAGTVTINADGWGNFSVNGGSVSIYVNK

SEQ ID NO: 23775 - protein, 483 aa, Bacillus sp.
HHNGTNGTLMQYFEWYLPNDGNHWNRLRSDASNLKDKGISAVWIPPAWKGASQNDVGYGAYDLYDLGEFNQKGTIRTKYGTRNQLQAAVNALKSNGIQVYGDVVMNHKGGADATEMVKAVEVNPNNRNQEVSGEYTIEAWTKFDFPGRANTHSNFKWRWYHFDGVDWDQSRKLNNRIYKFRTKAWDWEVDTEFGNYDYLLYADIDMDHPEVVNELRNWGVWYTNTLGLDGFRIDAVKHIKYSFTRDWINHVRSAIGNNMFAVAEFWKNDLGAIENYLNKTNWNHSVFDVPLHFNLYYASKSGGNYDMRQIFNGTVVQKHPTHAVTFVDNHDSQPEESLESFVREWFKPLAYALTLTREQGYPSVFYGDYYGIPTHGVPAMKSKIDPILEARQKYAYGRQNDYLDHHNIIGWTREGNTAHPNSGLATIMSDGAGGNKWMFVGRNKAGQVWTDITGNKAGTVTINADGWGNFSVNGGSVSIWVNK

SEQ ID NO: 23776 - protein, 483 aa, Bacillus sp.
HHNGTNGTLMQYFEWYLPNDGNHWNRLRSDASNLKDKGISAVWIPPAWKGASQNDVGYGAYDLYDLGEFNQKGTIRTKYGTRNQLQAAVNALKSNGIQVYGDVVMNHKGGADATEMVKAVEVNPNNRNQEVSGEYTIEAWTKFDFPGRANTHSNFKWRWYHFDGVDWDQSRKLNNRIYKFRTKAWDWEVDTEFGNYDYLLYADIDMDHPEVVNELRNWGVWYTNTLGLDGFRIDATKHIKYSFTRDWINHVRSAIGKNMFAVAEFWKNDLGAIENYLNKTNWNHSVFDVPLHFNLYYASKSGGNYDMRQIFNGTVVQKHPTHAVTFVDNHDSQPEESLESFVREWFKPLAYALTLTREQGYPSVFYGDYYGIPTHGVPAMKSKIDPILEARQKYAYGRQNDYLDHHNIIGWTREGNTAHPNSGLATIMSDGAGGNKWMFVGRNKAGQVWTDITGNKAGTVTINADGWGNFSVNGGSVSIWVNK

SEQ ID NO: 23777 - protein, 483 aa, Bacillus sp.
HHNGTNGTLMQYFEWYLPNDGNHWNRLRSDASNLKDKGISAVWIPPAWKGASQNDVGYGAYDLYDLGEFNQKGTIRTKYGTRNQLQAAVNALKSNGIQVYGDVVMNHKGGADATEMVKAVEVNPNNRNQEVSGEYTIEAWTKFDFPGRANTHSNFKWRWYHFDGVDWDQSRKLNNRIYKFRTKAWDWEVDTEFGNYDYLLYADIDLDHPEVVNELRNWGVWYTNTLGLDGFRIDAVKHIKYSFTRDWINHVRSAIGKNMFAVAEFWKNDLGAIENYLNKTNWNHSVFDVPLHFNLYYASKSGGNYDMRQIFNGTVVQKHPTHAVTFVDNHDSQPEESLESFVREWFKPLAYALTLTREQGYPSVFYGDYYGIPTHGVPAMKSKIDPILEARQKYAYGRQNDYLDHHNIIGWTREGNTAHPNSGLATIMSDGAGGNKWMFVGRNKAGQVWTDITGNKAGTVTINADGWGNFSVNGGSVSIWVNK

SEQ ID NO: 23778 - protein, 483 aa, Bacillus sp.
HHNGTNGTLMQYFEWYLPNDGNHWNRLRSDASNLKDKGISAVWIPPAWKGASQNDVGYGAYDLYDLGEFNQKGTIRTKYGTRNQLQAAVNALKSNGIQVYGDVVMNHKGGADATEMVKAVEVNPNNRNQEVSGEYTIEAWTKFDFPGRANTHSNFKWRWYHFDGVDWDQSRKLNNRIYKFRTKAWDWEVDTEFGNYDYLLYADIDMDHPEVVNELRNWGVWYTNTLGLDGFRIDAVKHIKYSFTRDWINHVRSAIGKNMFAVAEFWKNDLGAIENYLNKTNWNHSVFDVPLHFNLWYASKSGGNYDMRQIFNGTVVQKHPTHAVTFVDNHDSQPEESLESFVREWFKPLAYALTLTREQGYPSVFYGDYYGIPTHGVPAMKSKIDPILEARQKYAYGRQNDYLDHHNIIGWTREGNTAHPNSGLATIMSDGAGGNKWMFVGRNKAGQVWTDITGNKAGTVTINADGWGNFSVNGGSVSIWVNK

SEQ ID NO: 23779 - protein, 483 aa, Bacillus sp.
HHNGTNGTLMQYFEWYLPNDGNHWNRLRSDASNLKDKGISAVWIPPAWKGASQNDVGYGAYDLYDLGEFNQKGTIRTKYGTRNQLQAAVNALKSNGIQVYGDVVMNHKGGADATEMVKAVEVNPNNRNQEVSGEYTIEAWTKFDFPGRANTHSNFKWRWYHFDGVDWDQSRKLNNRIYKFRTKAWDWEVDTEFGNYDYLLYADIDMDHPEVVNELRNWGVWYTNTLGLDGFRIDAVKHIKYSFMRDWINHVRSAIGKNMFAVAEFWKNDLGAIENYLNKTNWNHSVFDVPLHFNLYYASKSGGNYDMRQIFNGTVVQKHPTHAVTFVDNHDSQPEESLESFVREWFKPLAYALTLTREQGYPSVFYGDYYGIPTHGVPAMKSKIDPILEARQKYAYGRQNDYLDHHNIIGWTREGNTAHPNSGLATIMSDGAGGNKWMFVGRNKAGQVWTDITGNKAGTVTINADGWGNFSVNGGSVSIWVNK

SEQ ID NO: 23780 - protein, 483 aa, Bacillus sp.
HHNGTNGTLMQYFEWYLPNDGNHWNRLRSDASNLKDKGISAVWIPPAWKGASQNDVGYGAYDLYDLGEFNQKGTIRTKYGTRNQLQAAVNALKSNGIQVYGDVVMNHKGGADATEMVKAVEVNPNNRNQEVSGEYTIEAWTKFDFPGRANTHSNFKWRWYHFDGVDWDQSRKLNNRIYKFRTKAWDWEVDTEFGNYDYLLYADIDMDHPEVVNELRNWGVWYTNTLGLDGFRIDAVKHIKYSFTRDWINHVRSAIGKNMFAVAEFWKNDLGAIENYLNKTNWNHSVFDVPLHFNLYYASKSGGNYDMRQIFNGTVVHKHPTHAVTFVDNHDSQPEESLESFVREWFKPLAYALTLTREQGYPSVFYGDYYGIPTHGVPAMKSKIDPILEARQKYAYGRQNDYLDHHNIIGWTREGNTAHPNSGLATIMSDGAGGNKWMFVGRNKAGQVWTDITGNKAGTVTINADGWGNFSVNGGSVSIWVNK

SEQ ID NO: 23781 - protein, 483 aa, Bacillus sp.
HHNGTNGTLMQYFEWYLPNDGNHWNRLRSDASNLKDKGISAVWIPPAWKGASQNDVGYGAYDLYDLGEFNQKGTIRTKYGTRNQLQAAVNALKSNGIQVYGDVVMNHKGGADATEMVKAVEVNPNNRNQEVSGEYTIEAWTKFDFPGRANTHSNFKWRWYHFDGVDWDQSRKLNNRIYKFRTKAWDWEVDTEFGNYDYLMYADIDMDHPEVVNELRNWGVWYTNTLGLDGFRIDAVKHIKYSFVRDWINHVRSAIGKNMFAVAEFWKNDLGAIENYLNKTNWNHSVFDVPLHFNLYYASKSGGNYDMRQIFNGTVVQKHPTHAVTFVDNHDTQPEESLESFVREWFKPLAYALTLTREQGYPSVFYGDYYGIPTHGVPAMKSKIDPILEARQKYAYGRQYDYLDHHNIIGWTREGNTAHPNSGLATIMSDGAGGNKWMFVGRNKAGQVWTDITGNKAGTVTINADGWGNFSVNGGSVSIWVNK

SEQ ID NO: 23782 - protein, 483 aa, Bacillus sp.
HHNGTNGTLMQYFEWYLPNDGNHWNRLRSDASNLKDKGISAVWIPPAWKGASQNDVGYGAYDLYDLGEFNQKGTIRTKYGTRNQLQAAVNALKSNGIQVYGDVVMNHKGGADATEMVKAVEVNPNNRNQEVSGEYTIEAWTKFDFPGRANTHSNFKWRWYHFDGVDWDQSRKLNNRIYKFRTKAWDWEVDTEFGNYDYLLYADIDMDHPEVVNELRNWGVWYTNTLGLDGFRIDAVKHIKYSFTRDWINHVRSAIGKNMFAVAEFWKNDLGAIENYLNKTNWNHSVFDVPLHFNLYYASKSGGNYDMRQIFNGTVVQKHPTHAVTFVDNHDTQPEESLESFVREWFKPLAYALTLTREQGYPSVFYGDYYGIPTHGVPAMKSKIDPILEARQKYAYGRQNDYLDHHNIIGWTREGNTAHPNSGLATIMSDGAGGNKWMFVGRNKAGQVWTDITGNKAGTVTINADGWGNFSVNGGSVSIWVNK

SEQ ID NO: 23783 - protein, 483 aa, Bacillus subtilis
HHNGTNGTLMQYFEWYLPNDGNHWNRLRSDASNLKDKGISAVWIPPAWKGASQNDVGYGAYDLYDLGEFNQKGTIRTKYGTRNQLQAAVNALKSNGIQVYGDVVMNHKGGADATEMVKAVEVNPNNRNQEVSGEYTIEAWTKFDFPGRANTHSNFKWRWYHFDGVDWDQSRKLNNRIYKFRTKAWDWEVDTEFGNYDYLMYADIDMDHPEVVNELRNWGVWYTNTLGLDGFRIDAVKHIKYSFIRDWINHVRSAIGKNMFAVAEFWKNDLGAIENYLNKTNWNHSVFDVPLHFNLYYASKSGGNYDMRQIFNGTVVQKHPTHAVTFVDNHDTQPEESLESFVREWFKPLAYALTLTREQGYPSVFYGDYYGIPTHGVPAMKSKIDPILEARQKYAYGRQNDYLDHHNIIGWTREGNTAHPNSGLATIMSDGAGGNKWMFVGRNKAGQVWTDITGNKAGTVTINADGWGNFSVNGGSVSIWVNK

SEQ ID NO: 23784 - protein, 483 aa, Bacillus sp.
HHNGTNGTLMQYFEWYLPNDGNHWNRLRSDASNLKDKGISAVWIPPAWKGASQNDVGYGAYDLYDLGEFNQKGTIRTKYGTRNQLQAAVNALKSNGIQVYGDVVMNHKGGADATEMVKAVEVNPNNRNQQVSGEYTIEAWTKFDFPGRANTHSNFKWRWYHFDGVDWDQSRKLNNRIYKFRTKAWDWEVDTEFGNYDYLLYADIDMDHPEVVNELRNWGVWYTNTLGLDGFRIDAVKHIKYSFTRDWINHVRSAIGKNMFAVAEFWKNDLGAIENYLNKTNWNHSVFDVPLHFNLYYASKSGGNYDMRQIFNGTVVQKHPTHAVTFVDNHDSQPEESLESFVREWFKPLAYALTLTREQGYPSVFYGDYYGIPTHGVPAMKSKIDPILEARQKYAYGRQNDYLDHHNIIGWTREGNTAHPNSGLATIMSDGAGGNKWMFVGRNKAGQVWTDITGNKAGTVTINADGWGNFSVNGGSVSIWVNK

SEQ ID NO: 23785 - protein, 483 aa, Bacillus sp.
HHNGTNGTLMQYFEWYLPNDGNHWNRLRSDASNLKDKGISAVWIPPAWKGASQNDVGYGAYDLYDLGEFNQKGTIRTKYGTRNQLQAAVNALKSNGIQVYGDVVMNHKGGADATEMVKAVEVNPNNRNQEVSGEYTIEAWTKFDFPGRANTHSNFKWRWYHFDGVDWDQSRKLNNRIYKFRTKAWDWEVDTEFGNYDYLLGADIDMDHPEVVNELRNWGVWYTNTLGLDGFRIDAVKHIKYSFTRDWINHVRSAIGKNMFAVAEFWKNDLGAIENYLNKTNWNHSVFDVPLHFNLYYASKSGGNYDMRQIFNGTVVQKHPTHAVTFVDNHDSQPEESLESFVREWFKPLAYALTLTREQGYPSVFYGDYYGIPTHGVPAMKSKIDPILEARQKYAYGRQNDYLDHHNIIGWTREGNTAHPNSGLATIMSDGAGGNKWMFVGRNKAGQVWTDITGNKAGTVTINADGWGNFSVNGGSVSIWVNK

SEQ ID NO: 23786 - protein, 483 aa, Bacillus sp.
HHNGTNGTLMQYFEWYLPNDGNHWNRLRSDASNLKDKGISAVWIPPAWKGASQNDVGYGAYDLYDLGEFNQKGTIRTKYGTRNQLQAAVNALKSNGIQVYGDVVMNHKGGADATEMVKAVEVNPNNRNQEVSGEYTIEAWTKFDFPGRANTHSNFKWRWYHFDGVDWDQSRKLNNRIYKFRTKAWDWEVDTEFGNYDYLLYADIDMDHPEVVNELRNWGVWYTNTLGLDGFRIDAVKHIKYSFTRDWINHVRSAIGKNMFAVAEFWKNDLGAIENYLNKTNWNHSVFDVPLHFNLYYASKSGGNYDMRQIFNGTVVQKHPTHAVTFVDNHDSQPEESLESFVREWFKPLAYALTLTREQGYPSVFYGDYYGIPTHGVPAMKSKIDPILEARKKYAYGRQNDYLDHHNIIGWTREGNTAHPNSGLATIMSDGAGGNKWMFVGRNKAGQVWTDITGNKAGTVTINADGWGNFSVNGGSVSIWVNK

SEQ ID NO: 23787 - protein, 483 aa, Bacillus sp.
HHNGTNGTLMQYFEWYLPNDGNHWNRLRSDASNLKDKGISAVWIPPAFKGASQNDVGYGAYDLYDLGEFNQKGTIRTKYGTRNQLQAAVNALKSNGIQVYGDVVMNHKGGADATEMVKAVEVNPNNRNQEVSGEYTIEAWTKFDFPGRANTHSNFKWRWYHFDGVDWDQSRKLNNRIYKFRTKAWDWEVDTEFGNYDYLLYADIDMDHPEVVNELRNWGVWYTNTLGLDGFRIDAVKHIKYSFTRDWINHVRSAIGKNMFAVAEFWKNDLGAIENYLNKTNWNHSVFDVPLHFNLYYASKSGGNYDMRQIFNGTVVQKHPTHAVTFVDNHDSQPEESLESFVREWFKPLAYALTLTREQGYPSVFYGDYYGIPTHGVPAMKSKIDPILEARQKYAYGRQNDYLDHHNIIGWTREGNTAHPNSGLATIMSDGAGGNKWMFVGRNKAGQVWTDITGNKAGTVTINADGWGNFSVNGGSVSIWVNK

SEQ ID NO: 23788 - protein, 483 aa, Bacillus sp.
HHNGTNGTLMQYFEWYLPNDGNHWNRLRSDASNLKDKGISAVWIPPAWKGASQNDVGYGAYDLYDLGEFNQKGTIRTKYGTRNQLQAAVNALKSNGIQVYGDVVMNHKGGADATEMVKAVEVNPNNRNQEVSGEYTIEAWTKFDFPGRANTHSNFKWRWYHFDGVDWDQSRKLNNRIYKFRTKAWDWEVDTEFGNFDYLLYADIDMDHPEVVNELRNWGVWYTNTLGLDGFRIDAVKHIKYSFTRDWINHVRSAIGKNMFAVAEFWKNDLGAIENYLNKTNWNHSVFDVPLHFNLYYASKSGGNYDMRQIFNGTVVQKHPTHAVTFVDNHDSQPEESLESFVREWFKPLAYALTLTREQGYPSVFYGDYYGIPTHGVPAMKSKIDPILEARQKYAYGRQNDYLDHHNIIGWTREGNTAHPNSGLATIMSDGAGGNKWMFVGRNKAGQVWTDITGNKAGTVTINADGWGNFSVNGGSVSIWVNK

SEQ ID NO: 23789 - protein, 483 aa, Bacillus sp.
HHNGTNGTLMQYFEWYLPNDGNHWNRLRSDASNLKDKGISAVWIPPAWKGASQNDVGYGAYDLYDLGEFNQKGTIRTKYGTRNQLQAAVNALKSNGIQVYGDVVMNHKGGADATEMVKAVEVNPNNRNQEVSGEYTIEAWTKFDFPGRANTHSNFKWRWYHFDGVDHDQSRKLNNRIYKFRTKAWDWEVDTEFGNYDYLLYADIDMDHPEVVNELRNWGVWYTNTLGLDGFRIDAVKHIKYSFTRDWINHVRSAIGKNMFAVAEFWKNDLGAIENYLNKTNWNHSVFDVPLHFNLYYASKSGGNYDMRQIFNGTVVQKHPTHAVTFVDNHDSQPEESLESFVREWFKPLAYALTLTREQGYPSVFYGDYYGIPTHGVPAMKSKIDPILEARQKYAYGRQNDYLDHHNIIGWTREGNTAHPNSGLATIMSDGAGGNKWMFVGRNKAGQVWTDITGNKAGTVTINADGWGNFSVNGGSVSIWVNK

SEQ ID NO: 23790 - protein, 483 aa, Bacillus sp.
HHNGTNGTLMQYFEWYLPNDGNHWNRLRSDASNLKDKGISAVWIPPAWKGASQNDVGYGAYDLYDLGEFNQKGTIRTKYGTRNQLQAAVNALKSNGIQVYGDVVMNHKGGADATEMVKAVEVNPNNRNQEVSGEYTIEAWTKFDFPGRANTHSNFKWRWYHFDGVDWDQSRKLNNRIYKFRTKAWDWEVDTEFGNYDYLLYADIDMDHPEVVNELRNWGVWYTNTLGLDGFRIDAVKHIKYSFTRDWINHVRSAIGKNMFAVAEFWKNDLGAIENYLNKTNWNHSVFDVPLHFNLYYASKSGGNYDMRQIFNGTVVQKHPTHAVTFVDNHDSQPEESLESFVREWFKPLAYALTLTREQGYPSVFYGDYYGIPTHGVPAMKSKIDPILEARQKYAYGRQNDYLDHHNIIGWTRLGNTAHPNSGLATIMSDGAGGNKWMFVGRNKAGQVWTDITGNKAGTVTINADGWGNFSVNGGSVSIWVNK

SEQ ID NO: 23791 - protein, 483 aa, Bacillus sp.
HHNGTNGTLMQYFEWYLPNDGNHWNRLRSDASNLKDKGISAVWIPPAWKGASQNDVGYGAYDLYDLGEFNQKGTIRTKYGTRNQLQAAVNALKSNGIQVYGDVVMNHKGGADATEMVKAVEVNPNNRNQEVSGEYTIEAWTKFDFPGRANTHSNFKWRWYHFDGVDWDQSRKLNNRIYKFRTKAWDWEVDTEFGNYDYLLYADIDMDNPEVVNELRNWGVWYTNTLGLDGFRIDAVKHIKYSFTRDWINHVRSAIGKNMFAVAEFWKNDLGAIENYLNKTNWNHSVFDVPLHFNLYYASKSGGNYDMRQIFNGTVVQKHPTHAVTFVDNHDSQPEESLESFVREWFKPLAYALTLTREQGYPSVFYGDYYGIPTHGVPAMKSKIDPILEARQKYAYGRQNDYLDHHNIIGWTREGNTAHPNSGLATIMSDGAGGNKWMFVGRNKAGQVWTDITGNKAGTVTINADGWGNFSVNGGSVSIWVNK

SEQ ID NO: 23792 - protein, 483 aa, Bacillus sp. SP70
HHNGTNGTMMQYFEWYLPNDGNHWNRLNSDASNLKSKGITAVWIPPAWKGASQNDVGYGAYDLYDLGEFNQKGTVRTKYGTRSQLQAAVTSLKNNGIQVYGDVVMNHKGGADATEMVRAVEVNPNNRNQEVTGEYTIEAWTRFDFPGRGNTHSSFKWRWYHFDGVDYDQSRRLNNRIYKFRGKAWDWEVDTENGNYDYLMYADIDMDHPEVVNELRNWGVWYTNTLGLDGFRIDAVKHIKYSFTRDWINHVRSATGKDMFAVAEFWKNDLGAIENYLQKTNWNHSVFDVPLHYNLYNASKSGGNYDMRNIFNGTVVQRHPSHAVTFVDNHDSQPEEALESFVEEWFKPLAYALTLTREQGYPSVFYGDYYGIPTHGVPAMRSKIDPILEARQKYAYGKQNDYLDHHNIIGWTREGNTAHPNSGLATIMSDGAGGSKRMFVGRNKAGQVWSDITGNRTGTVTINADGWGNFSVNQESVSIWVNK

SEQ ID NO: 23793 - protein, 483 aa, Bacillus sp.
HHNGTNGTLMQYFEWYLPNDGNHWNRLRSDASNLKDKGISAVWIPPAWKGASQNDVGYGAYDLYDLGEFNQKGTIRTKYGTRNQLQAAVNALKSNGIQVYGDVVMNHKGGADATEMVKAVEVNPNNRNQEVSGEYTIEAWTKFDFPGRANTHSNFKWRWYHFDGVDWDQSRKLNNRIYKFRTKAWDWEVDTEFGNYDYLLYADIDMDHPEVVNELRNWGVWYTNTLGLDGFRIDAVKHIKYSFTRDWINHVRSAIGKNMFAVAEFWKNDLGAIENYLNKTNWNHSVFDVPLHFNLYYASKSGGNYDMRQIFNGTVVQKHPTHAVTFVDNHDSQPEESLESFVREWFKPLAYALTLTREQGYPMVFYGDYYGIPTHGVPAMKSKIDPILEARQKYAYGRQNDYLDHHNIIGWTREGNTAHPNSGLATIMSDGAGGNKWMFVGRNKAGQVWTDITGNKAGTVTINADGWGNFSVNGGSVSIWVNK

SEQ ID NO: 23794 - protein, 483 aa, Bacillus sp.
HHNGTNGTLMQYFEWYLPNDGNHWNRLRSDASNLKDKGISAVWIPPAWKGASQNDVGYGAYDLYDLGEFNQKGTIRTKYGTRNQLQAAVNALKSNGIQVYGDVVMNHRGGADATEMVKAVEVNPNNRNQEVSGEYTIEAWTKFDFPGRANTHSNFKWRWYHFDGVDWDQSRKLNNRIYKFRTKAWDWEVDTEFGNYDYLLYADIDMDHPEVVNELRNWGVWYTNTLGLDGFRIDAVKHIKYSFTRDWINHVRSAIGKNMFAVAEFWKNDLGAIENYLNKTNWNHSVFDVPLHFNLYYASKSGGNYDMRQIFNGTVVQKHPTHAVTFVDNHDSQPEESLESFVREWFKPLAYALTLTREQGYPSVFYGDYYGIPTHGVPAMKSKIDPILEARQKYAYGRQNDYLDHHNIIGWTREGNTAHPNSGLATIMSDGAGGNKWMFVGRNKAGQVWTDITGNKAGTVTINADGWGNFSVNGGSVSIWVNK

SEQ ID NO: 23795 - protein, 483 aa, Bacillus sp.
HHNGTNGTLMQYFEWYLPNDGNHWNRLRSDASNLKDKGISAVWIPPAWKGASQNDVGYGAYDLYDLGEFNQKGTIRTKYGTRNQLQAAVNALKSNGIQVYGDVVMNHKGGADATEMVKAVEVNPNNRNQEVSGEYTIEAWTKFDFPGRANTHSNFKWRWYHFDGVDWDQSRKLNNRIYKFRTKAWDWEVDTEFGNYDYLMYADIDMDHPEVVNELRNWGVWYTNTLGLDGFRIDAVKHIKYSFVRDWINHVRSAIGKNMFAVAEFWKNDLGAIENYLNKTNWNHSVFDVPLHFNLYWASKSGGNYDMRQIFNGTVVQKHPTHAVTFVDNHDTQPEESLESFVREWFKPLAYALTLTREQGYPSVFYGDYYGIPTHGVPAMKSKIDPILEARQKYAYGRQNDYLDHHNIIGWTREGNTAHPNSGLATIMSDGAGGNKWMFVGRNKAGQVWTDITGNKAGTVTINADGWGNFSVNGGSVSIWVNK

SEQ ID NO: 23796 - protein, 483 aa, Bacillus sp.
HHNGTNGTLMQYFEWYLPNDGNHWNRLRSDASNLKDKGISAVWIPPAWKGASQNDVGYGAYDLYDLGEFNQKGTIRTKYGTRNQLQAAVNALKSNGIQVYGDVVMNHKGGADATEMVKAVEVNPNNRNQEVSGEYTIEAWTKFDFPGRANTHSNFKWRWYHFDGVDWDQSRKLNNRIYKFRTKAWDWEVDTEFGNYDYLLYADIDMDHPEVVNELRNWGVWYTNTLGLDGFRIDAVKHIKYSFTRDWINHVRSAIGKNMFAVAEFWKNDLGAIENYLNKTNWNHSVFDVPLHFNLYYASKSGGNYDMRQIFNGTVVQKHPTHAVTFVDNHDSQPEESLESFVREWFKPLAYALTLTREQGYPSVFYGDYYGIPTHGVPAMKSKIDPILEARQKYAYGRQNDYLDHHNIIGWTREGNTAHPNSGLATIMSDGAGGNKWMFVGRNKAGQVWTDITGNKAGTVTINADGFGNFSVNGGSVSIWVNK

SEQ ID NO: 23797 - protein, 483 aa, Bacillus sp.
HHNGTNGTLMQYFEWYLPNDGNHWNRLRSDASNLKDHGISAVWIPPAWKGASQNDVGYGAYDLYDLGEFNQKGTIRTKYGTRNQLQAAVNALKSNGIQVYGDVVMNHKGGADATEMVKAVEVNPNNRNQEVSGEYTIEAWTKFDFPGRANTHSNFKWRWYHFDGVDWDQSRKLNNRIYKFRTKAWDWEVDTEFGNYDYLMYADIDMDHPEVVNELRNWGVWYTNTLGLDGFRIDAVKHIKYSFVRDWINHVRSAIGKNMFAVAEFWKNDLGAIENYLNKTNWNHSVFDVPLHFNLYYASKSGGNYDMRQIFNGTVVQKHPTHAVTFVDNHDTQPEESLESFVREWFKPLAYALTLTREQGYPSVFYGDYYGIPTHGVPAMKSKIDPILEARQKYAYGRQNDYLDHHNIIGWTREGNTAHPNSGLATIMSDGAGGNKWMFVGRNKAGQVWTDITGNKAGTVTINADGWGNFSVNGGSVSIWVNK

SEQ ID NO: 23798 - protein, 483 aa, Bacillus sp.
HHNGTNGTLMQYFEWYLPNDGNHWNRLRSDASNLKDKGISAVWIPPAWKGASQNDVGYGAYDLYDLGEFNQKGTIRTKYGTRNQLQAAVNALHSNGIQVYGDVVMNHKGGADATEMVKAVEVNPNNRNQEVSGEYTIEAWTKFDFPGRANTHSNFKWRWYHFDGVDWDQSRKLNNRIYKFRTKAWDWEVDTEFGNYDYLLYADIDMDHPEVVNELRNWGVWYTNTLGLDGFRIDAVKHIKYSFTRDWINHVRSAIGKNMFAVAEFWKNDLGAIENYLNKTNWNHSVFDVPLHFNLYYASKSGGNYDMRQIFNGTVVQKHPTHAVTFVDNHDSQPEESLESFVREWFKPLAYALTLTREQGYPSVFYGDYYGIPTHGVPAMKSKIDPILEARQKYAYGRQNDYLDHHNIIGWTREGNTAHPNSGLATIMSDGAGGNKWMFVGRNKAGQVWTDITGNKAGTVTINADGWGNFSVNGGSVSIWVNK

SEQ ID NO: 23799 - protein, 483 aa, Bacillus sp.
HHNGTNGTLMQYFEWYLPNDGNHWNRLRSDASNLKDKGISAVWIPPAWKGASQNDVGYGAYDLYDLGEFNQKGTIRTKYGTRNQLQAAVNALKSNGIQVYGDVVMNHKGGADATEMVKAVEVNPNNRNQEVSGEYTIEAWTKFDFPGRANTHSNFKWRWYHFDGVDWDQSRKLNNRIYKFRTKAWDWEVDTEFGNYDYLMYADIDMDHPEVVNELRNWGVWYTNTLGLDGFRIDAAKHIKYSFTRDWINHVRSAIGKNMFAVAEFWKNDLGAIENYLNKTNWNHSVFDVPLHFNLYYASKSGGNYDMRQIFNGTVVQKHPTHAVTFVDNHDTQPEESLESFVREWFKPLAYALTLTREQGYPSVFYGDYYGIPTHGVPAMKSKIDPILEARQKYAYGRQNDYLDHHNIIGWTREGNTAHPNSGLATIMSDGAGGNKWMFVGRNKAGQVWTDITGNKAGTVTINADGWGNFSVNGGSVSIWVNK

SEQ ID NO: 23800 - protein, 483 aa, Bacillus subtilis
HHNGTNGTLMQYFEWYLPNDGNHWNRLRSDASNLKDKGISAVWIPPAWKGASQNDVGYGAYDLYDLGEFNQKGTIRTKYGTRNQLQAAVNALKSNGIQVYGDVVMNHKGGADATEMVKAVEVNPNNRNQEVSGEYTIEAWTKFDFPGRANTHSNFKWRWYHFDGVDWDQSRKLNNRIYKFRTKAWDWEVDTEFGNYDYLMYADIDMDHPEVVNELRNWGVWYTNTLGLDGFRIDAVKHIKYSFVRDWINHVRSAIGKNMFAVAEFWKNDLGAIENYLNKTNWNHSVFDVPLHFNLYYASKSGGNYDMRQIFNGTVVQKHPTHAVTFVDNHDTQPEESLESFVREWFKPLAYALTLTREQGYPSVFYGDYYGIPTHGVPAMKSKIDPILEARQKYAYGRQNDYLDHHNIIGWTREGNTAHPNSGLATIMSDGAGGNKWMFVGRNKAGQVWTDITGNKAGTVTINADGWGNFSVNGGSVSIWVNK

SEQ ID NO: 23801 - protein, 483 aa, Bacillus sp.
HHNGTNGTLMQYFEWYLPNDGNHWNRLRSDASNLKDKGISAVWIPPAWKGASQNDVGYGAYDLYDLGEFNQKGTIRTKYGTRNQLQAAVNALKSNGIQVYGDVVMNHKGGADATEMVKAVEVNPNNRNQEVSGEYTIEAWTKFDFPGRANTHSNFKWRWYHFDGVDWDQSRKLNNRIYKFRTKAWDWEVDTEFGNYDYLLYADIDMDHPEVVNELRNWGVWYTNTLGLDGFRIDAVKHIKYSFTRDWINHVRSAIGKNMFAVAEFWKNDLGAIENYLNKTNWNHSVFDVPLHFNLYYASKSGGNYDMRQIFNGTVVQKHPTHAVTFVDNHDSQPEEALESFVREWFKPLAYALTLTREQGYPSVFYGDYYGIPTHGVPAMKSKIDPILEARQKYAYGRQNDYLDHHNIIGWTREGNTAHPNSGLATIMSDGAGGNKWMFVGRNKAGQVWTDITGNKAGTVTINADGWGNFSVNGGSVSIWVNK

SEQ ID NO: 23802 - protein, 485 aa, Bacillus sp.
HHNGTNGTMMQYFEWYLPNDGNHWNRLRSDASNLKDKGISAVWIPPAWKGASQNDVGYGAYDLYDLGEFNQKGTIRTKYGTRNQLQAAVNALKSNGIQVYGDVVMNHKGGADATEMVRAVEVNPNNRNQEVSGEYTIEAWTKFDFPGRGNTHSNFKWRWYHFQGVDWDQSRKLNNRIYKFRGDGKGWNWEVDTENGNYDYLMYADIDFSHPEVVNELRNWGVWYTNTLGLDGFRIDAVKHIPYWFTRDWINHVRSATGKNMFAVAEFWKNDLGAIENYLNKTNWNHSVFDVPLHYNLYNASKSGGNYDMRQIFNGTVVQRHPMHAVTFVDNHDSQPEEALESFVEEWFKPLAYALTLTREQGYPSVFYGDYYGIPTHGVPAMKSKIDPILEARQKYAYGRQNDYLDHHNIIGWTREGNTAHPNSGLATIMSDGAGGNKWMFVGRNKAGQVWTDITGNRAGTVTINADGWGNFSVNGGSVSIWVNK

SEQ ID NO: 23803 - protein, 483 aa, Bacillus sp.
HHNGTNGTLMQYFEWYLPNDGNHWNRLRSDASNLKDKGISAVWIPPAWKGASQNDVGYGAYDLYDLGEFNQKGTIRTKYGTRNQLQAAVNALKSNGIQVYGDVVMNHKGGADATEMVKAVEVNPNNRNQEVSGEYTIEAWTKFDFPGRANTHSNFKWRWYHFDGVDWDQSRKLNNRIYKFRTKAWDWEVDTEFGNYDYLLYADIDMDHPEVVNELRNWGVWYTNTLGLDGFRIDAVKHIKMSFTRDWINHVRSAIGKNMFAVAEFWKNDLGAIENYLNKTNWNHSVFDVPLHFNLYYASKSGGNYDMRQIFNGTVVQKHPTHAVTFVDNHDSQPEESLESFVREWFKPLAYALTLTREQGYPSVFYGDYYGIPTHGVPAMKSKIDPILEARQKYAYGRQNDYLDHHNIIGWTREGNTAHPNSGLATIMSDGAGGNKWMFVGRNKAGQVWTDITGNKAGTVTINADGWGNFSVNGGSVSIWVNK

SEQ ID NO: 23804 - protein, 485 aa, Bacillus sp.
HHNGTNGTLMQYFEWYLPNDGNHWNRLRSDASNLKDKGISAVWIPPAWKGASQNDVGYGAYDLYDLGEFNQKGTIRTKYGTRNQLQAAVNALKSNGIQVYGDVVMNHKGGADATEMVKAVEVNPNNRNQEVSGEYTIEAWTKFDFPGRANTHSNFKWRWYHFDGVDWDQSRKLNNRIYKFRGDTKDWDWEVDTEFGNYDYLMYADIDMDHPEVVNELRNWGVWYTNTLGLDGFRIDAVKHIKYSFTRDWINHVRSAIGKNMFAVAEFWKGDLGAIENYLNKTNWNHSVFDVPLHFNLYYASKSGGNYDMRQIFNGTVVQKHPTHAVTFVDNHDSQPEEALESFVREWFKPLAYALTLTREQGYPSVFYGDYYGIPTHGVPAMKSKIDPILEARQKYAYGRQYDYLDHHNIIGWTREGNTAHPNSGLATIMSDGAGGNKWMFVGRNKAGQVWTDITGNKAGTVTINADGWGNFSVNGGSVSIWVNK

SEQ ID NO: 23805 - protein, 483 aa, Bacillus subtilis
HHNGTNGTLMQYFEWYLPNDGNHWNRLRSDASNLKDKGISAVWIPPAWKGASQNDVGYGAYDLYDLGEFNQKGTIRTKYGTRNQLQAAVNALKSNGIQVYGDVVMNHKGGADATEMVKAVEVNPNNRNQEVSGEYTIEAWTKFDFPGRANTHSNFKWRWYHFDGVDWDQSRKLNNRIYKFRTKDWDWEVDTEFGNYDYLLYADIDMDHPEVVNELRNWGVWYTNTLGLDGFRIDAVKHIKYSFTRDWINHVRSAIGKNMFAVAEFWKNDLGAIENYLNKTNWNHSVFDVPLHFNLYYASKSGGNYDMRQIFNGTVVQKHPTHAVTFVDNHDSQPEESLESFVREWFKPLAYALTLTREQGYPSVFYGDYYGIPTHGVPAMKSKIDPILEARQKYAYGRQNDYLDHHNIIGWTREGNTAHPNSGLATIMSDGAGGNKWMFVGRNKAGQVWTDITGNKAGTVTINADGWGNFSVNGGSVSIWVNK

SEQ ID NO: 23806 - protein, 485 aa, Bacillus sp.
HHNGTNGTMMQYFEWYLPNDGNHWNRLRSDASNLKDKGISAVWIPPAWKGASQNDVGYGAYDLYDLGEFNQKGTIRTKYGTRNQLQAAVNALKSNGIQVYGDVVMNHKGGADATEMVRAVEVNPNNRNQEVSGEYTIEAWTKFDFPGRGNTHSNFKWRWYHFNGVDWDQSRKLNNRIYKFANDGTNWNWEVDTENGNYDYLMYANIDMSHPEVVNELRNWGVWYTNTLGLDGFRIDAVKHIKYSFTRDWINHVRSATGKNMFAVAEFWKNDLGAIENYLNKTNWNHSVFDVPLHYNLYNASKSGGNYDMRQIFNGTVVQRHPMHAVTFVDNHDSQPEEALESFVEEWFKPLAYALTLTREQGYPSVFYGDYYGIPTHGVPAMKSKIDPILEARQKYAYGRQNDYLDHHNIIGWTREGNTAHPNSGLATIMSDGAGGNKWMFVGRNKAGQVWTDITGNRAGTVTINADGWGNFSVNGGSVSIWVNK

SEQ ID NO: 23807 - protein, 485 aa, Bacillus sp.
HHNGTNGTLMQYFEWYLPNDGNHWNRLRSDASNLKDKGISAVWIPPAWKGASQNDVGYGAYDLYDLGEFNQKGTIRTKYGTRNQLQAAVNALKSNGIQVYGDVVMNHKGGADATEMVRAVEVNPNNRNQEVSGEYTIEAWTKFDFPGRANTHSNFKWRWYHFDGVDWDQSRKLNNRIYKFRGDGKGWDWEVDTENGNYDYLIYADIDMDHPEVINELRNWGVWYTNTLGLDGFRIDAVKHIKYSFTRDWINHVRSATGKNMFAVAEFWKNDLGAIENYLNKTNWNHSVFDVPLHFNLYNASKSGGNYDMRQIFNGTVVQRHPTHAVTFVDNHDSQPEESLESFVREWFKPLAYALTLTREQGYPSVFYGDYYGIPTHGVPAYKSKIDPILEARQKYAYGRQNDYLDHHNIIGWTREGNTAHPNSGLATIMSDGAGGNKWMFVGRNKAGQVWTDITGNRAGTVTINADGWGNFSVNGGSVSIWVNK

SEQ ID NO: 23808 - protein, 485 aa, Bacillus sp.
HHNGTNGTMMQYFEWYLPNDGNHWNRLNSDASNLKSKGITAVWIPPAWKGASQNDVGYGAYDLYDLGEFNQKGTVRTKYGTRSQLQAAVTSLKNNGIQVYGDVVMNHKGGADATEMVRAVEVNPNNRNQEVTGEYTIEAWTRFDFPGRGNTHSSFKWRWYHFDGVDWDQSRRLNNRIYKFRGHGKAWDWEVDTEFGNYDYLMYADYDYDHPETVNEVRNWGVWYTNTLGLDGFRIDAVKHIKYSFTRDWINHVRSATGKNMFAVAEFWKNDLGAIENYLQKTNWNHSVFDVPLHYNLYNASKSGGNYDMRNIFNGTVVQRHPSHAVTFVDNHDSQPEEALESFVEEWFKPLAYALTLTREQGYPSVFYGDYYGIPTHGVPAMRSKIDPILEARQKYAYGKQNDYLDHHNIIGWTREGNTAHPNSGLATIMSDGAGGSKWMFVGRNKAGQVWSDITGNRTGTVTINADGWGNFSVNGGSVSIWVNK

SEQ ID NO: 23809 - protein, 483 aa, Bacillus sp.
HHNGTNGTLMQYFEWYLPNDGNHWNRLRSDASNLKDKGISAVWIPPAWKGASQNDVGYGAYDLYDLGEFNQKGTIRTKYGTRNQLQAAVNALKSNGIQVYGDVVMNHKGGADATEMVKAVEVNPNNRNQEVSGEYTIEAWTKFDFPGRANTHSNFKWRWYHFDGVDWDQSRKLNNRIYKFRTKAWDWEVDTEFGNYDYLLYADIDMDHPEVINELRNWGVWYTNTLGLDGFRIDAVKHIKYSFTRDWINHVRSAIGKNMFAVAEFWKNDLGAIENYLNKTNWNHSVFDVPLHFNLYYASKSGGNYDMRQIFNGTVVQKHPTHAVTFVDNHDSQPEESLESFVREWFKPLAYALTLTREQGYPSVFYGDYYGIPTHGVPAMKSKIDPILEARQKYAYGRQNDYLDHHNIIGWTREGNTAHPNSGLATIMSDGAGGNKWMFVGRNKAGQVWTDITGNKAGTVTINADGWGNFSVNGGSVSIWVNK

SEQ ID NO: 23810 - protein, 483 aa, Bacillus sp.
HHNGTNGTLMQYFEWYLPNDGNHWNRLRSDASNLKDKGISAVWIPPAWKGASQNDVGYGAYDLYDLGEFNQKGTIRTKYGTRNQLQAAVNALKSNGIQVYGDVVMNHKGGADATEMVKAVEVNPNNRNQEVSGEYTIEAWTKFDFPGRANTHSNFKWRWYHFDGVDWDQSRKLNNRIYKFRTKAWDWEVDTEFGNYDYLLYADIDMDHPEVVNELRNWGVWYTNTLGLDGFRIDAVKHIPYSFTRDWINHVRSAIGKNMFAVAEFWKNDLGAIENYLNKTNWNHSVFDVPLHFNLYYASKSGGNYDMRQIFNGTVVQKHPTHAVTFVDNHDSQPEESLESFVREWFKPLAYALTLTREQGYPSVFYGDYYGIPTHGVPAMKSKIDPILEARQKYAYGRQNDYLDHHNIIGWTREGNTAHPNSGLATIMSDGAGGNKWMFVGRNKAGQVWTDITGNKAGTVTINADGWGNFSVNGGSVSIWVNK

SEQ ID NO: 23811 - protein, 483 aa, Bacillus sp.
HHNGTNGTLMQYFEWYLPNDGNHWNRLRSDASNLKDKGISAVWIPPAWKGASQNDVGYGAYDLYDLGEFNQKGTIRTKYGTRNQLQAAVNALKSNGIQVYGDVVMNHKGGADATEMVKAVEVNPNNRNQEVSGEYTIEAWTKFDFPGRANTHSNFKWRWYHFDGVDWDQSRKLNNRIYKFRTKAWDWEVDTEFGNYDYLLYADIDMDHPEVVNELRNWGVWYTNTLGLDGFRIDAVKHIKYSFTRDWINHVRSAIGKNMFAVAEFWKNDLGAIENYLNKTNWNHSVFDVPLHFNLYYASKSGGNYDMRQIFNGTVVQKHPTHAVTFVDNHDSQPEESLESFVREWFKPLAYALTLTREQGYPSVFYGDYYGIPTHGVPAMKSKIDPILEARQKYAWGRQNDYLDHHNIIGWTREGNTAHPNSGLATIMSDGAGGNKWMFVGRNKAGQVWTDITGNKAGTVTINADGWGNFSVNGGSVSIWVNK

SEQ ID NO: 23812 - protein, 483 aa, Bacillus sp.
HHNGTNGTLMQYFEWYLPNDGNHWNRLRSDASNLKDKGISAVWIPPAWKGASQNDVGYGAYDLYDLGEFNQKGTIRTKYGTRNQLQAAVNALKSNGIQVYGDVVMNHKGGADATEMVKAVEVNPNNRNQEVSGEYTIEAWTKFDFPGRANTHSNFKWRWYHFDGVDWDQSRKLNNRIYKFRTKAWDWEVDTEFGNYDYLLYADIDMDHPEVVNELRNWGVWYTNTLGLDGFRLDAVKHIKYSFTRDWINHVRSAIGKNMFAVAEFWKNDLGAIENYLNKTNWNHSVFDVPLHFNLYYASKSGGNYDMRQIFNGTVVQKHPTHAVTFVDNHDSQPEESLESFVREWFKPLAYALTLTREQGYPSVFYGDYYGIPTHGVPAMKSKIDPILEARQKYAYGRQNDYLDHHNIIGWTREGNTAHPNSGLATIMSDGAGGNKWMFVGRNKAGQVWTDITGNKAGTVTINADGWGNFSVNGGSVSIWVNK

SEQ ID NO: 23813 - protein, 483 aa, Bacillus sp.
HHNGTNGTLMQYFEWYLPNDGNHWNRLRSDASNLKDKGISAVWIPPAWKGASQNDVGYGAYDLYDLGEFNQKGTIRTKYGTRNQLQAAVNALKSNGIQVYGDVVMNHKGGADATEMVKAVEVNPNNRNQEVSGEYTIEAWTKFDFPGRANTHSNFKWRWYHFDGVDWDQSRKLNNRIYKFRTKAWDWEVDTEFGNYDYLLYADIDMDHPEVVNELRNWGVWYTNTLGLDGFRIDAVKHIKYSFVRDWINHVRSAIGKNMFAVAEFWKNDLGAIENYLNKTNWNHSVFDVPLHFNLYYASKSGGNYDMRQIFNGTVVQKHPTHAVTFVDNHDSQPEESLESFVREWFKPLAYALTLTREQGYPSVFYGDYYGIPTHGVPAMKSKIDPILEARQKYAYGRQNDYLDHHNIIGWTREGNTAHPNSGLATIMSDGAGGNKWMFVGRNKAGQVWTDITGNKAGTVTINADGWGNFSVNGGSVSIWVNK

SEQ ID NO: 23814 - protein, 483 aa, Bacillus sp.
HHNGTNGTLMQYFEWYLPNDGNHWNRLRSDASNLKDKGISAVWIPPAWKGASQNDVGYGAYDLYDLGEFNQKGTIRTKYGTRNQLQAAVNALKSNGIQVYGDVVMNHKGGADATEMVKAVEVNPNNRNQEVSGEYTIEAWTKFDFPGRANTHSNFKWRWYHFDGVDYDQSRKLNNRIYKFRTKAWDWEVDTEFGNYDYLLYADIDMDHPEVVNELRNWGVWYTNTLGLDGFRIDAVKHIKYSFTRDWINHVRSAIGKNMFAVAEFWKNDLGAIENYLNKTNWNHSVFDVPLHFNLYYASKSGGNYDMRQIFNGTVVQKHPTHAVTFVDNHDSQPEESLESFVREWFKPLAYALTLTREQGYPSVFYGDYYGIPTHGVPAMKSKIDPILEARQKYAYGRQNDYLDHHNIIGWTREGNTAHPNSGLATIMSDGAGGNKWMFVGRNKAGQVWTDITGNKAGTVTINADGWGNFSVNGGSVSIWVNK

SEQ ID NO: 23815 - protein, 483 aa, Bacillus sp.
HHNGTNGTLMQYFEWYLPNDGNHWKRLRSDASNLKDKGISAVWIPPAWKGASQNDVGYGAYDLYDLGEFNQKGTIRTKYGTRNQLQAAVNALKSNGIQVYGDVVMNHKGGADATEMVKAVEVNPNNRNQEVSGEYTIEAWTKFDFPGRANTHSNFKWRWYHFDGVDWDQSRKLNNRIYKFRTKAWDWEVDTEFGNYDYLLYADIDMDHPEVVNELRNWGVWYTNTLGLDGFRIDAVKHIKYSFTRDWINHVRSAIGKNMFAVAEFWKNDLGAIENYLNKTNWNHSVFDVPLHFNLYYASKSGGNYDMRQIFNGTVVQKHPTHAVTFVDNHDSQPEESLESFVREWFKPLAYALTLTREQGYPSVFYGDYYGIPTHGVPAMKSKIDPILEARQKYAYGRQNDYLDHHNIIGWTREGNTAHPNSGLATIMSDGAGGNKWMFVGRNKAGQVWTDITGNKAGTVTINADGWGNFSVNGGSVSIWVNK

SEQ ID NO: 23816 - protein, 485 aa, Bacillus sp.
HHNGTNGTMMQYFEWYLPNDGNHWNRLNSDASNLKSKGITAVWIPPAWKGASQNDVGYGAYDLYDLGEFNQKGTVRTKYGTRSQLQAAVTSLKNNGIQVYGDVVMNHKGGADATEMVRAVEVNPNNRNQEVTGEYTIEAWTRFDFPGRGNTHSSFKWRWYHFDGVDWDQSRRLNNRIYKFRGHGKEWDWEVDTEFGNYDYLTYADYDMSHPEVVNELRNWGVWYTNTLGLDGFRIDAVKHIKYSFTRDWINHVRSATGKNMFAVAEFWKNDLGAIENYLQKTNWNHSVFDVPLHYNLYNASKSGGNYDMRNIFNGTVVQRHPSHAVTFVDNHDSQPEEALESFVEEWFKPLAYALTLTREQGYPSVFYGDYYGIPTHGVPAMRSKIDPILEARQKYAYGKQNDYLDHHNIIGWTREGNTAHPNSGLATIMSDGAGGSKWMFVGRNKAGQVWSDITGNRTGTVTINADGWGNFSVNGGSVSIWVNK

SEQ ID NO: 23817 - protein, 483 aa, Bacillus sp.
HHNGTNGTLMQYFEWYLPNDGNHWNRLRSDASNLKDKGISAVWIPPAWKGASQNDVGYGAYDLYDLGEFNQKGTIRTKYGTRNQLQAAVNALKSNGIQVYGDVVMNHKGGADATEMVKAVEVNPNNRNQEVSGEYTIEAWTKFDFPGRANTHSNFKWRWYHFDGVDWDQSRKLNNRIYKFRTKAWDWEVDTEFGNYDYLLYADIDMDHPEVVNELRNWGVWYTNTLGLDGFRIDAVKHIKYSFTRDWINHVRSAIGKNMFAVAEFWKNDLGAIENYLNKTNWNHSVFDVPLHFNLYYASKSGGNYDMRQIFNGTVVQKHPTHAVTFVDNHDSQPEESLESFVREWFKPLAYALTLTREQGYPSVFYGDYYGIPTHGVPAMQSKIDPILEARQKYAYGRQNDYLDHHNIIGWTREGNTAHPNSGLATIMSDGAGGNKWMFVGRNKAGQVWTDITGNKAGTVTINADGWGNFSVNGGSVSIWVNK

SEQ ID NO: 23818 - protein, 483 aa, Bacillus sp.
HHNGTNGTLMQYFEWYLPNDGNHWNRLRSDASNLKDKGISAVWIPPAWKGASQNDVGYGAYDLYDLGEFNQKGTIRTKYGTRNQLQAAVNALRSNGIQVYGDVVMNHKGGADATEMVKAVEVNPNNRNQEVSGEYTIEAWTKFDFPGRANTHSNFKWRWYHFDGVDWDQSRKLNNRIYKFRTKAWDWEVDTEFGNYDYLLYADIDMDHPEVVNELRNWGVWYTNTLGLDGFRIDAVKHIKYSFTRDWINHVRSAIGKNMFAVAEFWKNDLGAIENYLNKTNWNHSVFDVPLHFNLYYASKSGGNYDMRQIFNGTVVQKHPTHAVTFVDNHDSQPEESLESFVREWFKPLAYALTLTREQGYPSVFYGDYYGIPTHGVPAMKSKIDPILEARQKYAYGRQNDYLDHHNIIGWTREGNTAHPNSGLATIMSDGAGGNKWMFVGRNKAGQVWTDITGNKAGTVTINADGWGNFSVNGGSVSIWVNK

SEQ ID NO: 23819 - protein, 483 aa, Bacillus sp.
HHNGTNGTLMQYFEWYLPNDGNHWNRLRSDASNLKDKGISAVWIPPAWKGASQNDVGYGAYDLYDLGEFNQKGTIRTKYGTRNQLQAAVNALKSNGIQVYGDVVMNHKGGADATEMVKAVEVNPNNRNQEVSGEYTIEAWTKFDFPGRANTHSNFKWRWYHFDGVDWDQSRKLNNRIYKFRTKAWDWEVDTEFGNYDYLLYADIDMDHPEVVNELRNWGVWYTNTLGLDGFRIDAVKHIKYSFTRDWINHVRSAIGKNMFAVAEFWKNDLGAIENYLNKTNWNHSVFDVPLHFNLYYASKSGGNYDMRQIFNGTVVQHHPTHAVTFVDNHDSQPEESLESFVREWFKPLAYALTLTREQGYPSVFYGDYYGIPTHGVPAMKSKIDPILEARQKYAYGRQNDYLDHHNIIGWTREGNTAHPNSGLATIMSDGAGGNKWMFVGRNKAGQVWTDITGNKAGTVTINADGWGNFSVNGGSVSIWVNK

SEQ ID NO: 23820 - protein, 483 aa, Bacillus sp.
HHNGTNGTLMQYFEWYLPNDGNHWNRLRSDASNLKDKGISAVWIPPAWKGASQNDVGYGAYDLYDLGEFNQKGTIRTKYGTRNQLQAAVNALKSNGIQVYGDVVMNHKGGADATEMVKAVEVNPNNRNQEVSGEYTIEAWTKFDFPGRANTHSNFKWRWYHFDGVDWDQSRKLNNRIYKFRTKAWDWEVDTEFGNYDYLLFADIDMDHPEVVNELRNWGVWYTNTLGLDGFRIDAVKHIKYSFTRDWINHVRSAIGKNMFAVAEFWKNDLGAIENYLNKTNWNHSVFDVPLHFNLYYASKSGGNYDMRQIFNGTVVQKHPTHAVTFVDNHDSQPEESLESFVREWFKPLAYALTLTREQGYPSVFYGDYYGIPTHGVPAMKSKIDPILEARQKYAYGRQNDYLDHHNIIGWTREGNTAHPNSGLATIMSDGAGGNKWMFVGRNKAGQVWTDITGNKAGTVTINADGWGNFSVNGGSVSIWVNK

SEQ ID NO: 23821 - protein, 485 aa, Bacillus sp.
HHNGTNGTLMQYFEWYLPNDGNHWNRLRSDASNLKDKGISAVWIPPAWKGASQNDVGYGAYDLYDLGEFNQKGTIRTKYGTRNQLQAAVNALKSNGIQVYGDVVMNHKGGADATEMVKAVEVNPNNRNQEVSGEYTIEAWTKFDFPGRANTHSNFKWRWYHFDGVDWDQSRKLNNRIYKFRGDTKAYDWEVDTEFGNYDYLLYADIDLDHPEVVNELRNWGVWYTNTLGLDGFRIDAVKHIKYSFTRDWINHVRSAIGKNMFAVAEFWKNDLGAIENYLNKTNWNHSVFDVPLHFNLYYASKSGGNYDMRQIFNGTVVQKHPTHAVTFVDNHDSQPEESLESFVREWFKPLAYALTLTREQGYPSVFYGDYYGIPTHGVPAMKSKIDPILEARQKYAYGRQNDYLDHHNIIGWTREGNTAHPNSGLATIMSDGAGGNKWMFVGRNKAGQVWTDITGNKAGTVTINADGWGNFSVNGGSVSIWVNK

SEQ ID NO: 23822 - protein, 483 aa, Bacillus sp.
HHNGTNGTLMQYFEWYLPNDGNHWNRLRSDASNLKDKGISAVWIPPAWKGASQNDVGYGAYDLYDLGEFNQKGTIRTKYGTRNQLQAAVNALKSNGIQVYGDVVMNHKGGADATEMVKAVEVNPNNRNQEVSGEYTIEAWTKFDFPGRANTHSNFKWRWYHFDGVDWDQSRKLNNRIYKFRTKAWDWEVDTEFGNYDYLLYADIDMDHPEVVNELRNWGVWYTNTLGLDGFRIDAVKHIKYSFTRDWINHVRSAIGKNMFAVAEFWKNDLGAIQNYLNKTNWNHSVFDVPLHFNLYYASKSGGNYDMRQIFNGTVVQKHPTHAVTFVDNHDSQPEESLESFVREWFKPLAYALTLTREQGYPSVFYGDYYGIPTHGVPAMKSKIDPILEARQKYAYGRQNDYLDHHNIIGWTREGNTAHPNSGLATIMSDGAGGNKWMFVGRNKAGQVWTDITGNKAGTVTINADGWGNFSVNGGSVSIWVNK

SEQ ID NO: 23823 - protein, 483 aa, Bacillus sp.
HHNGTNGTLMQYFEWYLPNDGNHWNRLRSDASNLKDKGISAVWIPPAWKGASQNDVGYGAYDLYDLGEFNQKGTIRTKYGTRNQLQAAVNALKSNGIQVYGDVVMNHKGGADATEMVKAVEVNPNNRNQEVSGEYTIEAWTKFDFPGRANTHSNFKWRWYHFDGVDWDQSRKLNNRIYKFRTKAWDWEVDTEFGNYDYLLYADIDMDHPEVVNELRNWGVWYTNTLGLDGFRIDAVKHIKYSFTRDWINHVRSAIGKNMFAVAEFWKNDLGAIENYLNKTNWNHSVFDVPLHFNLYYASKSGGNYDMRQIFNGTVVRKHPTHAVTFVDNHDSQPEESLESFVREWFKPLAYALTLTREQGYPSVFYGDYYGIPTHGVPAMKSKIDPILEARQKYAYGRQNDYLDHHNIIGWTREGNTAHPNSGLATIMSDGAGGNKWMFVGRNKAGQVWTDITGNKAGTVTINADGWGNFSVNGGSVSIWVNK

SEQ ID NO: 23824 - protein, 483 aa, Bacillus sp.
HHNGTNGTLMQYFEWYLPNDGNHWNRLRSDASNLKDKGISAVWIPPAWKGASQNDVGYGAYDLYDLGEFNQKGTIRTKYGTRNQLQAAVNALKSNGIQVYGDVVMNHKGGADATEMVKAVEVNPNNRNQEVSGEYTIEAWTKFDFPGRANTHSNFKWRWYHFDGVDWDQSRKLNNRIYKFRTKAWDWEVDTEFGNYDYLLYADIDVDHPEVVNELRNWGVWYTNTLGLDGFRIDAVKHIKYSFTRDWINHVRSAIGKNMFAVAEFWKNDLGAIENYLNKTNWNHSVFDVPLHFNLYYASKSGGNYDMRQIFNGTVVQKHPTHAVTFVDNHDSQPEESLESFVREWFKPLAYALTLTREQGYPSVFYGDYYGIPTHGVPAMKSKIDPILEARQKYAYGRQNDYLDHHNIIGWTREGNTAHPNSGLATIMSDGAGGNKWMFVGRNKAGQVWTDITGNKAGTVTINADGWGNFSVNGGSVSIWVNK

SEQ ID NO: 23825 - protein, 483 aa, Bacillus sp.
HHNGTNGTLMQYFEWYLPNDGNHWNRLRSDASNLKDKGISAVWIPPAWKGTSQNDVGYGAYDLYDLGEFNQKGTIRTKYGTRNQLQAAVNALKSNGIQVYGDVVMNHKGGADATEMVKAVEVNPNNRNQEVSGEYTIEAWTKFDFPGRANTHSNFKWRWYHFDGVDWDQSRKLNNRIYKFRTKAWDWEVDTEFGNYDYLMYADIDMDHPEVVNELRNWGVWYTNTLGLDGFRIDAVKHIKYSFTRDWINHVRSAIGKNMFAVAEYWKNDLGAIENYLNKTNWNHSVFDVPLHFNLYYASKSGGNYDMRRIFNGTVVQKHPTHAVTFVDNHDTQPEESLESFVREWFKPLAYALTLTREQGYPLVFYGDYYGIPTHGVPAMKSKIDPILEARQKYAYGRQNDYLDHHNIIGWTREGNTAHPNSGLATIMSDGAGGNKWMFVGRNKAGQVWTDITGNKAGTVTINADGWGNFSVNGGSVSIWVNK

SEQ ID NO: 23826 - protein, 478 aa, Bacillus sp. TS-23
APINETMMQYFEWDLPNDGTLWTKVKNEAANLSSLGITALWLPPAYKGTSQSDVGYGVYDLYDLGEFNQKGTIRTKYGTKTQYIQAIQAAKAAGMQVYADVVFNHKAGADGTEFVDAVEVDPSNRNQETSGTYQIQAWTKFDFPGRGNTYSSFKWRWYHFDGTDWDESRKLNRIYKFRSTGKAWDWEVDTENGNYDYLMFADLDMDHPEVVTELKNWGTWYVNTTNIDGFRLDAVKHIKYSFFPDWLTYVRNQTGKNLFAVGEFWSYDVNKLHNYITKTEGSMSLFDAPLHNNFYTASKSSGYFDMRYLLNNTLMKDQPSLAVTLVDNHDTQPGQSLQSWVEPWFKPLAYAFILTRQEGYPCVFYGDYYGIPKYNIPGLKSKIDPLLIARRDYAYGTQRDYIDHQDIIGWTREGIDTKPNSGLAALITDGPGGSKWMYVGKKHAGKVFYDLTGNRSDTVTINADGWGEFKVNGGSVSI

SEQ ID NO: 23827 - protein, 478 aa, Bacillus sp. TS-23
APINETMMQYFEWDLPNDGTLWTKVKNEAANLSSLGITALWLPPAYKGTSQSDVGYGVYDLYDLGEFNQKGTIRTKYGTKTQYIQAIQAAKAAGMQVYADVVFNHKAGADGTEFVDAVEVDPSNRNQETSGTYQIQAWTKFDFPGRGNTYSSFKWRWYHFDGTDWDESRKLNRIYKFRSTGKAWDWEVDTENGNYDYLMFADLDMDHPEVVTELKNWGTWYVNTTNIDGFRLDAVKHIKYSFFPDWLTYVRNQTGKNLFAVGEFWSYDVNKLHNYITKTRGSMSLFDAPLHNNFYTASKSSGYFDMRYLLNNTLMKDQPSLAVTLVDNHDTQPGQSLQSWVEPWFKPLAYAFILTRQEGYPCVFYGDYYGIPKYNIPGLKSKIDPLLIARRDYAYGTQRDYIDHQDIIGWTREGIDTKPNSGLAALITDGPGGSKWMYVGKKHAGKVFYDLTGNRSDTVTINADGWGEFKVNGGSVSI

SEQ ID NO: 23828 - protein, 482 aa, Bacillus subtilis
HHNGTNGTLMQYFEWYLPNDGNHWNRLRSDASNLKDKGISAVWIPPAWKGASQNDVGYGAYDLYDLGEFNQKGTIRTKYGTRNQLQAAVNALKSNGIQVYGDVVMNHKGGADATEMVRAVEVNPNNRNQEVSGEYTIEAWTKFDFPGRANTHSNFKWRWYHFDGVDWDQSRKLNNRIYKFRTKAWDWEVDTENGNYDYLLYADIDMDHPEVVNELRNWGVWYTNTLGLDGFRIDAVKHIKYSFTRDWINHVRSAGKNMFAVAEFWKNDLGAIENYLNKTNWNHSVFDVPLHFNLYYASKSGGNYDMRQIFNGTVVQRHPTHAVTFVDNHDSQPEESLESFVREWFKPLAYALTLTREQGYPSVFYGDYYGIPTHGVPAMKSKIDPILEARQKYAYGRQNDYLDHHNIIGWTREGNTAHPNSGLATIMSDGAGGNKWMFVGRNKAGQVWTDITGNRAGTVTINADGWGEFSVNGGSVSIWVNK

SEQ ID NO: 23829 - protein, 484 aa, Synthetic construct
HHNGTNGTMMQYFEWYLPNDGNHWNRLNSDASNLKSKGITAVWIPPAWKGASQNDVGYGAYDLYDLGEFNQKGTVRTKYGTRSQLQAAVTSLKNNGIQVYGDVVMNHKAGADGTEFVDAVEVNPSNRNQETSGTYQIQAWTKFDFPGRGNTYSSFKWRWYHFDGTDWDESRKLNRIYKFRGTGKAWDWEVDTENGNYDYLMFADLDMDHPEVVNELRNWGVWYTNTLGLDGFRIDAVKHIKYSFTRDWINHVRSATGKNMFAVAEFWKNDLGAIENYLQKTNWNHSVFDVPLHYNLYNASKSGGNYDMRNIFNGTVVQRHPSHAVTFVDNHDSQPEEALESFVEEWFKPLAYALTLTREQGYPSVFYGDYYGIPTHGVPAMRSKIDPILEARQKYAYGKQNDYLDHHNIIGWTREGNTAHPNSGLATIMSDGAGGSKWMFVGRNKAGQVWSDITGNRTGTVTINADGWGNFSVNGGSVSIWVNK

SEQ ID NO: 23830 - protein, 484 aa, Synthetic construct
HHNGTNGTMMQYFEWYLPNDGNHWNRLNSDASNLKSKGITAVWIPPAWKGASQNDVGYGAYDLYDLGEFNQKGTVRTKYGTRSQLQAAVTSLKNNGIQVYGDVVMNHKAGADSTEWVDAVEVNPSNRNQETSGTYQIQAWTKFDFPGRGNTYSSFKWRWYHFDGTDWDESRKLNRIYKFRGTGKAWDWEVDTENGNYDYLMFADLDMDHPEVVNELRNWGVWYTNTLGLDGFRIDAVKHIKYSFTRDWINHVRSATGKNMFAVAEFWKNDLGAIENYLQKTNWNHSVFDVPLHYNLYNASKSGGNYDMRNIFNGTVVQRHPSHAVTFVDNHDSQPEEALESFVEEWFKPLAYALTLTREQGYPSVFYGDYYGIPTHGVPAMRSKIDPILEARQKYAYGKQNDYLDHHNIIGWTREGNTAHPNSGLATIMSDGAGGSKWMFVGRNKAGQVWSDITGNRTGTVTINADGWGNFSVNGGSVSIWVNK

SEQ ID NO: 23831 - protein, 484 aa, Synthetic construct
HHNGTNGTMMQYFEWYLPNDGNHWNRLRSDASNLKDKGISAVWIPPAWKGASQNDVGYGAYDLYDLGEFNQKGTIRTKYGTRNQLQAAVNALKSNGIQVYGDVVMNHKAGADGTEFVDAVEVNPSNRNQETSGTYQIQAWTKFDFPGRGNTYSSFKWRWYHFDGTDWDESRKLNRVYKFRGTGKAWDWEVDTENGNYDYLMFADLDMDHPEVVNELRNWGVWYTNTLGLDGFRIDAVKHIKYSFTRDWINHVRSATGKNMFAVAEFWKNDLGAIENYLNKTNWNHSVFDVPLHYNLYNASKSGGNYDMRQIFNGTVVQRHPMHAVTFVDNHDSQPEEALESFVEEWFKPLAYALTLTREQGYPSVFYGDYYGIPTHGVPAMKSKIDPILEARQKYAYGRQNDYLDHHNIIGWTREGNTAHPNSGLATIMSDGAGGNKWMFVGRNKAGQVWTDITGNRAGTVTINADGWGNFSVNGGSVSIWVNK

SEQ ID NO: 23832 - protein, 483 aa, Synthetic construct
SVPVNGTMMQYFEWYLPDDGTLWTKVANNAQSLANLGITALWLPPAYKGTSSSDVGYGVYDLYDLGEFNQKGTVRTKYGTKTQYIQAIQAAHTAGMQVYADVVFNHKAGADATEWVDAVEVNPSNRNQEVSGTYKIQAWTKFDFPGRGNTYSSFKWRWYHFDGTDWDQSRQLNRIYKFRGTGKAWDWEVDTENGNYDYLMFADLDMDHPEVVSELKNWGKWYVTTTNIDGFRLDAVKHIKYSFFPDWLSYVRTQTQKPLFAVGEFWSYDISKLHNYITKTNGSMSLFDAPLHNNFYIASKSGGYFDMRTLLNNTLMKDQPTLAVTLVDNHDTEPGQSLQSWVEPWFKPLAYAFILTRQEGYPCVFYGDYYGIPKYNIPALKSKLDPLLIARRDYAYGTQHDYIDSADIIGWTREGVAEKANSGLAALITDGPGGSKWMYVGKQHAGKTFYDLTGNRSDTVTINADGWGEFKVNGGSVSIWVPK

SEQ ID NO: 23833 - protein, 480 aa, Bacillus subtilis
APINETMMQYFEWDLPNDGTLWTKVKNEAANLSSLGITALWLPPAYKGTSQSDVGYGVYDLYDLGEFNQKGTIRTKYGTKTQYIQAIQAAKAAGMQVYADVVFNHKAGADGTEFVDAVEVDPSNRNQETSGTYQIQAWTKFDFPGRGNTYSSFKWRWYHFDGTDWDESRKLNRIYKFTGKAWDWPVDTENGNYDYLMFADLDMDHPEVVTELKNWGTWYVNTTNIDGFRLDAVKHIKYSFFPDWLTYVRNQTGKNLFAVGEFWSYDVNKLHNYITWTNGSMSLFDAPLHNNFYTASKSSGYFDMRYLLNNTLMKDQPSLAVTLVDNHDTQPGQSLQSWVEPWFKPLAYAFILTRQEGYPCVFYGDYYGIPKYNIPGLKSKIDPLLIARRDYAYGTQRDYIDHQDIIGWTREGIDTKPNSGLAALITDGPGGSKWMYVGKKHAGKVFYDLTGNRSDTVTINADGWGEFKVNGGSVSIWVAK

SEQ ID NO: 23834 - protein, 480 aa, Bacillus subtilis
APINETMMQYFEWDLPNDGTLWTKVKNEAANLSSLGITALWLPPAYKGTSQSDVGYGVYDLYDLGEFNQKGTIRTKYGTKTQYIQAIQAAKAAGMQVYADVVFNHKAGADGTEFVDAVEVDPSNRNQETSGTYQIQAWTKFDFPGRGNTYSSFKWRWYHFDGTDWDESRKLNRIYKFTGKAWDWPVDTENGNYDYLMFADLDMDHPEVVTELKNWGTWYVNTTNIDGFRLDAVKHIKYQFFPDWLTYVRNQTGKNLFAVGEFWSYDVNKLHNYITKTNGSMSLFDAPLHNNFYTASKSSGYFDMRYLLNNTLMKDQPSLAVTLVDNHDTQPGQSLQSWVEPWFKPLAYAFILTRQEGYPCVFYGDYYGIPKYNIPGLKSKIDPLLIARRDYAYGTQRDYIDHQDIIGWTREGIDTKPNSGLAALITDGPGGSKWMYVGKKHAGKVFYDLTGNRSDTVTINADGWGEFKVNGGSVSIWVAK

SEQ ID NO: 23835 - protein, 480 aa, Bacillus subtilis
APINETMMQYFEWDLPNDGTLWTKVKNEAANLSSLGITALWLPPAYKGTSQSDVGYGVYDLYDLGEFNQKGTIRTKYGTKTQYIQAIQAAKAAGMQVYADVVFNHKAGADGTEFVDAVEVDPSNRNQETSGTYQIQAWTKFDFPGRGNTYSSFKWRWYHFDGTDWDESRKLNRIYKFTGKAWDWPVDTENGNYDYLMFADLDMDHPEVVTELKNWGTWYVNTTNIDGFRLDAVKHIKYSFFPDWLTYVRNQTGKNLFAVGEFWSYDVNKLHNYITYTNGSMSLFDAPLHNNFYTASKSSGYFDMRYLLNNTLMKDQPSLAVTLVDNHDTQPGQSLQSWVEPWFKPLAYAFILTRQEGYPCVFYGDYYGIPKYNIPGLKSKIDPLLIARRDYAYGTQRDYIDHQDIIGWTREGIDTKPNSGLAALITDGPGGSKWMYVGKKHAGKVFYDLTGNRSDTVTINADGWGEFKVNGGSVSIWVAK

SEQ ID NO: 23836 - protein, 480 aa, Bacillus subtilis
APINETMMQYFEWDLPNDGTLWTKVKNEAANLSSLGITALWLPPAYKGTSQSDVGYGVYDLYDLGEFNQKGTIRTKYGTKTQYIQAIQAAKAAGMQVYADVVFNHKAGADGTEFVDAVEVDPSNRNQETSGTYQIQAWTKFDFPGRGNTYSSFKWRWYHFDGTDWDESRKLNRIYKFTGKAWDWPVDTENGNYDYLMFADLDMDHPEVVTELKNWGTWYVNTTNIDGFRLDAVKHIKYFFFPDWLTYVRNQTGKNLFAVGEFWSYDVNKLHNYITWTNGSMSLFDAPLHNNFYTASKSSGYFDMRYLLNNTLMKDQPSLAVTLVDNHDTQPGQSLQSWVEPWFKPLAYAFILTRQEGYPCVFYGDYYGIPKYNIPGLKSKIDPLLIARRDYAYGTQRDYIDHQDIIGWTREGIDTKPNSGLAALITDGPGGSKWMYVGKKHAGKVFYDLTGNRSDTVTINADGWGEFKVNGGSVSIWVAK

SEQ ID NO: 23837 - protein, 480 aa, Bacillus subtilis
APINETMMQYFEWDLPNDGTLWTKVKNEAANLSSLGITALWLPPAYKGTSQSDVGYGVYDLYDLGEFNQKGTIRTKYGTKTQYIQAIQAAKAAGMQVYADVVFNHKAGADGTEFVDAVEVDPSNRNQETSGTYQIQAWTKFDFPGRGNTYSSFKWRWYHFDGTDWDESRKLNRIYKFTGKAWDWPVDTENGNYDYLMFADLDMDHPEVVTELKNWGTWYVNTTNIDGFRLDAVKHIKYWFFPDWLTYVRNQTGKNLFAVGEFWSYDVNKLHNYITKTNGSMSLFDAPLHNNFYTASKSSGYFDMRYLLNNTLMKDQPSLAVTLVDNHDTQPGQSLQSWVEPWFKPLAYAFILTRQEGYPCVFYGDYYGIPKYNIPGLKSKIDPLLIARRDYAYGTQRDYIDHQDIIGWTREGIDTKPNSGLAALITDGPGGSKWMYVGKKHAGKVFYDLTGNRSDTVTINADGWGEFKVNGGSVSIWVAK

SEQ ID NO: 23838 - protein, 480 aa, Bacillus subtilis
APINETMMQYFEWDLPNDGTLWTKVKNEAANLSSLGITALWLPPAYKGTSQSDVGYGVYDLYDLGEFNQKGTIRTKYGTKTQYIQAIQAAKAAGMQVYADVVFNHKAGADGTEFVDAVEVDPSNRNQETSGTYQIQAWTKFDFPGRGNTYSSFKWRWYHFDGTDWDESRKLNRIYKFTGKAWDWPVDTENGNYDYLMFADLDMDHPEVVTELKNWGTWYVNTTNIDGFRLDAVKHIKYHFFPDWLTYVRNQTGKNLFAVGEFWSYDVNKLHNYITWTNGSMSLFDAPLHNNFYTASKSSGYFDMRYLLNNTLMKDQPSLAVTLVDNHDTQPGQSLQSWVEPWFKPLAYAFILTRQEGYPCVFYGDYYGIPKYNIPGLKSKIDPLLIARRDYAYGTQRDYIDHQDIIGWTREGIDTKPNSGLAALITDGPGGSKWMYVGKKHAGKVFYDLTGNRSDTVTINADGWGEFKVNGGSVSIWVAK

SEQ ID NO: 23839 - protein, 480 aa, Bacillus subtilis
APINETMMQYFEWDLPNDGTLWTKVKNEAANLSSLGITALWLPPAYKGTSQSDVGYGVYDLYDLGEFNQKGTIRTKYGTKTQYIQAIQAAKAAGMQVYADVVFNHKAGADGTEFVDAVEVDPSNRNQETSGTYQIQAWTKFDFPGRGNTYSSFKWRWYHFDGTDWDESRKLNRIYKFTGKAWDWPVDTENGNYDYLMFADLDMDHPEVVTELKNWGTWYVNTTNIDGFRLDAVKHIKYFFFPDWLTYVRNQTGKNLFAVGEFWSYDVNKLHNYITKTNGSMSLFDAPLHNNFYTASKSSGYFDMRYLLNNTLMKDQPSLAVTLVDNHDTQPGQSLQSWVEPWFKPLAYAFILTRQEGYPCVFYGDYYGIPKYNIPGLKSKIDPLLIARRDYAYGTQRDYIDHQDIIGWTREGIDTKPNSGLAALITDGPGGSKWMYVGKKHAGKVFYDLTGNRSDTVTINADGWGEFKVNGGSVSIWVAK

SEQ ID NO: 23840 - protein, 480 aa, Bacillus subtilis
APINETMMQYFEWDLPNDGTLWTKVKNEAANLSSLGITALWLPPAYKGTSQSDVGYGVYDLYDLGEFNQKGTIRTKYGTKTQYIQAIQAAKAAGMQVYADVVFNHKAGADGTEFVDAVEVDPSNRNQETSGTYQIQAWTKFDFPGRGNTYSSFKWRWYHFDGTDWDESRKLNRIYKFTGKAWDWPVDTENGNYDYLMFADLDMDHPEVVTELKNWGTWYVNTTNIDGFRLDAVKHIKYSFFPDWLTYVRNQTGKNLFAVGEFWSYDVNKLHNYITHTNGSMSLFDAPLHNNFYTASKSSGYFDMRYLLNNTLMKDQPSLAVTLVDNHDTQPGQSLQSWVEPWFKPLAYAFILTRQEGYPCVFYGDYYGIPKYNIPGLKSKIDPLLIARRDYAYGTQRDYIDHQDIIGWTREGIDTKPNSGLAALITDGPGGSKWMYVGKKHAGKVFYDLTGNRSDTVTINADGWGEFKVNGGSVSIWVAK

SEQ ID NO: 23841 - protein, 480 aa, Bacillus subtilis
APINETMMQYFEWDLPNDGTLWTKVKNEAANLSSLGITALWLPPAYKGTSQSDVGYGVYDLYDLGEFNQKGTIRTKYGTKTQYIQAIQAAKAAGMQVYADVVFNHKAGADGTEFVDAVEVDPSNRNQETSGTYQIQAWTKFDFPGRGNTYSSFKWRWYHFDGTDWDESRKLNRIYKFTGKAWDWPVDTENGNYDYLMFADLDMDHPEVVTELKNWGTWYVNTTNIDGFRLDAVKHIKYSFFPDWLTYVRNQTGKNLFAVGEFWSYDVNKLHNYITFTNGSMSLFDAPLHNNFYTASKSSGYFDMRYLLNNTLMKDQPSLAVTLVDNHDTQPGQSLQSWVEPWFKPLAYAFILTRQEGYPCVFYGDYYGIPKYNIPGLKSKIDPLLIARRDYAYGTQRDYIDHQDIIGWTREGIDTKPNSGLAALITDGPGGSKWMYVGKKHAGKVFYDLTGNRSDTVTINADGWGEFKVNGGSVSIWVAK

SEQ ID NO: 23842 - protein, 480 aa, Bacillus subtilis
APINETMMQYFEWDLPNDGTLWTKVKNEAANLSSLGITALWLPPAYKGTSQSDVGYGVYDLYDLGEFNQKGTIRTKYGTKTQYIQAIQAAKAAGMQVYADVVFNHKAGADGTEFVDAVEVDPSNRNQETSGTYQIQAWTKFDFPGRGNTYSSFKWRWYHFDGTDWDESRKLNRIYKFTGKAWDWPVDTENGNYDYLMFADLDMDHPEVVTELKNWGTWYVNTTNIDGFRLDAVKHIKYSFFPDWLTYVRNQTGKNLFAVGEFWSYDVNKLHNYITKTNGSMSLFDAPLHNNFYTASKSSGYFDMRYLLNNTLMKDQPSLAVTLVDNHDTQPGQSLQSWVEPWFKPLAYAFILTRQEGYPCVFYGDYYGIPKYNIPGLKSKIDPLLIARRDYAYGTQRDYIDHQDIIGWTREGIDTKPNSGLAALITDGPGGSKWMYVGKKHAGKVFYDLTGNRSDTVTINADGWGEFKVNGGSVSIWVAK

SEQ ID NO: 23843 - protein, 481 aa, Bacillus sp. TS-23
APINETMMQYFEWDLPNDGTLWTKVKNEAANLSSLGITALWLPPAYKGTSQSDVGYGVYDLYDLGEFNQKGTIRTKYGTKTQYIQAIQAAKAAGMQVYADVVFNHKAGADGTEFVDAVEVDPSNRNQETSGTYQIQAWTKFDFPGRGNTYSSFKWRWYHFDGTDWDESRKLNSRIYKFTGKAWDWEVDTENGNYDYLMFADLDMDHPEVVTELKNWGTWYVNTTNIDGFRLDAVKHIKYSFFPDWLTYVRNQTGKNLFAVGEFWSYDVNKLHNYITKTNGSMSLFDAPLHNNFYTASKSSGYFDMRYLLNNTLMKDQPSLAVTLVDNHDTQPGQSLQSWVEPWFKPLAYAFILTRQEGYPCVFYGDYYGIPKYNIPGLKSKIDPLLIARRDYAYGTQRDYIDHQDIIGWTREGIDTKPNSGLAALITDGPGGSKWMYVGKKHAGKVFYDLTGNRSDTVTINADGWGEFKVNGGSVSIWVAK

SEQ ID NO: 23844 - protein, 481 aa, Synthetic construct
APVNGTMMQYFEWDLPNDGTLWTKVKNEATNLFSLGITALWLPPAYKGTSQSDVGYGVYDLYDLGEFNQKGTIRTKYGTKTQYIQAIQAAKAAGMQVYADVVFNHKAGADGTEFVDAVEVDPSNRNQETSGTYQIQAWTKFDFPGRGNTYSSFKWRWYHFDGTDWDESRKLNRIYKFSTGKAWDWEVDTENGNYDYLMFADLDMDHPEVVTELKNWGTWYVNTTNIDGFRLDAVKHIKYSFFPDWLTYVRNQTGKNLFAVGEFWSYDVNKLHNYITKTNGSMSLFDAPLHNNFYTASKSSGYFDMRYLLNNTLMKDQPSLAVTLVDNHDTQPGQSLQSWVEPWFKPLAYAFILTRQEGYPCVFYGDYYGIPKYNIPGLKSKIDPLLIARRDYAYGTQRDYIDHQDIIGWTREGIDTKPNSGLAALITDGPGGSKWMYVGKKHAGKVFYDLTGNRSDTVTINADGWGEFKVNGGSVSIWVAK

SEQ ID NO: 23845 - protein, 480 aa, Geobacillus stearothermophilus
NGTLMQYFEWYTPNDGQHWKRLQNDSAYLAEHGITAVWIPPAYKGTSQADVGYGAYDLYDLGEFHQKGTVRTKYGTKGELQSAIKSLHSRDINVYGDVVINHKGGADATEDVTAVEVDPADRNRVISGEYLIKAWTHFHFPGRGSTYSDFKWHWYHFDGTDWDESRKLNRIYKFQGKAWDWEVSTENGNYDYLMYADLDMDHPEVVTELKNWGKWYVNTTNIDGFRLDAVKHIKFSFFPDWLSYVRSQTGKPLFTVGEYWSYDINKLHNYITKTNGTMSLFDAPLHNKFYTASKSGGAFDMRTLMTNTLMKDQPTLAVTFVDNHDTEPGQALQSWVDPWFKPLAYAFILTRQEGYPCVFYGDYYGIPQYNIPSLKSKIDPLLIARRDYAYGTQHDYLDHSDIIGWTREGVTEKPGSGLAALITDGPGGSKWMYVGKQHAGKVFYDLTGNRSDTVTINSDGWGEFKVNGGSVSVWVPRKTT

SEQ ID NO: 23846 - protein, 480 aa, Geobacillus stearothermophilus
NGTLMQYFEWYTPNDGQHWKRLQNDSAYLAEHGITAVWIPPAYKGTSQADVGYGAYDLYDLGEFHQKGTVRTKYGTKGELQSAIKSLHSRDINVYGDVVINHKGGADATEDVTAVEVDPADRNRVISGEYLIKAWTHFHFPGRGSTYSDFKWHWYHFDGTDWDESRKLNRIYKFQGKAWDWEVSSENGNYDYLMYADLDMDHPEVVTELKNWGKWYVNTTNIDGFRLDAVKHIKFSFFPDWLSYVRSQTGKPLFTVGEYWSYDINKLHNYITKTNGTMSLFDAPLHNKFYTASKSGGAFDMRTLMTNTLMKDQPTLAVTFVDNHDTEPGQALQSWVDPWFKPLAYAFILTRQEGYPCVFYGDYYGIPQYNIPSLKSKIDPLLIARRDYAYGTQHDYLDHSDIIGWTREGVTEKPGSGLAALITDGPGGSKWMYVGKQHAGKVFYDLTGNRSDTVTINSDGWGEFKVNGGSVSVWVPRKTT

SEQ ID NO: 23847 - protein, 480 aa, Geobacillus stearothermophilus
NGTLMQYFEWYTPNDGQHWKRLQNDSAYLAEHGITAVWIPPAYKGTSQADVGYGAYDLYDLGEFHQKGTVRTKYGTKGELQSAIKSLHSRDINVYGDVVINHKGGADATEDVTAVEVDPADRNRVISGEYLIKAWTHFHFPGRGSTYSDFKWHWYHFDGTDWDESRKLNRIYKFQGKAWDWEVDTENGNYDYLMYADIDMDHPEVVTELKNWGKWYVNTTNIDGFRLDAVKHIKFSFFPDWLSYVRSQTGKPLFTVGEYWSYDINKLHNYITKTNGTMSLFDAPLHNKFYTASKSGGAFDMRTLMTNTLMKDQPTLAVTFVDNHDTEPGQALQSWVDPWFKPLAYAFILTRQEGYPCVFYGDYYGIPQYNIPSLKSKIDPLLIARRDYAYGTQHDYLDHSDIIGWTREGVTEKPGSGLAALITDGPGGSKWMYVGKQHAGKVFYDLTGNRSDTVTINSDGWGEFKVNGGSVSVWVPRKTT

SEQ ID NO: 23848 - protein, 482 aa, Synthetic construct
APVNGTMMQYFEWDLPNDGTLWTKVKNEATNLFSLGITALWLPPAYKGTSQSDVGYGVYDLYDLGEFNQKGTIRTKYGTKTQYIQAIQAAKAAGMQVYADVVFNHKAGADSTEWVDAVEVNPSNRNQETSGTYQIQAWTKFDFPGRGNTYSSFKWRWYHFDGTDWDESRKLNRIYKFRGTGKAWDWEVDTENGNYDYLMFADLDMDHPEVVTELKNWGTWYVNTTNIDGFRLDAVKHIKYSFFPDWLTYVRNQTGKNLFAVGEFWSYDVNKLHNYITKTNGSMSLFDAPLHNNFYTASKSSGYFDMRYLLNNTLMKDQPSLAVTLVDNHDTQPGQSLQSWVEPWFKPLAYAFILTRQEGYPCVFYGDYYGIPKYNIPGLKSKIDPLLIARRDYAYGTQRDYIDHQDIIGWTREGIDTKPNSGLAALITDGPGGSKWMYVGKKHAGKVFYDLTGNRSDTVTINADGWGEFKVNGGSVSIWVAK

SEQ ID NO: 23849 - protein, 482 aa, Synthetic construct
APINETMMQYFEWDLPNDGTLWTKVKNEAANLSSLGITALWLPPAYKGTSQSDVGYGVYDLYDLGEFNQKGTIRTKYGTKTQYIQAIQAAKAAGMQVYADVVFNHKAGADSTEWVDAVEVNPSNRNQETSGTYQIQAWTKFDFPGRGNTYSSFKWRWYHFDGTDWDESRKLNRIYKFRGTGKAWDWEVDTENGNYDYLMFADLDMDHPEVVTELKNWGTWYVNTTNIDGFRLDAVKHIKYSFFPDWLTYVRNQTGKNLFAVGEFWSYDVNKLHNYITKTNGSMSLFDAPLHNNFYTASKSSGYFDMRYLLNNTLMKDQPSLAVTLVDNHDTQPGQSLQSWVEPWFKPLAYAFILTRQEGYPCVFYGDYYGIPKYNIPGLKSKIDPLLIARRDYAYGTQRDYIDHQDIIGWTREGIDTKPNSGLAALITDGPGGSKWMYVGKKHAGKVFYDLTGNRSDTVTINADGWGEFKVNGGSVSIWVAK

SEQ ID NO: 23850 - protein, 482 aa, Synthetic construct
APVNGTMMQYFEWDLPNDGTLWTKVKNEAANLSSLGITALWLPPAYKGTSQSDVGYGVYDLYDLGEFNQKGTVRTKYGTKDQYIQAIQAAKAAGMQVYADVVFNHKAGADATEWVDAVEVNPSNRNQEVSGTYKIQAWTKFDFPGRGNTYSSFKWRWYHFDGTDWDQSRQLNRIYKFRGTGKAWDWEVDTENGNYDYLMFADLDMDHPEVVTELKNWGKWYVNTTNVDGFRLDAVKHIKYSFFPDWLASVRSQTGKNLFAVGEFWSYDVNKLHNYITKTNGTMSLFDAPLHNNFYTASKSSGYFDMRYLLNNTLMKDQPVLAVTLVDNHDTQPGQSLQSWVEPWFKPLAYAFILTRQEGYPCVFYGDYYGIPKYNIPGLKSKIDPLLIARRDYAYGTQRDYIDHQDIIGWTREGIDSKPNSGLAALITDGPGGSKWMYVGKKHAGKVFYDLTGNRSDTVTINADGWGEFKVNGGSVSIWVAK

SEQ ID NO: 23851 - protein, 482 aa, Synthetic construct
APINETMMQYFEWDLPNDGTLWTKVKNEAANLSSLGITALWLPPAYKGTSQSDVGYGVYDLYDLGEFNQKGTIRTKYGTKTQYIQAIQAAKAAGMQVYADVVFNHKAGADGTEFVDAVEVNPSNRNQETSGTYQIQAWTKFDFPGRGNTYSSFKWRWYHFDGTDWDESRKLNRIYKFRGTGKAWDWEVDTENGNYDYLMFADLDMDHPEVVTELKNWGTWYVNTTNIDGFRLDAVKHIKYSFFPDWLTYVRNQTGKNLFAVGEFWSYDVNKLHNYITKTNGSMSLFDAPLHNNFYTASKSSGYFDMRYLLNNTLMKDQPSLAVTLVDNHDTQPGQSLQSWVEPWFKPLAYAFILTRQEGYPCVFYGDYYGIPKYNIPGLKSKIDPLLIARRDYAYGTQRDYIDHQDIIGWTREGIDTKPNSGLAALITDGPGGSKWMYVGKKHAGKVFYDLTGNRSDTVTINADGWGEFKVNGGSVSIWVAK

SEQ ID NO: 23852 - protein, 482 aa, Synthetic construct
APVNGTMMQYFEWDLPNDGTLWTKVKNEASSLSALGITALWLPPAYKGTSQADVGYGVYDLYDLGEFNQKGTIRTKYGTKTQYLQAIQAAKSAGMQVYADVVFNHKAGADGTELVDAVEVNPSDRNQEISGTYQIQAWTKFDFPGRGNTYSSFKWRWYHFDGTDWDESRKLNRIYKFRGTGKAWDWEVDTENGNYDYLMYADLDMDHPEVVAELKNWGKWYVNTTNVDGFRLDAVKHIKYSFFPDWLSYVRNQTGKNLFAVGEFWGYDVNKLHNYITKTNGAMSLFDAPLHNNFYIASKSSGYFDMRYLLNNTLMKDQPALAVTLVDNHDTQPGQSLQSWVEPWFKPLAYAFILTRQEGYPCVFYGDYYGIPKYNIPGLKSKIDPLLIARRDYAYGTQRDYIDHQDIIGWTREGIDAKPNSGLAALITDGPGGSKWMYVGKRHAGKVFYDLTGNRSDTVTINADGWGEFKVNGGSVSIWVAK

SEQ ID NO: 23853 - protein, 482 aa, Synthetic construct
APVNGTMMQYFEWDLPNDGTLWTKVKNEAANLSSLGITALWLPPAYKGTSQSDVGYGVYDLYDLGEFNQKGTIRTKYGTKTQYIQAIQAAKAAGMQVYADVVFNHKAGADGTEFVDAVEVNPSNRNQETSGTYQIQAWTKFDFPGRGNTYSSFKWRWYHFDGTDWDESRKLNRVYKFRGTGKAWDWEVDTENGNYDYLMFADLDMDHPEVVAELKNWGKWYVNTTNVDGFRLDAVKHIKYSFFPDWLSYVRNQTGKNLFAVGEFWSYDVNKLHNYITKTNGTMSLFDAPLHNNFYIASKSSGYFDMRYLLNNTLMKDQPALAVTLVDNHDTQPGQSLQSWVEPWFKPLAYAFILTRQEGYPCVFYGDYYGIPKYNIPGLKSKIDPLLIARRDYAYGTQRDYIDHPDIIGWTREGIDAKPNSGLAALITDGPGGSKWMYVGKKHAGKVFYDLTGNRSDTVTINADGWGQFKVNGGSVSIWVAK

SEQ ID NO: 23854 - protein, 519 aa, Bacillus sp.
MKQQKRLYARLLTLLFALIFLLPHSAAAAANTAPINETMMQYFEWDLPNDGTLWTKVKNEAANLSSLGITALWLPPAYKGTSQSDVGYGVYDLYDLGEFNQKGTIRTKYGTKTQYIQAIQAAKAAGMQVYADVVFNHKAGADGTEFVDAVEVDPSNRNQETSGTYQIQAWTKFDFPGRGNTYSSFKWRWYHFDGTDWDESRKLNRIYKFRSTGKAWDWEVDTENGNYDYLMFADLDMDHPEVVTELKNWGTWYVNTTNIDGFRLDAVKHIKYSFFPDWLTYVRNQTGKNLFAVGEFWSYDVNKLHNYITKTNGSMSLFDAPLHNNFYTASKSSGYFDMRYLLNNTLMKDQPSLAVTLVDNHDTQPGQSLQSWVEPWFKPLAYAFILTRQEGYPCVFYGDYYGIPKYNIPGLKSKIDPLLIARRDYAYGTQRDYIDHQDIIGWTREGIDTKPNSGLAALITDGPGGSKWMYVGKKHAGKVFYDLTGNRSDTVTINADGWGEFKVNGGSVSIWVAKTSNVT

SEQ ID NO: 23855 - protein, 531 aa, Anoxybacillus flavithermus
KKIFPWILSLLLLFLFIAPFSIQTEKVRAGSVPVNGTMMQYFEWYLPDDGTLWTKVANNAQSLANLGITALWLPPAYKGTSSSDVGYGVYDLYDLGEFNQKGTVRTKYGTKTQYIQAIQAAHTAGMQVYADVVFNHKAGADGTELVDAVEVNPSDRNQEISGTYQIQAWTKFDFPGRGNTYSSFKWRWYHFDGTDWDESRKLNRIYKFRGTGKAWDWEVDTENGNYDYLMYADLDMDHPEVVSELKNWGKWYVTTTNIDGFRLDAVKHIKYSFFPDWLSYVRTQTQKPLFAVGEFWSYDISKLHNYITKTNGSMSLFDAPLHNNFYIASKSGGYFDMRTLLNNTLMKDQPTLAVTLVDNHDTEPGQSLQSWVEPWFKPLAYAFILTRQEGYPCVFYGDYYGIPKYNIPALKSKLDPLLIARRDYAYGTQHDYIDSADIIGWTREGVAEKANSGLAALITDGPGGSKWMYVGKQHAGKTFYDLTGNRSDTVTINADGWGEFKVNGGSVSIWVPKTSTTSQITFTVNNATTVW

SEQ ID NO: 23856 - protein, 531 aa, Anoxybacillus contaminans
KKSFPWILSLLLLFSFIAPFSIQTEKVRAGSVPVNGTMMQYFEWYLPDDGTLWTKVANNAQSLANLGITALWLPPAYKGTSSSDVGYGVYDLYDLGEFNQKGTVRTKYGTKTQYIQAIQAAHTAGMQVYADVVFNHKAGADGTELVDAVEVNPSDRNQEISGTYQIQAWTKFDFPGRGNTYSSFKWRWYHFDGTDWDESRKLNRIYKFRGTGKAWDWEVDTENGNYDYLMYADLDMDHPEVVSELKNWGKWYVTTTNIDGFRLDAVKHIKYSFFPDWLSYVRTQTQKPLFAVGEFWSYDISKLHNYITKTNGSMSLFDAPLHNNFYIASKSGGYFDMRTLLNNTLMKDQPTLAVTLVDNHDTEPGQSLQSWVEPWFKPLAYAFILTRQEGYPCVFYGDYYGIPKYNIPALKSKLDPLLIARRDYAYGTQHDYIDSADIIGWTREGVAEKANSGLAALITDGPGGSKWMYVGKQHAGKTFYDLTGNRSDTVTINADGWGEFKVNGGSVSIWVPKISTTSQITFTVNNATTVW

SEQ ID NO: 23857 - protein, 531 aa, Bacteria
KKSFPWILSLLLLFLFIAPFSIQTEKVRAGSVPVNGTMMQYFEWYLPDDGTLWTKVANNAQSLANLGITALWLPPAYKGTSSSDVGYGVYDLYDLGEFNQKGTVRTKYGTKTQYIQAIQAAHTAGMQVYADVVFNHKAGADGTELVDAVEVNPSDRNQEISGTYQIQAWTKFDFPGRGNTYSSFKWRWYHFDGTDWDESRKLNRIYKFRGTGKAWDWEVDTENGNYDYLMYADLDMDHPEVVSELKNWGKWYVTTTNIDGFRLDAVKHIKYSFFPDWLSYVRTQTQKPLFSVGEFWSYDISKLHNYITKTNGSMSLFDAPLHNNFYIASKSGGYFDMRTLLNNTLMKDQPTLAVTLVDNHDTEPGQSLQSWVEPWFKPLAYAFILTRQEGYPCVFYGDYYGIPKYNIPALKSKLDPLLIARRDYAYGTQHDYIDSADIIGWTREGVAEKANSGLAALITDGPGGSKWMYVGKQHAGKTFYDLTGNRSDTVTINADGWGEFKVNGGSVSIWVPKTSTTSQITFTVNNATTVW

SEQ ID NO: 23858 - protein, 483 aa, Bacillus sp.
HHNGTNGTLMQYFEWYLPNDGNHWNRLRSDASNLKDKGISAVWIPPAWKGASQNDVGYGAYDLYDLGEFNQKGTIRTKYGTRNQLQAAVNALKSNGIQVYGDVVMNHKGGADATEMVKAVEVNPNNRNQEVSGEYTIEAWTKFDFPGRANTHSNFKWRWYHFDGVDWDQSRKLNNRIYKFRTKAWDWEVDTEFGNYDYLLYADIDMDHPEVVNELRNWGVWYTNTLGLDGFRIDAVKHIKYSFTRDWINHVRSAIGKNMFAVAEFWKNDLGAIENYLNKTNWNHSVFDVPLHFNLYYASKSGGNYDMRQIFNGTVVQKHPTHAVTFVDNHDSQPEESLESFVREWFKPLAYALTLTRFQGYPCVFYGDYYGIPTHGVPAMKSKIDPILEARQKYAYGRQNDYLDHHNIIGWTREGNTAHPNSGLATIMSDGAGGNKWMFVGRNKAGQVWTDITGNKAGTVTINADGWGNFSVNGGSVSIWVNK

SEQ ID NO: 23859 - protein, 483 aa, Bacillus sp.
HHNGTNGTLMQYFEWYLPNDGNHWNRLRSDASNLKDKGISAVWIPPAWKGASQNDVGYGAYDLYDLGEFNQKGTIRTKYGTRNQLQAAVNALKSNGIQVYGDVVMNHKGGADATEMVKAVEVNPNNRNQEVSGEYTIEAWTKFDFPGRANTHSNFKWRWYHFDGVDWDQSRKLNNRIYKFRTKAWDWEVDTEFGNYDYLMYADIDMDHPEVVNELRNWGVWYTNTLGLDGFRMDAVKHIKYSFVRDWINHVRSAIGKNMFAVAEFWKNDLGAIENYLNKTNWNHSVFDVPLHFNLYYASKSGGNYDMRQIFNGTVVQKHPTHAVTFVDNHDTQPEESLESFVREWFKPLAYALTLTREQGYPSVFYGDYYGIPTHGVPAMKSKIDPILEARQKYAYGRQNDYLDHHNIIGWTREGNTAHPNSGLATIMSDGAGGNKWMFVGRNKAGQVWTDITGNKAGTVTINADGWGNFSVNGGSVSIWVNK

SEQ ID NO: 23860 - protein, 483 aa, Bacillus sp.
HHNGTNGTLMQYFEWYLPNDGNHWNRLRSDASNLKDKGISAVWIPPAWKGASQNDVGYGAYDLYDLGEFNQKGTIRTKYGTRNQLQAAVNALKSNGIQVYGDVVMNHKGGADATEMVKAVEVNPNNRNQEVSGEYTIEAWTKFDFPGRANTHSNFKWRWYHFDGVDWDQSRKLNNRIYKFRTKAWDWEVDTEFGNYDYLMYADIDMDHPEVVNELRNWGVWYTNTLGLDGFRIDAVKHIKYSFVRDWINHVRSAIGKNMFAVAEFWKGDLGAIENYLNKTNWNHSVFDVPLHFNLYYASKSGGNYDMRQIFNGTVVQKHPTHAVTFVDNHDTQPEESLESFVREWFKPLAYALTLTREQGYPSVFYGDYYGIPTHGVPAMKSKIDPILEARQKYAYGRQNDYLDHHNIIGWTREGNTAHPNSGLATIMSDGAGGNKWMFVGRNKAGQVWTDITGNKAGTVTINADGWGNFSVNGGSVSIWVNK

SEQ ID NO: 23861 - protein, 483 aa, Bacillus sp.
HHNGTNGTLMQYFEWYLPNDGNHWNRLRSDASNLKDKGISAVWIPPAWKGASQNDVGYGAYDLYDLGEFNQKGTIRTKYGTRNQLQAAVNALKSNGIQVYGDVVMNHKGGADATEMVKAVEVNPNNRNQEVSGEYTIEAWTKFDFPGRANTHSNFKWRWYHFDGVDWDQSRKLNNRIYKFRTKAWDWEVDTEFGNYDYLLYADIDMDNPEVVNELRNWGVWYTNTLGLDGFRIDAVKHIKYSFTRDWINHVRSAIGKNMFAVAEFWKNDLGAIENYLNKTNWNHSVFDVPLHFNLYYASKSGGNYDMRQIFNGTVVQKHPTHAVTFVDNHDSQPEESLESFVREWFKPLAYALTLTREQGYPSIFYGDYYGIPTHGVPAMKSKIDPILEARQKYAYGRQNDYLDHHNIIGWTREGNTAHPNSGLATIMSDGAGGNKWMFVGRNKAGQVWTDITGNKAGTVTINADGWGNFSVNGGSVSIWVNK

SEQ ID NO: 23862 - protein, 483 aa, Bacillus sp.
HHNGTNGTLMQYFEWYLPNDGNHWNRLRSDASNLKDKGISAVWIPPAWKGASQNDVGYGAYDLYDLGEFNQKGTIRTKYGTRNQLQAAVNALKSNGIQVYGDVVMNHKGGADATEMVKAVEVNPNNRNQEVSGEYTIEAWTKFDFPGRANTHSNFKWRWYHFDGVDWDQSRKLNNRIYKFRTKAWDWEVDTEFGNYDYLMYADIDMDHPEVVNELRNWGVWYTNTLGLDGFRIDAVKHIKYSFVRDWINHVRSAIGKNLFAVAEFWKNDLGAIENYLNKTNWNHSVFDVPLHFNLYYASKSGGNYDMRQIFNGTVVQKHPTHAVTFVDNHDTQPEESLESFVREWFKPLAYALTLTREQGYPSVFYGDYYGIPTHGVPAMKSKIDPILEARQKYAYGRQNDYLDHHNIIGWTREGNTAHPNSGLATIMSDGAGGNKWMFVGRNKAGQVWTDITGNKAGTVTINADGWGNFSVNGGSVSIWVNK

SEQ ID NO: 23863 - protein, 483 aa, Bacillus sp.
HHNGTNGTLMQYFEWYLPNDGNHWNRLRSDASNLKDKGISAVWIPPAFKGASQNDVGYGAYDLYDLGEFNQKGTIRTKYGTRNQLQAAVNALKSNGIQVYGDVVMNHKGGADATEMVKAVEVNPNNRNQEVSGEYTIEAWTKFDFPGRANTHSNFKWRWYHFDGVDWDQSRKLNNRIYKFRTKAWDWEVDTEFGNYDYLMYADIDMDHPEVVNELRNWGVWYTNTLGLDGFRIDAAKHIKYSFTRDWINHVRSAIGKNMFAVAEFWKNDLGAIENYLNKTNWNHSVFDVPLHFNLYYASKSGGNYDMRQIFNGTVVQKHPTHAVTFVDNHDTQPEESLESFVREWFKPLAYALTLTREQGYPSVFYGDYYGIPTHGVPAMKSKIDPILEARQKYAYGRQNDYLDHHNIIGWTREGNTAHPNSGLATIMSDGAGGNKWMFVGRNKAGQVWTDITGNKAGTVTINADGWGNFSVNGGSVSIWVNK

SEQ ID NO: 23864 - protein, 483 aa, Bacillus subtilis
HHNGTNGTLMQYFEWYLPNDGNHWNRLRSDASNLKDKGISAVWIPPAWKGASQNDVGYGAYDLYDLGEFNQKGTIRTKYGTRNQLQAAVNALKSNGIQVYGDVVMNHKGGADATEMVRAVEVNPNNRNQEVSGEYTIEAWTKFDFPGRANTHSNFKWRWYHFDGVDWDQSRKLNNRIYKFRTKAWDWEVDTENGNYDYLLYADIDMDHPEVVNELRNWGVWYTNTLGLDGFRIDAVKHIKYSFTRDWINHVRSAIGKNMFAVAEFWKNDLGAIENYLNKTNWNHSVFDVPLHFNLYYASKSGGNYDMRQIFNGTVVQRHPTHAVTFVDNHDSQPEESLESFVREWFKPLAYALTLTREQGYPSVFYGDYYGIPTHGVPAMKSKIDPILEARQKYAYGRQNDYLDHHNIIGWTREGNTAHPNSGLATIMSDGAGGNKWMFVGRNKAGQVWTDITGNRAGTVTINADGWGEFSVNGGSVSIWVNK

SEQ ID NO: 23865 - protein, 485 aa, Bacillus sp.
HHNGTNGTMMQYFEWYLPNDGNHWNRLNSDASNLKSKGITAVWIPPAWKGASQNDVGYGAYDLYDLGEFNQKGTVRTKYGTRSQLQAAVTSLKNNGIQVYGDVVMNHKGGADATEMVRAVEVNPNNRNQEVTGEYTIEAWTRFDFPGRGNTHSSFKWRWYHFDGVDWDQSRRLNNRIYKFRGHGKAWDWEVDTEFGNYDYLMYADYDLDHPETTNEVRNWGVWYTNTLGLDGFRIDAVKHIKYSFTRDWINHVRSATGKNMFAVAEFWKNDLGAIENYLQKTNWNHSVFDVPLHYNLYNASKSGGNYDMRNIFNGTVVQRHPSHAVTFVDNHDSQPEEALESFVEEWFKPLAYALTLTREQGYPSVFYGDYYGIPTHGVPAMRSKIDPILEARQKYAYGKQNDYLDHHNIIGWTREGNTAHPNSGLATIMSDGAGGSKWMFVGRNKAGQVWSDITGNRTGTVTINADGWGNFSVNGGSVSIWVNK

SEQ ID NO: 23866 - protein, 483 aa, Bacillus sp.
HHNGTNGTLMQYFEWYLPNDGNHWNRLRSDASNLKDKGISAVWIPPAWKGASQNDVGYGAYDLYDLGEFNQKGTIRTKYGTRNQLQAAVNALKSNGIQVYGDVVMNHKGGADATEMVKAVEVNPNNRNQEVSGEYTIEAWTKFDFPGRANTHSNFKWRWYHFDGVDYDQSRKLNNRIYKFRTKAWDWEVDTEFGNYDYLMYADIDMDNPEVVNELRNWGVWYTNTLGLDGFRIDAVKHIKYSFTRDWINHVRSAIGKNMFAVAEFWKNDLGAIENYLNKTNWNHSVFDVPLHFNLYYASKSGGNYDMRQIFNGTVVQKHPTHAVTFVDNHDSQPEEALESFVREWFKPLAYALTLTREQGYPSVFYGDYYGIPTHGVPAMKSKIDPILEARQKYAYGRQNDYLDHHNIIGWTREGNTAHPNSGLATIMSDGAGGNKWMFVGRNKAGQVWTDITGNKAGTVTINADGWGNFSVNGGSVSIWVNK

SEQ ID NO: 23867 - protein, 483 aa, Bacillus sp. SP70
HHNGTNGTMMQYFEWYLPNDGNHWNRLNSDASNLKSKGITAVWIPPAWKGASQNDVGYGAYDLYDLGEFNQKGTVRTKYGTRSQLQAAVTSLKNNGIQVYGDVVMNHKGGADATEMVRAVEVNPNNRNQEVTGEYTIEAWTRFDFPGRGNTHSSFKWRWYHFDGVDYDQSRRLNNRIYKFRGKAWDWEVDTENGNYDYLMYADIDMDHPEVVNELRNWGVWYTNTLGLDGFRIDAVKHIKYSFTRDWINHVRSATGKNMPAVAEFWKNDLGAIENYLQKTNWNHSVFDVPLHYNLYNASKSGGNYDMRNIFNGTVVQRHPSHAVTFVDNHDSQPEEALESFVEEWFKPLAYALTLTREQGYPSVFYGDYYGIPTHGVPAMRSKIDPILEARQKYAYGKQNDYLDHHNIIGWTREGNTAHPNSGLATIMSDGAGGSKWMFVGRNKAGQVWSDITGNRTGTVTINADGYGNFSVNRQSVSIWVNK

SEQ ID NO: 23868 - protein, 485 aa, Bacillus sp.
HHNGTNGTLMQYFEWYLPNDGNHWNRLRSDASNLKDKGISAVWIPPAWKGASQNDVGYGAYDLYDLGEFNQKGTIRTKYGTRNQLQAAVNALKSNGIQVYGDVVMNHKGGADATEMVRAVEVNPNNRNQEVSGEYTIEAWTKFDFPGRANTHSNFKWRWYHFDGVDWDQSRKLNNRIYKFRGDGKGWDWEVDTENGNYDYLLYADIDMDHPEVINELRNWGVWYTNTLGLDGFRIDAVKHIKYSFTRDWINHVRSATGKNMFAVAEFWKNDLGAIENYLNKTNWNHSVFDVPLHFNLYNASKSGGNYDMRQIFNGTVVQRHPTHAVTFVDNHDSQPEESLESFVREWFKPLAYALTLTREQGYPSVFYGDYYGIPTHGVPAYKSKIDPILEARQKYAYGRQNDYLDHHNIIGWTREGNTAHPNSGLATIMSDGAGGNKWMFVGRNKAGQVWTDITGNRAGTVTINADGWGEFSVNGGSVSIWVNK

SEQ ID NO: 23869 - protein, 483 aa, Bacillus sp.
HHNGTNGTLMQYFEWYLPNDGNHWNRLRSDASNLKDKGISAVWIPPAWKGASQNDVGYGAYDLYDLGEFNQKGTIRTKYGTRNQLQAAVNALKSNGIQVYGDVVMNHKGGADATEMVKAVEVNPNNRNQEVSGEYTIEAWTKFDFPGRANTHSNFKWRWYHFDGVDWDQSRKLNNRIYKFRTKAWDWEVDTEFGNYDYLMYADIDMDHPEVVNELRNWGVWYTNTLGLDGFRIDAVKHIKYSFVRDWINHVRSAIGKNMFAVAEFWKNDLGAIENYLNKTNWNHSVFDVPLHFNLYYASKSGGNYDMRQIFNGTVVRKHPTHAVTFVDNHDTQPEESLESFVREWFKPLAYALTLTREQGYPSVFYGDYYGIPTHGVPAMKSKIDPILEARQKYAYGRQNDYLDHHNIIGWTREGNTAHPNSGLATIMSDGAGGNKWMFVGRNKAGQVWTDITGNKAGTVTINADGWGNFSVNGGSVSIWVNK

SEQ ID NO: 23870 - protein, 483 aa, Bacillus sp.
HHNGTNGTLMQYFEWYLPNDGNHWNRLRSNASDLKDVGISAVWIPPAWKGASQNDVGYGAYDLYDLGEFNQKGTIRTKYGTRNQLQAAVNALKSNGIQVYGDVVMNHKGGADATEMVKAVEVNPNNRNQEVSGEYTIEAWTKFDFPGRANTHSNFKWRWYHFDGVDWDQSRKLNNRIYKFRTKAWDWEVDTEFGNYDYLMYADIDMDHPEVVNELRNWGVWYTNTLGLDGFRIDAVKHIKYSFTRDWINHVRSAIGKNMFAVAEFWKNDLGAIENYLNKTNWNHSVFDVPLHFNLYYASKSGGNYDMRQIFNGTVVQKHPTHAVTFVDNHDSQPEESLESFVREWFKPLAYALTLTREQGYPSVFYGDYYGIPTHGVPAMRSKIDPILEARQKYAYGRQNDYLDHHNIIGWTREGNTAHPNSGLATIMSDGAGGNKWMFVGRNKAGQVWTDITGNKAGTVTINADGWGNFSVNGGSVSIWVNK

SEQ ID NO: 23871 - protein, 483 aa, Bacillus sp.
HHNGTNGTLMQYFEWYLPNDGNHWNRLRSDASNLKDKGISAVWIPPAWKGQSQNDVGYGAYDLYDLGEFNQKGTIRTKYGTRNQLQAAVNALKSNGIQVYGDVVMNHKMGADATEMVKAVEVNPNNRNQEVSGEYTIEAWTKFDFPGRANTHSNFKWRWYHFDGVDWDQSRKLNNRIYKFRTKAWDWEVDTEFGNYDYLLGADIDMDHPEVVNELRNWGVWYTNTLGLDGFRIDAVKHIKYSFTRDWINHVRSAIGKNMFAVAEFWKNDLGAIENYLNKTNWNHSVFDVPLHFNLYYASKSGGNYDMRQIFNGTVVQKHPTHAVTFVDNHDSQPEESLESFVREWFKPLAYALTLTREQGYPSVFYGDYYGIPTHGVPAMKSKIDPILEARQKYAYGRQNDYLDHHNIIGWTREGNTAHPNSGLATIMSDGAGGNKWMFVGRNKAGQVWTDITGNKAGTVTINADGWGNFSVNGGSVSIWVNK

SEQ ID NO: 23872 - protein, 483 aa, Bacillus sp.
HHNGTNGTLMQYFEWYLPNDGNHWNRLRSDASNLKDKGISAVWIPPAWKGASQNDVGYGAYDLYDLGEFNQKGTIRTKYGTRNQLQAAVNALKSNGIQVYGDVVMNHKGGADATEMVKAVEVNPNNRNQEVSGEYTIEAWTKFDFPGRANTHSNFKWRWYHFDGVDWDQSRKLNNRIYKFRTKAWDWEVDTEFGNYDYLMYADIDMDHPEVVNELRNWGVWYTNTLGLDGFRIDAVKHIKYSFVRDWINHVRSAIGKNMFAVAEFWKNDLGAIENYLNKTNWNHSVFDVPLHFNLYYASKSGGNYDMRQIFNGTVVHKHPTHAVTFVDNHDTQPEESLESFVREWFKPLAYALTLTREQGYPSVFYGDYYGIPTHGVPAMKSKIDPILEARQKYAYGRQNDYLDHHNIIGWTREGNTAHPNSGLATIMSDGAGGNKWMFVGRNKAGQVWTDITGNKAGTVTINADGWGNFSVNGGSVSIWVNK

SEQ ID NO: 23873 - protein, 483 aa, Bacillus sp.
HHNGTNGTLLQYFEWYLPNDGNHWNRLRSDASNLKDKGISAVWIPPAWKGASQNDVGYGAYDLYDLGEFNQKGTIRTKYGTRNQLQAAVNALKSNGIQVYGDVVMNHKGGADATEMVKAVEVNPNNRNQEVSGEYTIEAWTKFDFPGRANTHSNFKWRWYHFDGVDWDQSRKLNNRIYKFRTKAWDWEVDTEFGNYDYLLYADIDMDHPEVVNELRNWGVWYTNTLGLDGFRIDAVKHIKYSFTRDWINHVRSAIGKNLFAVAEFWKNDLGAIENYLNKTNWNHSVFDVPLHFNLYYASKSGGNYDMRQIFNGTVVQKHPTHAVTFVDNHDSQPEESLESFVREWFKPLAYALTLTREQGYPSVFYGDYYGIPTHGVPAMKSKIDPILEARQKYAYGRQNDYLDHHNIIGWTREGNTAHPNSGLATIMSDGAGGNKWMFVGRNKAGQVWTDITGNKAGTVTINADGWGNFSVNGGSVSIWVNK

SEQ ID NO: 23874 - protein, 483 aa, Bacillus sp.
HHNGTNGTLMQYFEWYLPNDGNHWNRLRSDASNLKDKGISAVWIPPAWKGASQNDVGYGAYDLYDLGEFNQKGTIRTKYGTRNQLQAAVNALKSNGIQVYGDVVMNHKGGADATEMVKAVEVNPNNRNQEVSGEYTIEAWTKFDFPGRANTHSNFKWRWYHFDGVDWDQSRKLNNRIYKFRTKAWDWEVDTEFGNYDYLLYADIDMDNPEVVNELRNWGVWYTNTLGLDGFRIDAVKHIKYSFTRDWINHVRSAIGKNMFAVAEFWKNDLGAIENYLNKTNWNHSVFDVPLHFNLYYASKSGGNYDMRQIFNGTVVQKHPTHAVTFVDNHDSQPEEALESFVREWFKPLAYALTLTREQGYPSVFYGDYYGIPTHGVPAMKSKIDPILEARQKYAYGRQNDYLDHHNIIGWTREGNTAHPNSGLATIMSDGAGGNKWMFVGRNKAGQVWTDITGNKAGTVTINADGWGNFSVNGGSVSIWVNK

SEQ ID NO: 23875 - protein, 483 aa, Bacillus sp. SP70
HHNGTNGTMMQYFEWYLPNDGNHWNRLNSDASNLKSKGITAVWIPPAWKGASQNDVGYGAYDLYDLGEFNQKGTVRTKYGTRSQLQAAVTSLKNNGIQVYGDVVMNHKGGADATEMVRAVEVNPNNRNQEVTGEYTIEAWTRFDFPGRGNTHSSFKWRYYHFDGVDFDQSRRLNNRIYKFRGKAWDWEVDTENGNYDYLMYADIDMDHPEVVNELRNWGVWYTNTLGLDGFRIDAVKHIKYSFTRDWINHVRSATGKGMFAVAEFWKNDLGAIENYLQKTNWNHSVFDVPLHYNLYNASKSGGNYDMRNIFNGTVVQRHPSHAVTFVDNHDSQPEEALESFVEEWFKPLAYALTLTREQGYPSVFYGDYYGIPTHGVPAMRSKIDPILEARQKYAYGKQNDYLDHHNIIGWTREGNTAHPNSGLATIMSDGAGGSKRMFVGRNKAGQVWSDITGNRTGTVTINADGYGNFSVNRGSVSIWVNK

SEQ ID NO: 23876 - protein, 483 aa, Bacillus sp. 707
HHNGTNGTMMQYFEWYLPNDGNHWNRLNSDASNLKSKGITAVWIPPAYKGTSQNDVGYGAYDLYDLGEFNQKGTVRTKYGTRSQLQAAVTSLKNNGIQVYGDVVMNHKGGADATEMVRAVEVNPSNRNQEISGDYTIEAWTKFDFPGRGNTHSSFKWRWYHFDGVDWDQSRRLNNRIYKFHGKAWDWPVSSENGNYDYLMYADIDMDHPDVVNELRNWGVWYANTLGLDGFRIDAVKHIKYSFTRDWINHVRSATGKNMFAVAEFWKNDLGAIENYLQKTNWNHSVFDVPLHYNLYNASKSGGNYDMRNIFNGTVVQRHPSHAVTFVDNHDSQPEEALESFVEEWFKPLAYALTLTREQGYPSVFYGDYYGIPTHGVPAMRSKIDPILEARQKYAYGKQNDYLDHHNIIGWTREGNTAHPNSGLATIMSDGAGGSKWMNVGKNNAGEVWYDITGNRTGTVTINADGWGQFHVNGGSVSIWVNK

SEQ ID NO: 23877 - protein, 485 aa, Bacillus sp.
HHNGTNGTMMQYFEWYLPNDGNHWNRLNSDASNLKSKGITAVWIPPAWKGASQNDVGYGAYDLYDLGEFNQKGTVRTKYGTRSQLQAAVTSLKNNGIQVYGDVVMNHKGGADATEMVRAVEVNPNNRNQEVTGEYTIEAWTRFDFPGRGNTHSSFKWRWYHFDGVDWDQSRRLNNRIYKFRGHGKAWDWEVDTEFGNYDYLMYADYDYDHPETTNEIRNWGVWYTNTLGLDGFRIDAVKHIKYSFTRDWINHVRSATGKNMFAVAEFWKNDLGAIENYLQKTNWNHSVFDVPLHYNLYNASKSGGNYDMRNIFNGTVVQRHPSHAVTFVDNHDSQPEEALESFVEEWFKPLAYALTLTREQGYPSVFYGDYYGIPTHGVPAMRSKIDPILEARQKYAYGKQNDYLDHHNIIGWTREGNTAHPNSGLATIMSDGAGGSKWMFVGRNKAGQVWSDITGNRTGTVTINADGWGNFSVNGGSVSIWVNK

SEQ ID NO: 23878 - protein, 485 aa, Bacillus sp.
HHNGTNGTMMQYFEWYLPNDGNHWNRLNSDASNLKSKGITAVWIPPAWKGASQNDVGYGAYDLYDLGEFNQKGTVRTKYGTRSQLQAAVTSLKNNGIQVYGDVVMNHKGGADATEMVRAVEVNPNNRNQEVTGEYTIEAWTRFDFPGRGNTHSSFKWRWYHFDGVDWDQSRRLNNRIYKFRGHGKAWDWEVDTEFGNYDYLMYADYDFDHPETTNEVRNWGVWYTNTLGLDGFRIDAVKHIKYSFTRDWINHVRSATGKNMFAVAEFWKNDLGAIENYLQKTNWNHSVFDVPLHYNLYNASKSGGNYDMRNIFNGTVVQRHPSHAVTFVDNHDSQPEEALESFVEEWFKPLAYALTLTREQGYPSVFYGDYYGIPTHGVPAMRSKIDPILEARQKYAYGKQNDYLDHHNIIGWTREGNTAHPNSGLATIMSDGAGGSKWMFVGRNKAGQVWSDITGNRTGTVTINADGWGNFSVNGGSVSIWVNK

SEQ ID NO: 23879 - protein, 483 aa, Bacillus sp.
HHNGTNGTLMQYFEWYLPNDGNHWNRLRSDASNLKDKGISAVWIPPAWKGASQNDVGYGAYDLYDLGEFNQKGTIRTKYGTRNQLQAAVNALKSNGIQVYGDVVMNHKGGADATEMVKAVEVNPNNRNQEVSGEYTIEAWTKFDFPGRANTHSNFKWRWYHFDGVDWDQSRKLNNRIYKFRTKAWDWEVDTEFGNYDYLMYADIDMDHPEVVNELRNWGVWYTNTLGLDGFRIDAVKHIKYSFVRDWINHVRSAIGKNMFAVAEFWKNDLGAIENYLNKTNWNHSVFDVPLHFNLYYASKSGGNYDMRQIFNGTVVQKHPTHAVTFVDNHDTQPEESLESFVREWFKPLAYALTLTREQGYPSIFYGDYYGIPTHGVPAMKSKIDPILEARQKYAYGRQNDYLDHHNIIGWTREGNTAHPNSGLATIMSDGAGGNKWMFVGRNKAGQVWTDITGNKAGTVTINADGWGNFSVNGGSVSIWVNK

SEQ ID NO: 23880 - protein, 485 aa, Bacillus sp.
HHNGTNGTMMQYFEWYLPNDGNHWNRLNSDASNLKSKGITAVWIPPAWKGASQNDVGYGAYDLYDLGEFNQKGTVRTKYGTRSQLQAAVTSLKNNGIQVYGDVVMNHKGGADATEMVRAVEVNPNNRNQEVTGEYTIEAWTRFDFPGRGNTHSSFKWRWYHFDGVDWDQSRRLNNRIYKFRGHGKAWDWEVDTEFGNYDYLMYADYDYDHPETTNEMRNWGVWYTNTLGLDGFRIDAVKHIKYSFTRDWINHVRSATGKNMFAVAEFWKNDLGAIENYLQKTNWNHSVFDVPLHYNLYNASKSGGNYDMRNIFNGTVVQRHPSHAVTFVDNHDSQPEEALESFVEEWFKPLAYALTLTREQGYPSVFYGDYYGIPTHGVPAMRSKIDPILEARQKYAYGKQNDYLDHHNIIGWTREGNTAHPNSGLATIMSDGAGGSKWMFVGRNKAGQVWSDITGNRTGTVTINADGWGNFSVNGGSVSIWVNK

SEQ ID NO: 23881 - protein, 483 aa, Bacillus sp.
HHNGTNGTLMQYFEWYLPNDGNHWNRLRSDASNLKDKGISAVWIPPAFKGASQNDVGYGAYDLYDLGEFNQKGTIRTKYGTRNQLQAAVNALKSNGIQVYGDVVMNHKGGADATEMVKAVEVNPNNRNQEVSGEYTIEAWTKFDFPGRANTHSNFKWRWYHFDGVDYDQSRKLNNRIYKFRTKAWDWEVDTEFGNYDYLLYADIDMDHPEVVNELRNWGVWYTNTLGLDGFRIDAVKHIKYSFTRDWINHVRSAIGKNMFAVAEFWKNDLGAIENYLNKTNWNHSVFDVPLHFNLYYASKSGGNYDMRQIFNGTVVQKHPTHAVTFVDNHDSQPEESLESFVREWFKPLAYALTLTREQGYPSVFYGDYYGIPTHGVPAMKSKIDPILEARQKYAYGRQNDYLDHHNIIGWTREGNTAHPNSGLATIMSDGAGGNKWMFVGRNKAGQVWTDITGNKAGTVTINADGWGNFSVNGGSVSIWVNK

SEQ ID NO: 23882 - protein, 483 aa, Bacillus sp.
HHNGTNGTLMQYFEWYLPNDGNHWNRLRSDASNLKDKGISAVWIPPAWKGASQNDVGYGAYDLYDLGEFNQKGTIRTKYGTRNQLQAAVNALKSNGIQVYGDVVMNHKGGADATEMVKAVEVNPNNRNQEVSGEYTIEAWTKFDFPGRANTHSNFKWRWYHFDGVDYDQSRKLNNRIYKFRTKAWDWEVDTEFGNYDYLLYADIDMDHPEVVNELRNWGVWYTNTLGLDGFRIDAVKHIKYSFTRDWINHVRSAIGKNMFAVAEFWKNDLGAIENYLNKTNWNHSVFDVPLHFNLYYASKSGGNYDMRQIFNGTVVQKHPTHAVTFVDNHDSQPEESLESFVREWFKPLAYALTLTREQGYPSIFYGDYYGIPTHGVPAMKSKIDPILEARQKYAYGRQNDYLDHHNIIGWTREGNTAHPNSGLATIMSDGAGGNKWMFVGRNKAGQVWTDITGNKAGTVTINADGWGNFSVNGGSVSIWVNK

SEQ ID NO: 23883 - protein, 485 aa, Bacillus sp.
HHNGTNGTMMQYFEWYLPNDGNHWNRLNSDASNLKSKGITAVWIPPAWKGASQNDVGYGAYDLYDLGEFNQKGTVRTKYGTRSQLQAAVTSLKNNGIQVYGDVVMNHKGGADATEMVRAVEVNPNNRNQEVTGEYTIEAWTRFDFPGRGNTHSSFKWRWYHFDGVDWDQSRRLNNRIYKFRGHGKAWDWEVDTEFGNYDYLMYADYDYDHPETTNEVRNWGVWYTNTLGLDGFRIDAVKHIKYSFTRDWINHVRSATGKNMFAVAEFWKNDLGAIENYLQKTNWNHSVFDVPLHYNLYNASKSGGNYDMRNIFNGTVVQRHPSHAVTFVDNHDSQPEEALESFVEEWFKPLAYALTLTREQGYPSVFYGDYYGIPTHGVPAMRSKIDPILEARQKYAYGKQNDYLDHHNIIGWTREGNTAHPNSGLATIMSDGAGGSKWMFVGRNKAGQVWSDITGNRTGTVTINADGWGNFSVNGGSVSIWVNK

SEQ ID NO: 23884 - protein, 485 aa, Bacillus sp.
HHNGTNGTMMQYFEWYLPNDGNHWNRLRSDASNLKDKGISAVWIPPAWKGASQNDVGYGAYDLYDLGEFNQKGTIRTKYGTRNQLQAAVNALKSNGIQVYGDVVMNHKGGADATEMVRAVEVNPNNRNQEVSGEYTIEAWTKFDFPGRGNTHSNFKWRWYHFNGVDWDQSRKLNNRIYKFANDGTNWNWEVDTENGNYDYLMYANIDFSHPEVVNELRNWGVWYTNTLGLDGFRIDAVKHIKYSFTRDWINHVRSATGKNMFAVAEFWKNDLGAIENYLNKTNWNHSVFDVPLHYNLYNASKSGGNYDMRQIFNGTVVQRHPMHAVTFVDNHDSQPEEALESFVEEWFKPLAYALTLTREQGYPSVFYGDYYGIPTHGVPAMKSKIDPILEARQKYAYGRQNDYLDHHNIIGWTREGNTAHPNSGLATIMSDGAGGNKWMFVGRNKAGQVWTDITGNRAGTVTINADGWGNFSVNGGSVSIWVNK

SEQ ID NO: 23885 - protein, 483 aa, Bacillus sp.
HHNGTNGTLMQYFEWYLPNDGNHWNRLRSDASNLKDKGISAVWIPPAWKGASQNDVGYGAYDLYDLGEFNQKGTIRTKYGTRNQLQAAVNALKSNGIQVYGDVVMNHKGGADATEMVKAVEVNPNNRNQEVSGEYTIEAWTKFDFPGRANTHSNFKWRWYHFDGVDWDQSRKLNNRIYKFRTKAWDWEVDTEFGNYDYLLYADIDMDHPEVVNELRNWGVWYTNTLGLDGFRIDAVKHIKYSFTRDWINHVRSAIGKNMFAVAEFWKNDLGAIENYLNKTNWNHSVFDVPLHFNLYYASKSGGNYDMRQIFNGTVVQKHPTHAVTFVDNHDSQPEEALESFVREWFKPLAYALTLTREQGYPSIFYGDYYGIPTHGVPAMKSKIDPILEARQKYAYGRQNDYLDHHNIIGWTREGNTAHPNSGLATIMSDGAGGNKWMFVGRNKAGQVWTDITGNKAGTVTINADGWGNFSVNGGSVSIWVNK

SEQ ID NO: 23886 - protein, 485 aa, Bacillus sp.
HHNGTNGTMMQYFEWYLPNDGNHWNRLNSDASNLKSKGITAVWIPPAWKGASQNDVGYGAYDLYDLGEFNQKGTVRTKYGTRSQLQAAVTSLKNNGIQVYGDVVMNHKGGADATEMVRAVEVNPNNRNQEVTGEYTIEAWTRFDFPGRGNTHSSFKWRWYHFDGVDWDQSRRLNNRIYKFRGHGKAWDWEVDTEFGNYDYLMYADIDYDHPETTNEVRNWGVWYTNTLGLDGFRIDAVKHIKYSFTRDWINHVRSATGKNMFAVAEFWKNDLGAIENYLQKTNWNHSVFDVPLHYNLYNASKSGGNYDMRNIFNGTVVQRHPSHAVTFVDNHDSQPEEALESFVEEWFKPLAYALTLTREQGYPSVFYGDYYGIPTHGVPAMRSKIDPILEARQKYAYGKQNDYLDHHNIIGWTREGNTAHPNSGLATIMSDGAGGSKWMFVGRNKAGQVWSDITGNRTGTVTINADGWGNFSVNGGSVSIWVNK

SEQ ID NO: 23887 - protein, 483 aa, Bacillus sp.
HHNGTNGTLMQYFEWYLPNDGNHWNRLRSDASNLKDKGISAVWIPPAWKGASQNDVGYGAYDLYDLGEFNQKGTIRTKYGTRNQLQAAVNALKSNGIQVYGDVVMNHKGGADATEMVKAVEVNPNNRNQEVSGEYTIEAWTKFDFPGRANTHSNFKWRWYHFDGVDWDQSRKLNNRIYKFRTKAWDWEVDTEFGNYDYLMYADIDMDHPEVVNELRNWGVWYTNTLGLDGFRIDAVKHIKYSFVRDWINHVRSAIGKNMFAVAEFWKNDLGAIENYLNKTNWNHSVFDVPLHFNLYYASKSGGNYDMRQIFNGTVVQHHPTHAVTFVDNHDTQPEESLESFVREWFKPLAYALTLTREQGYPSVFYGDYYGIPTHGVPAMKSKIDPILEARQKYAYGRQNDYLDHHNIIGWTREGNTAHPNSGLATIMSDGAGGNKWMFVGRNKAGQVWTDITGNKAGTVTINADGWGNFSVNGGSVSIWVNK

SEQ ID NO: 23888 - protein, 483 aa, Bacillus sp.
HHNGTNGTLMQYFEWYLPNDGNHWNRLRSDASNLKDKGISAVWIPPAWKGASQNDVGYGAYDLYDLGEFNQKGTIRTKYGTRNQLQAAVNALKSNGIQVYGDVVMNHKGGADATEMVKAVEVNPNNRNQEVSGEYTIEAWTKFDFPGRANTHSNFKWRWYHFDGVDWDQSRKLNNRIYKFRTKAWDWEVDTEFGNYDYLMYADIDMDHPEVVNELRNWGVWYTNTLGLDGFRIDAVKHIKYSFVRDWINHVRSAIGKNMFAVAEFWKNDLGAIENYLNKTNWNHSVFDVPLHFNLYYASKSGGNYDMRQIFNGTVVQKHPTHAVTFVDNHDTQPEESLESFVREWFKPLAYALTLTREQGYPSVFYGDYYGIPTHGVPAMKSKIDPILEARQKYAYGRQNDYLDHHNIIGWTREGNTAHPNSGLATIMSDGAGGNKWMFVGRNKAGQVWTDITGNKAGTVTINADGWGNFSCNGGSVSIWVNK

SEQ ID NO: 23889 - protein, 483 aa, Bacillus sp.
HHNGTNGTLMQYFEWYLPNDGNHWNRLRSDASNLKDKGISAVWIPPAWKGASQNDVGYGAYDLYDLGEFNQKGTIRTKYGTRNQLQAAVNALKSNGIQVYGDVVMNHKGGADATEMVKAVEVNPNNRNQEVSGEYTIEAWTKFDFPGRANTHSNFKWRWYHFDGVDYDQSRKLNNRIYKFRTKAWDWEVDTEFGNYDYLLYADIDMDNPEVVNELRNWGVWYTNTLGLDGFRIDAVKHIKYSFTRDWINHVRSAIGKNMFAVAEFWKNDLGAIENYLNKTNWNHSVFDVPLHFNLYYASKSGGNYDMRQIFNGTVVQKHPTHAVTFVDNHDSQPEESLESFVREWFKPLAYALTLTREQGYPSVFYGDYYGIPTHGVPAMKSKIDPILEARQKYAYGRQNDYLDHHNIIGWTREGNTAHPNSGLATIMSDGAGGNKWMFVGRNKAGQVWTDITGNKAGTVTINADGWGNFSVNGGSVSIWVNK

SEQ ID NO: 23890 - protein, 483 aa, Bacillus sp.
HHNGTNGTLMQYFEWYLPNDGNHWNRLRSDASNLKDVGISAVWIRPAWKGASQNDVGYGAYDLYDLGEFNQKGTIRTKYGTRNQLQAAVNALKSNGIQVYGDVVMNHKGGADATEMVKAVEVNPNNRNQEVSGEYTIEAWTKFDFPGRANTHSNFKWRWYHFDGVDWDQSRKLNNRIYKFRTKAWDWEVDTEFGNYDYLLYADIDMDHPEVVNELRNWGVWYTNTLGLDGFRIDAVKHIKYSFTRDWINHVRSAIGKNMFAVAEFWKNDLGAIENYLNKTNWNHSVFDVPLHFNLYYASKSGGNYDMRQIFNGTVVQKHPTHAVTFVDNHDSQPEESLESFVREWFKPLAYALTLTREQGYPSVFYGDYYGIPTHGVPAMRSKIDPILEARQKYAYGRQNDYLDHHNIIGWTREGNTAHPNSGLATIMSDGAGGNKWMFVGRNKAGQVWTDITGNKAGTVTINADGWGNFSVNGGSVSIWVNK

SEQ ID NO: 23891 - protein, 485 aa, Bacillus sp.
HHNGTNGTMMQYFEWYLPNDGNHWNRLNSDASNLKSKGITAVWIPPAWKGASQNDVGYGAYDLYDLGEFNQKGTVRTKYGTRSQLQAAVTSLKNNGIQVYGDVVMNHKGGADATEMVRAVEVNPNNRNQEVTGEYTIEAWTRFDFPGRGNTHSSFKWRWYHFDGVDWDQSRRLNNRIYKFRGHGKAWDWEVDTEFGNYDYLMYADYDLDHPETTNEMRNWGVWYTNTLGLDGFRIDAVKHIKYSFTRDWINHVRSATGKNMFAVAEFWKNDLGAIENYLQKTNWNHSVFDVPLHYNLYNASKSGGNYDMRNIFNGTVVQRHPSHAVTFVDNHDSQPEEALESFVEEWFKPLAYALTLTREQGYPSVFYGDYYGIPTHGVPAMRSKIDPILEARQKYAYGKQNDYLDHHNIIGWTREGNTAHPNSGLATIMSDGAGGSKWMFVGRNKAGQVWSDITGNRTGTVTINADGWGNFSVNGGSVSIWVNK

SEQ ID NO: 23892 - protein, 483 aa, Bacillus sp.
HHNGTNGTLMQYFEWYLPNDGNHWNRLRSDASNLKDKGISAVWIPPAWKGASQNDVGYGAYDLYDLGEFNQKGTIRTKYGTRNQLQAAVNALKSNGIQVYGDVVMNHKGGADATEMVKAVEVNPNNRNQEVSGEYTIEAWTKFDFPGRANTHSNFKWRWYHFDGVDYDQSRKLNNRIYKFRTKAWDWEVDTEFGNYDYLLYADIDMDHPEVVNELRNWGVWYTNTLGLDGFRIDAVKHIKFSFTRDWINHVRSAIGKNMFAVAEFWKNDLGAIENYLNKTNWNHSVFDVPLHFNLYYASKSGGNYDMRQIFNGTVVQKHPTHAVTFVDNHDSQPEESLESFVREWFKPLAYALTLTREQGYPSVFYGDYYGIPTHGVPAMKSKIDPILEARQKYAYGRQNDYLDHHNIIGWTREGNTAHPNSGLATIMSDGAGGNKWMFVGRNKAGQVWTDITGNKAGTVTINADGWGNFSVNGGSVSIWVNK

SEQ ID NO: 23893 - protein, 483 aa, Bacillus sp. SP70
HHNGTNGTMMQYFEWYLPNDGNHWNRLNSDASNLKSKGITAVWIPPAWKGASQNDVGYGAYDLYDLGEFNQKGTVRTKYGTRSQLQAAVTSLKNNGIQVYGDVVMNHKGGADATEMVRAVEVNPNNRNQEVTGEYTIEAWTRFDFPGRGNTHSSFKWRWYHFDGVDYDQSRRLNNRIYKFRGKAWDWEVDTENGNYDYLMYADIDMDHPEVVNELRNWGVWYTNTLGLDGFRIDAVKHIKYSFTRDWINHVRSATGKPMPAVAEFWKNDLGAIENYLQKTNWNHSVFDVPLHYNLYNASKSGGNYDMRNIFNGTVVQRHPSHAVTFVDNHDSQPEEALESFVEEWFKPLAYALTLTREQGYPSVFYGDYYGIPTHGVPAMRSKIDPILEARQKYAYGKQNDYLDHHNIIGWTREGNTAHPNSGLATIMSDGAGGSKRMFVGRNKAGQVWSDITGNRTGTVTINADGWGNFSVNERSVSIWVNK

SEQ ID NO: 23894 - protein, 483 aa, Bacillus sp.
HHNGTNGTLMQYFEWYLPNDGNHWNRLRSDASNLKDKGISAVWIPPAWKGASQNDVGYGAYDLYDLGEFNQKGTIRTKYGTRNQLQAAVNALKSNGIQVYGDVVMNHKGGADATEMVKAVEVNPNNRNQEVSGEYTIEAWTKFDFPGRANTHSNFKWRWYHFDGVDWDQSRKLNNRIYKFRTKAWDWEVDTEFGNYDYLMYADIDMDHPEVVNELRNWGVWYTNTLGLDGFRIDAVKHIKYSFVRDWINHVRSAIGKNMFAVAEFWKNDLGAIENYLNKTNWNHSVFDVPLHFNLYYASKSGGNYDMRQIFNGTVVQKHPTHAVTFVDNHDTQPEESLESFVREWFKPLAYALTLTREQGYPSVFYGDYYGIPTHGVPAMKSKIDPILEARQKYAWGRQNDYLDHHNIIGWTREGNTAHPNSGLATIMSDGAGGNKWMFVGRNKAGQVWTDITGNKAGTVTINADGWGNFSVNGGSVSIWVNK

SEQ ID NO: 23895 - protein, 485 aa, Bacillus sp.
HHNGTNGTLMQYFEWYLPNDGNHWNRLRSDASNLKDKGISAVWIPPAWKGASQNDVGYGAYDLYDLGEFNQKGTIRTKYGTRNQLQAAVNALKSNGIQVYGDVVMNHKGGADATEMVRAVEVNPNNRNQEVSGEYTIEAWTKFDFPGRANTHSNFKWRWYHFDGVDWDQSRKLNNRIYKFRGDGKGWDWEVDTENGNYDYLIYADIDMDHPEVTNELRNWGVWYTNTLGLDGFRIDAVKHIKYSFTRDWINHVRSATGKNMFAVAEFWKNDLGAIENYLNKTNWNHSVFDVPLHFNLYYASKSGGNYDMRQIFNGTVVQRHPTHAVTFVDNHDSQPEESLESFVREWFKPLAYALTLTREQGYPSVFYGDYYGIPTHGVPAMKSKIDPILEARQKYAYGRQNDYLDHHNIIGWTREGNTAHPNSGLATIMSDGAGGNKWMFVGRNKAGQVWTDITGNRAGTVTINADGWGEFSVNGGSVSIWVNK

SEQ ID NO: 23896 - protein, 483 aa, Bacillus sp.
HHNGTNGTLMQYFEWYLPNDGNHWNRLRSDASNLKDKGISAVWIPPAWKGASQNDVGYGAYDLYDLGEFNQKGTIRTKYGTRNQLQAAVNALKSNGIQVYGDVVMNHKGGADATEMVKAVEVNPNNRNQEVSGEYTIEAWTKFDFPGRANTHSNFKWRWYHFDGVDWDQSRKLNNRIYKFRTKAWDWEVDTEFGNYDYLLYADIDMDHPEVVNELRNWGVWYTNTLGLDGFRIDAVKHIKFSFTRDWINHVRSAIGKNMFAVAEFWKNDLGAIENYLNKTNWNHSVFDVPLHFNLYYASKSGGNYDMRQIFNGTVVQKHPTHAVTFVDNHDTQPEESLESFVREWFKPLAYALTLTREQGYPSVFYGDYYGIPTHGVPAMKSKIDPILEARQKYAYGRQNDYLDHHNIIGWTREGNTAHPNSGLATIMSDGAGGNKWMFVGRNKAGQVWTDITGNKAGTVTINADGWGNFSVNGGSVSIWVNK

SEQ ID NO: 23897 - protein, 483 aa, Bacillus sp.
HHNGTNGTLMQYFEWYLPNDGNHWNRLRSDASNLKDKGISAVWIPPAWKGASQNDVGYGAYDLYDLGEFNQKGTIRTKYGTRNQLQAAVNALKSNGIQVYGDVVMNHKGGADATEMVKAVEVNPNNRNQEVSGEYTIEAWTKFDFPGRANTHSNFKWRWYHFDGVDWDQSRKLNNRIYKFRTKAWDWEVDTEFGNYDYLMYADIDMDHPEVVNELRNWGVWYTNTLGLDGFRIDAVKHIKYSFVRDWINHVRSAIGKNMFAVAEFWKNDLGAIENYLNKTNWNHSVFDVPLHFNLYYASKSGGNYDMRQIFNGTVVQRHPTHAVTFVDNHDTQPEESLESFVREWFKPLAYALTLTREQGYPSVFYGDYYGIPTHGVPAMKSKIDPILEARQKYAYGRQNDYLDHHNIIGWTREGNTAHPNSGLATIMSDGAGGNKWMFVGRNKAGQVWTDITGNKAGTVTINADGWGNFSVNGGSVSIWVNK

SEQ ID NO: 23898 - protein, 483 aa, Bacillus sp. SP70
HHNGTNGTMMQYFEWYLPNDGNHWNRLNSDASNLKSKGITAVWIPPAWKGASQNDVGYGAYDLYDLGEFNQKGTVRTKYGTRSQLQAAVTSLKNNGIQVYGDVVMNHKGGADATEMVRAVEVNPNNRNQEVTGEYTIEAWTRFDFPGRGNTHSSFKWRYYHFDGVDYDQSRRLNNRIYKFRGKAWDWEVDTENGNYDYLMYADIDMDHPEVVNELRNWGVWYTNTLGLDGFRIDAVKHIKYSFTRDWINHVRSATGKPMFAVAEFWKNDLGAIENYLQKTNWNHSVFDVPLHYNLYNASKSGGNYDMRNIFNGTVVQRHPSHAVTFVDNHDSQPEEALESFVEEWFKPLAYALTLTREQGYPSVFYGDYYGIPTHGVPAMRSKIDPILEARQKYAYGKQNDYLDHHNIIGWTREGNTAHPNSGLATIMSDGAGGSKYMFVGRNKAGQVWSDITGNRTGTVTINADGWGNFSVNQQSVSIWVNK

SEQ ID NO: 23899 - protein, 483 aa, Bacillus sp.
HHNGTNGTLMQYFEWYLPNDGNHWNRLRSDASNLKDKGISAVWIPPAWKGASQNDVGYGAYDLYDLGEFNQKGTIRTKYGTRNQLQAAVNALKSNGIQVYGDVVMNHKGGADATEMVKAVEVNPNNRNQEVSGEYTIEAWTKFDFPGRANTHSNFKWRWYHFDGVDWDQSRKLNNRIYKFRTKAWDWEVDTEFGNYDYLMYADIDMDHPEVVNELRNWGVWYTNTLGLDGFRIDAVKHIKYSFVRDWINHVRSAIGKNMFAVAEFWKNDLGAIENYLNKTNWNHSVFDVPLHFNLYYASKSGGNYDMRQIFNGTVVQKHPTHAVTFVDNHDTQPEESLESFVREWFKPLAYALTLTREQGYPSVFYGDYYGIPTHGVPAMKSKIDPILEARQKYAYGRQNDYLDHHNIIGWTRLGNTAHPNSGLATIMSDGAGGNKWMFVGRNKAGQVWTDITGNKAGTVTINADGWGNFSVNGGSVSIWVNK

SEQ ID NO: 23900 - protein, 483 aa, Bacillus sp.
HHNGTNGTLMQYFEWYLPNDGNHWNRLRSDASNLKDKGISAVWIPPAWKGASQNDVGYGAYDLYDLGEFNQKGTIRTKYGTRNQLQAAVNALKSNGIQVYGDVVMNHKGGADATEMVKAVEVNPNNRNQEVSGEYTIEAWTKFDFPGRANTHSNFKWRWYHFDGVDYDQSRKLNNRIYKFRTKAWDWEVDTEFGNYDYLMYADIDMDNPEVVNELRNWGVWYTNTLGLDGFRIDAVKHIKYSFTRDWINHVRSAIGKNMFAVAEFWKNDLGAIENYLNKTNWNHSVFDVPLHFNLYFASKSGGNYDMRQIFNGTVVQKHPTHAVTFVDNHDSQPEEALESFVREWFKPLAYALTLTREQGYPSVFYGDYYGIPTHGVPAMKSKIDPILEARQKYAYGRQNDYLDHHNIIGWTREGNTAHPNSGLATIMSDGAGGNKWMFVGRNKAGQVWTDITGNKAGTVTINADGWGNFSVNGGSVSIWVNK

SEQ ID NO: 23901 - protein, 483 aa, Bacillus sp. SP70
HHNGTNGTMMQYFEWYLPNDGNHWNRLNSDASNLKSKGITAVWIPPAWKGASQNDVGYGAYDLYDLGEFNQKGTVRTKYGTRSQLQAAVTSLKNNGIQVYGDVVMNHKGGADATEMVRAVEVNPNNRNQEVTGEYTIEAWTRFDFPGRGNTHSSFKWRWYHFDGVDYDQSRRLNNRIYKFRGKAWDWEVDTENGNYDYLMYADIDMDHPEVVNELRNWGVWYTNTLGLDGFRIDAVKHIKYSFTRDWINHVRSATGKDMFAVAEFWKNDLGAIENYLQKTNWNHSVFDVPLHYNLYNASKSGGNYDMRNIFNGTVVQRHPSHAVTFVDNHDSQPEEALESFVEEWFKPLAYALTLTREQGYPSVFYGDYYGIPTHGVPAMRSKIDPILEARQKYAYGKQNDYLDHHNIIGWTREGNTAHPNSGLATIMSDGAGGSKRMFVGRNKAGQVWSDITGNRTGTVTINADGVGNFSVNQQSVSIWVNK

SEQ ID NO: 23902 - protein, 483 aa, Bacillus sp.
HHNGTNGTLMQYFEWYLPNDGNHWNRLRSDASNLKDKGISAVWIPPAWKGASQNDVGYGAYDLYDLGEFNQKGTIRTKYGTRNQLQAAVNALKSNGIQVYGDVVMNHKGGADATEMVKAVEVNPNNRNQEVSGEYTIEAWTKFDFPGRANTHSNFKWRWYHFDGVDWDQSRKLNNRIYKFRTKAWDWEVDTEFGNYDYLMYADIDMDHPEVVNELRNWGVWYTNTLGLDGFRIDAVKHIKYSFVRDWINHVRSAIGKNMFAVAEFWKNDLGAIENYLNKTNWNHSVFDVPLHFNLYYASKSGGNYDMRQIFNGTVVQKHPTHAVTFVDNHDTQPEESLESFVREWFKPLAYALTLTREQGYPCVFYGDYYGIPTHGVPAMKSKIDPILEARQKYAYGRQNDYLDHHNIIGWTREGNTAHPNSGLATIMSDGAGGNKWMFVGRNKAGQVWTDITGNKAGTVTINADGWGNFSVNGGSVSIWVNK

SEQ ID NO: 23903 - protein, 483 aa, Bacillus sp. SP70
HHNGTNGTMMQYFEWYLPNDGNHWNRLNSDASNLKSKGITAVWIPPAWKGASQNDVGYGAYDLYDLGEFNQKGTVRTKYGTRSQLQAAVTSLKNNGIQVYGDVVMNHKGGADATEMVRAVEVNPNNRNQEVTGEYTIEAWTRFDFPGRGNTHSSFKWRWYHFDGVDYDQSRRLNNRIYKFRGKAWDWEVDTENGNYDYLMYADIDMDHPEVVNELRNWGVWYTNTLGLDGFRIDAVKHIKYSFTRDWINHVRSATGKDMFAVAEFWKNDLGAIENYLQKTNWNHSVFDVPLHYNLYNASKSGGNYDMRNIFNGTVVQRHPSHAVTFVDNHDSQPEEALESFVEEWFKPLAYALTLTREQGYPSVFYGDYYGIPTHGVPAMRSKIDPILEARQKYAYGKQNDYLDHHNIIGWTREGNTAHPNSGLATIMSDGAGGSKRMFVGRNKAGQVWSDITGNRTGTVTINADGYGNFSVNEKSVSIWVNK

SEQ ID NO: 23904 - protein, 483 aa, Bacillus sp.
HHNGTNGTLMQYFEWYLPNDGNHWNRLRSDASNLKDKGISAVWIPPAWKGASQNDVGYGAYDLYDLGEFNQKGTIRTKYGTRNQLQAAVNALKSNGIQVYGDVVMNHKGGADATEFVKAVEVNPNNRNQEVSGEYTIEAWTKFDFPGRANTHSNFKWRWYHFDGVDWDQSRKLNNRIYKFRTKAWDWEVDTEFGNYDYLLYADIDMDHPEVVNELRNWGVWYTNTLGLDGFRIDAAKHIKYSFTRDWINHVRSAIGKNMFAVAEFWKNDLGAIENYLNKTNWNHSVFDVPLHFNLYYASKSGGNYDMRQIFNGTVVQKHPTHAVTFVDNHDTQPEESLESFVREWFKPLAYALTLTREQGYPSVFYGDYYGIPTHGVPAMKSKIDPILEARQKYAYGRQNDYLDHHNIIGWTREGNTAHPNSGLATIMSDGAGGNKWMFVGRNKAGQVWTDITGNKAGTVTINADGWGNFSVNGGSVSIWVNK

SEQ ID NO: 23905 - protein, 483 aa, Bacillus subtilis
HHNGTNGTLMQYFEWYLPNDGNHWNRLRSDASNLKDKGISAVWIPPAWTGASQNDVGYGAYDLYDLGEFNQKGTIRTKYGTRNQLQAAVNALKSNGIQVYGDVVMNHKGGADATEMVKAVEVNPNNRNQEVSGEYTIEAWTKFDFPGRANTHSNFKWRWYHFDGVDWDQSRKLNNRIYKFRTKAWDWEVDTEFGNYDYLMYADIDMDHPEVVNELRNWGVWYTNTLGLDGFRIDAVKHIKYSFIRDWINHVRSAIGKNMFAVAEFWKNDLGAIENYLNKTNWNHSVFDVPLHFNLYYASKSGGNYDMRQIFNGTVVQKHPTHAVTFVDNHDTQPEESLESFVREWFKPLAYALTLTREQGYPSVFYGDYYGIPTHGVPAMKSKIDPILEARQKYAYGRQNDYLDHHNIIGWTREGNTAHPNSGLATIMSDGAGGNKWMFVGRNKAGQVWTDITGNKAGTVTINADGWGNFSVNGGSVSIWVNK

SEQ ID NO: 23906 - protein, 483 aa, Bacillus sp.
HHNGTNGTLMQYFEWYLPNDGNHWNRLRSDASNLKDKGISAVWIPPAWKGASQNDVGYGAYDLYDLGEFNQKGTIRTKYGTRNQLQAAVNALKSNGIQVYGDVVMNHKGGADATEMVKAVEVNPNNRNQEVSGEYTIEAWTKFDFPGRANTHSNFKWRWYHFDGVDWDQSRKLNNRIYKFRTKAWDWEVDTEFGNYDYLMYADIDMDHPEVVNELRNWGVWYTNTLGLDGFRIDAVKHIKYSFVRDWINHVRSAIGKNMFAVAEFWKNDLGAIENYLNKTNWNHSVFDVPLHFNLYYASKSGGNYDMRQIFNGTVVQKHPTHAVTFVDNHDTQPEESLESFVREWFKPLAYALTLTREQGYPMVFYGDYYGIPTHGVPAMKSKIDPILEARQKYAYGRQNDYLDHHNIIGWTREGNTAHPNSGLATIMSDGAGGNKWMFVGRNKAGQVWTDITGNKAGTVTINADGWGNFSVNGGSVSIWVNK

SEQ ID NO: 23907 - protein, 485 aa, Bacillus sp.
HHNGTNGTMMQYFEWYLPNDGNHWNRLNSDASNLKSKGITAVWIPPAWKGASQNDVGYGAYDLYDLGEFNQKGTVRTKYGTRSQLQAAVTSLKNNGIQVYGDVVMNHKGGADATEMVRAVEVNPNNRNQEVTGEYTIEAWTRFDFPGRGNTHSSFKWRWYHFDGVDWDQSRRLNNRIYKFRGHGKAWDWEVDTEFGNYDYLMYADYDYDHPESTNEMRNWGVWYTNTLGLDGFRIDAVKHIKYSFTRDWINHVRSATGKNMFAVAEFWKNDLGAIENYLQKTNWNHSVFDVPLHYNLYNASKSGGNYDMRNIFNGTVVQRHPSHAVTFVDNHDSQPEEALESFVEEWFKPLAYALTLTREQGYPSVFYGDYYGIPTHGVPAMRSKIDPILEARQKYAYGKQNDYLDHHNIIGWTREGNTAHPNSGLATIMSDGAGGSKWMFVGRNKAGQVWSDITGNRTGTVTINADGWGNFSVNGGSVSIWVNK

SEQ ID NO: 23908 - protein, 485 aa, Bacillus sp.
HHNGTNGTMMQYFEWYLPNDGNHWNRLNSDASNLKSKGITAVWIPPAWKGASQNDVGYGAYDLYDLGEFNQKGTVRTKYGTRSQLQAAVTSLKNNGIQVYGDVVMNHKGGADATEMVRAVEVNPNNRNQEVTGEYTIEAWTRFDFPGRGNTHSSFKWRWYHFDGVDWDQSRRLNNRIYKFRGHGKAWDWEVDTEFGNYDYLMYADYDYDHPETTNEQRNWGVWYTNTLGLDGFRIDAVKHIKYSFTRDWINHVRSATGKNMFAVAEFWKNDLGAIENYLQKTNWNHSVFDVPLHYNLYNASKSGGNYDMRNIFNGTVVQRHPSHAVTFVDNHDSQPEEALESFVEEWFKPLAYALTLTREQGYPSVFYGDYYGIPTHGVPAMRSKIDPILEARQKYAYGKQNDYLDHHNIIGWTREGNTAHPNSGLATIMSDGAGGSKWMFVGRNKAGQVWSDITGNRTGTVTINADGWGNFSVNGGSVSIWVNK

SEQ ID NO: 23909 - protein, 483 aa, Bacillus sp.
HHNGTNGTLMQYFEWYLPNDGNHWNRLRSDASNLKDKGISAVWIPPAWKGASQNDVGYGAYDLYDLGEFNQKGTIRTKYGTRNQLQAAVNALKSNGIQVYGDVVMNHKGGADATEMVKAVEVNPNNRNQEVSGEYTIEAWTKFDFPGRANTHSNFKWRWYHFDGVDWDQSRKLNNRIYKFRTKAWDWEVDTEFGNYDYLLYADIDMDHPEVVNELRNWGVWYTNTLGLDGFRIDAVKHIKFSFTRDWINHVRSAIGKNMFAVAEYWKNDLGAIENYLNKTNWNHSVFDVPLHFNLYYASKSGGNYDMRQIFNGTVVQKHPTHAVTFVDNHDSQPEESLESFVREWFKPLAYALTLTREQGYPSVFYGDYYGIPTHGVPAMKSKIDPILEARQKYAYGRQNDYLDHHNIIGWTREGNTAHPNSGLATIMSDGAGGNKWMFVGRNKAGQVWTDITGNKAGTVTINADGWGNFSVNGGSVSIWVNK

SEQ ID NO: 23910 - protein, 483 aa, Bacillus sp.
HHNGTNGTLMQYFEWYLPNDGNHWNRLRSDASNLKDKGISAVWIPPAWKGASQNDVGYGAYDLYDLGEFNQKGTIRTKYGTRNQLQAAVNALKSNGIQVYGDVVMNHRGGADATEMVKAVEVNPNNRNQEVSGEYTIEAWTKFDFPGRANTHSNFKWRWYHFDGVDWDQSRKLNNRIYKFRTKAWDWEVDTEFGNYDYLMYADIDMDHPEVVNELRNWGVWYTNTLGLDGFRIDAVKHIKYSFVRDWINHVRSAIGKNMFAVAEFWKNDLGAIENYLNKTNWNHSVFDVPLHFNLYYASKSGGNYDMRQIFNGTVVQKHPTHAVTFVDNHDTQPEESLESFVREWFKPLAYALTLTREQGYPSVFYGDYYGIPTHGVPAMKSKIDPILEARQKYAYGRQNDYLDHHNIIGWTREGNTAHPNSGLATIMSDGAGGNKWMFVGRNKAGQVWTDITGNKAGTVTINADGWGNFSVNGGSVSIWVNK

SEQ ID NO: 23911 - protein, 483 aa, Bacillus sp. SP70
HHNGTNGTMMQYFEWYLPNDGNHWNRLNSDASNLKSKGITAVWIPPAWKGASQNDVGYGAYDLYDLGEFNQKGTVRTKYGTRSQLQAAVTSLKNNGIQVYGDVVMNHKGGADATEMVRAVEVNPNNRNQEVTGEYTIEAWTRFDFPGRGNTHSSFKWRYYHFDGVDFDQSRRLNNRIYKFRGKAWDWEVDTENGNYDYLMYADIDMDHPEVVNELRNWGVWYTNTLGLDGFRIDAVKHIKYSFTRDWINHVRSATGKNMPAVAEFWKNDLGAIENYLQKTNWNHSVFDVPLHYNLYNASKSGGNYDMRNIFNGTVVQRHPSHAVTFVDNHDSQPEEALESFVEEWFKPLAYALTLTREQGYPSVFYGDYYGIPTHGVPAMRSKIDPILEARQKYAYGKQNDYLDHHNIIGWTREGNTAHPNSGLATIMSDGAGGSKWMFVGRNKAGQVWSDITGNRTGTVTINADGYGNFSVNRGSVSIWVNK

SEQ ID NO: 23912 - protein, 485 aa, Bacillus sp.
HHNGTNGTLMQYFEWYLPNDGNHWNRLRSDASNLKDKGISAVWIPPAWKGASQNDVGYGAYDLYDLGEFNQKGTIRTKYGTRNQLQAAVNALKSNGIQVYGDVVMNHKGGADATEMVKAVEVNPNNRNQEVSGEYTIEAWTKFDFPGRANTHSNFKWRWYHFDGVDWDQSRKLNNRIYKFRGDTKNWDWEVDTEFGNYDYLMYADIDMDHPEVVNELRNWGVWYTNTLGLDGFRIDAVKHIKYSFVRDWINHVRSAIGKNMFAVAEFWKGDLGAIENYLNKTNWNHSVFDVPLHFNLYYASKSGGNYDMRQIFNGTVVQKHPTHAVTFVDNHDTQPEESLESFVREWFKPLAYALTLTREQGYPSVFYGDYYGIPTHGVPAMKSKIDPILEARQKYAYGRQNDYLDHHNIIGWTREGNTAHPNSGLATIMSDGAGGNKWMFVGRNKAGQVWTDITGNKAGTVTINADGWGNFSVNGGSVSIWVNK

SEQ ID NO: 23913 - protein, 485 aa, Bacillus sp.
HHNGTNGTMMQYFEWYLPNDGNHWNRLNSDASNLKSKGITAVWIPPAWKGASQNDVGYGAYDLYDLGEFNQKGTVRTKYGTRSQLQAAVTSLKNNGIQVYGDVVMNHKGGADATEMVRAVEVNPNNRNQEVTGEYTIEAWTRFDFPGRGNTHSSFKWRWYHFDGVDWDQSRRLNNRIYKFRGHGKAWDWEVDTEFGNYDYLMYADYDFDHPETTNEMRNWGVWYTNTLGLDGFRIDAVKHIKYSFTRDWINHVRSATGKNMFAVAEFWKNDLGAIENYLQKTNWNHSVFDVPLHYNLYNASKSGGNYDMRNIFNGTVVQRHPSHAVTFVDNHDSQPEEALESFVEEWFKPLAYALTLTREQGYPSVFYGDYYGIPTHGVPAMRSKIDPILEARQKYAYGKQNDYLDHHNIIGWTREGNTAHPNSGLATIMSDGAGGSKWMFVGRNKAGQVWSDITGNRTGTVTINADGWGNFSVNGGSVSIWVNK

SEQ ID NO: 23914 - protein, 485 aa, Bacillus sp.
HHNGTNGTMMQYFEWYLPNDGNHWNRLRSDASNLKDKGISAVWIPPAWKGASQNDVGYGAYDLYDLGEFNQKGTIRTKYGTRNQLQAAVNALKSNGIQVYGDVVMNHKGGADATEMVRAVEVNPNNRNQEVSGEYTIEAWTKFDFPGRGNTHSNFKWRWYHFNGVDWDQSRKLNNRIYKFRGDGKGWNWEVDTENGNYNYLMYANINFSHPEVVNELRNWGVWYTNTLGLDGFRIDAVKHIKYSFTRDWINHVRSATGKNMFAVAEFWKNDLGAIENYLNKTNWNHSVFDVPLHYNLYNASKSGGNYDMRQIFNGTVVQRHPMHAVTFVDNHDSQPEEALESFVEEWFKPLAYALTLTREQGYPSVFYGDYYGIPTHGVPAMKSKIDPILEARQKYAYGRQNDYLDHHNIIGWTREGNTAHPNSGLATIMSDGAGGNKWMFVGRNKAGQVWTDITGNRAGTVTINADGWGNFSVNGGSVSIWVNK

SEQ ID NO: 23915 - protein, 483 aa, Bacillus sp.
HHNGTNGTLMQYFEWYLPNDGNHWNRLRSDASNLKDKGISAVWIPPAWKGASQNDVGYGAYDLYDLGEFNQKGTIRTKYGTRNQLQAAVNALKSNGIQVYGDVVMNHKGGADATEMVKAVEVNPNNRNQEVSGEYTIEAWTKFDFPGRANTHSNFKWRWYHFDGVDWDQSRKLNNRIYKFRTKAWDWEVDTEFGNYDYLLYADIDMDHPEVVNELRNWGVWYTNTLGLDGFRIDAAKHIKYSFTRDWINHVRSAIGKNMFAVAEFWKNDLGAIENYLNKTNWNHSVFDVPLHFNLYYASKSGGNYDMRQIFNGTVVQKHPTHAVTFVDNHDTQPEESLESFVREWFKPLAYALTLTREQGYPSVFYGDYYGIPTHGVPAMKSKIDPILEARQKYAYGRQNDYLDHHNIIGWTREGNTAHPNSGLATIMSDGAGGNKWMFVGRNKAGQVWTDITGNKAGTVTINADGWGNFSVNGGSVSIWVNK

SEQ ID NO: 23916 - protein, 483 aa, Bacillus sp.
HHNGTNGTLMQYFEWYLPNDGNHWNRLRSDASNLKDKGISAVWIPPAWKGASQNDVGYGAYDLYDLGEFNQKGTIRTKYGTRNQLQAAVNALKSNGIQVYGDVVMNHKGGADATEMVKAVEVNPNNRNQEVSGEYTIEAWTKFDFPGRANTHSNFKWRWYHFDGVDWDQSRKLNNRIYKFRTKAWDWEVDTEFGNYDYLMYADIDMDHPEVVNELRNWGVWYTNTLGLDGFRIDAVKHIKYSFVRDWINHVRSAIGKNMFAVAEFWKNDLGAIENYLNKTNWNHSVFDVPLHFNLYYASKSGGNYDMRQIFNGTVVQKHPTHAVTFVDNHDTQPEESLESFVREWFKPLAYALTLTREQGYPSVFYGDYYGIPTHGVPAMKSKIDPILEARQKYAYGRQNDYLDHHNIIGWTREGNTAHPNSGLATIMSDGAGGNKWMFVGRNKAGQVWTDITGNKAETVTINADGWGNFSVNGGSVSIWVNK

SEQ ID NO: 23917 - protein, 478 aa, Bacillus sp. TS-23
APINETMMQYFEWDLPNDGTLWTKVKNEAANLSSLGITALWLPPAYKGTSQSDVGYGVYDLYDLGEFNQKGTIRTKYGTKTQYIQAIQAAKAAGMQVYADVVFNHKAGADGTEFVDAVEVDPSNRNQETSGTYQIQAWTKFDFPGRGNTYSSFKWRWYHFDGTDWDESRKLNRIYKFRSTGKAWDWEVDTENGNYDYLMFADLDMDHPEVVTELKNWGTWYVNTTNIDGFRLDAVKHIKYSFFPDWLTYVRNQTGKNLFAVGEFWSYDVEKLHNYITKTEGSMSLFDAPLHNNFYTASKSSGYFDMRYLLNNTLMKDQPSLAVTLVDNHDTQPGQSLQSWVEPWFKPLAYAFILTRQEGYPCVFYGDYYGIPKYNIPGLKSKIDPLLIARRDYAYGTQRDYIDHQDIIGWTREGIDTKPNSGLAALITDGPGGSKWMYVGKKHAGKVFYDLTGNRSDTVTINADGWGEFKVNGGSVSI

SEQ ID NO: 23918 - protein, 478 aa, Bacillus sp. TS-23
APINETMMQYFEWDLPNDGTLWTKVKNEAANLSSLGITALWLPPAYKGTSQSDVGYGVYDLYDLGEFNQKGTIRTKYGTKTQYIQAIQAAKAAGMQVYADVVFNHKAGADGTEFVDAVEVDPSNRNQETSGTYQIQAWTKFDFPGRGNTYSSFKWRWYHFDGTDWDESRKLNRIYKFRSTGKAWDWEVDTENGNYDYLMFADLDMDHPEVVTELKNWGTWYVNTTNIDGFRLDAVKHIKYSFFPDWLTYVRNQTGKNLFAVGEFWSYDVEKLHNYITKTRGSMSLFDAPLHNNFYTASKSSGYFDMRYLLNNTLMKDQPSLAVTLVDNHDTQPGQSLQSWVEPWFKPLAYAFILTRQEGYPCVFYGDYYGIPKYNIPGLKSKIDPLLIARRDYAYGTQRDYIDHQDIIGWTREGIDTKPNSGLAALITDGPGGSKWMYVGKKHAGKVFYDLTGNRSDTVTINADGWGEFKVNGGSVSI

SEQ ID NO: 23919 - protein, 478 aa, Bacillus sp. TS-23
APINETMMQYFEWDLPNDGTLWTKVKNEAANLSSLGITALWLPPAYKGTSQSDVGYGVYDLYDLGEFNQKGTIRTKYGTKTQYIEAIQAAKAAGMQVYADVVFNHKAGADGTEFVDAVEVDPSNRNQETSGTYQIQAWTKFDFPGRGNTYSSFKWRWYHFDGTDWDESRKLNRIYKFRSTGKAWDWEVDTENGNYDYLMFADLDMDHPEVVTELKNWGTWYVNTTNIDGFRLDAVKHIKYSFFPDWLTYVRNQTGKNLFAVGEFWSYDVNKLHNYITKTRGSMSLFDAPLHNNFYTASKSSGYFDMRYLLNNTLMKDQPSLAVTLVDNHDTQPGQSLQSWVEPWFKPLAYAFILTRQEGYPCVFYGDYYGIPKYNIPGLKSKIDPLLIARRDYAYGTQRDYIDHQDIIGWTREGIDTKPNSGLAALITDGPGGSKWMYVGKKHAGKVFYDLTGNRSDTVTINADGWGEFKVNGGSVSI

SEQ ID NO: 23920 - protein, 478 aa, Bacillus sp. TS-23
APINETMMQYFEWDLPNDGTLWTKVKNEAANLSSLGITALWLPPAYKGTSQSDVGYGVYDLYDLGEFNQKGTIRTKYGTKTQYIQAIQAAKAAGMQVYADVVFNHKAGADGTEFVDAVEVDPSNRNQETSGTYQIQAWTKFDFPGRGNTYSSFKWRWYHFDGTDWDESRKLNRIYKFRSTGKAWDWEVDTENGNYDYLMFADLDMDHPEVVTELKNWGTWYVRTTNIDGFRLDAVKHIKYSFFPDWLTYVRNQTGKNLFAVGEFWSYDVNKLHNYITKTRGSMSLFDAPLHNNFYTASKSSGYFDMRYLLNNTLMKDQPSLAVTLVDNHDTQPGQSLQSWVEPWFKPLAYAFILTRQEGYPCVFYGDYYGIPKYNIPGLKSKIDPLLIARRDYAYGTQRDYIDHQDIIGWTREGIDTKPNSGLAALITDGPGGSKWMYVGKKHAGKVFYDLTGNRSDTVTINADGWGEFKVNGGSVSI

SEQ ID NO: 23921 - protein, 478 aa, Bacillus sp. TS-23
APINETMMQYFEWDLPNDGTLWTKVKNEAANLSSLGITALWLPPAYKGTSQSDVGYGVYDLYDLGEFNQKGTIRTKYGTKTQYIEAIQAAKAAGMQVYADVVFNHKAGADGTEFVDAVEVDPSNRNQETSGTYQIQAWTKFDFPGRGNTYSSFKWRWYHFDGTDWDESRKLNRIYKFRSTGKAWDWEVDTENGNYDYLMFADLDMDHPEVVTELKNWGTWYVNTTNIDGFRLDAVKHIKYSFFPDWLTYVRNQTGKNLFAVGEFWSYDVNKLHNYITKTEGSMSLFDAPLHNNFYTASKSSGYFDMRYLLNNTLMKDQPSLAVTLVDNHDTQPGQSLQSWVEPWFKPLAYAFILTRQEGYPCVFYGDYYGIPKYNIPGLKSKIDPLLIARRDYAYGTQRDYIDHQDIIGWTREGIDTKPNSGLAALITDGPGGSKWMYVGKKHAGKVFYDLTGNRSDTVTINADGWGEFKVNGGSVSI

SEQ ID NO: 23922 - protein, 478 aa, Bacillus sp. TS-23
APINETMMQYFEWDLPNDGTLWTKVKNEAANLSSLGITALWLPPAYKGTSQSDVGYGVYDLYDLGEFNQKGTIRTKYGTKTQYIQAIQAAKAAGMQVYADVVFNHKAGADGTEFVDAVEVDPSNRNQETSGTYQIQAWTKFDFPGRGNTYSSFKWRWYHFDGTDWDESRKLNRIYKFRSTGKAWDWEVDTENGNYDYLMFADLDMDHPEVVTELKNWGTWYVNTTNIDGFRLDAVKHIKYSFFPDWLTYVRNQTGKNLFAVGEFWSYDVRKLHNYITKTNGSMSLFDAPLHNNFYTASKSSGYFDMRYLLNNTLMKDQPSLAVTLVDNHDTQPGQSLQSWVEPWFKPLAYAFILTRQEGYPCVFYGDYYGIPKYNIPGLKSKIDPLLIARRDYAYGTQRDYIDHQDIIGWTREGIDTKPNSGLAALITDGPGGSKWMYVGKKHAGKVFYDLTGNRSDTVTINADGWGEFKVNGGSVSI

SEQ ID NO: 23923 - protein, 478 aa, Bacillus sp. TS-23
APINETMMQYFEWDLPNDGTLWTKVKNEAANLSSLGITALWLPPAYKGTSQSDVGYGVYDLYDLGEFNQKGTIRTKYGTKTQYIEAIQAAKAAGMQVYADVVFNHKAGADGTEFVDAVEVDPSNRNQETSGTYQIQAWTKFDFPGRGNTYSSFKWRWYHFDGTDWDESRKLNRIYKFRSTGKAWDWEVDTENGNYDYLMFADLDMDHPEVVTELKNWGTWYVNTTNIDGFRLDAVKHIKYSFFPDWLTYVRNQTGKNLFAVGEFWSYDVNKLHNYITKTNGSMSLFDAPLHNNFYTASKSSGYFDMRYLLNNTLMKDQPSLAVTLVDNHDTQPGQSLQSWVEPWFKPLAYAFILTRQEGYPCVFYGDYYGIPKYNIPGLKSKIDPLLIARRDYAYGTQRDYIDHQDIIGWTREGIDTKPNSGLAALITDGPGGSKWMYVGKKHAGKVFYDLTGNRSDTVTINADGWGEFKVNGGSVSI

SEQ ID NO: 23924 - protein, 478 aa, Bacillus sp. TS-23
APINETMMQYFEWDLPNDGTLWTKVKNEAANLSSLGITALWLPPAYKGTSQSDVGYGVYDLYDLGEFNQKGTIRTKYGTKTQYIRAIQAAKAAGMQVYADVVFNHKAGADGTEFVDAVEVDPSNRNQETSGTYQIQAWTKFDFPGRGNTYSSFKWRWYHFDGTDWDESRKLNRIYKFRSTGKAWDWEVDTENGNYDYLMFADLDMDHPEVVTELKNWGTWYVNTTNIDGFRLDAVKHIKYSFFPDWLTYVRNQTGKNLFAVGEFWSYDVNKLHNYITKTNGSMSLFDAPLHNNFYTASKSSGYFDMRYLLNNTLMKDQPSLAVTLVDNHDTQPGQSLQSWVEPWFKPLAYAFILTRQEGYPCVFYGDYYGIPKYNIPGLKSKIDPLLIARRDYAYGTQRDYIDHQDIIGWTREGIDTKPNSGLAALITDGPGGSKWMYVGKKHAGKVFYDLTGNRSDTVTINADGWGEFKVNGGSVSI

SEQ ID NO: 23925 - protein, 478 aa, Bacillus sp. TS-23
APINETMMQYFEWDLPNDGTLWTKVKNEAANLSSLGITALWLPPAYKGTSQSDVGYGVYDLYDLGEFNQKGTIRTKYGTKTQYIQAIQAAKAAGMQVYADVVFNHKAGADGTEFVDAVEVDPSNRNQETSGTYQIQAWTKFDFPGRGNTYSSFKWRWYHFDGTDWDESRKLNRIYKFRSTGKAWDWEVDTENGNYDYLMFADLDMDHPEVVTELKNWGTWYVNTTNIDGFRLDAVKHIKYSFFPDWLTYVRNQTGKNLFAVGEFWSYDVEKLHNYITKTNGSMSLFDAPLHNNFYTASKSSGYFDMRYLLNNTLMKDQPSLAVTLVDNHDTQPGQSLQSWVEPWFKPLAYAFILTRQEGYPCVFYGDYYGIPKYNIPGLKSKIDPLLIARRDYAYGTQRDYIDHQDIIGWTREGIDTKPNSGLAALITDGPGGSKWMYVGKKHAGKVFYDLTGNRSDTVTINADGWGEFKVNGGSVSI

SEQ ID NO: 23926 - protein, 478 aa, Bacillus sp. TS-23
APINETMMQYFEWDLPNDGTLWTKVKNEAANLSSLGITALWLPPAYKGTSQSDVGYGVYDLYDLGEFNQKGTIRTKYGTKTQYIQAIQAAKAAGMQVYADVVFNHKAGADGTEFVDAVEVDPSNRNQETSGTYQIQAWTKFDFPGRGNTYSSFKWRWYHFDGTDWDESRKLNRIYKFRSTGKAWDWEVDTENGNYDYLMFADLDMDHPEVVTELKNWGTWYVRTTNIDGFRLDAVKHIKYSFFPDWLTYVRNQTGKNLFAVGEFWSYDVNKLHNYITKTEGSMSLFDAPLHNNFYTASKSSGYFDMRYLLNNTLMKDQPSLAVTLVDNHDTQPGQSLQSWVEPWFKPLAYAFILTRQEGYPCVFYGDYYGIPKYNIPGLKSKIDPLLIARRDYAYGTQRDYIDHQDIIGWTREGIDTKPNSGLAALITDGPGGSKWMYVGKKHAGKVFYDLTGNRSDTVTINADGWGEFKVNGGSVSI

SEQ ID NO: 23927 - protein, 478 aa, Bacillus sp. TS-23
APINETMMQYFEWDLPNDGTLWTKVKNEAANLSSLGITALWLPPAYKGTSQSDVGYGVYDLYDLGEFNQKGTIRTKYGTKTQYIQAIQAAKAAGMQVYADVVFNHKAGADGTEFVDAVEVDPSNRNQETSGTYQIQAWTKFDFPGRGNTYSSFKWRWYHFDGTDWDESRKLNRIYKFRSTGKAWDWEVDTENGNYDYLMFADLDMDHPEVVTELKNWGTWYVETTNIDGFRLDAVKHIKYSFFPDWLTYVRNQTGKNLFAVGEFWSYDVNKLHNYITKTRGSMSLFDAPLHNNFYTASKSSGYFDMRYLLNNTLMKDQPSLAVTLVDNHDTQPGQSLQSWVEPWFKPLAYAFILTRQEGYPCVFYGDYYGIPKYNIPGLKSKIDPLLIARRDYAYGTQRDYIDHQDIIGWTREGIDTKPNSGLAALITDGPGGSKWMYVGKKHAGKVFYDLTGNRSDTVTINADGWGEFKVNGGSVSI

SEQ ID NO: 23928 - protein, 478 aa, Bacillus sp. TS-23
APINETMMQYFEWDLPNDGTLWTKVKNEAANLSSLGITALWLPPAYKGTSQSDVGYGVYDLYDLGEFNQKGTIRTKYGTKTQYIQAIQAAKAAGMQVYADVVFNHKAGADGTEFVDAVEVDPSNRNQETSGTYQIQAWTKFDFPGRGNTYSSFKWRWYHFDGTDWDESRKLNRIYKFRSTGKAWDWEVDTENGNYDYLMFADLDMDHPEVVTELKNWGTWYVETTNIDGFRLDAVKHIKYSFFPDWLTYVRNQTGKNLFAVGEFWSYDVNKLHNYITKTEGSMSLFDAPLHNNFYTASKSSGYFDMRYLLNNTLMKDQPSLAVTLVDNHDTQPGQSLQSWVEPWFKPLAYAFILTRQEGYPCVFYGDYYGIPKYNIPGLKSKIDPLLIARRDYAYGTQRDYIDHQDIIGWTREGIDTKPNSGLAALITDGPGGSKWMYVGKKHAGKVFYDLTGNRSDTVTINADGWGEFKVNGGSVSI

SEQ ID NO: 23929 - protein, 478 aa, Bacillus sp. TS-23
APINETMMQYFEWDLPNDGTLWTKVKNEAANLSSLGITALWLPPAYKGTSQSDVGYGVYDLYDLGEFNQKGTIRTKYGTKTQYIQAIQAAKAAGMQVYADVVFNHKAGADGTEFVDAVEVDPSNRNQETSGTYQIQAWTKFDFPGRGNTYSSFKWRWYHFDGTDWDESRKLNRIYKFRSTGKAWDWEVDTENGNYDYLMFADLDMDHPEVVTELKNWGTWYVNTTNIDGFRLDAVKHIKYSFFPDWLTYVRNQTGKNLFAVGEFWSYDVRKLHNYITKTRGSMSLFDAPLHNNFYTASKSSGYFDMRYLLNNTLMKDQPSLAVTLVDNHDTQPGQSLQSWVEPWFKPLAYAFILTRQEGYPCVFYGDYYGIPKYNIPGLKSKIDPLLIARRDYAYGTQRDYIDHQDIIGWTREGIDTKPNSGLAALITDGPGGSKWMYVGKKHAGKVFYDLTGNRSDTVTINADGWGEFKVNGGSVSI

SEQ ID NO: 23930 - protein, 478 aa, Bacillus sp. TS-23
APINETMMQYFEWDLPNDGTLWTKVKNEAANLSSLGITALWLPPAYKGTSQSDVGYGVYDLYDLGEFNQKGTIRTKYGTKTQYIQAIQAAKAAGMQVYADVVFNHKAGADGTEFVDAVEVDPSNRNQETSGTYQIQAWTKFDFPGRGNTYSSFKWRWYHFDGTDWDESRKLNRIYKFRSTGKAWDWEVDTENGNYDYLMFADLDMDHPEVVTELKNWGTWYVETTNIDGFRLDAVKHIKYSFFPDWLTYVRNQTGKNLFAVGEFWSYDVNKLHNYITKTNGSMSLFDAPLHNNFYTASKSSGYFDMRYLLNNTLMKDQPSLAVTLVDNHDTQPGQSLQSWVEPWFKPLAYAFILTRQEGYPCVFYGDYYGIPKYNIPGLKSKIDPLLIARRDYAYGTQRDYIDHQDIIGWTREGIDTKPNSGLAALITDGPGGSKWMYVGKKHAGKVFYDLTGNRSDTVTINADGWGEFKVNGGSVSI

SEQ ID NO: 23931 - protein, 478 aa, Bacillus sp. TS-23
APINETMMQYFEWDLPNDGTLWTKVKNEAANLSSLGITALWLPPAYKGTSQSDVGYGVYDLYDLGEFNQKGTIRTKYGTKTQYIQAIQAAKAAGMQVYADVVFNHKAGADGTEFVDAVEVDPSNRNQETSGTYQIQAWTKFDFPGRGNTYSSFKWRWYHFDGTDWDESRKLNRIYKFRSTGKAWDWEVDTENGNYDYLMFADLDMDHPEVVTELKNWGTWYVNTTNIDGFRLDAVKHIKYSFFPDWLTYVRNQTGKNLFAVGEFWSYDVRKLHNYITKTEGSMSLFDAPLHNNFYTASKSSGYFDMRYLLNNTLMKDQPSLAVTLVDNHDTQPGQSLQSWVEPWFKPLAYAFILTRQEGYPCVFYGDYYGIPKYNIPGLKSKIDPLLIARRDYAYGTQRDYIDHQDIIGWTREGIDTKPNSGLAALITDGPGGSKWMYVGKKHAGKVFYDLTGNRSDTVTINADGWGEFKVNGGSVSI

SEQ ID NO: 23932 - protein, 478 aa, Bacillus sp. TS-23
APINETMMQYFEWDLPNDGTLWTKVKNEAANLSSLGITALWLPPAYKGTSQSDVGYGVYDLYDLGEFNQKGTIRTKYGTKTQYIRAIQAAKAAGMQVYADVVFNHKAGADGTEFVDAVEVDPSNRNQETSGTYQIQAWTKFDFPGRGNTYSSFKWRWYHFDGTDWDESRKLNRIYKFRSTGKAWDWEVDTENGNYDYLMFADLDMDHPEVVTELKNWGTWYVNTTNIDGFRLDAVKHIKYSFFPDWLTYVRNQTGKNLFAVGEFWSYDVNKLHNYITKTEGSMSLFDAPLHNNFYTASKSSGYFDMRYLLNNTLMKDQPSLAVTLVDNHDTQPGQSLQSWVEPWFKPLAYAFILTRQEGYPCVFYGDYYGIPKYNIPGLKSKIDPLLIARRDYAYGTQRDYIDHQDIIGWTREGIDTKPNSGLAALITDGPGGSKWMYVGKKHAGKVFYDLTGNRSDTVTINADGWGEFKVNGGSVSI

SEQ ID NO: 23933 - protein, 478 aa, Bacillus sp. TS-23
APINETMMQYFEWDLPNDGTLWTKVKNEAANLSSLGITALWLPPAYKGTSQSDVGYGVYDLYDLGEFNQKGTIRTKYGTKTQYIRAIQAAKAAGMQVYADVVFNHKAGADGTEFVDAVEVDPSNRNQETSGTYQIQAWTKFDFPGRGNTYSSFKWRWYHFDGTDWDESRKLNRIYKFRSTGKAWDWEVDTENGNYDYLMFADLDMDHPEVVTELKNWGTWYVNTTNIDGFRLDAVKHIKYSFFPDWLTYVRNQTGKNLFAVGEFWSYDVNKLHNYITKTRGSMSLFDAPLHNNFYTASKSSGYFDMRYLLNNTLMKDQPSLAVTLVDNHDTQPGQSLQSWVEPWFKPLAYAFILTRQEGYPCVFYGDYYGIPKYNIPGLKSKIDPLLIARRDYAYGTQRDYIDHQDIIGWTREGIDTKPNSGLAALITDGPGGSKWMYVGKKHAGKVFYDLTGNRSDTVTINADGWGEFKVNGGSVSI

SEQ ID NO: 23934 - protein, 478 aa, Bacillus sp. TS-23
APINETMMQYFEWDLPNDGTLWTKVKNEAANLSSLGITALWLPPAYKGTSQSDVGYGVYDLYDLGEFNQKGTIRTKYGTKTQYIQAIQAAKAAGMQVYADVVFNHKAGADGTEFVDAVEVDPSNRNQETSGTYQIQAWTKFDFPGRGNTYSSFKWRWYHFDGTDWDESRKLNRIYKFRSTGKAWDWEVDTENGNYDYLMFADLDMDHPEVVTELKNWGTWYVRTTNIDGFRLDAVKHIKYSFFPDWLTYVRNQTGKNLFAVGEFWSYDVNKLHNYITKTNGSMSLFDAPLHNNFYTASKSSGYFDMRYLLNNTLMKDQPSLAVTLVDNHDTQPGQSLQSWVEPWFKPLAYAFILTRQEGYPCVFYGDYYGIPKYNIPGLKSKIDPLLIARRDYAYGTQRDYIDHQDIIGWTREGIDTKPNSGLAALITDGPGGSKWMYVGKKHAGKVFYDLTGNRSDTVTINADGWGEFKVNGGSVSI

SEQ ID NO: 23935 - protein, 483 aa, Synthetic construct
HHNGTNGTMMQYFEWYLPNDGNHWNRLRSDASNLKDKGISAVWIPPAWKGASQNDVGYGAYDLYDLGEFNQKGTIRTKYGTRNQLQAAVNALKSNGIQVYGDVVMNHKAGADGTEFVDAVEVDPSNRNQETSGTYQIQAWTKFDFPGRGNTYSSFKWRWYHFDGTDWDESRKLNRIYKFSTGKAWDWEVDTENGNYDYLMFADLDMDHPEVVNELRNWGVWYTNTLGLDGFRIDAVKHIKYSFTRDWINHVRSATGKNMFAVAEFWKNDLGAIENYLNKTNWNHSVFDVPLHYNLYNASKSGGNYDMRQIFNGTVVQRHPMHAVTFVDNHDSQPEEALESFVEEWFKPLAYALTLTREQGYPSVFYGDYYGIPTHGVPAMKSKIDPILEARQKYAYGRQNDYLDHHNIIGWTREGNTAHPNSGLATIMSDGAGGNKWMFVGRNKAGQVWTDITGNRAGTVTINADGWGNFSVNGGSVSIWVNK

SEQ ID NO: 23936 - protein, 484 aa, Synthetic construct
HHNGTNGTMMQYFEWYLPNDGNHWNRLNSDASNLKSKGITAVWIPPAWKGASQNDVGYGAYDLYDLGEFNQKGTVRTKYGTRSQLQAAVTSLKNNGIQVYGDVVMNHKAGADGTEFVDAVEVNPSNRNQETSGTYQIQAWTKFDFPGRGNTYSSFKWRWYHFDGTDWDESRKLNRVYKFRGTGKAWDWEVDTENGNYDYLMFADLDMDHPEVVNELRNWGVWYTNTLGLDGFRIDAVKHIKYSFTRDWINHVRSATGKNMFAVAEFWKNDLGAIENYLQKTNWNHSVFDVPLHYNLYNASKSGGNYDMRNIFNGTVVQRHPSHAVTFVDNHDSQPEEALESFVEEWFKPLAYALTLTREQGYPSVFYGDYYGIPTHGVPAMRSKIDPILEARQKYAYGKQNDYLDHHNIIGWTREGNTAHPNSGLATIMSDGAGGSKWMFVGRNKAGQVWSDITGNRTGTVTINADGWGNFSVNGGSVSIWVNK

SEQ ID NO: 23937 - protein, 484 aa, Synthetic construct
HHNGTNGTMMQYFEWYLPNDGNHWNRLRSDASNLKDKGISAVWIPPAWKGASQNDVGYGAYDLYDLGEFNQKGTIRTKYGTRNQLQAAVNALKSNGIQVYGDVVMNHKAGADATEDVTAVEVNPANRNQETSEEYQIKAWTDFRFPGRGNTYSDFKWHWYHFDGADWDESRKISRIFKFRGEGKAWDWEVSSENGNYDYLMYADVDMDHPEVVNELRNWGVWYTNTLGLDGFRIDAVKHIKYSFTRDWINHVRSATGKNMFAVAEFWKNDLGAIENYLNKTNWNHSVFDVPLHYNLYNASKSGGNYDMRQIFNGTVVQRHPMHAVTFVDNHDSQPEEALESFVEEWFKPLAYALTLTREQGYPSVFYGDYYGIPTHGVPAMKSKIDPILEARQKYAYGRQNDYLDHHNIIGWTREGNTAHPNSGLATIMSDGAGGNKWMFVGRNKAGQVWTDITGNRAGTVTINADGWGNFSVNGGSVSIWVNK

SEQ ID NO: 23938 - protein, 481 aa, Bacillus licheniformis
VNGTLMQYFEWYTPNDGQHWKRLQNDAEHLSDIGITAVWIPPAYKGLSQSDNGYGPYDLYDLGEFQQKGTVRTKYGTKSELQDAIGSLHSRNVQVYGDVVLNHKAGADATEDVTAVEVDPADRNRVISGEHRIKAWTHFHFPGRGSTYSDFKWHWYHFDGTDWDESRKLNRIYKFQGKAWDWEVSNENGNYDYLMYADIDYDHPDVAAEIKRWGTWYANELQLDGFRLDAVKHIKFSFLRDWVNHVREKTGKEMFTVAEYWQNDLGALENYLNKTNFNHSVFDVPLHYQFHAASTQGGGYDMRKLLNSTVVSKHPLKAVTFVDNHDTQPGQSLESTVQTWFKPLAYAFILTRESGYPQVFYGDMYGTKGDSQREIPALKHKIEPILKARKQYAYGAQHDYFDHHDIVGWTREGDSSVANSGLAALITDGPGGAKRMYVGRQNAGETWHDITGNRSEPVVINSEGWGEFHVNGGSVSIYVQR

SEQ ID NO: 23939 - protein, 483 aa, Bacillus licheniformis
APINETMMQYFEWDLPNDGTLWTKVKNEAANLSSLGITALWLPPAYKGTSQSDVGYGVYDLYDLGEFNQKGTIRTKYGTKTQYIQAIQAAKAAGMQVYADVVFNHKAGADGTEFVDAVEVDPSNRNQETSGTYQIQAWTKFDFPGRGNTYSSFKWRWYHFDGTDWDESRKLNRIYKFRSTGKAWDWEVDTENGNYDYLMFADLDMDHPEVVTELKNWGTWYVNTTNIDGFRLDAVKHIKYSFFPDWLTYVRNQTGKNLFAVGEFWSYDVNKLHNYITKTNGSMSLFDAPLHNNFYTASKSSGYFDMRYLLNNTLMKDQPSLAVTLVDNHDTQPGQSLQSWVEPWFKPLAYAFILTRQEGYPCVFYGDYYGIPKYNIPGLKSKIDPLLIARRDYAYGTQRDYIDHQDIIGWTREGIDTKPNSGLAALITDGPGGSKWMYVGKKHAGKVFYDLTGNRSDTVTINADGWGEFKVNGGSVSIWVAKK

SEQ ID NO: 23940 - protein, 480 aa, Bacillus sp.
APINETMMQYFEWDLPNDGTLWTKVKNEAANLSSLGITALWLPPAYKGTSQSDVGYGVYDLYDLGEFNQKGTIRTKYGTKTQYIQAIQAAKAAGMQVYADVVFNHKAGADGTEFVDAVEVDPSNRNQETSGTYQIQAWTKFDFPGRGNTYSSFKWRWYHFDGTDWDESRKLNRIYKFRGKAWDWEVDTENGNYDYLMFADLDMDHPEVVTELKNWGTWYVNTTNIDGFRLDAVKHIKYSFFPDWLTYVRNQTGKNLFAVGEFWSYDVNKLHNYITKTNGSMSLFDAPLHNNFYTASKSSGYFDMRYLLNNTLMKDQPSLAVTLVDNHDTQPGQSLQSWVEPWFKPLAYAFILTRQEGYPCVFYGDYYGIPKYNIPGLKSKIDPLLIARRDYAYGTQRDYIDHQDIIGWTREGIDTKPNSGLAALITDGPGGSKWMYVGKKHAGKVFYDLTGNRSDTVTINADGWGEFKVNGGSVSIWVAK

SEQ ID NO: 23941 - protein, 480 aa, Bacillus sp. TS-23
APINETMMQYFEWDLPNDGTLWTKVKNEAANLSSLGITALWLPPAYKGTSQSDVGYGAYDLYDLGEFNQKGTIRTKYGTKTQYIQAIQAAKAAGMQVYADVVFNHKAGADGTEFVDAVEVDPSNRNQETSGTYQIQAWTKFDFPGRGNTYSSFKWRWYHFDGTDWDESRKLNRIYKFTGKAWDWEVDTENGNYDYLMFADYDMDHPEVVTELKNWGTWYVNTTNIDGFRLDAVKHIKYSFFPDWLTYVRNQTGKNLFAVGEFWSYDVNKLHNYITKTNGSMSLFDAPLHNNFYTASKSSGYFDMRYLLNNTLMKDQPSLAVTLVDNHDTQPGQSLQSWVEPWFKPLAYAFILTRQEGYPCVFYGDYYGIPKYNIPGLKSKIDPLLIARRDYAYGTQRDYIDHQDIIGWTREGIDTKPNSGLAALITDGPGGSKWMYVGKKHAGKVFYDLTGNRSDTVTINADGWGEFKVNGGSVSIWVAK

SEQ ID NO: 23942 - protein, 480 aa, unidentified
APINETMMQYFEWDLPNDGTLWTKVKNEAANLSSLGITALWLPPAYKGTSQSDVGYGVYDLYDLGEFNQKGTIRTKYGTKTQYIQAIQAAKAAGMQVYADVVFNHKAGADGTEFVDAVEVDPSNRNQETSGTYQIQAWTKFDFPGRGNTYSSFKWRWYHFDGTDWDESRKLNRIYKFTGKAWDWEVDTENGNYDYLMFADLDMDHPEVVTELKNWGTWYVNTTNIDGFRLDAVKHIKYTFFPDWLTYVRNQTGKNLFAVGEFWSYDVNKLHNYITKTNGSMSLFDAPLHNNFYTASKSSGYFDMRYLLNNTLMKDQPSLAVTLVDNHDTQPGQSLQSWVEPWFKPLAYAFILTRQEGYPCVFYGDYYGIPKYNIPGLKSKIDPLLIARRDYAYGTQRDYIDHQDIIGWTREGIDTKPNSGLAALITDGPGGSKWMYVGKKHAGKVFYDLTGNRSDTVTINADGWGEFKVNGGSVSIWVAK

SEQ ID NO: 23943 - protein, 480 aa, Bacillus sp.
APINETMMQYFEWDLPNDGTLWTKVKNEAANLSSLGITALWLPPAYKGTSQSDVGYGVYDLYDLGEFNQKGTIRTKYGTKTQYIQAIQAAKAAGMQVYADVVFNHKAGADGTEFVDAVEVDPSNRNQETSGTYQIQAWTKFDFPGRGNTYSSFKWRWYHFDGTDWDESRKLNRIYKFTGKAWDWEVDTENGNYDYLMFADLDMDHPEVVTELKNWGTWYVNTTNIDGFRLDAVKHIKYSFFPDWLTYVRNQTGKNLFAVGEFWSYDVNKLHNYITKTNGSMSLFDAPLHNNFYTASKSSGYFDMRYLLNNTLMKDQPSLAVTLVDNHDTQPGQSLQSWVEPWFKPLAYAFILTRQEGYPCVFYGDYYGIPKYNIPGLKSKIDPLLIARRDYAYGTQRDYIDHQDIIGWTREGIDTKPNSGLAALITDGPGGSKWMYVGKKHAGKVFYDLTGNRSDTVTINADGWGEFKVNGGSVSIWVAK

SEQ ID NO: 23944 - protein, 481 aa, Bacillus sp. TS-23
APINETMMQYFEWDLPNDGTLWTKVKNEAANLSSLGITALWLPPAYKGTSQSDVGYGVYDLYDLGEFNQKGTIRTKYGTKTQYIQAIQAAKAAGMQVYADVVFNHKAGADGTEFVDAVEVDPSNRNQETSGTYQIQAWTKFDFPGRGNTYSSFKWRWYHFDGTDWDESRKNLNRIYKFTGKAWDWEVDTENGNYDYLMFADLDMDHPEVVTELKNWGTWYVNTTNIDGFRLDAVKHIKYSFFPDWLTYVRNQTGKNLFAVGEFWSYDVNKLHNYITKTNGSMSLFDAPLHNNFYTASKSSGYFDMRYLLNNTLMKDQPSLAVTLVDNHDTQPGQSLQSWVEPWFKPLAYAFILTRQEGYPCVFYGDYYGIPKYNIPGLKSKIDPLLIARRDYAYGTQRDYIDHQDIIGWTREGIDTKPNSGLAALITDGPGGSKWMYVGKKHAGKVFYDLTGNRSDTVTINADGWGEFKVNGGSVSIWVAK

SEQ ID NO: 23945 - protein, 481 aa, Bacillus sp. TS-23
APINETMMQYFEWDLPNDGTLWTKVKNEAANLSSLGITALWLPPAYKGTSQSDVGYGVYDLYDLGEFNQKGTIRTKYGTKTQYIQAIQAAKAAGMQVYADVVFNHKAGADGTEFVDAVEVDPSNRNQETSGTYQIQAWTKFDFPGRGNTYSSFKWRWYHFDGTDWDESRNKLNRIYKFTGKAWDWEVDTENGNYDYLMFADLDMDHPEVVTELKNWGTWYVNTTNIDGFRLDAVKHIKYSFFPDWLTYVRNQTGKNLFAVGEFWSYDVNKLHNYITKTNGSMSLFDAPLHNNFYTASKSSGYFDMRYLLNNTLMKDQPSLAVTLVDNHDTQPGQSLQSWVEPWFKPLAYAFILTRQEGYPCVFYGDYYGIPKYNIPGLKSKIDPLLIARRDYAYGTQRDYIDHQDIIGWTREGIDTKPNSGLAALITDGPGGSKWMYVGKKHAGKVFYDLTGNRSDTVTINADGWGEFKVNGGSVSIWVAK

SEQ ID NO: 23946 - protein, 481 aa, Bacillus sp. TS-23
APINETMMQYFEWDLPNDGTLWTKVKNEAANLSSLGITALWLPPAYKGTSQSDVGYGVYDLYDLGEFNQKGTIRTKYGTKTQYIQAIQAAKAAGMQVYADVVFNHKAGADGTEFVDAVEVDPSNRNQETSGTYQIQAWTKFDFPGRGNTYSSFKWRWYHFDGTDWDESLRKLNRIYKFTGKAWDWEVDTENGNYDYLMFADLDMDHPEVVTELKNWGTWYVNTTNIDGFRLDAVKHIKYSFFPDWLTYVRNQTGKNLFAVGEFWSYDVNKLHNYITKTNGSMSLFDAPLHNNFYTASKSSGYFDMRYLLNNTLMKDQPSLAVTLVDNHDTQPGQSLQSWVEPWFKPLAYAFILTRQEGYPCVFYGDYYGIPKYNIPGLKSKIDPLLIARRDYAYGTQRDYIDHQDIIGWTREGIDTKPNSGLAALITDGPGGSKWMYVGKKHAGKVFYDLTGNRSDTVTINADGWGEFKVNGGSVSIWVAK

SEQ ID NO: 23947 - protein, 481 aa, Bacillus sp. TS-23
APINETMMQYFEWDLPNDGTLWTKVKNEAANLSSLGITALWLPPAYKGTSQSDVGYGVYDLYDLGEFNQKGTIRTKYGTKTQYIQAIQAAKAAGMQVYADVVFNHKAGADGTEFVDAVEVDPSNRNQETSGTYQIQAWTKFDFPGRGNTYSSFKWRWYHFDGTDWDEQSRKLNRIYKFTGKAWDWEVDTENGNYDYLMFADLDMDHPEVVTELKNWGTWYVNTTNIDGFRLDAVKHIKYSFFPDWLTYVRNQTGKNLFAVGEFWSYDVNKLHNYITKTNGSMSLFDAPLHNNFYTASKSSGYFDMRYLLNNTLMKDQPSLAVTLVDNHDTQPGQSLQSWVEPWFKPLAYAFILTRQEGYPCVFYGDYYGIPKYNIPGLKSKIDPLLIARRDYAYGTQRDYIDHQDIIGWTREGIDTKPNSGLAALITDGPGGSKWMYVGKKHAGKVFYDLTGNRSDTVTINADGWGEFKVNGGSVSIWVAK

SEQ ID NO: 23948 - protein, 481 aa, Bacillus sp. TS-23
APINETMMQYFEWDLPNDGTLWTKVKNEAANLSSLGITALWLPPAYKGTSQSDVGYGVYDLYDLGEFNQKGTIRTKYGTKTQYIQAIQAAKAAGMQVYADVVFNHKAGADGTEFVDAVEVDPSNRNQETSGTYQIQAWTKFDFPGRGNTYSSFKWRWYHFDGTDWDESRKLLNRIYKFTGKAWDWEVDTENGNYDYLMFADLDMDHPEVVTELKNWGTWYVNTTNIDGFRLDAVKHIKYSFFPDWLTYVRNQTGKNLFAVGEFWSYDVNKLHNYITKTNGSMSLFDAPLHNNFYTASKSSGYFDMRYLLNNTLMKDQPSLAVTLVDNHDTQPGQSLQSWVEPWFKPLAYAFILTRQEGYPCVFYGDYYGIPKYNIPGLKSKIDPLLIARRDYAYGTQRDYIDHQDIIGWTREGIDTKPNSGLAALITDGPGGSKWMYVGKKHAGKVFYDLTGNRSDTVTINADGWGEFKVNGGSVSIWVAK

SEQ ID NO: 23949 - protein, 481 aa, Bacillus sp. TS-23
APINETMMQYFEWDLPNDGTLWTKVKNEAANLSSLGITALWLPPAYKGTSQSDVGYGVYDLYDLGEFNQKGTIRTKYGTKTQYIQAIQAAKAAGMQVYADVVFNHKAGADGTEFVDAVEVDPSNRNQETSGTYQIQAWTKFDFPGRGNTYSSFKWRWYHFDGTDWDESRKLNARIYKFTGKAWDWEVDTENGNYDYLMFADLDMDHPEVVTELKNWGTWYVNTTNIDGFRLDAVKHIKYSFFPDWLTYVRNQTGKNLFAVGEFWSYDVNKLHNYITKTNGSMSLFDAPLHNNFYTASKSSGYFDMRYLLNNTLMKDQPSLAVTLVDNHDTQPGQSLQSWVEPWFKPLAYAFILTRQEGYPCVFYGDYYGIPKYNIPGLKSKIDPLLIARRDYAYGTQRDYIDHQDIIGWTREGIDTKPNSGLAALITDGPGGSKWMYVGKKHAGKVFYDLTGNRSDTVTINADGWGEFKVNGGSVSIWVAK

SEQ ID NO: 23950 - protein, 481 aa, Bacillus sp. TS-23
APINETMMQYFEWDLPNDGTLWTKVKNEAANLSSLGITALWLPPAYKGTSQSDVGYGVYDLYDLGEFNQKGTIRTKYGTKTQYIQAIQAAKAAGMQVYADVVFNHKAGADGTEFVDAVEVDPSNRNQETSGTYQIQAWTKFDFPGRGNTYSSFKWRWYHFDGTDWDESRFKLNRIYKFTGKAWDWEVDTENGNYDYLMFADLDMDHPEVVTELKNWGTWYVNTTNIDGFRLDAVKHIKYSFFPDWLTYVRNQTGKNLFAVGEFWSYDVNKLHNYITKTNGSMSLFDAPLHNNFYTASKSSGYFDMRYLLNNTLMKDQPSLAVTLVDNHDTQPGQSLQSWVEPWFKPLAYAFILTRQEGYPCVFYGDYYGIPKYNIPGLKSKIDPLLIARRDYAYGTQRDYIDHQDIIGWTREGIDTKPNSGLAALITDGPGGSKWMYVGKKHAGKVFYDLTGNRSDTVTINADGWGEFKVNGGSVSIWVAK

SEQ ID NO: 23951 - protein, 481 aa, Bacillus sp. TS-23
APINETMMQYFEWDLPNDGTLWTKVKNEAANLSSLGITALWLPPAYKGTSQSDVGYGVYDLYDLGEFNQKGTIRTKYGTKTQYIQAIQAAKAAGMQVYADVVFNHKAGADGTEFVDAVEVDPSNRNQETSGTYQIQAWTKFDFPGRGNTYSSFKWRWYHFDGTDWDESRQKLNRIYKFTGKAWDWEVDTENGNYDYLMFADLDMDHPEVVTELKNWGTWYVNTTNIDGFRLDAVKHIKYSFFPDWLTYVRNQTGKNLFAVGEFWSYDVNKLHNYITKTNGSMSLFDAPLHNNFYTASKSSGYFDMRYLLNNTLMKDQPSLAVTLVDNHDTQPGQSLQSWVEPWFKPLAYAFILTRQEGYPCVFYGDYYGIPKYNIPGLKSKIDPLLIARRDYAYGTQRDYIDHQDIIGWTREGIDTKPNSGLAALITDGPGGSKWMYVGKKHAGKVFYDLTGNRSDTVTINADGWGEFKVNGGSVSIWVAK

SEQ ID NO: 23952 - protein, 480 aa, Geobacillus stearothermophilus
NGTLMQYFEWYTPNDGQHWKRLQNDSAYLAEHGITAVWIPPAYKGTSQADVGYGAYDLYDLGEFHQKGTVRTKYGTKGELQSAIKSLHSRDINVYGDVVINHKGGADATEDVTAVEVDPADRNRVISGEYLIKAWTHFHFPGRGSTYSDFKWHWYHFDGTDWDESRKLNRIYKFQGKAWDWEVSSENGNYDYLMYADIDMDHPEVVTELKNWGKWYVNTTNIDGFRLDAVKHIKFSFFPDWLSYVRSQTGKPLFTVGEYWSYDINKLHNYITKTNGTMSLFDAPLHNKFYTASKSGGAFDMRTLMTNTLMKDQPTLAVTFVDNHDTEPGQALQSWVDPWFKPLAYAFILTRQEGYPCVFYGDYYGIPQYNIPSLKSKIDPLLIARRDYAYGTQHDYLDHSDIIGWTREGVTEKPGSGLAALITDGPGGSKWMYVGKQHAGKVFYDLTGNRSDTVTINSDGWGEFKVNGGSVSVWVPRKTT

SEQ ID NO: 23953 - protein, 481 aa, Bacillus sp. TS-23
APINETMMQYFEWDLPNDGTLWTKVKNEAANLSSLGITALWLPPAYKGTSQSDVGYGVYDLYDLGEFNQKGTIRTKYGTKTQYIQAIQAAKAAGMQVYADVVFNHKAGADGTEFVDAVEVDPSNRNQETSGTYQIQAWTKFDFPGRGNTYSSFKWRWYHFDGTDWDESRKLNLRIYKFTGKAWDWEVDTENGNYDYLMFADLDMDHPEVVTELKNWGTWYVNTTNIDGFRLDAVKHIKYSFFPDWLTYVRNQTGKNLFAVGEFWSYDVNKLHNYITKTNGSMSLFDAPLHNNFYTASKSSGYFDMRYLLNNTLMKDQPSLAVTLVDNHDTQPGQSLQSWVEPWFKPLAYAFILTRQEGYPCVFYGDYYGIPKYNIPGLKSKIDPLLIARRDYAYGTQRDYIDHQDIIGWTREGIDTKPNSGLAALITDGPGGSKWMYVGKKHAGKVFYDLTGNRSDTVTINADGWGEFKVNGGSVSIWVAK

SEQ ID NO: 23954 - protein, 481 aa, Bacillus sp. TS-23
APINETMMQYFEWDLPNDGTLWTKVKNEAANLSSLGITALWLPPAYKGTSQSDVGYGVYDLYDLGEFNQKGTIRTKYGTKTQYIQAIQAAKAAGMQVYADVVFNHKAGADGTEFVDAVEVDPSNRNQETSGTYQIQAWTKFDFPGRGNTYSSFKWRWYHFDGTDWDESRKRLNRIYKFTGKAWDWEVDTENGNYDYLMFADLDMDHPEVVTELKNWGTWYVNTTNIDGFRLDAVKHIKYSFFPDWLTYVRNQTGKNLFAVGEFWSYDVNKLHNYITKTNGSMSLFDAPLHNNFYTASKSSGYFDMRYLLNNTLMKDQPSLAVTLVDNHDTQPGQSLQSWVEPWFKPLAYAFILTRQEGYPCVFYGDYYGIPKYNIPGLKSKIDPLLIARRDYAYGTQRDYIDHQDIIGWTREGIDTKPNSGLAALITDGPGGSKWMYVGKKHAGKVFYDLTGNRSDTVTINADGWGEFKVNGGSVSIWVAK

SEQ ID NO: 23955 - protein, 481 aa, Bacillus sp. TS-23
APINETMMQYFEWDLPNDGTLWTKVKNEAANLSSLGITALWLPPAYKGTSQSDVGYGVYDLYDLGEFNQKGTIRTKYGTKTQYIQAIQAAKAAGMQVYADVVFNHKAGADGTEFVDAVEVDPSNRNQETSGTYQIQAWTKFDFPGRGNTYSSFKWRWYHFDGTDWDESRLKLNRIYKFTGKAWDWEVDTENGNYDYLMFADLDMDHPEVVTELKNWGTWYVNTTNIDGFRLDAVKHIKYSFFPDWLTYVRNQTGKNLFAVGEFWSYDVNKLHNYITKTNGSMSLFDAPLHNNFYTASKSSGYFDMRYLLNNTLMKDQPSLAVTLVDNHDTQPGQSLQSWVEPWFKPLAYAFILTRQEGYPCVFYGDYYGIPKYNIPGLKSKIDPLLIARRDYAYGTQRDYIDHQDIIGWTREGIDTKPNSGLAALITDGPGGSKWMYVGKKHAGKVFYDLTGNRSDTVTINADGWGEFKVNGGSVSIWVAK

SEQ ID NO: 23956 - protein, 481 aa, Bacillus sp. TS-23
APINETMMQYFEWDLPNDGTLWTKVKNEAANLSSLGITALWLPPAYKGTSQSDVGYGVYDLYDLGEFNQKGTIRTKYGTKTQYIQAIQAAKAAGMQVYADVVFNHKAGADGTEFVDAVEVDPSNRNQETSGTYQIQAWTKFDFPGRGNTYSSFKWRWYHFDGTDWDESRKFLNRIYKFTGKAWDWEVDTENGNYDYLMFADLDMDHPEVVTELKNWGTWYVNTTNIDGFRLDAVKHIKYSFFPDWLTYVRNQTGKNLFAVGEFWSYDVNKLHNYITKTNGSMSLFDAPLHNNFYTASKSSGYFDMRYLLNNTLMKDQPSLAVTLVDNHDTQPGQSLQSWVEPWFKPLAYAFILTRQEGYPCVFYGDYYGIPKYNIPGLKSKIDPLLIARRDYAYGTQRDYIDHQDIIGWTREGIDTKPNSGLAALITDGPGGSKWMYVGKKHAGKVFYDLTGNRSDTVTINADGWGEFKVNGGSVSIWVAK

SEQ ID NO: 23957 - protein, 481 aa, Bacillus sp. TS-23
APINETMMQYFEWDLPNDGTLWTKVKNEAANLSSLGITALWLPPAYKGTSQSDVGYGVYDLYDLGEFNQKGTIRTKYGTKTQYIQAIQAAKAAGMQVYADVVFNHKAGADGTEFVDAVEVDPSNRNQETSGTYQIQAWTKFDFPGRGNTYSSFKWRWYHFDGTDWDESRKLRNRIYKFTGKAWDWEVDTENGNYDYLMFADLDMDHPEVVTELKNWGTWYVNTTNIDGFRLDAVKHIKYSFFPDWLTYVRNQTGKNLFAVGEFWSYDVNKLHNYITKTNGSMSLFDAPLHNNFYTASKSSGYFDMRYLLNNTLMKDQPSLAVTLVDNHDTQPGQSLQSWVEPWFKPLAYAFILTRQEGYPCVFYGDYYGIPKYNIPGLKSKIDPLLIARRDYAYGTQRDYIDHQDIIGWTREGIDTKPNSGLAALITDGPGGSKWMYVGKKHAGKVFYDLTGNRSDTVTINADGWGEFKVNGGSVSIWVAK

SEQ ID NO: 23958 - protein, 481 aa, Bacillus sp. TS-23
APINETMMQYFEWDLPNDGTLWTKVKNEAANLSSLGITALWLPPAYKGTSQSDVGYGVYDLYDLGEFNQKGTIRTKYGTKTQYIQAIQAAKAAGMQVYADVVFNHKAGADGTEFVDAVEVDPSNRNQETSGTYQIQAWTKFDFPGRGNTYSSFKWRWYHFDGTDWDESRKALNRIYKFTGKAWDWEVDTENGNYDYLMFADLDMDHPEVVTELKNWGTWYVNTTNIDGFRLDAVKHIKYSFFPDWLTYVRNQTGKNLFAVGEFWSYDVNKLHNYITKTNGSMSLFDAPLHNNFYTASKSSGYFDMRYLLNNTLMKDQPSLAVTLVDNHDTQPGQSLQSWVEPWFKPLAYAFILTRQEGYPCVFYGDYYGIPKYNIPGLKSKIDPLLIARRDYAYGTQRDYIDHQDIIGWTREGIDTKPNSGLAALITDGPGGSKWMYVGKKHAGKVFYDLTGNRSDTVTINADGWGEFKVNGGSVSIWVAK

SEQ ID NO: 23959 - protein, 481 aa, Bacillus sp. TS-23
APINETMMQYFEWDLPNDGTLWTKVKNEAANLSSLGITALWLPPAYKGTSQSDVGYGVYDLYDLGEFNQKGTIRTKYGTKTQYIQAIQAAKAAGMQVYADVVFNHKAGADGTEFVDAVEVDPSNRNQETSGTYQIQAWTKFDFPGRGNTYSSFKWRWYHFDGTDWDESRRKLNRIYKFTGKAWDWEVDTENGNYDYLMFADLDMDHPEVVTELKNWGTWYVNTTNIDGFRLDAVKHIKYSFFPDWLTYVRNQTGKNLFAVGEFWSYDVNKLHNYITKTNGSMSLFDAPLHNNFYTASKSSGYFDMRYLLNNTLMKDQPSLAVTLVDNHDTQPGQSLQSWVEPWFKPLAYAFILTRQEGYPCVFYGDYYGIPKYNIPGLKSKIDPLLIARRDYAYGTQRDYIDHQDIIGWTREGIDTKPNSGLAALITDGPGGSKWMYVGKKHAGKVFYDLTGNRSDTVTINADGWGEFKVNGGSVSIWVAK

SEQ ID NO: 23960 - protein, 481 aa, Bacillus sp. TS-23
APINETMMQYFEWDLPNDGTLWTKVKNEAANLSSLGITALWLPPAYKGTSQSDVGYGVYDLYDLGEFNQKGTIRTKYGTKTQYIQAIQAAKAAGMQVYADVVFNHKAGADGTEFVDAVEVDPSNRNQETSGTYQIQAWTKFDFPGRGNTYSSFKWRWYHFDGTDWDESRKLANRIYKFTGKAWDWEVDTENGNYDYLMFADLDMDHPEVVTELKNWGTWYVNTTNIDGFRLDAVKHIKYSFFPDWLTYVRNQTGKNLFAVGEFWSYDVNKLHNYITKTNGSMSLFDAPLHNNFYTASKSSGYFDMRYLLNNTLMKDQPSLAVTLVDNHDTQPGQSLQSWVEPWFKPLAYAFILTRQEGYPCVFYGDYYGIPKYNIPGLKSKIDPLLIARRDYAYGTQRDYIDHQDIIGWTREGIDTKPNSGLAALITDGPGGSKWMYVGKKHAGKVFYDLTGNRSDTVTINADGWGEFKVNGGSVSIWVAK

SEQ ID NO: 23961 - protein, 481 aa, Bacillus sp. TS-23
APINETMMQYFEWDLPNDGTLWTKVKNEAANLSSLGITALWLPPAYKGTSQSDVGYGVYDLYDLGEFNQKGTIRTKYGTKTQYIQAIQAAKAAGMQVYADVVFNHKAGADGTEFVDAVEVDPSNRNQETSGTYQIQAWTKFDFPGRGNTYSSFKWRWYHFDGTDWDESRKLNFRIYKFTGKAWDWEVDTENGNYDYLMFADLDMDHPEVVTELKNWGTWYVNTTNIDGFRLDAVKHIKYSFFPDWLTYVRNQTGKNLFAVGEFWSYDVNKLHNYITKTNGSMSLFDAPLHNNFYTASKSSGYFDMRYLLNNTLMKDQPSLAVTLVDNHDTQPGQSLQSWVEPWFKPLAYAFILTRQEGYPCVFYGDYYGIPKYNIPGLKSKIDPLLIARRDYAYGTQRDYIDHQDIIGWTREGIDTKPNSGLAALITDGPGGSKWMYVGKKHAGKVFYDLTGNRSDTVTINADGWGEFKVNGGSVSIWVAK

SEQ ID NO: 23962 - protein, 481 aa, Bacillus sp. TS-23
APINETMMQYFEWDLPNDGTLWTKVKNEAANLSSLGITALWLPPAYKGTSQSDVGYGVYDLYDLGEFNQKGTIRTKYGTKTQYIQAIQAAKAAGMQVYADVVFNHKAGADGTEFVDAVEVDPSNRNQETSGTYQIQAWTKFDFPGRGNTYSSFKWRWYHFDGTDWDESRKLNQRIYKFTGKAWDWEVDTENGNYDYLMFADLDMDHPEVVTELKNWGTWYVNTTNIDGFRLDAVKHIKYSFFPDWLTYVRNQTGKNLFAVGEFWSYDVNKLHNYITKTNGSMSLFDAPLHNNFYTASKSSGYFDMRYLLNNTLMKDQPSLAVTLVDNHDTQPGQSLQSWVEPWFKPLAYAFILTRQEGYPCVFYGDYYGIPKYNIPGLKSKIDPLLIARRDYAYGTQRDYIDHQDIIGWTREGIDTKPNSGLAALITDGPGGSKWMYVGKKHAGKVFYDLTGNRSDTVTINADGWGEFKVNGGSVSIWVAK

SEQ ID NO: 23963 - protein, 481 aa, Bacillus sp. TS-23
APINETMMQYFEWDLPNDGTLWTKVKNEAANLSSLGITALWLPPAYKGTSQSDVGYGVYDLYDLGEFNQKGTIRTKYGTKTQYIQAIQAAKAAGMQVYADVVFNHKAGADGTEFVDAVEVDPSNRNQETSGTYQIQAWTKFDFPGRGNTYSSFKWRWYHFDGTDWDESRKLNNRIYKFTGKAWDWEVDTENGNYDYLMFADLDMDHPEVVTELKNWGTWYVNTTNIDGFRLDAVKHIKYSFFPDWLTYVRNQTGKNLFAVGEFWSYDVNKLHNYITKTNGSMSLFDAPLHNNFYTASKSSGYFDMRYLLNNTLMKDQPSLAVTLVDNHDTQPGQSLQSWVEPWFKPLAYAFILTRQEGYPCVFYGDYYGIPKYNIPGLKSKIDPLLIARRDYAYGTQRDYIDHQDIIGWTREGIDTKPNSGLAALITDGPGGSKWMYVGKKHAGKVFYDLTGNRSDTVTINADGWGEFKVNGGSVSIWVAK

SEQ ID NO: 23964 - protein, 482 aa, Synthetic construct
APINETMMQYFEWDLPNDGTLWTKVKNEAANLSSLGITALWLPPAYKGTSQSDVGYGVYDLYDLGEFNQKGTIRTKYGTKTQYIQAIQAAKAAGMQVYADVVFNHKAGADGTEFVDAVEVNPSNRNQETSGTYQIQAWTKFDFPGRGNTYSSFKWRWYHFDGTDWDESRKLNRVYKFRGTGKAWDWEVDTENGNYDYLMFADLDMDHPEVVTELKNWGTWYVNTTNIDGFRLDAVKHIKYSFFPDWLTYVRNQTGKNLFAVGEFWSYDVNKLHNYITKTNGSMSLFDAPLHNNFYTASKSSGYFDMRYLLNNTLMKDQPSLAVTLVDNHDTQPGQSLQSWVEPWFKPLAYAFILTRQEGYPCVFYGDYYGIPKYNIPGLKSKIDPLLIARRDYAYGTQRDYIDHQDIIGWTREGIDTKPNSGLAALITDGPGGSKWMYVGKKHAGKVFYDLTGNRSDTVTINADGWGEFKVNGGSVSIWVAK

SEQ ID NO: 23965 - protein, 482 aa, Synthetic construct
APVNGTMMQYFEWDLPNDGTLWTKVKNEATNLFSLGITALWLPPAYKGTSQSDVGYGVYDLYDLGEFNQKGTIRTKYGTKTQYIQAIQAAKAAGMQVYADVVFNHKAGADGTEFVDAVEVNPSNRNQETSGTYQIQAWTKFDFPGRGNTYSSFKWRWYHFDGTDWDESRKLNRVYKFRGTGKAWDWEVDTENGNYDYLMFADLDMDHPEVVTELKNWGTWYVNTTNIDGFRLDAVKHIKYSFFPDWLTYVRNQTGKNLFAVGEFWSYDVNKLHNYITKTNGSMSLFDAPLHNNFYTASKSSGYFDMRYLLNNTLMKDQPSLAVTLVDNHDTQPGQSLQSWVEPWFKPLAYAFILTRQEGYPCVFYGDYYGIPKYNIPGLKSKIDPLLIARRDYAYGTQRDYIDHQDIIGWTREGIDTKPNSGLAALITDGPGGSKWMYVGKKHAGKVFYDLTGNRSDTVTINADGWGEFKVNGGSVSIWVAK

SEQ ID NO: 23966 - protein, 482 aa, Bacillus sp.
APINETMMQYFEWDLPNDGTLWTKVKNEAANLSSLGITALWLPPAYKGTSQSDVGYGVYDLYDLGEFNQKGTIRTKYGTKTQYIQAIQAAKAAGMQVYADVVFNHKAGADGTEFVDAVEVDPSNRNQETSGTYQIQAWTKFDFPGRGNTYSSFKWRWYHFDGTDWDESRKLNRIYKFRSTGKAWDWEVDTENGNYDYLMFADLDMDHPEVVTELKNWGTWYVNTTNIDGFRLDAVKHIKYTFFPDWLTYVRNQTGKNLFAVGEFWSYDVNKLHNYITKTNGSMSLFDAPLHNNFYTASKSSGYFDMRYLLNNTLMKDQPSLAVTLVDNHDTQPGQSLQSWVEPWFKPLAYAFILTRQEGYPCVFYGDYYGIPKYNIPGLKSKIDPLLIARRDYAYGTQRDYIDHQDIIGWTREGIDTKPNSGLAALITDGPGGSKWMYVGKKHAGKVFYDLTGNRSDTVTINADGWGEFKVNGGSVSIWVAK

SEQ ID NO: 23967 - protein, 482 aa, Bacillus sp. TS-23
APINETMMQYFEWDLPNDGTLWTKVKNEAANLSSLGITALWLPPAYKGTSQSDVGYGVYDLYDLGEFNQKGTIRTKYGTKTQYIQAIQAAKAAGMQVYADVVFNHKAGADGTEFVDAVEVDPSNRNQETSGTYQIQAWTKFDFPGRGNTYSSFKWRWYHFDGTDWDESRKLNRIYKFRSTGKAWDWEVDTENGNYDYLMFADLDMDHPEVVTELKNWGTWYVNTTNIDGFRLDAVKHIKYSFFPDWLTYVRNQTGKNLFAVGEFWSYDVNKLHNYITKTNGSMSLFDAPLHNNFYTASKSSGYFDMRYLLNNTLMKDQPSLAVTLVDNHDTQPGQSLQSWVEPWFKPLAYAFILTRQEGYPCVFYGDYYGIPKYNIPGLKSKIDPLLIARRDYAYGTQRDYIDHQDIIGWTREGIDTKPNSGLAALITDGPGGSKWMYVGKKHAGKVFYDLTGNRSDTVTINADGWGEFKVNGGSVSIWVAK

SEQ ID NO: 23968 - protein, 545 aa, Bacillus sp.
MKQQKRLYARLLTLLFALIFLLPHSAAAAANTAPINETMMQYFEWDLPNDGTLWTKVKNEAANLSSLGITALWLPPAYKGTSQSDVGYGVYDLYDLGEFNQKGTIRTKYGTKTQYIQAIQAAKAAGMQVYADVVFNHKAGADGTEFVDAVEVDPSNRNQETSGTYQIQAWTKFDFPGRGNTYSSFKWRWYHFDGTDWDESRKLNRIYKFRSTGKAWDWEVDTENGNYDYLMFADLDMDHPEVVTELKNWGTWYVNTTNIDGFRLDAVKHIKYSFFPDWLTYVRNQTGKNLFAVGEFWSYDVNKLHNYITKTNGSMSLFDAPLHNNFYTASKSSGYFDMRYLLNNTLMKDQPSLAVTLVDNHDTQPGQSLQSWVEPWFKPLAYAFILTRQEGYPCVFYGDYYGIPKYNIPGLKSKIDPLLIARRDYAYGTQRDYIDHQDIIGWTREGIDTKPNSGLAALITDGPGGSKWMYVGKKHAGKVFYDLTGNRSDTVTINADGWGEFKVNGGSVSIWVAKTSNVTFTVNNATTTSGQNVYVVANIPELGNW

SEQ ID NO: 23969 - protein, 483 aa, Bacillus sp. SP70
HHNGTNGTMMQYFEWYLPNDGNHWNRLNSDASNLKSKGITAVWIPPAWKGASQNDVGYGAYDLYDLGEFNQKGTVRTKYGTRSQLQAAVTSLKNNGIQVYGDVVMNHKGGADATEMVRAVEVNPNNRNQEVTGEYTIEAWTRFDFPGRGNTHSSFKWRYYHFDGVDFDQSRRLNNRIYKFRGKAWDWEVDTENGNYDYLMYADIDMDHPEVVNELRNWGVWYTNTLGLDGFRIDAVKHIKYSFTRDWINHVRSATGKPMPAVAEFWKNDLGAIENYLQKTNWNHSVFDVPLHYNLYNASKSGGNYDMRNIFNGTVVQRHPSHAVTFVDNHDSQPEEALESFVEEWFKPLAYALTLTREQGYPSVFYGDYYGIPTHGVPAMRSKIDPILEARQKYAYGKQNDYLDHHNIIGWTREGNTAHPNSGLATIMSDGAGGSKYMFVGRNKAGQVWSDITGNRTGTVTINADGYGNFSVNRGSVSIWVNK

SEQ ID NO: 23970 - protein, 483 aa, Bacillus sp. SP70
HHNGTNGTMMQYFEWYLPNDGNHWNRLNSDASNLKSKGITAVWIPPAWKGASQNDVGYGAYDLYDLGEFNQKGTVRTKYGTRSQLQAAVTSLKNNGIQVYGDVVMNHKGGADATEMVRAVEVNPNNRNQEVTGEYTIEAWTRFDFPGRGNTHSSFKWRWYHFDGVDYDQSRRLNNRIYKFRGKAWDWEVDTENGNYDYLMYADIDMDHPEVVNELRNWGVWYTNTLGLDGFRIDAVKHIKYSFTRDWINHVRSATGKDMPAVAEFWKNDLGAIENYLQKTNWNHSVFDVPLHYNLYNASKSGGNYDMRNIFNGTVVQRHPSHAVTFVDNHDSQPEEALESFVEEWFKPLAYALTLTREQGYPSVFYGDYYGIPTHGVPAMRSKIDPILEARQKYAYGKQNDYLDHHNIIGWTREGNTAHPNSGLATIMSDGAGGSKRMFVGRNKAGQVWSDITGNRTGTVTINADGVGNFSVNQKSVSIWVNK

SEQ ID NO: 23971 - protein, 483 aa, Bacillus sp.
HHNGTNGTLMQYFEWYLPNDGNHWNRLRSDASNLKDKGISAVWIPPAWKGASQNDVGYGAYDLYDLGEFNQKGTIRTKYGTRNQLQAAVNALKSNGIQVYGDVVMNHKGGADATEMVKAVEVNPNNRNQEVSGEYTIEAWTKFDFPGRANTHSNFKWRWYHFDGVDYDQSRKLNNRIYKFRTKAWDWEVDTEFGNYDYLMYADIDMDNPEVVNELRNWGVWYTNTLGLDGFRIDAVKHIKYSFTRDWINHVRSAIGKNMFAVAEFWKNDLGAIENYLNKTNWNHSVFDVPLHFNLYYASKSGGNYDMRQIFNGTVVQKHPTHAVTFVDNHDSQPEEALESFVREWFKPLAYALTLTREQGYPSIFYGDYYGIPTHGVPAMKSKIDPILEARQKYAYGRQNDYLDHHNIIGWTREGNTAHPNSGLATIMSDGAGGNKWMFVGRNKAGQVWTDITGNKAGTVTINADGWGNFSVNGGSVSIWVNK

SEQ ID NO: 23972 - protein, 483 aa, Bacillus sp. SP70
HHNGTNGTMMQYFEWYLPNDGNHWNRLNSDASNLKSKGITAVWIPPAWKGASQNDVGYGAYDLYDLGEFNQKGTVRTKYGTRSQLQAAVTSLKNNGIQVYGDVVMNHKGGADATEMVRAVEVNPNNRNQEVTGEYTIEAWTRFDFPGRGNTHSSFKWRYYHFDGVDFDQSRRLNNRIYKFRGKAWDWEVDTENGNYDYLMYADIDMDHPEVVNELRNWGVWYTNTLGLDGFRIDAVKHIKYSFTRDWINHVRSATGKDMFAVAEFWKNDLGAIENYLQKTNWNHSVFDVPLHYNLYNASKSGGNYDMRNIFNGTVVQRHPSHAVTFVDNHDSQPEEALESFVEEWFKPLAYALTLTREQGYPSVFYGDYYGIPTHGVPAMRSKIDPILEARQKYAYGKQNDYLDHHNIIGWTREGNTAHPNSGLATIMSDGAGGSKYMFVGRNKAGQVWSDITGNRTGTVTINADGYGNFSVNKQSVSIWVNK

SEQ ID NO: 23973 - protein, 483 aa, Bacillus sp.
HHNGTNGTLMQYFEWYLPNDGNHWNRLRSNASDLKDVGISAVWIPPAWKGASQNDVGYGAYDLYDLGEFNQKGTIRTKYGTRNQLQAAVNALKSNGIQVYGDVVMNHKGGADATEMVKAVEVNPNNRNQEVSGEYTIEAWTKFDFPGRANTHSNFKWRWYHFDGVDWDQSRKLNNRIYKFRTKAWDWEVDTEFGNYDYLLYADIDMDHPEVVNELRNWGVWYTNTLGLDGFRIDAVKHIKYSFTRDWINHVRSAIGKNMFAVAEFWKNDLGAIENYLNKTNWNHSVFDVPLHFNLYYASKSGGNYDMRQIFNGTVVQKHPTHAVTFVDNHDSQPEESLESFVREWFKPLAYALTLTREQGYPSVFYGDYYGIPTHGVPAMRSKIDPILEARQKYAYGRQNDYLDHHNIIGWTREGNTAHPNSGLATIMSDGAGGNKWMFVGRNKAGQVWTDITGNKAGTVTINADGWGNFSVNGGSVSIWVNK

SEQ ID NO: 23974 - protein, 483 aa, Bacillus sp.
HHNGTNGTLMQYFEWYLPNDGNHWNRLRSNASNLKDKGISAVWIPPAWKGASQNDVGYGAYDLYDLGEFNQKGTIRTKYGTRNQLQAAVNALKSNGIQVYGDVVMNHKGGADATEMVKAVEVNPNNRNQEVSGEYTIEAWTKFDFPGRANTHSNFKWRWYHFDGVDWDQSRKLNNRIYKFRTKAWDWEVDTEFGNYDYLMYADIDMDNPEVVNELRNWGVWYTNTLGLDGFRIDAVKHIKYSFVRDWINHVRSAIGKNMFAVAEFWKNDLGAIENYLNKTNWNHSVFDVPLHFNLYYASKSGGNYDMRQIFNGTVVQKHPTHAVTFVDNHDTQPEESLESFVREWFKPLAYALTLTREQGYPSVFYGDYYGIPTHGVPAMKSKIDPILEARQKYAYGRQNDYLDHHNIIGWTREGNTAHPNSGLATIMSDGAGGNKWMFVGRNKAGQVWTDITGNKAGTVTINADGWGNFSVNGGSVSIWVNK

SEQ ID NO: 23975 - protein, 483 aa, Bacillus sp.
HHNGTNGTLMQYFEWYLPNDGNHWNRLRSDASNLKDKGISAVWIPPAWKGASQNDVGYGAYDLYDLGEFNQKGTIRTKYGTRNQLQAAVNALKSNGIQVYGDVVMNHKGGADATEFVKAVEVNPNNRNQEVSGEYTIEAWTKFDFPGRANTHSNFKWRWYHFDGVDYDQSRKLNNRIYKFRTKAWDWEVDTEFGNYDYLLYADIDMDNPEVVNELRNWGVWYTNTLGLDGFRIDAVKHIKYSFTRDWINHVRSAIGKNMFAVAEFWKNDLGAIENYLNKTNWNHSVFDVPLHFNLYYASKSGGNYDMRQIFNGTVVQKHPTHAVTFVDNHDSQPEEALESFVREWFKPLAYALTLTREQGYPSVFYGDYYGIPTHGVPAMKSKIDPILEARQKYAYGRQNDYLDHHNIIGWTREGNTAHPNSGLATIMSDGAGGNKWMFVGRNKAGQVWTDITGNKAGTVTINADGWGNFSVNGGSVSIWVNK

SEQ ID NO: 23976 - protein, 483 aa, Bacillus sp.
HHNGTNGTLMQYFEWYLPNDGNHWNRLRSDASNLKDKGISAVWIPPAFKGASQNDVGYGAYDLYDLGEFNQKGTIRTKYGTRNQLQAAVNALKSNGIQVYGDVVMNHKGGADATEMVKAVEVNPNNRNQEVSGEYTIEAWTKFDFPGRANTHSNFKWRWYHFDGVDWDQSRKLNNRIYKFRTKAWDWEVDTEFGNYDYLLYADIDMDHPEVVNELRNWGVWYTNTLGLDGFRIDAAKHIKYSFTRDWINHVRSAIGKNMFAVAEFWKNDLGAIENYLNKTNWNHSVFDVPLHFNLYYASKSGGNYDMRQIFNGTVVQKHPTHAVTFVDNHDTQPEESLESFVREWFKPLAYALTLTREQGYPSVFYGDYYGIPTHGVPAMKSKIDPILEARQKYAYGRQNDYLDHHNIIGWTREGNTAHPNSGLATIMSDGAGGNKWMFVGRNKAGQVWTDITGNKAGTVTINADGWGNFSVNGGSVSIWVNK

SEQ ID NO: 23977 - protein, 483 aa, Bacillus sp. SP70
HHNGTNGTMMQYFEWYLPNDGNHWNRLNSDASNLKSKGITAVWIPPAWKGASQNDVGYGAYDLYDLGEFNQKGTVRTKYGTRSQLQAAVTSLKNNGIQVYGDVVMNHKGGADATEMVRAVEVNPNNRNQEVTGEYTIEAWTRFDFPGRGNTHSSFKWRYYHFDGVDYDQSRRLNNRIYKFRGKAWDWEVDTENGNYDYLMYADIDMDHPEVVNELRNWGVWYTNTLGLDGFRIDAVKHIKYSFTRDWINHVRSATGKPMPAVAEFWKNDLGAIENYLQKTNWNHSVFDVPLHYNLYNASKSGGNYDMRNIFNGTVVQRHPSHAVTFVDNHDSQPEEALESFVEEWFKPLAYALTLTREQGYPSVFYGDYYGIPTHGVPAMRSKIDPILEARQKYAYGKQNDYLDHHNIIGWTREGNTAHPNSGLATIMSDGAGGSKRMFVGRNKAGQVWSDITGNRTGTVTINADGWGNFSVNEKSVSIWVNK

SEQ ID NO: 23978 - protein, 483 aa, Bacillus sp.
HHNGTNGTLMQYFEWYLPNDGNHWNRLRSDASNLKDKGISAVWIPPAWKGASQNDVGYGAYDLYDLGEFNQKGTIRTKYGTRNQLQAAVNALKSNGIQVYGDVVMNHKGGADATEMVKAVEVNPNNRNQEVSGEYTIEAWTKFDFPGRANTHSNFKWRWYHFDGVDWDQSRKLNNRIYKFRTKAWDWEVDTEFGNYDYLLYADIDMDHPEVVNELRNWGVWYTNTLGLDGFRIDAVKHIKYSFTRDWINHVRSAIGKNMFAVAEFWSGDLGKIENYLNKTNWNHSVFDVPLHFNLYYASKSGGNYDMRQIFNGTVVQKHPTHAVTFVDNHDSQPEESLESFVREWFKPLAYALTLTREQGYPSVFYGDYYGIPTHGVPAMKSKIDPILEARQKYAYGRQNDYLDHHNIIGWTREGNTAHPNSGLATIMSDGAGGNKWMFVGRNKAGQVWTDITGNKAGTVTINADGWGNFSVNGGSVSIWVNK

SEQ ID NO: 23979 - protein, 483 aa, Bacillus sp.
HHNGTNGTLMQYFEWYLPNDGNHWNRLRSDASNLKDKGISAVWIPPAWKGASQNDVGYGAYDLYDLGEFNQKGTIRTKYGTRNQLQAAVNALKSNGIQVYGDVVMNHKGGADATEMVKAVEVNPNNRNQEVSGEYTIEAWTKFDFPGRANTHSNFKWRWYHFDGVDYDQSRKLNNRIYKFRTKAWDWEVDTEFGNYDYLLYADIDMDHPEVVNELRNWGVWYTNTLGLDGFRIDAVKHIKYSFTRDWINHVRSAIGKNMFAVAEFWKNDLGAIENYLNKTNWNHSVFDVPLHFNLYYASKSGGNYDMRQIFNGTVVQKHPTHAVTFVDNHDSQPEEALESFVREWFKPLAYALTLTREQGYPSIFYGDYYGIPTHGVPAMKSKIDPILEARQKYAYGRQNDYLDHHNIIGWTREGNTAHPNSGLATIMSDGAGGNKWMFVGRNKAGQVWTDITGNKAGTVTINADGWGNFSVNGGSVSIWVNK

SEQ ID NO: 23980 - protein, 483 aa, Bacillus sp.
HHNGTNGTLMQYFEWYLPNDGNHWNRLRSDASNLKDKGISAVWIPPAWKGASQNDVGYGAYDLYDLGEFNQKGTIRTKYGTRNQLQAAVNALKSNGIQVYGDVVMNHKGGADATEMVKAVEVNPNNRNQEVSGEYTIEAWTKFDFPGRANTHSNFKWRWYHFDGVDYDQSRKLNNRIYKFRTKAWDWEVDTEFGNYDYLLYADIDMDNPEVVNELRNWGVWYTNTLGLDGFRIDAVKHIKYSFTRDWINHVRSAIGKNMFAVAEFWKNDLGAIENYLNKTNWNHSVFDVPLHFNLYFASKSGGNYDMRQIFNGTVVQKHPTHAVTFVDNHDSQPEEALESFVREWFKPLAYALTLTREQGYPSVFYGDYYGIPTHGVPAMKSKIDPILEARQKYAYGRQNDYLDHHNIIGWTREGNTAHPNSGLATIMSDGAGGNKWMFVGRNKAGQVWTDITGNKAGTVTINADGWGNFSVNGGSVSIWVNK

SEQ ID NO: 23981 - protein, 485 aa, Bacillus sp.
HHNGTNGTMMQYFEWYLPNDGNHWNRLRSDASNLKDKGISAVWIPPAWKGASQNDVGYGAYDLYDLGEFNQKGTIRTKYGTRNQLQAAVNALKSNGIQVYGDVVMNHKGGADATEMVRAVEVNPNNRNQEVSGEYTIEAWTKFDFPGRGNTHSNFKWRWYHFNGVDWDQSRKLNNRIYKFANDGKGWNWEVDTENGNYNYLMYANINFSHPEVVNELRNWGVWYTNTLGLDGFRIDAVKHIKYSFTRDWINHVRSATGKNMFAVAEFWKNDLGAIENYLNKTNWNHSVFDVPLHYNLYNASKSGGNYDMRQIFNGTVVQRHPMHAVTFVDNHDSQPEEALESFVEEWFKPLAYALTLTREQGYPSVFYGDYYGIPTHGVPAMKSKIDPILEARQKYAYGRQNDYLDHHNIIGWTREGNTAHPNSGLATIMSDGAGGNKWMFVGRNKAGQVWTDITGNRAGTVTINADGWGNFSVNGGSVSIWVNK

SEQ ID NO: 23982 - protein, 483 aa, Bacillus sp. SP70
HHNGTNGTMMQYFEWYLPNDGNHWNRLNSDASNLKSKGITAVWIPPAWKGASQNDVGYGAYDLYDLGEFNQKGTVRTKYGTRSQLQAAVTSLKNNGIQVYGDVVMNHKGGADATEMVRAVEVNPNNRNQEVTGEYTIEAWTRFDFPGRGNTHSSFKWRYYHFDGVDFDQSRRLNNRIYKFRGKAWDWEVDTENGNYDYLMYADIDMDHPEVVNELRNWGVWYTNTLGLDGFRIDAVKHIKYSFTRDWINHVRSATGKPMFAVAEFWKNDLGAIENYLQKTNWNHSVFDVPLHYNLYNASKSGGNYDMRNIFNGTVVQRHPSHAVTFVDNHDSQPEEALESFVEEWFKPLAYALTLTREQGYPSVFYGDYYGIPTHGVPAMRSKIDPILEARQKYAYGKQNDYLDHHNIIGWTREGNTAHPNSGLATIMSDGAGGSKYMFVGRNKAGQVWSDITGNRTGTVTINADGVGNFSVNQQSVSIWVNK

SEQ ID NO: 23983 - protein, 483 aa, Bacillus sp. SP70
HHNGTNGTMMQYFEWYLPNDGNHWNRLNSDASNLKSKGITAVWIPPAWKGASQNDVGYGAYDLYDLGEFNQKGTVRTKYGTRSQLQAAVTSLKNNGIQVYGDVVMNHKGGADATEMVRAVEVNPNNRNQEVTGEYTIEAWTRFDFPGRGNTHSSFKWRYYHFDGVDFDQSRRLNNRIYKFRGKAWDWEVDTENGNYDYLMYADIDMDHPEVVNELRNWGVWYTNTLGLDGFRIDAVKHIKYSFTRDWINHVRSATGKPMPAVAEFWKNDLGAIENYLQKTNWNHSVFDVPLHYNLYNASKSGGNYDMRNIFNGTVVQRHPSHAVTFVDNHDSQPEEALESFVEEWFKPLAYALTLTREQGYPSVFYGDYYGIPTHGVPAMRSKIDPILEARQKYAYGKQNDYLDHHNIIGWTREGNTAHPNSGLATIMSDGAGGSKYMFVGRNKAGQVWSDITGNRTGTVTINADGWGNFSVNKQSVSIWVNK

SEQ ID NO: 23984 - protein, 483 aa, Bacillus sp.
HHNGTNGTLMQYFEWYLPNDGNHWNRLRSDASNLKDKGISAVWIPPAWKGASQNDVGYGAYDLYDLGEFNQKGTIRTKYGTRNQLQAAVNALKSNGIQVYGDVVMNHKGGADATEMVKAVEVNPNNRNQEVSGEYTIEAWTKFDFPGRANTHSNFKWRWYHFDGVDWDQSRKLNNRIYKFRTKAWDWEVDTEFGNYDYLMYADIDMDHPEVVNELRNWGVWYTNTLGLDGFRIDAVKHIKYSFVRDWINHVRSAIGKNMFAVAEFWKGDLGAIENYLNKTNWNHSVFDVPLHFNLYYASKSGGNYDMRQIFNGTVVQKHPTHAVTFVDNHDTQPEESLESFVREWFKPLAYALTLTREQGYPCVFYGDYYGIPTHGVPAMKSKIDPILEARQKYAYGRQNDYLDHHNIIGWTREGNTAHPNSGLATIMSDGAGGNKWMFVGRNKAGQVWTDITGNKAGTVTINADGWGNFSVNGGSVSIWVNK

SEQ ID NO: 23985 - protein, 483 aa, Bacillus sp.
HHNGTNGTLMQYFEWYLPNDGNHWNRLRSDASNLKDKGISAVWIPPAWKGASQNDVGYGAYDLYDLGEFNQKGTIRTKYGTRNQLQAAVNALKSNGIQVYGDVVMNHKGGADATEMVKAVEVNPNNRNQEVSGEYTIEAWTKFDFPGRANTHSNFKWRWYHFDGVDYDQSRKLNNRIYKFRTKAWDWEVDTEFGNYDYLLYADIDMDNPEVVNELRNWGVWYTNTLGLDGFRIDAVKHIKYSFTRDWINHVRSAIGKNMFAVAEFWKNDLGAIENYLNKTNWNHSVFDVPLHFNLYYASKSGGNYDMRQIFNGTVVQKHPTHAVTFVDNHDSQPEESLESFVREWFKPLAYALTLTREQGYPSIFYGDYYGIPTHGVPAMKSKIDPILEARQKYAYGRQNDYLDHHNIIGWTREGNTAHPNSGLATIMSDGAGGNKWMFVGRNKAGQVWTDITGNKAGTVTINADGWGNFSVNGGSVSIWVNK

SEQ ID NO: 23986 - protein, 483 aa, Bacillus sp.
HHNGTNGTLMQYFEWYLPNDGNHWNRLRSDASNLKDKGISAVWIPPAFKGASQNDVGYGAYDLYDLGEFNQKGTIRTKYGTRNQLQAAVNALKSNGIQVYGDVVMNHKGGADATEMVHAVEVNPNNRNQEVSGEYTIEAWTKFDFPGRANTHSNFKWRWYHFDGVDWDQSRKLNNRIYKFRTKAWDWEVDTEFGNYDYLLYADIDMDHPEVVNELRNWGVWYTNTLGLDGFRIDAAKHIKYSFTRDWINHVRSAIGKNMFAVAEFWKNDLGAIENYLNKTNWNHSVFDVPLHFNLYYASKSGGNYDMRQIFNGTVVQKHPTHAVTFVDNHDTQPEESLESFVREWFKPLAYALTLTREQGYPSVFYGDYYGIPTHGVPAMKSKIDPILEARQKYAYGRQNDYLDHHNIIGWTREGNTAHPNSGLATIMSDGAGGNKWMFVGRNKAGQVWTDITGNKAGTVTINADGWGNFSVNGGSVSIWVNK

SEQ ID NO: 23987 - protein, 483 aa, Bacillus sp. SP70
HHNGTNGTMMQYFEWYLPNDGNHWNRLNSDASNLKSKGITAVWIPPAWKGASQNDVGYGAYDLYDLGEFNQKGTVRTKYGTRSQLQAAVTSLKNNGIQVYGDVVMNHKGGADATEMVRAVEVNPNNRNQEVTGEYTIEAWTRFDFPGRGNTHSSFKWRYYHFDGVDYDQSRRLNNRIYKFRGKAWDWEVDTENGNYDYLMYADIDMDHPEVVNELRNWGVWYTNTLGLDGFRIDAVKHIKYSFTRDWINHVRSATGKDMFAVAEFWKNDLGAIENYLQKTNWNHSVFDVPLHYNLYNASKSGGNYDMRNIFNGTVVQRHPSHAVTFVDNHDSQPEEALESFVEEWFKPLAYALTLTREQGYPSVFYGDYYGIPTHGVPAMRSKIDPILEARQKYAYGKQNDYLDHHNIIGWTREGNTAHPNSGLATIMSDGAGGSKRMFVGRNKAGQVWSDITGNRTGTVTINADGVGNFSVNEKSVSIWVNK

SEQ ID NO: 23988 - protein, 483 aa, Bacillus sp.
HHNGTNGTLMQYFEWYLPNDGNHWNRLRSDASNLKDKGISAVWIPPAWKGASQNDVGYGAYDLYDLGEFNQKGTIRTKYGTRNQLQAAVNALKSNGIQVYGDVVMNHKGGADATEMVKAVEVNPNNRNQEVSGEYTIEAWTKFDFPGRANTHSNFKWRWYHFDGVDWDQSRKLNNRIYKFRTKAWDWEVDTEFGNYDYLMYADIDMDHPEVVNELRNWGVWYTNTLGLDGFRIDAVKHIKYSFIRDWINHVRSAIGKNMFAVGEYWKNDLGAIENYLNKTNWNHSVFDVPLHFNLYYASKSGGNYDMRRIFNGTVVQKHPTHAVTFVDNHDTQPEESLESFVREWFKPLAYALTLTREQGYPSVFYGDYYGIPTHGVPAMKSKIDPILEARQKYAYGRQNDYLDHHNIIGWTREGNTAHPNSGLATIMSDGAGGNKWMFVGRNKAGQVWTDITGNKAGTVTINADGWGNFSVNGGSVSIWVNK

SEQ ID NO: 23989 - protein, 483 aa, Bacillus sp. SP70
HHNGTNGTMMQYFEWYLPNDGNHWNRLNSDASNLKSKGITAVWIPPAWKGASQNDVGYGAYDLYDLGEFNQKGTVRTKYGTRSQLQAAVTSLKNNGIQVYGDVVMNHKGGADATEMVRAVEVNPNNRNQEVTGEYTIEAWTRFDFPGRGNTHSSFKWRYYHFDGVDYDQSRRLNNRIYKFRGKAWDWEVDTENGNYDYLMYADIDMDHPEVVNELRNWGVWYTNTLGLDGFRIDAVKHIKYSFTRDWINHVRSATGKNMPAVAEFWKNDLGAIENYLQKTNWNHSVFDVPLHYNLYNASKSGGNYDMRNIFNGTVVQRHPSHAVTFVDNHDSQPEEALESFVEEWFKPLAYALTLTREQGYPSVFYGDYYGIPTHGVPAMRSKIDPILEARQKYAYGKQNDYLDHHNIIGWTREGNTAHPNSGLATIMSDGAGGSKRMFVGRNKAGQVWSDITGNRTGTVTINADGYGNFSVNGQSVSIWVNK

SEQ ID NO: 23990 - protein, 483 aa, Bacillus sp.
HHNGTNGTLMQYFEWYLPNDGNHWNRLRSDASNLKDKGISAVWIPPAFKGASQNDVGYGAYDLYDLGEFNQKGTIRTKYGTRNQLQAAVNALKSNGIQVYGDVVMNHKGGADATEMVKAVEVNPNNRNQEVSGEYTIEAWTKFDFPGRANTHSNFKWRWYHFDGVDYDQSRKLNNRIYKFRTKAWDWEVDTEFGNYDYLMYADIDMDNPEVVNELRNWGVWYTNTLGLDGFRIDAVKHIKYSFTRDWINHVRSAIGKNMFAVAEFWKNDLGAIENYLNKTNWNHSVFDVPLHFNLYYASKSGGNYDMRQIFNGTVVQKHPTHAVTFVDNHDSQPEEALESFVREWFKPLAYALTLTREQGYPSVFYGDYYGIPTHGVPAMKSKIDPILEARQKYAYGRQNDYLDHHNIIGWTREGNTAHPNSGLATIMSDGAGGNKWMFVGRNKAGQVWTDITGNKAGTVTINADGWGNFSVNGGSVSIWVNK

SEQ ID NO: 23991 - protein, 483 aa, Bacillus sp.
HHNGTNGTLMQYFEWYLPNDGNHWNRLRSDASNLKDKGISAVWIPPAWKGASQNDVGYGAYDLYDLGEFNQKGTIRTKYGTRNQLQAAVNALKSNGIQVYGDVVMNHKGGADATEMVKAVEVNPNNRNQEVSGEYTIEAWTKFDFPGRANTHSNFKWRWYHFDGVDYDQSRKLNNRIYKFRTKAWDWEVDTEFGNYDYLLYADIDMDNPEVVNELRNWGVWYTNTLGLDGFRIDAVKHIKYSFTRDWINHVRSAIGKNMFAVAEFWKNDLGAIENYLNKTNWNHSVFDVPLHFNLYYASKSGGNYDMRQIFNGTVVQKHPTHAVTFVDNHDSQPEEALESFVREWFKPLAYALTLTREQGYPSVFYGDYYGIPTHGVPAMKSKIDPILEARQKYAYGRQNDYLDHHNIIGWTREGNTAHPNSGLATIMSDGAGGNKWMFVGRNKAGQVWTDITGNKAGTVTINADGWGNFSVNGGSVSIWVNK

SEQ ID NO: 23992 - protein, 483 aa, Bacillus sp.
HHNGTNGTLMQYFEWYLPNDGNHWNRLRSNASDLKDVGISAVWIPPAWKGASQNDVGYGAYDLYDLGEFNQKGTIRTKYGTRNQLQAAVNALKSNGIQVYGDVVMNHKGGADATEFVKAVEVNPNNRNQEVSGEYTIEAWTKFDFPGRANTHSNFKWRWYHFDGVDWDQSRKLNNRIYKFRTKAWDWEVDTEFGNYDYLLYADIDMDHPEVVNELRNWGVWYTNTLGLDGFRIDAVKHIKYSFTRDWINHVRSAIGKNMFAVAEFWKNDLGAIENYLNKTNWNHSVFDVPLHFNLYYASKSGGNYDMRQIFNGTVVQKHPTHAVTFVDNHDSQPEESLESFVREWFKPLAYALTLTREQGYPSVFYGDYYGIPTHGVPAMRSKIDPILEARQKYAYGRQNDYLDHHNIIGWTREGNTAHPNSGLATIMSDGAGGNKWMFVGRNKAGQVWTDITGNKAGTVTINADGWGNFSVNGGSVSIWVNK

SEQ ID NO: 23993 - protein, 483 aa, Bacillus sp.
HHNGTNGTLMQYFEWYLPNDGNHWNRLRSDASNLKDKGISAVWIPPAWKGASQNDVGYGAYDLYDLGEFNQKGTIRTKYGTRNQLQAAVNALKSNGIQVYGDVVMNHKGGADATEMVKAVEVNPNNRNQEVSGEYTIEAWTKFDFPGRANTHSNFKWRWYHFDGVDYDQSRKLNNRIYKFRTKAWDWEVDTEFGNYDYLMYADIDMDNPEVVNELRNWGVWYTNTLGLDGFRIDAVKHIKYSFTRDWINHVRSAIGKNMFAVAEFWKNDLGAIENYLNKTNWNHSVFDVPLHFNLYFASKSGGNYDMRQIFNGTVVQKHPTHAVTFVDNHDSQPEEALESFVREWFKPLAYALTLTREQGYPSIFYGDYYGIPTHGVPAMKSKIDPILEARQKYAYGRQNDYLDHHNIIGWTREGNTAHPNSGLATIMSDGAGGNKWMFVGRNKAGQVWTDITGNKAGTVTINADGWGNFSVNGGSVSIWVNK

SEQ ID NO: 23994 - protein, 483 aa, Bacillus sp.
HHNGTNGTLMQYFEWYLPNDGNHWNRLRSDASNLKDKGISAVWIPPAWKGASQNDVGYGAYDLYDLGEFNQKGTIRTKYGTRNQLQAAVNALKSNGIQVYGDVVMNHKGGADATEMVKAVEVNPNNRNQEVSGEYTIEAWTKFDFPGRANTHSNFKWRWYHFDGVDWDQSRKLNNRIYKFRTKAWDWEVDTEFGNYDYLLYADIDMDHPEVVNELRNWGVWYTNTLGLDGFRIDAAKHIKYSFTRDWINHVRSAIGKNMFAVAEFWKNDLGAIENYLNKTNWNHSVFDVPLHFNLYYASKSGGNYDMRQIFNGTVVQKHPTHAVTFVDNHDTQPEESLESFVREWFKPLAYALTLTREQGYPSVFYGDYYGIPTHGVPAMKSKIDPILEARQKYAYGRQNDYLDHHNIIGWTREGNTAHPNSGLATIMSDGAGGNKWMFVGRNKAGQVWTDITGNKAGTVTINADGWGNFSVNGGSVSIYVNK

SEQ ID NO: 23995 - protein, 478 aa, Bacillus sp. TS-23
APINETMMQYFEWDLPNDGTLWTKVKNEAANLSSLGITALWLPPAYKGTSQSDVGYGVYDLYDLGEFNQKGTIRTKYGTKTQYIRAIQAAKAAGMQVYADVVFNHKAGADGTEFVDAVEVDPSNRNQETSGTYQIQAWTKFDFPGRGNTYSSFKWRWYHFDGTDWDESRKLNRIYKFRSTGKAWDWEVDTENGNYDYLMFADLDMDHPEVVTELKNWGTWYVETTNIDGFRLDAVKHIKYSFFPDWLTYVRNQTGKNLFAVGEFWSYDVNKLHNYITKTNGSMSLFDAPLHNNFYTASKSSGYFDMRYLLNNTLMKDQPSLAVTLVDNHDTQPGQSLQSWVEPWFKPLAYAFILTRQEGYPCVFYGDYYGIPKYNIPGLKSKIDPLLIARRDYAYGTQRDYIDHQDIIGWTREGIDTKPNSGLAALITDGPGGSKWMYVGKKHAGKVFYDLTGNRSDTVTINADGWGEFKVNGGSVSI

SEQ ID NO: 23996 - protein, 478 aa, Bacillus sp. TS-23
APINETMMQYFEWDLPNDGTLWTKVKNEAANLSSLGITALWLPPAYKGTSQSDVGYGVYDLYDLGEFNQKGTIRTKYGTKTQYIEAIQAAKAAGMQVYADVVFNHKAGADGTEFVDAVEVDPSNRNQETSGTYQIQAWTKFDFPGRGNTYSSFKWRWYHFDGTDWDESRKLNRIYKFRSTGKAWDWEVDTENGNYDYLMFADLDMDHPEVVTELKNWGTWYVRTTNIDGFRLDAVKHIKYSFFPDWLTYVRNQTGKNLFAVGEFWSYDVNKLHNYITKTEGSMSLFDAPLHNNFYTASKSSGYFDMRYLLNNTLMKDQPSLAVTLVDNHDTQPGQSLQSWVEPWFKPLAYAFILTRQEGYPCVFYGDYYGIPKYNIPGLKSKIDPLLIARRDYAYGTQRDYIDHQDIIGWTREGIDTKPNSGLAALITDGPGGSKWMYVGKKHAGKVFYDLTGNRSDTVTINADGWGEFKVNGGSVSI

SEQ ID NO: 23997 - protein, 478 aa, Bacillus sp. TS-23
APINETMMQYFEWDLPNDGTLWTKVKNEAANLSSLGITALWLPPAYKGTSQSDVGYGVYDLYDLGEFNQKGTIRTKYGTKTQYIRAIQAAKAAGMQVYADVVFNHKAGADGTEFVDAVEVDPSNRNQETSGTYQIQAWTKFDFPGRGNTYSSFKWRWYHFDGTDWDESRKLNRIYKFRSTGKAWDWEVDTENGNYDYLMFADLDMDHPEVVTELKNWGTWYVNTTNIDGFRLDAVKHIKYSFFPDWLTYVRNQTGKNLFAVGEFWSYDVEKLHNYITKTRGSMSLFDAPLHNNFYTASKSSGYFDMRYLLNNTLMKDQPSLAVTLVDNHDTQPGQSLQSWVEPWFKPLAYAFILTRQEGYPCVFYGDYYGIPKYNIPGLKSKIDPLLIARRDYAYGTQRDYIDHQDIIGWTREGIDTKPNSGLAALITDGPGGSKWMYVGKKHAGKVFYDLTGNRSDTVTINADGWGEFKVNGGSVSI

SEQ ID NO: 23998 - protein, 478 aa, Bacillus sp. TS-23
APINETMMQYFEWDLPNDGTLWTKVKNEAANLSSLGITALWLPPAYKGTSQSDVGYGVYDLYDLGEFNQKGTIRTKYGTKTQYIQAIQAAKAAGMQVYADVVFNHKAGADGTEFVDAVEVDPSNRNQETSGTYQIQAWTKFDFPGRGNTYSSFKWRWYHFDGTDWDESRKLNRIYKFRSTGKAWDWEVDTENGNYDYLMFADLDMDHPEVVTELKNWGTWYVETTNIDGFRLDAVKHIKYSFFPDWLTYVRNQTGKNLFAVGEFWSYDVEKLHNYITKTEGSMSLFDAPLHNNFYTASKSSGYFDMRYLLNNTLMKDQPSLAVTLVDNHDTQPGQSLQSWVEPWFKPLAYAFILTRQEGYPCVFYGDYYGIPKYNIPGLKSKIDPLLIARRDYAYGTQRDYIDHQDIIGWTREGIDTKPNSGLAALITDGPGGSKWMYVGKKHAGKVFYDLTGNRSDTVTINADGWGEFKVNGGSVSI

SEQ ID NO: 23999 - protein, 478 aa, Bacillus sp. TS-23
APINETMMQYFEWDLPNDGTLWTKVKNEAANLSSLGITALWLPPAYKGTSQSDVGYGVYDLYDLGEFNQKGTIRTKYGTKTQYIEAIQAAKAAGMQVYADVVFNHKAGADGTEFVDAVEVDPSNRNQETSGTYQIQAWTKFDFPGRGNTYSSFKWRWYHFDGTDWDESRKLNRIYKFRSTGKAWDWEVDTENGNYDYLMFADLDMDHPEVVTELKNWGTWYVNTTNIDGFRLDAVKHIKYSFFPDWLTYVRNQTGKNLFAVGEFWSYDVEKLHNYITKTEGSMSLFDAPLHNNFYTASKSSGYFDMRYLLNNTLMKDQPSLAVTLVDNHDTQPGQSLQSWVEPWFKPLAYAFILTRQEGYPCVFYGDYYGIPKYNIPGLKSKIDPLLIARRDYAYGTQRDYIDHQDIIGWTREGIDTKPNSGLAALITDGPGGSKWMYVGKKHAGKVFYDLTGNRSDTVTINADGWGEFKVNGGSVSI

SEQ ID NO: 24000 - protein, 478 aa, Bacillus sp. TS-23
APINETMMQYFEWDLPNDGTLWTKVKNEAANLSSLGITALWLPPAYKGTSQSDVGYGVYDLYDLGEFNQKGTIRTKYGTKTQYIRAIQAAKAAGMQVYADVVFNHKAGADGTEFVDAVEVDPSNRNQETSGTYQIQAWTKFDFPGRGNTYSSFKWRWYHFDGTDWDESRKLNRIYKFRSTGKAWDWEVDTENGNYDYLMFADLDMDHPEVVTELKNWGTWYVNTTNIDGFRLDAVKHIKYSFFPDWLTYVRNQTGKNLFAVGEFWSYDVRKLHNYITKTEGSMSLFDAPLHNNFYTASKSSGYFDMRYLLNNTLMKDQPSLAVTLVDNHDTQPGQSLQSWVEPWFKPLAYAFILTRQEGYPCVFYGDYYGIPKYNIPGLKSKIDPLLIARRDYAYGTQRDYIDHQDIIGWTREGIDTKPNSGLAALITDGPGGSKWMYVGKKHAGKVFYDLTGNRSDTVTINADGWGEFKVNGGSVSI

SEQ ID NO: 24001 - protein, 478 aa, Bacillus sp. TS-23
APINETMMQYFEWDLPNDGTLWTKVKNEAANLSSLGITALWLPPAYKGTSQSDVGYGVYDLYDLGEFNQKGTIRTKYGTKTQYIQAIQAAKAAGMQVYADVVFNHKAGADGTEFVDAVEVDPSNRNQETSGTYQIQAWTKFDFPGRGNTYSSFKWRWYHFDGTDWDESRKLNRIYKFRSTGKAWDWEVDTENGNYDYLMFADLDMDHPEVVTELKNWGTWYVRTTNIDGFRLDAVKHIKYSFFPDWLTYVRNQTGKNLFAVGEFWSYDVEKLHNYITKTEGSMSLFDAPLHNNFYTASKSSGYFDMRYLLNNTLMKDQPSLAVTLVDNHDTQPGQSLQSWVEPWFKPLAYAFILTRQEGYPCVFYGDYYGIPKYNIPGLKSKIDPLLIARRDYAYGTQRDYIDHQDIIGWTREGIDTKPNSGLAALITDGPGGSKWMYVGKKHAGKVFYDLTGNRSDTVTINADGWGEFKVNGGSVSI

SEQ ID NO: 24002 - protein, 478 aa, Bacillus sp. TS-23
APINETMMQYFEWDLPNDGTLWTKVKNEAANLSSLGITALWLPPAYKGTSQSDVGYGVYDLYDLGEFNQKGTIRTKYGTKTQYIEAIQAAKAAGMQVYADVVFNHKAGADGTEFVDAVEVDPSNRNQETSGTYQIQAWTKFDFPGRGNTYSSFKWRWYHFDGTDWDESRKLNRIYKFRSTGKAWDWEVDTENGNYDYLMFADLDMDHPEVVTELKNWGTWYVETTNIDGFRLDAVKHIKYSFFPDWLTYVRNQTGKNLFAVGEFWSYDVNKLHNYITKTNGSMSLFDAPLHNNFYTASKSSGYFDMRYLLNNTLMKDQPSLAVTLVDNHDTQPGQSLQSWVEPWFKPLAYAFILTRQEGYPCVFYGDYYGIPKYNIPGLKSKIDPLLIARRDYAYGTQRDYIDHQDIIGWTREGIDTKPNSGLAALITDGPGGSKWMYVGKKHAGKVFYDLTGNRSDTVTINADGWGEFKVNGGSVSI

SEQ ID NO: 24003 - protein, 478 aa, Bacillus sp. TS-23
APINETMMQYFEWDLPNDGTLWTKVKNEAANLSSLGITALWLPPAYKGTSQSDVGYGVYDLYDLGEFNQKGTIRTKYGTKTQYIQAIQAAKAAGMQVYADVVFNHKAGADGTEFVDAVEVDPSNRNQETSGTYQIQAWTKFDFPGRGNTYSSFKWRWYHFDGTDWDESRKLNRIYKFRSTGKAWDWEVDTENGNYDYLMFADLDMDHPEVVTELKNWGTWYVETTNIDGFRLDAVKHIKYSFFPDWLTYVRNQTGKNLFAVGEFWSYDVEKLHNYITKTNGSMSLFDAPLHNNFYTASKSSGYFDMRYLLNNTLMKDQPSLAVTLVDNHDTQPGQSLQSWVEPWFKPLAYAFILTRQEGYPCVFYGDYYGIPKYNIPGLKSKIDPLLIARRDYAYGTQRDYIDHQDIIGWTREGIDTKPNSGLAALITDGPGGSKWMYVGKKHAGKVFYDLTGNRSDTVTINADGWGEFKVNGGSVSI
